United States Patent Application Publication US 2011/0214205 A1 - sequence listing, part 12

SEQ ID NO: 40953 - DNA, 1507 bp, Setaria italica
  Peptide Sequence Number=SeqID_106927
acgaaacgaaggaaagccgcataacccggtgcggctcccgtctccctttacccccggcggcgatcgatggccccgacggcggtggcgacggcggaggaggcggagaggctagcggcggcggcgtggggggaggaaggggaggaggaggggaagcgcggggcggggatgaagaggaggaagcgctacgggctggtggagtaccgggcgctgccggggtacctgcgggacaacgagtacatccaccggcactaccgctgcgagtggccgctcccgcaggtgctgctctccgccttctccatccacaacgagaccctcaacgtctggacgcatttgataggatttttcatcttcctcgctctgaccatatacactgcaacccaagtcccgaatgtagtagatatccagagcttgaagcatttgccagatgtgctgagaaatgcagacattcataagatccaggcggagcttgtgtcatgccttccatcgttacctcacctttctgatttagaaaagctgaaggatgagctgaagagctcgtggaattctatggaggttcttccgtctctgtcccgttggcatctcttggagttactctcaaattgcttgccacacagatttacccataccaatgaaacaagtttgtctgttcttcaaagcatgaaggatgatatagcaaacatgattgcaccagagctgattagaccaattgcacgatggccattcttcgccttcttgggaggagccatgttctgccttcttgccagcagcacttgccaccttctctcctgccactcccgccgcctagcatacatcatgcttcgacttgattatgcaggcattgctgcacttattgccacatccttctaccctcctgtatactattctttcatgtgttaccccttcttttgcaacctgtacctcagcttcataaccatcctaggtgtggcaactatcgcgttctctctactcccggtcttccagaaccccgagttcagaaccatcagagcgtgcctcttcttcggcatgggcgcatcaggtgtgatccctgttcttcacaagctggtccttttctggcaccaaccagaggcattgcacacgaccggctacgaagttctgatggggctcttctacggactgggagcactggtgtacgcgacccgggtccctgagcgctggatgcctgggaaatttgacatcgccgggcacagccaccagctcttccacatcttggttgtagctggagcatacacgcattaccacgcagggctcgtgtacctcaagtggagagacctgcaaggctgctgaaaggtggtgcattgttgaggctgtggatagattataggttccaggaattcagactgaagatcgtggtccgttgtaaattgtaacagtaaacatgaacgagtgctaccggttatcaggtcgtagtcaataatccaatgaggattggcttttaagctactacctagctgttccaggtcgtctgaccaatgtgacaatgtcagta

SEQ ID NO: 40954 - DNA, 530 bp, Setaria italica
  Peptide Sequence Number=SeqID_106928
tttagtctagtctttgtctatcggataaatgctttcttcatcatgagataagatcaccaaagtaaaaacaaaagccaatttatttttaacagaagcaccttttccattctttaaaactgcttcccaagcatcacgcatcatcaccatttcctaatagaaaacctcaaatcaacctttcattattacaaaactaataattaatgaatccagtgtatgtggagaccattggtataggggtcgcttgcatttagtctctaaaaaatgaccaggaatgcagcacatgggacaactaaaattgaagttcaaacttgtggactaaacgagtatgtaactttgcaacagaagatcagcattcagcaaaattgtaatgtaaaagagcaaatacatggataaatagagatatagtgaattttgtgacaaatatgtgtacaggtacaaggaatgcccatgattctaaatatacatgcttgtcatagagtaatggaacttgcactaaggatctttcaatgtctatcaacatggaaaatgat

SEQ ID NO: 40955 - DNA, 778 bp, Setaria italica
  Peptide Sequence Number=SeqID_106929
ttcccaacaagtagagctatcagaactggtgccccaactgtttttctgagattccaaaacataaagcatcgtcctcttaaatctgtttcttctgcagttgcaccaaagtaatccacattatcatcccaaaatacctcagggaactccaatactattttgtttagaacaccaaacccaagcctgtttatagaagatagtttccaatctggcaaggagggtgaaaatttaattgtctgtgctttcaagcaaccaagaggaacagtgattaacacagcatctccaataaattcatttccatttgaagtggaaaccttgacgtgcttgccatccttacagctagcccctgactcaccatgtccatacagtacttcagtcacaatatgatttaacctaagatcaagtccttttgcaaggctgcatagaacagtgtcatagccccctttgatcatgcaatgaggaccaccgaatcctccatatacatcatcctggttccagtatggaagggacacggattttagggttgcagcacaaccatactctaaatgtgcaaagtgccagttcataacccttctctcaagaggactgaggacgtctaccttatcatccttcccacaatgagctatctccttttctgttgaagcaattttggaaatgtccatagctccagcatttgtcaaactttttaagtgatcatcccgctcaacaatatccatatgttgagctgcacggtgcttcctaagagcgtactccagtccatcctcaagggataaaccaattg

SEQ ID NO: 40956 - DNA, 345 bp, Setaria italica
  Peptide Sequence Number=SeqID_106930
gaggtcgaagtccctggcctggtcagagttcaaggtcccgggaagtccaccggagggcggcggcggggggccggatcttgatggtcttgacggcctcggcgtgcgccgcctgggagaagacgctgccgacgatgccggtggccaccagcccgagcacggcgcggcggccggcctcgccgtcggcggacgccctgacgacggccgtcctagccctgctggcggcgcgcctgctgggcagcacgccctgcgagaggccggtcatggacgccatggcttgtgccatctcagctgccttggcttcgcttccacgcttcttcggtggagcagtcaggagggagctttttt

SEQ ID NO: 40957 - DNA, 268 bp, Setaria italica
  Peptide Sequence Number=SeqID_106931
cagtcgagggcagctggagcggccggcgatggcgtcagcagcggcgagtcgacgcccgtggacgccctggcgaccgcattcgggagcggccgcatcgtgcggtccgcagccgggcgcaaggaccgccacagcaaggtgtgcacggcgcgcgggctgcgcgaccgccgcgtccgcctcgccgcgcacacggccatccggttctacgacgtgcaagaccggctaggctatgaccgccccagcaaagccgtcgactggctcatccgcaacg

SEQ ID NO: 40958 - DNA, 500 bp, Setaria italica
  Peptide Sequence Number=SeqID_106932
ggcggcaggaagcccggcctagggacggacggacggaccggggcctgaacctgagcgtgaactcgtgcatcgggtaccggcaccaggtgagctgccggcgagcggacgtcggcgccgcccgcggccccggcggcggcgggctgttcggcatcaaggggttcttctccaagaaggtgcattgagcctgtttgttcttcacccttggggctctctctaatgactcatgtagtaacttattattttttaacttttcttttttacctttttctcttcctttttttactttgttggtgaaatgggtggatggagagtggagtcgtatgtctgtaatggaggctggtaattacatgtaaaaagatggctagccaataaccggtttttgtaaggctaatgcttggtgatatgtaaagtttagcagtggtaaccagtgcaactttaatataatcatgagaacaaaaaaaacctaaaaaaaagagaactagccaaaggacacacaggga

SEQ ID NO: 40959 - DNA, 239 bp, Setaria italica
  Peptide Sequence Number=SeqID_106933
tcccttggcgcctcaggttcgtccttctcgctgttgtcggtgatgttggttcatgggggtggtaagaggcggagtttggatggtccgtgcttgctacttgcgcgctccgatcaggcgggaggttatgagatggcttgattcgttgcgctggaagcttattgctatatgatgaacttacttgcatgatagtaatacggttttgggaggtttaattagataagttgctttgcaatagaggg

SEQ ID NO: 40960 - DNA, 425 bp, Setaria italica
  Peptide Sequence Number=SeqID_106934
attattctttttttttggttgaatactggtatgtgcaaaacggcgaatgttatggtagttgtactcctgggaatgcttcggtacagtaaatccttcgggggtaaaaagaggcaaaatccacatccaaattcaaatccttctcgcgtccatggctactggcctactgcttattcacaaccgcggcctgagcatcgatcctgaccctgtacttgtagcgcttggcgacgtagacgaagacgagcaggttgaccgtgctgagcacggcgagcagccagtagaggtagtcgaacctgccgacgttgatgttctgcgccagccacgacggccgccccgcggcgtcgtcccgcgtcgcggcatccacggcggtgttgagcgccgacgccaggaagcacccgagtccgccggcgacggcggcgtacgcggag

SEQ ID NO: 40961 - DNA, 375 bp, Setaria italica
  Peptide Sequence Number=SeqID_106935
cccacacctagccgttgcctcctcttcttcgtcttcctccgtccagtctccccgcattgtgttgcttggcttgctcgaggtgtgttgcttctgcgcgcactcctccacttgctgcaataattcgctgcggcggctgggtaggaggacggggaggagggagcaggataaaccttggcactgtgcagatagggctggatcagaggagggaggagtgctgactgtgtcgccgtcgtattcaatcgaccgggtcccccttcccctgccgccgcaccggccaccacccgcgcccatcaccggcgtcatcgtgacacgcaatcgcccccgttgcggttcttgccttgatcaagacggctacctagcaccaacctgtccgga

SEQ ID NO: 40962 - DNA, 598 bp, Setaria italica
  Peptide Sequence Number=SeqID_106936
ggggggcgcctcgtccaagttgaactggaccttcttggcctctgccttcgcgtccttgccgcctttctccgccttgtccggcttcgcttccttatcgcccttgccctccttcttgtcttccttcttctcggccttggcgccctccttctcacccttggcttccttgaccttttccggcttgttctcggcccctttggcggcggccttcggcttgtcgccgccgccgtccttggccttctccttgcctttgatgtccatctccttgatgacccggccggcctcgcagcagagtttgttgcagaccttctcggcgtcgaacgggcccgagatcgtcacggcattgctcttctcatcaaacgagatcgtcttgatgttcatcttgtcttggatcttgcagaggactcttctcatcttcttgtagcatctctcgcattcaaggtcaaccttgaggacgatcgtggagatcttgtccgccatgggaatggcgctcgaggctccgtcaccttcctggtgcggactccggactccgggatggcggctgtcggctgcagaagtagagagagtgtgggtgcgcgaggaaggagaaggaagggtggac

SEQ ID NO: 40963 - DNA, 495 bp, Setaria italica
  Peptide Sequence Number=SeqID_106937
tccttgcatctcttcctccttccatgtcccactcccactcccactcccaatcctcctcttgaagggtatagtcggctccgggctacgcatgtttcatgcatgtgcattgagcaattgcggcgtggccctgcgcactattgaggggtggagttgttgaggcaacgaggcctccatgaaaggtcgagggcggagggctgcagcacgaggtcgtaatggatgagaaccacaccatcaacaataacagtagtctatgtgggctaccatgtgacaatgatcatcgagatggaacatttcttttggcgaaggatactagccgtgcttgaggttttggagattacagatggcaaaacagtttttttaaaaagtatctctataagtactaatgttaataaaggttgtctggcgttgggaagtgggcgaaaatgccttaatttacaagaaattgagcattttacactacttgtttttgagtctagactatttggcaatcagcag

SEQ ID NO: 40964 - DNA, 466 bp, Setaria italica
  Peptide Sequence Number=SeqID_106938
tcttcgttcttgagagcattgagatcctgacatcatcccacaaaccagtaacacataagagaatattggtacatgtgtcatttatcctgtattcttctgaagatttcttaatgcctgtcactaacccaagttggtatggcattttaggcttttcgtacatgtgaaccctgggggcattcttgactctaacgaaacagccaacaactttctgatcaaatgtgtctagatgattcaaaagattaataactaaagatcttctcagataaataagctttatgttattctcgttaagagaggcaaaacatctgttgtttttttctgaaaccctcttagaaatcttcaactccacagcattccgaggtttcttttttcataattggaacatcatcatcttcagaaccatcaaagcgaggtttctttttcgtaattggaacatcatcgtcttcagaaccatcagaattttcat

SEQ ID NO: 40965 - DNA, 426 bp, Setaria italica
  Peptide Sequence Number=SeqID_106939
agaaagaccttcctgcgtgctctaagaaaaagcttgactaattatactactgtgatggcctcttttgcactaattctgccagaagcccagaaagcatggttatacagatctactgcagcacatatatcagtagtgaacatagatcaccatgctgaatgagacttgttatcatcaatagtcaatcataggttaaactaatcggttaccatcattatcttagaacatagggacactgagtttcaatattactccatgtttagatgcgcaatggtggcctgatacattcatcagtcacaagagccatcggaagcaataactgattgatgtcacacctttgaagctgttctaccagttactctggagttatggataagctcctcacttccctcatccagttcaaatttcacttgatctcagcaaggctat

SEQ ID NO: 40966 - DNA, 412 bp, Setaria italica
  misc_feature (1)..(1): n is a, c, g, or t
  Peptide Sequence Number=SeqID_106940
ncggcacggcagcacaagcagcagagcagagacagcagcggcaccggcacggcagcagctagcagagacagcagcagcacggcagcataaggctatgcccggttgtatcactttcaaaactgcaccacttgagcatgaggacttgctaaggatcatgttcgatgctataagtgttacaaatgagaccgcatatgttcctggtcaaggtggtgctgctgctgacagtgatggacagggaaaaggtgatcgtgaggatgagatgaccacacaaacagtcatccctaattctaatgcacgtggtaaggataaaaggacagcatcttgggagaagtacttctcccaagggaaagaaaaagaagacctttagagatcagtgtatgaaaaggttggtagatgcgaatgagatgaaaga

SEQ ID NO: 40967 - DNA, 429 bp, Setaria italica
  Peptide Sequence Number=SeqID_106941
taagttaacgtttaaggtacggtaagggtacgtacggaaggcggatgcgaggacgcggtggtggtcggtgggcgcggggaagagcgggatggagtcgtggtggtcggggaagggagcggggagaaggagctggggaaggagggtggatgcgtcgagggggtcctagaaggggtcagtgaatcggggcgtgcgcacggcgacgaaaaggacgacgaggaagtggcggagaaggcgatcttggtgctagattttgagtgagcagctcgattggtaaccgctggtttgagcttgtcgtcatagcttgggccaaggtgtgaatttcattttagttttgttcttgttagaggcagctaatagttttttgctacttgttgtttgtttgactgtaatgtaatgtatggtttgtagtctcagatgatatcttcttag

SEQ ID NO: 40968 - DNA, 740 bp, Setaria italica
  Peptide Sequence Number=SeqID_106942
cattgtttgttatagaagggcaaatatccgaaactatttgccggtgaatgtcgcttatgaactcaaatatactgttccaagaaaaagtgaacttgattcattgattgaaatgacgcaaacttccacacaagcaaacatatttgctaacttcttgtgtattctagaagaaatgccagtggatcttgtgtacgttttttttgtcaaagtcaaacaaatttgtaagcttgatagccttgctgaaatccagtgaaatttgtggaactggataaggaaaaggtagctttcctatgaaatagaagatcatccaaaattccagagtaactggtaaaaaggttttgcatttctagcaacttgaatctaatttagttctcgtggtgtgacatcaatcaattactgattccgatggctcttgtggctgatgaatgtgtcagatcactgccgtatccaaacatggagcaatactgaaacttggcgttcctttgttccaagtctaagatactgatggtaaacaatttatgaggaccttggatcttatatgcaagtgtcccgaatttgatcaaatgccaataatgcatatttggatgatgttcctgccatgcatgtcgccgacatgtctcaggctctcagcagtgcgtttgcttcacctggttgccctgtaggtcgcttgccacgggcgatgctagggatcatgatgcagaagttgtagacgtctaatgtactgagaatgacatgtgctgaag

SEQ ID NO: 40969 - DNA, 405 bp, Setaria italica
  Peptide Sequence Number=SeqID_106943
tagaaagggctgaagagtttgctttccgtgttgaagaagatgctgtttggagccaggttgccaaggcccagttacgtgagggtctagtcagcgaagcaatcgagtccttcattcgtgcagatgatgccgcacatttccttgatgtcatccatgctgctgaggaagcaaatgtgtacaatgatttagtgaagtaccttctgatggtaaggcaaaaggcacgggagcccaaagtcgatggagaactcatctttgcatatgctaagattgacagactcagtgacattgaagagttcattcttatgccactgagtctgtcaatcttagcatatgcaaagatgagttctccatcgactttgcatatgctaagattgacagactcagtgacattgaagagttcattctatg

SEQ ID NO: 40970 - DNA, 472 bp, Setaria italica
  Peptide Sequence Number=SeqID_106944
tgccagcggcgtcatgggcgacggcggcggcgccgatgaggtcgtggtcgttggcggagggcgcggaggcggatgcgaggacgcggtggtggtcggcgggcgcggggaagagcaggatggagtcgtggtggtcggggaagggagcggggagaaggagctggggaaggagggtggatgcgtcgagggggtccgagaaggggtcagtgaaccggggcgcgcgcacggcgacggaaaggacgacgaggaagtggcggagaaggcgatcttggtgccggatttcgactgagcagctcgattggtgaccgctggattcaagcttctcgtcgtagcttgggccaaggtgtgaatttcattttagttttgttcttgttagaggcagctaatagtgtcagatcttttgctacttgttgtttgtttgactgtatgactgtaatgtaatgtatggtttgtagtctcagacgatatcttctac

SEQ ID NO: 40971 - DNA, 664 bp, Setaria italica
  Peptide Sequence Number=SeqID_106945
cttggttgttatgttcctactctattttggcatactaatgtggtaacaggaggttattgaaatggactaatgaagaaaatcactgatccagaacctgtgacagatctaaagaactaaattaaaagaactctgttttgctatgtggcaatgtattatgtatgtactgctttgtttctggtcaaataaagtaagttatatctgtgaagcaaaaaaagactaactggactaatattaagtagaggaattcctgcaatttactaaattattactctacctccttaagctattgtcccattgtttgttatagaagggccaaaatatccgaaaactatttgccggtgaatgttgcttatgaactcaaatatactgttccaagaaaaagtgtgaaacttgatttcattgattgaaatgatgcatacttccacacaagtaaagatatttgctaacttcttgtgtattctagaagaaatgtcagttgatcttgtgtacgtttttaccagtgaaatgccagtgtattctacaagttaacttcttgtgtaacagtatatgttgagttcataagcaacacccctcttctcttcatgagttcattaccaaatattcttccagcactttacccgtctataacaagcaatgtgacaaatggtttcaggaggcacagcta

SEQ ID NO: 40972 - DNA, 509 bp, Setaria italica
  Peptide Sequence Number=SeqID_106946
gcaactcttaggccagatgccgctatgctaaacatttgagaacctatctctgagcctaaaaaccatacattacatcactgtcaagtaaacaagcagcagcaaaagatctgaccatagtaagctgaccacattagtattttatttactaatatggaaataggagatgaagcagatgagtggtgacaattttcaaattataaaattgataattttgcatttctcatccaaacttgtttatattatctaaaagtttgagttaattaataataggaagaccttcctgcatgctctaagaaaaagcttgactaattatactactgtgatggcctcttttgcactaattctgccagaagcccagaaagcatggttatacagatctactgcagcacatacattagtgaacataaatcaccatgctgaatgagacttgttatcatcaatagtccaatcataggttaaactaatcggttactatcattatcttagaacatagggacactgagtttcaa

SEQ ID NO: 40973 - DNA, 1057 bp, Setaria italica
  Peptide Sequence Number=SeqID_106947
gtcggtgggcgcgggaagagcgggatggagtcgtggtggtcggggaagggagcggggagaaggagctggggaaggagggtggatgcgtcgagggggtcctagaaggggtcagtgaatcggggcgtgcgcacggcgacgaaaaggacgacgaggaagtggcggagaaggcgatcttggtgctagattttgagtgagcagctcgattggtaaccgctggtttgagcttgtcgtcatagcttgggccaagatgcacgatggtggtctgatacattcatcagtcgcaagagccatcgcaagcaataactgattgatgtcacaccttcgaagccgttctaccaattactctggagttatggataagcttctatttcataagaagctcctcatttccctcatccagttcaaatttcacttgatctcagcaaggctatcaagcttacaaaattgtatgactttgaccaagaagcttagatgcatttcttctagcaaggagttggcaaagacgtttgcttgtctatgagtgcaaaactcaagcaggacaacaacaaccaaaatcacgggatcctgaaaacgtgtgcaaaagaaagacaacatgtacaaggattgcatggagacatgcttgcagtctggtgaccgtgaactgtcggaggacttgtctatttcattgagcaggggaagaaagaatgctttgcttcttgcctcttcatttgctatgacttgatacgaccagatattgcccttgagcttgcatggatgaacaacatgatagactttgctttcccatatctgttgcagttcattcgcgaatacagcagcaaggttgatgatttagttaaggacaaaattgagtcgcaaaatgaggaaagagcgaaagagaaagaggagaaagatcttgttgctcagcagaacatgtacgcccagctgcttcctctcgctttgcccgctccgccgatgccaggcatgggcggtcctccacctccgatgggtggaatgggcatgcctccgatgggtggaatgggtatgcctccaatgggccctagtagcttcccattggtgg

SEQ ID NO: 40974 - DNA, 544 bp, Setaria italica
  Peptide Sequence Number=SeqID_106948
cctaagcaaggaaaattgcaagctaactttcaactgatctgttataccacaattgtctaatattccattatgtcatagttctgacaaatagtaccaaaacaagttgagtcatatggaccaacaacacatatcgctctgagagaccaattacttgttcttcccggacttcttcttaccccctgccgccgcgccagcagcactcacctgcgggcgcgggtggcgctcggcctcgtcggcgtcgagccacttgagcgggttgcggttgaagaagggccagttggggacggtgacgagcgccgtgagcacgacgccgccggcgtagacgagcagcatgagctggaagtccccgcgcaggtagcccacgaggaacgccgccacggccgccgccaccagcagcacctgcatcagcatctccgcgcgcttctgccccctgccaatccatccccgagggaagggagatggttcggtgatcttgaggccggcggactgggaggaagcaggggaggggcgtcgactgggttcggtggtgccgtgcccgtgctcg

SEQ ID NO: 40975 - DNA, 1275 bp, Setaria italica
  Peptide Sequence Number=SeqID_106949
aaaaaaagcctgcaaaggttcaggcgaaatgggatcctttcgccgccaagcatttcaacgaaatctgcgtggaagaagttctcgcgcacaacaggccgcaccaatgcttgaacagtctgggctacgcgaatctcgtaaggaaaattcaaggaacgtacgaacaggtcgtacacccaggagcagatgaagaacaggtgggattcgttgaagaagaaatatacccactggaagactctcaacgtgagagctgctgggttcgggaggaatcctctgactgggtgtatcatagccggtgatgattggtgggaagagcaaaatgcggctatcccaggttgtgcaactttcaagacttcaccacttgagcatgaggacttgctgcagatcatgtttgaagctactagtgttacaaatgagaccgcatatgttcctggatgtgatgatgatgatgctcatgagggtgatggtcaaggagagggtgatgttgatggagagggtggtcatgagggtgatggcgaggatgtgagcggcacgcttttggtcacacccagttctggtatgtgtggtatggagaaaaggccagcacccaatttcttacccaagggaaagaagaagaagacttttagagatcaatgtctgaagcggctggtggatgcatatgagttgagggcccaaagcagtaaaaattcagcaacttcacaagtggttgatcatgttagaattgagattgcaactatgttggatcaagttattaaggatggggctgaagaagggagtgatgagcactactatgccacccaacttcttagaaaaaaggagtatcgcgatgtgttcataactttgaagacaacaaatgggaggttgaattggctgaggagggcatggcaagacagggagaggcattagtggtgttgtgttcaactatgtgcattcacccttagaaatttgattgagcgttcaattggagttctaaagatgaagtggcgcattctcttggaagctatgcaatttggaagcagtaacaaattgtaactgtgtgtgtggttcttcgtaatttcattagagacaatgccatgcatgatgtagattttgagattttgcgcctgaggaaggtgcttgtgctaaccaaggaagcataggggatagtagtgtttcatgggatgctatcaatatgggtgcttttgtgatgctattgcctctgctatggttgtgtgattattgtacctatcagtatcttttctttggactcgagtgaatgaattggtgcttcttttgact

SEQ ID NO: 40976 - DNA, 4149 bp, Setaria italica
  Peptide Sequence Number=SeqID_106950
ctcagatcagatctctcccacgggacgagcggaggcaccaccacccctcgccaccgccgctgcctccgtcccctcccacccccgactccagggagatccgccgcccgtcgccatggcggcggccaacgcccccatcgccatgcgcgaggccctcacgctcaccagcctgggcatcgccccgcagttcgtcaccttcacccatgtcaccatggagtcggagaagtacatctgcgtccgcgagacctcgccgcagaacagcgtcgtcatcatcgacatggccatgcccatgcagccgctccgacgccccatcaccgccgactccgcgctcatgaacccaaacaccagaatcctcgccctcaaagcccaaatacctgggactacacaggatcaccttcaaatatttaatattgaggctaagactaaaataaagtctcatcagatgccagagcaggttgtgttttggaagtggatcactcccaagttgttgggtttagtaacacaaacatcagtttatcactggtcaattgaaggtgattctgagcccaccaagatgtttgataggacagcaaacttagcaaacaatcagatcatcaactaccgatgtgacccagcggagaagtggcttgtgcttattggaattgcacctggtgccccagagaggccacaactggtgaaggggaacatgcaacttttttctgttgagcaacagcgtagccaggcacttgaagcccatgcagcatcttttgcaacatttaaggttgctggtaatgagaacccatcaacccttatttgttttgcctcgaagacaactaatgctggacagattacttcaaagttacatgttattgaactgggtgcccagccagggaaacctggcttctctaagaaacaagccgacctcttcttcccacctgatttccaggatgattttcctgtagctatgcaggtttcacaaaagtatggacttgtctatgtaattacaaagcttggccttttatttgtatatgacttggaaactgctgcagcagtttacagaaatagaattagtccggaccctatattcttgacagcagaatcttcttcaactggtggattttatgccatcaacagaagagggcaggttttgcatgccacagttaatgatgcaactgttgtgccttttgtcagtggtcaattaaacaaccttgagctagctgtgaatcttgccaagagagccaaccttcctggtgcagagaacttggttgtacaaagatttcaggaactgtttgcacaaacaaaatacaaggaagccgctgagctggccgcagagtctcctcaaggcctcctgagaacacctgagactgttgcaaaatttcagagtgttcctgtgcaagctgggcaaacacccccactgttgcagtactttggtacattgctaactcgagggaagcttaatgccttcgagtctcttgagctatctcgacttgtcgtcaatcagaacaaaaagaaccttctggaaaattggttggcggaagacaaactagagtgcagtgaagaacttggagatcttgtcaagactgtggataatgatatggcactaaaaatatacataaaggctagggcaacccctaaagttgttgctgcttttgctgaaaggagggagtttgacaagatacttatatattcaaagcaggttgggtacactccagattatctgttcctcctccagaccattttacgtacagatccacagggagctgtgaactttgctctcatgatgtcacaaatggagggaggttgtccagtagattataatactataactgatcttttccttcagaggaatatgatacgggaggcaacagcttttctgttggatgttctcaaaccaaatttgccagagcacgcttttcttcaaaccaaggttttggagataaacttggtgacttatccaaatgttgctgatgccattcttgctaatggtatgttcagtcattacgaccgccctcgtattgctcagctgtgtgaaaaggctggcttgtacttgcgagctctccagcattactcagaattacctgatatcaagcgtgtcattgtcaatacccatgccattgagccacaggcactcgttgagttctttggcaccctgtcaagagagtgggccttggagtgcatgaaggaccttctagtagtcaatctgaggggaaatcttcaaatcgttgtgcaggctgcaaaagaatactccgagcagttaggagttgacgcctgcataaaactatttgagcaattcaaatcttatgagggactttactttttcttgggatcctatctgagctccagtgaggacccagatatccatttcaaatacatagaagcagctgccaggactggacagatcaaagaagttgaacgtgtaactagagagtctaacttctatgatgctgagaagacaaagaatttcttgatggaggcaaaactacctgatgcccgtccactgattaatgtttgtgaccgctttggttttgtgccagatctcactcactatctgtacacaaacaacatgcttcggtatatcgaaggctatgtgcagaaagtgaatcctgggaatgctcccttggtagtgggacaactacttgatgatgagtgtcctgaagattttattaagggtttgattctttctgttcgttccctccttcctgttgagccactggttgatgaatgcgagaagaggaaccgcctacgtttgctcactcagttcttggagcacttagtgagtgaaggtagccaagatgtacatgtccacaatgctcttgggaaaatcatcatcgacagcaacaataatcctgagcatttccttactactaacccattttatgactcacgtgttgtgggtaaatactgtgaaaagcgggatcctacacttgctgttgttgcttacagacgtgggcagtgtgacgatgagcttattaatgtcactaacaaaaactctctgttcaagctgcaagctagatatgttgttgagaggatggatggtgatctgtgggataaagttcttcagcctgagaatgaatacagaaggcaactcattgaccaggtggtttcgactgcattacctgagagcaagagccctgagcaagtatctgctgctgttaaggctttcatgactgctgacctccctcatgaattgatcgagcttcttgaaaagattgttcttcagaattccgcattcagtggaaacttcaatctgcagaatctgctcattttgactgccatcaaggcagacccatccagagtcatggactatgttaacagactagacaactttgatggacctgctgttggagaagttgctgttgaggcacaactgtatgaggaggcttttgctatattcaagaagttcaacttaaatgtgcaggctgtcaatgttctcttagataacatccggagcatagaaagggctgaagagtttgctttccgtgttgaagaagatgctgtttggagccaggttgccaaggcccagttacgtgagggtctagtcagcgaagcaatcgagtccttcattcgtgcagatgatgccgcacatttccttgatgtcatccatgctgctgaggaagcaaatgtgtacaatgatttagtgaagtaccttctgatggtaaggcaaaaggcacgggagcccaaagtcgatggagaactcatctttgcatatgctaagattgacagactcagtgacattgaagagttcattcttatgccaaatgttgccaaccttcaaaatgtcggtgaccgtctgtatgatgaagaactatatgaagctgcaaagatcatctacgcgttcatctcaaactgggctaagctggctgttaccctagttaagctgaagcagttccaaggtgctgtggatgctgctcgcaaggctaacagtgctaagcatggaaggaggtctgctttgcttgtgttgacgctgaggagttccgtcttgcacaaatatgtggtctcaacattattgtccaggttgatgacttggaagaagtgagtgaatactaccaaaatagaggatgcttcaatgaacttatagctctcatggagagtggtcttggacttgaacgtgcacacatgggcatcttcacagagcttggagttctgtatgctagataccgctatgagaagctt

SEQ ID NO: 40977 - DNA, 2414 bp, Setaria italica
  Peptide Sequence Number=SeqID_106951
ttgtacttgtcttgtaccttccctcatgaatgcattacctgagagcaagagccctgaacaagtatctgctgctgttaaggctttcatgactgctgacctccctcatgaattgatcgagcttcttgaaaagattgttcttcagaattccgcattcagtggaaacttcaatctgcagaacctgctcattttgactgccatcaaggcagacccatccagagtcatggactatgttaacagacttgacaactttgatgggcctgctgttggagaagttgctgttgaggcacagctgtatgaggagggttttgcaatattcaagaagttcaacttaaatgtgcaggctgtcaatgttctcttagataacatccggagcatagaaagggctgaagaatttgctttccgcgttgaagaagatgctgtttggagccaggttgccaaggcccagttacgtgagggtctagtcagcgaagcaatcgagtccttcattcgtgcagatgatgccgcacatttccttgatgtcatccatgctgctgaggaagcaaatgtgtacaatgatttagtgaagtaccttctgatggtaaggcaaaaggcacgggagcccaaagtcgatggagaactcatctttgcatatgctaagattgacagactcagtgacattgaagagttcattcttatgccaaatgttgccaaccttcaaaatgtcggtgaccgtctgtatgatgaagaactatatgaagctgcaaagatcatctacgcgttcatctcaaactgggctaagctggctgttaccctagttaagctgaagcagttccaaggtgctgtggatgctgctcgcaaggctaacagtgctaagacatggaaggaggtctgctttgcttgtgttgacgctgaggagttccgtcttgcacaaatttgtggtctcaacattattgtccaggttgatgacttggaagaagtgagtgaatactaccaaaatagaggatgtttcaatgaacttatagctctcatggagagtggtcttggacttgaacgtgcacacatgggcatcttcacagaacttggagttctgtatgctagataccgctatgagaagcttatggagcacatcaaacttttctccacccgtctcaacattcctaagcttatccgggcttgtgatgaacagcagcactggaaagaacttacgtacctctacatacagtatgatgaatttgacaatgctgccaccactattatgaaccactctccagatgcatgggatcatatgcagttcaaggatgtttgtgttaaagttgcaaatgttgagctatattacaaggcagttcatttctatttacaagagcaccctgatctcatcaatgatatgctaaatgtgcttgcgcttcgtttggatcataccagagttgttgacataatgcgcaaggctggtcagttgcatcttgtgaaaccttatatggttgcagttcagagtaacaatgtctctgctgtgaatgaagcgttgaatgagctttatgttgaagaggaagactatgagagactccgtgaatcagttgacatgcatgataactttgaccagataggtcttgcccagaagcttgagaagcatgagttgcttgagatgaggaggattgctgcctacatttacaagaaggctggcagatggaagcagtccattgctctatcgaagaaagacaacatgtacaaggattgcatggagacatgctcgcagtctggtgaccgtgaactgtcggaggacttgctagtctatttcattgagcaggggaagaaagaatgctttgcttcttgcctcttcatttgctatgacttgatacgaccagatgttgcccttgagcttgcatggatgaacaacatgatagactttgcttttccatatctgttgcagttcattcgtgaatacagcagcaaggttgatgatttagttaaggacaaaattgagtcgcaaaatgaggaaagagcgaaagagaaagaggagaaagatcttgttgctcagcagaacatgtacgcccagctgcttcctctcgctttgcccgctccgccgatgccaggcatgggcggtcctccacctccgatgggtggaatgggcatgcctccgatgggtggaatgggtatgcctccaatgggccctggtccgatgccagcatttgggatgccaccaatgggaagctactaggttggttttgcagagcgcttagatgatgattcggatttttccagtgtaagcagaagttgaactatggggttgtagatgatcacagtttggaattaatattctttatggtatcaggaaattttggcgagtgaaaatctctagccagagtttgagaaatgctacctgttgctatatatatatacatgttataatcggataggatgaggatgaggatgattaggtt

SEQ ID NO: 40978 - DNA, 5603 bp, Setaria italica
  Peptide Sequence Number=SeqID_106952
ggtactaagctcagatcagatccgaccatctcccctacccccccgacctccagagagatctcggcaccgccgcccgtcgccatggcggcggccaacgctcccatcgccatgcgcgaggccctcacgctcaccagcctgggcatcgccccgcagttcgtcaccttcacccatgtcaccatggagtcggagaagtacatctgcgtccgcgagacctcgccgcagaacagcgtcgtcatcatcgacatggccatgcccatgcagccgctccgacgccctatcaccgccgactccgcgctcatgaacccgaacaccagaatcctcgccctcaaagcccaaatacctgggactacacaggatcaccttcaaatatttaacattgaggctaagactaagataaagtctcatcagatgccggagcaggttgtgttttggaaatggatcactcccaagttggtgggtttagtaacacaaacatcagtttatcactggtcaattgaaggtgattctgagcccaccaagatgtttgataggacagcaaacttagcaaacaatcagatcatcaactaccgatgtgacccagcggagaagtggcttgtgcttattggaattgcacctggtgccccagagagaccacaactggtgaaggggaacatgcaacttttttctgttgaccaacagcgtagccaggcacttgaagcccatgcagcatcttttgcaacatttaaggttgttggtaatgagaacccatcaacccttatttgttttgcctcgaagacaactaatgctggacagattacttcaaagttacatgttattgaactgggcgcccagccagggaaacctggcttttctaagaaacaagccgacctctttttcccacctgatttccaggatgattttcctgtagctatgcaggtttcacaaaagtatggacttatctatgtaattacaaagcttggccttttatttgtatatgacttggaaactgccgcagcagtttacagaaatagaattagtccggaccctatattcttgacagcagaatcttcttcaactggtggattttatgccatcaacaggagagggcaggttttacatgccacagttaacgatgcaactgttgtgccttttgtcagtggtcaattaaacaaccttgagctagctgtgaatcttgccaagagagccaaccttcctggtgcagagaacttggttgtacaaagatttcaggaactgtttgcacaaacaaaatacaaggaagcagctgagctggccgcagagtctcctcaagggctcctgagaacacctgagaccgttgcaaaatttcagagtgttcctgtgcaagctgggcaaacacccccactgttgcagtactttggtacattgctaactcgagggaagcttaatgccttcgagtctcttgagctatctcgacttgtcgtcaatcagaacaaaaagaaccttctggaaaattggttggcagaagacaaactagagtgcagtgaagaacttggagatcttgtcaagactgtggataatgatatggcactaaaaatatacataaaggctagggcaacccctaaagttgttgctgcttttgctgaaaggagggagtttgacaagattcttatatactcaaagcaggttgggtacactccagattatctgttcctcctccagaccattttacgtacagatccacagggagctgtgaactttgctctcatgatgtcacaaatggagggaggttgtccagtagattataatactataactgatcttttccttcagaggaatatgatacgggaggcaacagcttttttgttggatgttctcaaaccaaatttgccagagcacgcttttcttcaaaccaaggttttggagataaacttggtgacttatccaaatgttgctgatgccattcttgctaatggtatgttcagtcattacgaccgccctcgtattgctcagctgtgtgaaaaggctggcttgtacttgcgagctctccagcattactcagagttacctgatatcaagcgtgtcatggtcaatacccatgccattgagccacaggcactcgttgagttctttggcaccctgtcaagggagtgggccttggagtgcatgaaggaccttctagtagtcaatctgaggggaaatcttcaaatagttgtgcaggctgcaaaagaatactccgagcagttaggagttgacgcttgcataaaactatttgagcaattcaaatcttatgagggcctttactttttcttgggatcctatctgagctccagtgaggacccagatatccatttcaaatacatagaagcagctgccaggactggacagatcaaagaagttgaacgtgtaactagagagtctaacttctatgatgctgagaagacgaagaactttttgatggaggcaaaactacctgatgcccgtccactgattaacgtttgtgaccgctttggttttgtgccagatctcactcactatctgtacacaaacaacatgcttcggtatatcgaaggctatgtgcaaaaagtgaatcctgggaatgctcccttggtagtggggcaactacttgatgatgagtgtcctgaagattttattaagggtttgattctctctgttcgttccctccttcctgttgagccactggttgatgaatgtgagaagaggaaccgcctacgtttgctcactcagttcttggagcacttagtgagtgaaggtagccaagatgtacatgtccacaatgctcttgggaaaatcatcatcgacagcaacaataatcctgagcatttccttactactaacccattttatgactcacgtgttgtgggtaaatactgtgaaaagcgggatcctacacttgctgttgttgcttacagacgtgggcagtgtgatgatgaacttattaatgtcactaacaaaaactcactgttcaagctgcaagctagatatgttgttgagaggatggatggtgatctatgggataaagttcttcagcctgagaatgaatacagaaggcaactcattgaccaggtggtttcgaccgcattacctgagagcaagagccctgaacaagtatctgctgctgttaaggctttcatgactgctgacctccctcatgaattgatcgagcttcttgaaaagattgttcttcagaattccgcattcagtggaaacttcaatctgcagaacctgctcattttgactgccatcaaggcagacccatccagagtcatggactatgttaacagacttgacaactttgatgggcctgctgttggagaagttgctgttgaggcacagctgtatgaggagggttttgcaatattcaagaagttcaacttaaatgtgcaggctgtcaatgttctcttagataacatccggagcatagaaagggctgaagaatttgctttccgcgttgaagaagatgctgtttggagccaggttgccaaggcccagttacgtgagggtctagtcagcgaagcaatcgagtccttcattcgtgcagatgatgccgcacatttccttgatgtcatccatgctgctgaggaagcgaatgtgtacaatgatttagtgaagtaccttctgatggtaaggcaaaaggcccgggagcccaaagttgatggaaagaactcatctttgcatatgctaagattgacagactcagtgacattgaagagttcattcttatgccaaatgttgccaaccttcaaaatgtcggtgaccgtctgtatgatgaagaactatatgaagctgcaaagatcatctacgcgttcatctcaaactgggctaagctggctgttaccctagttaagctgaagcagttccaaggtgctgtggatgctgctcgcaaggctaacagtgctaagacatggaaggaggtctgctttgcttgtgttgacgctgaggagttccgtcttgcacaaatatgtggtctcaacattattgtccaggttgatgacttggaagaagtgagtgaatactaccaaaatagaggatgcttcaatgaacttatagctctcatggagagtggtcttggacttgaacgtgcacacatgggcatcttcacagagcttggagttctgtatgctagataccgctatgagaagcttatggagcacatcaaacttttctccacccgtctcaacattcctaagcttatccgggcttgtgatgaacagcagcactggaaagaacttacgtacctctacatacagtatgatgaatttgacaatgctgccaccactattatgaaccactctccagatgcatgggatcatatgcagttcaaggatgtttgtgttaaagttgcaaatgttgagctatattacaaggcagttcacttctatttacaagagcaccctgatctcatcaatgatatgctaaatgtgcttgcgcttcgtttggatcataccagagttgttgacataatgcgcaaggctggacagttgcatcttgtgaaaccttatatggttgcagttcagagtaacaatgtctctgctgtgaatgaagcgttgaatgagctttatgttgaagaggaagactatgagagactccgtgaatcagttgacatgcacgataactttgaccagataggtctggcccagaagcttgagaagcatgagttgcttgagatgaggaggattgctgcctacatttacaagaaggctggcagatggaagcagtccattgctctatcaaagaaagacaacatgtacaaggattgcatggagacatgctcgcagtctggtgaccgtgaactgtcggaggacttgcttgtctatttcattgagcaggggaagaaagaatgctttgcttcttgcctcttcatttgctatgacttgatacgtccggatgttgcccttgagcttgcatggatgaacaacatgatagacttcgctttcccatatctgttgcagttcattcgcgaatacagcagcaaggttgatgatttagtgaaggacaaaattgagtcgcaaaatgaggaaagagcgaaagagaaagaggagaaagatcttgttgctcagcagaacatgtatgcccagctgcttcctctcgctttgcccgctccgccgatgccaggcatgggcggtcctccacctccccgatgggtggaatgggcatgcctccgatgggtggaatgggcatgcctccgatgggccctggtccgatgccagcatttgggatgccaccaatgggaagctactaggttgattttgcagagcgcttagatgatgattcggatttttccagtgtaagcacaagttgaactatggggttgtagatgatcacagtttggaattaatattctttatggtaccaggaaattttggcgagtgaaatctctagccagagtttgagaaatgttataatcggataggatgaggatgaggatgattaggttgattgagctggagctgttgaaagctggtaccatttgtatagtgtgagaaatatttgtagacattttgcttgtatacctgatggcctcagtggcaggcacaaacaatgtatgttatttacattttttacgacctactgactgtttgtaactgttgtcaacttccggttacattacatgaatgttttccttt

SEQ ID NO: 40979 - DNA, 765 bp, Setaria italica
  Peptide Sequence Number=SeqID_106953
ccatccaatcgttgcttgtcgtccatccatcgtgtggtgcctccaacggaattaagagatcaaaaaatcagcagccgattgaatcgatcgatcgacgaagagaatggacgaggtggagcagcagctgtccaagcagcagatcgaggagttccgggaggccttcagcctcttcgacaaagatgggcgacgggacgatcacgagcaaggagcttggcacggtgatgcgctcgctggggcagagcccgtccgaggaggagctgcaggagatggtgaaggaggtggacgccgacggcagcggcgccatcgatttccaggagttcctgaccctcctggcgcgccagatgcgggaggccaacggcgccgacgaggaggagcttcgcgaggccttccgcgtcttcgaccaggaccagaacggcttcatctcccgcgacgagctccgccacgtcctccagaacctcggcgagcgcctctccgacgacgagctcgccgagatgctccgcgaggccgacgtcgacggcgacggccagatcaactacaccgagttcgccaaggtcatgctggccaagcgaaggaaccaggagttggaaggccatgggagctacttatctcactccaagagtttctgtccctcatgtacaatcctctgaaacccactctgccaccttcgtttctagctgacagctgagagaaatgtaacaacattcactgtgtaaatggggggaaattgaaacggcaaaccaatatgagttctcaattaactcgcca

SEQ ID NO: 40980 - DNA, 412 bp, Setaria italica
  Peptide Sequence Number=SeqID_106954
tttgttccgtgttcttgtctgctctacttcaaatgatctccaatgaagaaggcatttgtatataatacaagcagcaactggccgattcccagcatagcctaaatgctgtgcgatgcacctaattaatagatcttgattttcctgctgcttctcattaagagatttctgtggcttatcatcgatgtcatattcctttttaggagaggatgtattattggactctagagttatttttgggtcattgcttgatacttgcacattttcagaactcctttgtaaattggacttggagcggccagacagaattttgcttggagccattgagacagcttgctgacgaagcactttattttcagattctacattagcgagtttctcctctagccttctcaggtagtcctgaaattgacgt

SEQ ID NO: 40981 - DNA, 296 bp, Setaria italica
  Peptide Sequence Number=SeqID_106955
attttgagatttggaagcgggttgctaaggaaagttagtacctcagtatgcacaactaaggaacccacattgctctccatttctatgagtttcgaagaagccttgttggaaatacatagcaaagacatgtttcccttgcgcagttcttatattaaacatgagcttgaaaacactccaggcagattcccaataaaagattattccaagttccttctctcttattagcatttccctaattctttggtgtatattttttttcaattagcagttcatctagatgcttattttgtcctgtt

SEQ ID NO: 40982 - DNA, 260 bp, Setaria italica
  Peptide Sequence Number=SeqID_106956
cggagtatatctgtagcattaggtctgattcttcttacaagagattagatggtctctattttgagatttggaagcgggttgctaaaggaaaagttagtacctcagtatgcacaactaaggaacccacattgctctccatttctgttggtgtatcgctttgcattcttatacatatgcttgcttgctaagggacatatttcttgacctcaatttctttcagatgagtttcgaagaagccttgttggaaatacatagcaaag

SEQ ID NO: 40983 - DNA, 1899 bp, Setaria italica
  Peptide Sequence Number=SeqID_106957
ctcgccatcatctggtgaagaaaccaccgttatgccgaagtggaggcagaagaagagcagaccaggtggcccttacatgtggatcccgactaggctcctgtggaggttcaatggtaatgtgcaagcagccttaaaggcctatgctgaggaagaaggtattgtgccagcatccttaaggaaggctgaggtagaaagctggctacatgatgattccaccagcagcagcagccggtcaggagttgcacaggaagaagccccttttaatggggaggaaacaagcttgcttcttaagatggacaagaagccgaaatcaacttgttctagggcacgtggcaagattgcacatgatgaacatgagaagccgaaatcaacttgttctagggcacgtggcaagattgcacatgatgaacatgaagatggacagtctgacaaaaaaccttgttctgcagttgaagatgaacagcattctggcaagattggtgtccatgccattgaagagcacaaacaagaacaagggagtgcaagaggagatgtgcaggccctcctcgacatggatgatgaaaccatccaagaaaagatttggtgtttcagcgaacgcctacacctaaactttgttgatcctgagttttgtgattatggtcctgaatacgagccagagcagctcagggagttgtacgagcagttagccttgtaccgcatcagagcttatgagttaacagtggataggaagctgactgaactggatgatgtgaatctgaaactgcattaccctccgtccaaactttataataacagttttttcgagtactatgaggacagccttgaatggtacttcgatcttgagcgctgcaggaacgctcagtatgataactaccagcggctagtgcttcgcgctcctggatatttagattgggatttctaccacaaaattattcacacttacgaacaagaccaagcatatgtacagtactttgaagaggtagcgaaccggaccaagtgggttgaagattatctgggagacagcacaattcagtgggaaagagttagaggtctggcttacatgcaagcactggaggttgcagcaggctttcccgatgtttccccatttttagtttcctacggtttcccggagtatatctgtagcattaggtctgattcttcttacaagagattagatggtctctattttgagatttggaagcgggttgctaaaggaaaaatgagtttcgaagaagccttgttggaaatacatagcaaagacatgtttcccttgcgcagttcttatattaaacatgagcttgaaaacactccaggcagattcccaataaaagattattatgatgcccatgtggctggcattgacaaaatggccgcagatgataaagctcggcagttgataagagaggctgttgtaaaaatagcttcacctttgaaacgaaagttctatttggattatgccaggaaaaagttggaaattgcaagagatattgatttgattcccaaaggaaggagaggttctgaatcactatggtaataggaagggtccctccacagggcaagggagacgatggcgaaacaaaggtggtggtgtggctgtcagaaagaaattgtggctttatttagtcttatgggttttgagattgtttttatgtagtataatagtttaattgttctgagatatctactatccagcatatccttggcagccgatataatataacctacactgagattgatgtatcagccaagggcgtagtacttcaaccctctgttgttgaaagtgttttcagatcaaccatttgtgactcgataacagttaaacatgcgtttacgagcttatcaaatttgattttaacctttggtcttgatttggactataaattgttgtaacatgtactt

SEQ ID NO: 40984 - DNA, 640 bp, Setaria italica
  Peptide Sequence Number=SeqID_106958
gtgtcttccaaatataaaatctcaagggctgtaaggtgctcaatgccatgagggatgttgttcaatcttgggcagtctgaaaaccatagcacaataaggctttccaatgcaccttctgctatttcaacttggttgagctgtggagcaccagatatttttaattgtcgtagtctaggaaacgagagtgcagggaagtacatttttttgccattataagacttgttaagaaggcgaaggtagcataaaccacgtaacacaatgaggttagaaaatgagtcctcatcaagtttggatagtctcagagacaatcgagtgaggttgttaaggtgttgaccaggatgagaaaatctgaggcgtccatttcttttccagttgcccacccagataaagttttgaaagagtctctggcaagcgaagttgttcccatggttacttcatgttcgtttgatgcagcaatcagcagatggacaagatgcctcatgttcatgatagcagtgcacaagtttaaagagtgctcgcttgtgaaatcaccaactgcaaatgttcttaactcaatcgaagttgcaacatcacgaagaatctctaagcttgctttaacatactgcagagcatgcagtccggtcaagttccttatgcctcg

SEQ ID NO: 40985 - DNA, 1498 bp, Setaria italica
  Peptide Sequence Number=SeqID_106959
gcaaggaacctgtttcataaataggggtaatatattacacaatgttgaaccaagtatcccaacaacacaccaagctcagaagccactaaaacaattctagaatgtaaatggtgctggttacctaagctattacaagaaaactgaaaaagtactgctgttagtataaatggatttctaacagttggttgccctcctgcaggccatgactgacatgcacaaaagcaattacactttcaccttcttgctattaggtttctcaaccttttcagtttcaacattcatcttttttatggaatccaatagggatggtgactgctctttgctggatgatgattttgcgaaagggttaactggtcgctgaggctcttttcgattgcagtcttcagtgctcatcttttttgagccagtctgatccatgcctccttttttattctgatcgactgatgctccattgctgtctctctttgtttcactatttttgggtactttggtcaatggagtaaagggaggtgaaacttttaaagcgcttccagtaattcctctcacttgttctccttttggcttctttggttcaattaaactgctttcttgattgctaggattcggtataggtaatgaagattccatcaatttttttccattttgcacaaacctagaaggtagagctgcatgagaggtcaacactggtgcgttccttgtgattgtagcattggaggaaaaacctactgctccagctatttttttaccatttaacatcctctcctcaagtatggagctgaacttctcttgcaacattggaagtttcaagcgtgtcactaatgttagtgctcccttcattgacttctctagtatcaataattttgcaagctcagtagctcgaaccagcttatcaccactgcagcagctagagatgagcctcaaaatgcaccggtcaagtgctgcctccatgttgaatgcttcatcgtcatatgcagctgcgtccagacccaatgcagccatttcatccatcttgttttgaatctgtgacagatatagcttcctcatcatgaactcattttccaaactgttagcaccaaggtcagatgaagcgatgggaaatgacagctcgagtatggttaacacaggcttgggcatcacctgtggataagactgtgggtatttgcatagaatgcagaatatattattagcatccagacctaccacccaatggctttcatcttcggattttcttgccttgacagaactaaatactggaagccaacttccgccaaactgactggaaaagacccttagtattcccttggaatcatatgaactaagttggccattatcactgaatccaaaccaggataattgggacgatggagtcaaaagaaggcggccagacaatgattgtgctctttcagatatgttgaataccctaacatccagtacctgatctcctgtgggcagacaatcggaagcatgagatacaatagctagctgagtccccatgccc

SEQ ID NO: 40986 - DNA, 392 bp, Setaria italica
  misc_feature (18)..(18): n is a, c, g, or t
  misc_feature (160)..(160): n is a, c, g, or t
  Peptide Sequence Number=SeqID_106960
gtgcaatgagatgagtangttgacgtgggccctcagtacaacagctgtaagctgtcgtgctcctttggtttgcacaatgcataggaaagcaaactgcaaaaaaaatttgaggccaaactaggtccctattgcttgtatcccagttttgccagtttctaangtttttccctggctactgattaggagcaacataacttggatatgtaatgcgtccatatcatgcttgctgcataattgtcattgcataattttcgatctgttcatatgtcactgacataaatttggtttcttctgtgctttcacatccattctctattccatgttttaatgtgtgtagagaactacaatttatgctcaagttgatgctgctcttcgcaaaataagggacacat

SEQ ID NO: 40987 - DNA, 537 bp, Setaria italica
  Peptide Sequence Number=SeqID_106961
atgtcgagcatcacctcaagttcccaccttctgtcccatatgacaagctctcgcatgtctacacggctatcttgaagccagacaatgaggtgagaattttgatcgatggggaggaaaagaagaaaggcaaacttacctgtctgctgatgattttgagccagctattatcccacccaagaccattcctgaccctgatgacaagaagccagaggactgggatgagagagctaaaatccctttccttctcaacttcatatttgggcttccaggtcttctctaggatggaggtggcaaccttctcatcatcagcaatcaaaatattgtcaaacaggatgccatcctgcatcgtccagatctcaattccaatagcagcaattggatcaaagtcaggcttgtcgagctcaaagtactcagggttggggatctcctgaggcttccagattcccttgtagttgggattgtcaatcgaggggtgcatgccacttgcccttgtaagcagggttctgcttcattggcctcttccactcgccacaccca

SEQ ID NO: 40988 - DNA, 691 bp, Setaria italica
  Peptide Sequence Number=SeqID_106962
actaattaggaaattagaagaatctggacgatgcaggatggcatcctgtttgacaatattttgattgctgatgatgagaaggttgccacctccatcctagagaagacctggaagcccaaatatgaagttgagaaggaaaagggattttagctctctcatcccagtcctctggcttcttgtcatcagggtcaggaatgttcttgggtgggataatagctggctcaaaatcatcagcagacaggaagtttgccttcttcttttcctccccatcgatcaaaattctcacctcattgtctggcttcaagatagccgtgtagacatgcgagagcttgtcatatgggacagaaggtgggaacttgaggtgatgctcgacatactttccagtcttggggttcttgtgcttaaggatgaaatgcaccttgttggttgacccacacttgtctgggccaaacataatagtgtatggagtctcattatcaaactccttggcatcccatccggcatcctgagggcggatgtacttaatataggcacctccacactcaaggccattctggagcctcacttcaaactgcaggactactgtcccatccttcaaagtaactggctcatcaagctccttgattatggcatatttccttagcctttcttctacttaactaaggagaccatagtccgcatgccaagagtg

SEQ ID NO: 40989 - DNA, 2178 bp, Setaria italica
  Peptide Sequence Number=SeqID_106963
ctgaaattttctttcgtttaatctaccagaaaacaatgacaaactgctgacaacctatcccttgcagaaattcaagcatcaactaacttaaacaaactaacttaaacaagcattcaccttaccgaacagttgaaaaaaaatctgaaatgtgacttcgtttaatctaccagaaaacaatcacctctgtctgattcaaagtgattataaaagtcaggcacagcacacaaacgaccgacagaaactaacttctactgctcgtgaagggttcctggtctaaccatgtaaacaacaaatcatcagctgcgaagcagcagaggtgacatatgacactcctattatacactcaaaatattaagaggcgaattctcaaaaagaagcaggtgccagaatggccaaagacgtcaaaaataagcctcagagtctatgtctcccttcgggacctccggcgtggcgctgcggtctcttccttctcgtcctctttctcctccttgtcaccactgcttccagcaccatcagtctcagtcaccttgggcttcttcgcctcagctgcaggtttcacaggagccacaggcttcttgccaccgaacaggatcctgaagagcacggtcacaaagacaacaacaaccgagaccaaaatgccaatagtgatgttgggctgcttctctcccttctcgatcacatcctgtgtgcaagatattgagagaagatgtcactttctaggtgtgacattcagatgtttgacaagataggttagcaaagatttccagaactcacaatgatcttggtcttgtagggtgccaagaatggaacatcagcaatcttgtacaggatgtcaaaaaccttcttctggaactcagaaagaccatctgcaccagcagcagcctcctcagccttctccttttccttctcaacttcatatttgggcttccaggtcttctctaggatggaggtggcaaccttctcatcatcagcaatcaaaatattgtcaaacaggatgccatcctgcatcgtccagatctcaattccaatagcagcaattggatcaaagtcaggcttgtcgagctcaaagtactcagggttggggatctcctgaggcttccagattcccttgtagttgggattgtcaatcaggggtggcatgccacttgcccttgtaagcagggttctgcttcattggcctcttccactcgccacacccaggtgccacttcacacttggggttgtcaatctttggtgcctcccattcaccatcctcctcatcatcccagtcctcaggcttggctgcctctggatcatcaatttcctcaggctcatcatccagccatccctcaggcttggtggcttcctcatcctcaatttccattggagcatcctcatcccagtcatcaggcttcactgcatctggatcagggattttagctctctcatcccagtcctctggcttcttgtcatcagggtcaggaatggtcttgggtgggataatagctggctcaaaatcatcagcagacaggaagtttgccttcttcttttcctccccatcgatcaaaattctcacctcattgtctggcttcaagatagccgtgtagacatgcgagagcttgtcatatgggacagaaggtgggaacttgaggtgatgctcgacatactttccagtcttggggttcttgtgcttaaggatgaaatgcaccttgttggttgacccacacttgtctgggccaaacataatagtgtatggagtctcattatcaaactccttggcatcccatccggcatcctgagggcggatgtacttaatataggcacctccacactcaaggccattctggagcctcacttcaaactgcaggactactgtcccatccttcaaagtaactggctcatcaagctccttgattatggcatatttcctagccttctcactaacaaggagaccatagtcctcatgcccatcactcttggcatgcttccatacaccttggtactcgtccttcctggagacgacccaccgcccctcgaaatcctcgtcgaacgactcgtacagcagcgggtcggaggcgcggatctgaacgagtagcgcggaaacgagcagcagcagcagggcgcgccctcccatcatcctctcgctcccgatctcctcgagccgggggagtttctcgaaaccttccaaccagagcgaag

SEQ ID NO: 40990 - DNA, 306 bp, Setaria italica
  Peptide Sequence Number=SeqID_106964
tttttttttgtaattatcaacagtacatttcagatggtatgacttcctcattttgcttcacagctattgtcgattcttgaacctagcaacacatgaaagaatgacttacaaaggaaagaaaagctttggacatgaagcgatcagagaactttgaagaccatatgtgtgttatccacatgaaaactttcagatgtttcaatctcctcatatcgcttccaaccataagccagagcttgattaactaaaaaaatgaaatggaggaagaacacatatgtgaataatacatcaatggaaacatatgtgaat

SEQ ID NO: 40991 - DNA, 406 bp, Setaria italica
  Peptide Sequence Number=SeqID_106965
agtactgtctacctgcagccactgattgaggagctcaaacaactatggaaaggtgtgaaaacaatggatgctacctcaaagaaaagtttccctcttcgtgctgctcttttatggacactgaatgatttccctgcattggcatacttatatggttgcagcacaagtggaacatatgcatgtccatcttgtgctggttcgacaaaatcaaagtcattgaaaaaaataaaaaactgtgttacatgggtcatcgtcgatggttgccacaaggtcatccttatcgacgtgaaaagaagttcttttatgaaaaagaggatgaatctgcaccagaaccattggatgggagttcagtattgaaatgttggaaggagagtgtttgtgcatggaaaaaaggcgtatcaaagcaaaa

SEQ ID NO: 40992 - DNA, 495 bp, Setaria italica
  Peptide Sequence Number=SeqID_106966
ggaggtggacaagaaggaagaagccgccatgtcgcagcatctgcttgaagcggcggacaggttcaacctccagaggctgaggctcttgtgtgaagacaagctgtgtgggtgcattgacacaagctcggtggtgaccacactcgtgctggctgagcagcacagttgtcaggggctcaaggagaaatgctttgagttcctcaagtcaactggtctgaatgcggtcatgacaaccgatggcttcaaccatctggtaagtagctgcccaaccgtgctggaggagctcatgtccaagctcagtctccagtgatatggaagaacatagctttcactagtggtggaatggtagctgcagaagcatgtttcagtaccgtgcattaacacaaagaaagtcttttgcatcttggttgtcatcaagatgaaatgtagctctgtgtttgctctgtttggtccttgtgtatgcaggcatttagttgtgaacctgcaatcggtcagcaa

SEQ ID NO: 40993 - DNA, 603 bp, Setaria italica
  Peptide Sequence Number=SeqID_106967
gtcctcttctgatttataatagaatcatagtctctttctccaagggcaagtgtcttcctctcaacttcaatttgcatatgtctctccctttcgtcaatacgggacagattaagcttcgaaagctccacttctgcagcatcacgttctttctctttatctttagtgcgccttgaaatacctgacatggattcaatcttagactgtatctgtccatcaacttcagagttgcgagcatttactttaagatagtgtttccacaaaacatctaactgatcgtcattggatttcttcttctcctgcaaatcattctcaagatttgagagtctcgctttaattctgtttgtaaggttcagagcaacatcatttgtaaagggaaattcaggaactggcccaaaattatgtttggcgaatatcttttttatctcagagtctcgttcctgcttcatagacatgtgagcatcagcttctgccctggagctttcctatgtcacgtgttaactcagagattgtctgggacagcaagtatccttttgttgcttcatcatccatctctcttcctagtttactgattttagtttctagtagtgcaatcctttcttcaaa

SEQ ID NO: 40994 - DNA, 403 bp, Setaria italica
  Peptide Sequence Number=SeqID_106968
cccctcgcctccctccggccgggtcccctctggcacgcaccacgtcgagcatatgccaacgtttgcgagcccccggcggcggcggtggtccacatggccacgggcggccgccgacgcggccgcctcggcactcgccgccgccgtcttcgcgctcctggacgtcgtcgacgtcctcctctgcctcgtgtacgccctcctcgacggcatcctggaggagagccccgttgggtgctactgccacaggagctacgagagcgaggcggtggccacggatggggatggcgacgaggaggtctccgatacgctgtacgcgcggaggagcgccgtcagggacgcgctggtggggcttgtgcgggtggtggtgaggaagagccgggcgccggagaaggggccggcggcggct

SEQ ID NO: 40995 - DNA, 414 bp, Setaria italica
  Peptide Sequence Number=SeqID_106969
ctcaccgtcactgaaacaagggtctcactcttttggcatcagattgccgtgtttttgccatctctcagtttcgatggtgactggttccaagcgcacccgaaaagtatagcgaaattattgtggtggtgtgttaagcctggatcgacatgctgcctgtaataataccttgtgataatcctgtagcaatctttcatatttgcggttctgacgcaggaggactatgtttactacgcgtgcaaggcacatttggttgctgtttggagcgcaattttttgacccttgtctatgggaggtactgtttggaaggcatggtgttctcaagtcacgaactacagaatccctgtggtaatattgtcaaaaactgttatgctgaaagcagtacacgagctctcgtatctttagtaattcaaaaaa

SEQ ID NO: 40996 - DNA, 401 bp, Setaria italica
  misc_feature (337)..(337): n is a, c, g, or t
  Peptide Sequence Number=SeqID_106970
tgtctagggtcgtagtattcgtaggtcgagatcgtgcccgtcgtcatcgccaccggcgtccacaccttcttcggcaaggcggcacacctggtggacagcaccaacaacgtcggccacttccagctcgtgctcacggccatcggcaacttctgcatcatctccatcgccgtcggcatggtcatcgagatcatcgtcatgtaccccatccagcaccgcgcctaccgcgatggcatcgacaacctcctcgtcctgctcatcggcggcatccccatcgccatgcccaccgtgctctccgtcaccatggccatcggctcccaccgcctctcacagcagggcnccatcaccaagcgcatgactgccatcgaggagatggccggcatggacgtgctgtgcagcgacaa

SEQ ID NO: 40997 - DNA, 742 bp, Setaria italica
  misc_feature (1)..(7): n is a, c, g, or t
  Peptide Sequence Number=SeqID_106971
nnnnnnnaaagtagccaatcaaacaagtgaaacttttttgtaaattttgttcgacaagctgaaacacgtagattctcacaaagacagacaaccattatagttcaaaaaggataaacattaaattcggtgctgactgaaacatgacactgaacagaccacaattcacctttcaccatgataatatggtctattgaccgatgtactggactgcagtgcacaacgtactgcataactacatggatggatcaattgaagcttgggcagataggccccttggacaagccaaggcgaacctccattccatggtgcatgtcaggttgacggaaactgtcagaatcttggggcatgttaagataatcttcaaatccaaaatcatccagggaacctgtcagtgcctcatatccaagcatagatgatggcaaagcaccagggggcctttggaacctggacaggatttgggcatcgagatccttgcggatgttgaaggcggatccgtagatggcctccgtcccgaacttcttcttgtccgcccagaacttggtctccgattggatggtggcctggagcgggtgcggcggcgcgaggtcggccttgacgccggcgttgatgccgaagcggagggcgtcgtgggtctcgctgatctccctcttcatgccgccgctcgccatcgtcgttagctgcttctctctctcgtttcgctgctgcttctctctcgtttctttctttgcggggaagaaagaga

SEQ ID NO: 40998 - DNA, 529 bp, Setaria italica
  Peptide Sequence Number=SeqID_106972
ttgttaacttcacaaatatacagatatgtattttttacatctatttgaaaaacaagttttacttgtttacatctatttgaaaaaacaagttttacttgttctaaaaacactacacatttacaatatagtttcaagagcccagtgacagatagattactataatagtgtactttatcatatactacgacaaaaatgctctacatgtaacatattcaaggttgttgataaatgagtaaccatggactaggcatgcaaatatctttgaagaataataacaaggcagaaaataacaatttatgaagaacacacttgatacaaaaatacataatcaatggtgcaatgcatagtaaagagtttacaaaagaactttcctaattaggagaaaggggcaaggaattgtcttcagtacacctactgttcattagaagacacatggttttacagatagtggaaggatgctcctttcctcaaattgccaatagagacgcgtgctaccatctgccagtatagttcaagcttgacatatcct

SEQ ID NO: 40999 - DNA, 270 bp, Setaria italica
  Peptide Sequence Number=SeqID_106973
ggaggaaggaggagttggaaaaggaaggcggcggcggtggccactgaggagtgggggctgcggaggctatggcggaggatacggtggtggcggcgggtacggtggaggcgggggctatggaggcggatatggtggtggcggctaccctggaggtggacaccatggtggatggaattaagtggagcaactatataagtttctctgtgtcaaataattaatgtgccgtggtgatgggtttgaatgatgcatggtgattacttggcggtacaa

SEQ ID NO: 41000 - DNA, 857 bp, Setaria italica
  Peptide Sequence Number=SeqID_106974
cgtggctctgctgcctctataaatagtggagcgggtcgctgaggtctctggcccagttgttgagcaatggcggtcaagtttgtagctcttgtgggggttgtcctgctctttctcctcgtctcccaggatttggcatgtgctagagagctcacggaagccaatgagtctgaagggaaaaatgtgaaacctggaggagcgcctggactcaaagatgagaagtggggaggtggatataatggagggtatggcaacggaggtggttatgggggaggttacggtggcgggtatggtggtggctatgagcctagatacggtggaggataccaccatggccatggtggaggaggctatgggcccggatatggtggtggttatggtggccctgggtatggtggtgggtatggtcagcctgggtacggcggaggctatggtggaggatacggcggaggctatggcggaggatacggtggtggcggcgggtacggtggaggcgggggctatggaggcggatatggtggtggcggctaccctggaggtggacaccatggtggatggaattaagtggagcaactatataagtttctctgtgtcaaataattaatgtgccgtggtgatgggtttgaatgatgcatggggattacttggcggtacaacaatgtctgcatagtataaaatagatggtagatgtactgttatgtgttgcatgaagtgtgatattaagagcaagtcacctagccatgtatgtacggcagtgtgcacatctggcttttagaacttgtacgtcctcattatttatgaacctacatatacatataaataaattaatggcctgtaaagttttctgtacaaaaaaaaaa

SEQ ID NO: 41001 - DNA, 549 bp, Setaria italica
  Peptide Sequence Number=SeqID_106975
ttagctggttctgtccaatttgcacgccctccattttagctgaaggtggtggcgatggcccggattttatcgttgcttgcttccccatgacacccgcccttgttatcttctggcaaccgcttatgtacaaattagaaagctttggaaaatgagagagcagctgtgtaaattcctttccactagcaccacactctgtgatcattagattttccactggaaactgatggccggcatggctttcaccttcaactggccaaaggccactattcggattcttgatactgagggtcttcagggatgaaagcatttggaggtgatccggaggcagaggagggcatctctgggcctccaaagattttagttccgttaggttgtcaaagtccaacaccttcagccatgcaccatccaagccatcgactttcaagctgcattcagattcatcttttctgtaaaatagactctcaaaacatttagatgcatcactgtttcctatattgagggagcatggagcacgagtccaaggtaaacgaggcaaggacaataagtttg

SEQ ID NO: 41002 - DNA, 555 bp, Setaria italica
  Peptide Sequence Number=SeqID_106976
acggtgagaacacttggatcgttcatgaatacttttacacacttccatcgccagaaaacagcactccttcagtcaatgagttcaggaaagagggttctcagggtcaggtgacggtctactgccggagtagcaggctggccaacggtggggatgctgccaaccacaggcaggaggacggctggttgagaagggccagggtgggggtggcagcaatgccgggttagcgtggtgagggaaagtagatgtggatctagcggcagggatatccctagacgggggaagaggctggctgagcagggaagtgatttgagggctgagtccatgcactgctaatttgctagagagattgatccctgaaagaagatagcagcactgactaaaacactgatgaacatataggtgattttgatctgccatcatccatatatttttagcttcagggatcatctattgaagaaaaggcaaacatctcgttgatcaatactcatgtagtcctgccaattaagggagaatcagtgatgctcattgcttgatattagtgctggtagtttcata

SEQ ID NO: 41003 - DNA, 341 bp, Setaria italica
  misc_feature (341)..(341): n is a, c, g, or t
  Peptide Sequence Number=SeqID_106977
gcggcggacaagacgaagctgcgcggcgaggagtcggaggaggacgtgatgatgcgggtgaaggcggcggaccagatgacgggtcaggcgttcaacgacgtcggcatgatgggggaggagggcaccggcatgccacggcggcggcgctctgggtgatagcctgagaaatactcggaacaggcgaggggggccgccggagatgacctggccggcggtgcgtgcttctcgtgtatccaactacgctacgaaaataaggagacgatgtcgcgtctcgatctcttctgttccatgaagtttatacagcttattaacttgcaacaagaattacttcgatcttttan

SEQ ID NO: 41004 - DNA, 502 bp, Setaria italica
  Peptide Sequence Number=SeqID_106978
ggcgggcatgtcgcgtacgcgtgttaatttgcaacgtagcgtacgccaaaggcaaaatacatagtacgcgcgcaggcgcaaccatttctgactttgtttgttgctagtagcatgaaagaaacaaaaagtgtgacctggatattgacgtgcagttctggtgtggtgtggcactatggcagttctagtaagatacccaccgctttatgtttgttacgttgtttaaaggttatatctttttttaaatttctaggagtaggcaacactaggctctcagcagggaaggggaaaaacaacaaaggctctgttctgcaacctgaatgcatgatgcttctgaacttagtcttacaacgttggcacggtacaacaaacaaacctggagctgtcccacagttctgagctttccagtgaggttggttttcagagctattaataggaagtttaaatacagtggtagtaaaaagaaatactagaacaacggacgtgcctccggagacgagcatga

SEQ ID NO: 41005 - DNA, 453 bp, Setaria italica
  Peptide Sequence Number=SeqID_106979
aggactagatgctgatgataatgtctgcacaaatcaaagcaataggtgaagtgaactgatactgcaatatccgggatcaactacataaagttgttaatttcaggcaccatttggctaacaccccgtttggatgtagatactgtagtccagaatttggaattggtatttggtgccatcaatatcgctgtttggatgatctgagaattggaattggaaacttacttcaataccaaggggtattcggcctactgctgcagtccatcacacgataccgagcccttcccctccgcattagctggaatcgccctcccagctctctcccgtatctctctccctctcgcatcctctcctcttctccgtctctcgcatctctcccccaacgcggagctctggcggagggcagggcgcagctcaggcgggacgggtccggtgctgtatcttcagcaggtaacg

SEQ ID NO: 41006 - DNA, 2151 bp, Setaria italica
  Peptide Sequence Number=SeqID_106980
aaatccatcagtacactcatcagattgggaattttacacttttcccaactaatgaacaatatcgtagcacattttcgcataaccgttcatctacccgccaccaaatacacatcggggcaaactttttgccccataagtctgaacttcaagaacatgaaaccatggacagagacacaacgtaaagcgcagcagcaacaccaatcctaacacatctctgcatccaggaccattttcccctatctaataaaatcagatcacgtttaagctctcgccatctcctgctgctcgtggagatttcccgggtatttgggatccttgcggacgatgcgcttccagtaccagtgcctgtcgaagagcatccagatctcctcgatgggcacctgcttcgtctccggcagcaggaggatgacgaagatggacatgacgacgatgagcgacgcgaagagcacgaagacgccccaccggaggtggcagagcgcggcgaggaagcactgcgccacggccgccgtccagaagaggttgacgcacaccaccacgctctgccctgctgatcgcatctccagtgggaacagctcgctggggacaagccaccccagtgggccccatgaccagccgtaggcgacgacgaagaggcagatggccaccaccagcactgtgctcacgcccttggtcaggtcctcgccgtgcccgaacttgagcgccaggatcaccgccacaaccaccatggaggcgatcatctggacgccagcctcgatgaagaggaaccgtcggccgaggcggtcgacggtgaccatggagacgagcgcgccgacgacgagcatggagccagtgatgatggaggagtacagcgcggcggagttgccgaagcccaggctctggaagatgacgggcgagtagaagaggatggagttcatcccggacagctgctggaacgccgggatgccgagcgcgccgatgatgagctgcgggcggttgcgcgtggcgagcaggttccggaacgtgcccttcacggcgcgcgccgcctcgctggcctccttgaggtcctcgaactctgcgtccaccttgtgggtcccgcgcaccttctccagcacgcggcgggcctcctcgaggtgtccgcgctcgacgaggctgttgggcgtctccggcaggaacagcgcgccgacgaagatggcggtggcggggcccatggcgaggcccagcgacaggcgccaaccccacgggtggagccggtcggtgaagtagttgatgacgtcggcgacgaggatgccgaggcaggtggtgagctggaagagctggttgacggcgccgcggatgcggtagggggcgatctcggagaggtagagcgggacggcctggttgccgaacccgatgccgactccgaggaggacgcggccgacgatgagcatggcgatgttcatggcggcggcgttgatggcgccgccgaggaagaaactggtggcgccaaccatgatgctggcgcgccggccgtggcgcttggtcacgtaggaggcgccgaaggtggagacgaggccggcgaagtagagcgaggaggtgaagagcgtcagcacctggttgtcgtacttgcagtagtccgtctcgtgcaggtgcgcctgcttccgttggtacacgtccgggaagaacttcttcaggaagtcgtccatggatgtcacgccgctggagactccgaggtcgtagccgaagagggatccgccgaaggagccgacgatgcaggcgaggatgaagtagccggtgatcttgccctcgtataactccgccctcccggtggccgcccctccgccgccgaacccgccggccatggtcttttactctctcccgctcctccgcttcctcctctgctcctcacccgagaagcaagttcctcgcctctcttccgacaggctctcttccctccgttcttggagttggaccagctcctcccggggacctcgccgaaatgcgtgcggcgagcagtattcaacaccgggccaggtaaccggcgattaaacaatgatccaccggctgctccgaaccaagaaagccagtctgatccactctgccccgctgatctggtaggggaagaaggcagtgggaggctgcgggggtggcaggaggccgttgggacggggagggttttatgggagttgacggacc

SEQ ID NO: 41007 - DNA, 616 bp, Setaria italica
  Peptide Sequence Number=SeqID_106981
ccttacatcaaagtaccacaggccagtcagttggcacatatcaggtgacagagttccagtcagtgagttacccctcaagcctaggtactgcagtacttcattccagtagatgagcctcgggatgtcgccagtaagcttgttctgagcaaggtccaaggtcttgagatttggaatctgggacaatgtggaagggatgggtccggtgagttggttgttcttcaaaatcaggtcctcaagctgcttgagcttggagatggagaaggggatgtctccatacagcaagttgccagacaaatccagatattttaaggagacacaatccccaatctcatctgggatttggcctgtgagcttgttcaacttgagatccacgaactgtagactcttgagctcccctatagccggtgagatctcccctcctaggtttagatttgacaggttcaggccgacgacggcgaaggaggcgctgtcgcaggcgacgccgcgccaggcgcagtggtcgcggccgccgtcccagtcgacgagcgcgttggccgcgttcccgaacccggccttgaccgccatcagtgcccgcctctccccgttccccattcccctttcttcccgtccgtccgta

SEQ ID NO: 41008 - DNA, 755 bp, Setaria italica
  Peptide Sequence Number=SeqID_106982
ttgtacaaagaatccatcataatgtaactgttattctacagtgcgtacatcttcgtcttgtattcgctgttaagtatctcttcatctgaatcaactgaccgggaccacgagccccgggactggctcgcggaggccttcctgatcttcctcgtgttcttctcgttcaacctgtgggtgatgatgcagtagcacatggagccaagggtggtgagcatgatcacggtgccaattgccatggtgcaccaggccagccaccagtcatcacgccccaccacgacgtatgtcagtgcaatgaaggccaccgagatgaagaggcacgccagccacatcagcttgttcatcacgaagaccatccgcttcttggccttctgctccaccacgatcagcgaggtctggacgacgacgaccgcaagggagatgaagagagccagggcgtcgaagaccaggaagactatgaaggccgggttgctagcaacatatgcttgtcccagggacatctcgggaggcgcttggctcagatcctctacaaaatttccagggacggtgaatatggcagcaaaggctacggtggcgataagcactgcaacaacagtgttggagttgatggcgttgtttagaccaccaatatggagcttttcgagtctcttcttgatcttatggacttgcatcttggtctgacgtgtttgttgatctgggactggacatcatgtctgatatcactgactgtttgctttaagttgctttgctgattcgga

SEQ ID NO: 41009 - DNA, 533 bp, Setaria italica
  Peptide Sequence Number=SeqID_106983
tggatataaaagcacacataagaatctgcccggaagttccaggctggtaggctgccataaaaaaatagctataaccactaaaccatttggccaaagtatatgaaatttcattgaatcgaaggtctttggttcctctacagctttgtaaatgccaaaaaattaataaagcctctgaatggccatcaacagaaactgaaaataaaattaaaactgaatctatctctacaacacaacatatacttcccatgagcatattacacaacctaccaggccatcagaatttagaaatattatgatggttaaagttaacttctaaatagcatctgtcactactctaacccgaacatgtataatacttgtcctacaaatggttatccaactaaactttgataagcgcaaaccatgatccatgctaattgtaccacataatggacttcctctcaaaactctaacaaacagttgacacctagaatgaaatgcggtctacggaaccagcctctaacacaaaaactggaaagttgatcatctatcat

SEQ ID NO: 41010 - DNA, 1170 bp, Setaria italica
  Peptide Sequence Number=SeqID_106984
aaggaatgtagatcttaaaaatactttctggttctgtcaaccaatagcaagaaggttacattaaccccagaggaacaaccatattaaggagagcatttgtgcaaactgcagagtacatacttttcctattaaatgtgtttttgacataaacagctatgcttacatactttgaattaaacagtgctgaacattatgaacgttgatagaatgcagtacggaagctatttccaaatacagttgaaaacccaagaacatgtcccaaaaccaacttcaacaatactgctcagctacacttcttcccatccaatttgtcccttaagatttctttttccacagctcacgagttacaaaagtgtgtgcaattttttagagaagaaaaataaaagccaaaggttgtgagttgatgctgatggccaactccctcctacctaaacagatcctaacgacctgtagaaccaaaatcccaaaaagaatccataccaaactgggcaactaaggagagcaagcatttaaaaagatccaaggttaactagagttgttgacatgtggtcgtgtggattgaatcacaagctggatatggctgcagcatagtattgaacgagttgtttgctaagttagcctcttcaaccctatgaatgctagtgcaaagcatcatggatccactacagcttccctcacttttcctgtttccttgcaagactggaatgaaagactaacacacaaactgcataccaagtcacccctaagcactattgtgcccaaaacacagaaaattacagagagcaggataaacctgccatctcacagaagcatctgcacttaactgggcatcagatcaggcaatcactgaagcttagaatttgctaaaaaacagtttgcaaattgaacgcacaggatttttttttaaaggcaatgatgcggtttatagtaacatgaagcctctagaatagaaggctattaggctacagattgaattgttagcaaagcagctaacttgatcatttccttcccatattttcaagaatcaacacagcagcactaaactattggtctattggaagagcataaaaggtacttgtacgtgacccctgcaaagattactagccgcaactagagcaggaagtgcccacagattcttacttggcaacgacactggcacacagcaagcag

SEQ ID NO: 41011 - DNA, 419 bp, Setaria italica
  Peptide Sequence Number=SeqID_106985
tactaaatttgcaaaggatttcttgatcttttttcagaactgaagactccaaactgacgaggccatgaactgctatgaacccttgtgccaaagggatttgaaaggcaactgagagaaccaagactcagatttaggagatttaggggacgcacttgtaccagtatgcggatctcgccaaaacttgagaacaaaaaggctctcctcctcagtacatcttttcaagacaacgcgtgatgcataccccatctcgctcatcagatgacatatgtccaaaggatcattatcttcgagggccaccatgtacagccaccctctttctgataggatctctcgcacagcaggaaggatcctgtctatcacctggcgcccattcaaccctccagcccaagacgaagtctaattgtccctttgtctattct

SEQ ID NO: 41012 - DNA, 686 bp, Setaria italica
  Peptide Sequence Number=SeqID_106986
aagaaagaaagaaaaccaaaagaaactacaagaatttaaggaagaatttaaggggaacgcacttgtaccagtatgcggatctcgccaaaacttgagaacaaaaaggctctcctcctcagtacatcttttcaagacaacgcgtgatgcataccccatctcgctcatcagatgacatatgtccaaaggatcattatcttcgagggccaccatgtacagccaccctctttctgataggatctctcgcacagcaggaaggatcctgtctatcacctggcgcccattcaaccctccagcccaagacgaagcaatgcccttgcatctaatttcttcctctggagttggcacataaggagggttaataactaccacatcaaccataccagctagatgtttctcaagaccagacacgatatcagtaacaatcacatccgcatgcacgccatgggcttcaagggttgcttgagttgtctcggcagcgtgtttgttgatatcagttgctaggtactgggttccagaggctaattgcctgagcatgattgcaagagaggtgatgacataaccactcccgcaccctacctccatacataaccttggctgcagcgtcaaaagttgtgctttgtctgagagcagtgcatcaacaagggcaaaggaatcatcacatggctcatacaacctactaggaatta

SEQ ID NO: 41013 - DNA, 452 bp, Setaria italica
  Peptide Sequence Number=SeqID_106987
ccttcggttcatcttatttcttagatccctagaactggtaatgctttcgtcttagcgctaactagttcattacggtttacttttagcgtatagctacagattatagagatgcatcactgtaaaaatgaaatcctgtactaatgtctgcactctttggaaagctttgactttgttctagtttttttagcttcagtgcttaattgcttgtcattcttcctggaatgaaaaataatcatgctgttgtctcttataaatcttgatgaggttcatcagtgttttggatgaggttcttgctagcctgatgagagaaaaaaatcctgatgttacacatacacatgactggtagaatagacattgcactgcaatgttcttattgaaatatggaaatattcaaagttctctagtttcagcactagttcttttctcatttccttcttgaactgcagacgttt

SEQ ID NO: 41014 - DNA, 442 bp, Setaria italica
  Peptide Sequence Number=SeqID_106988
acggacgactcgaccgcctcttcaccatctccctgaacatctcgtagtggctcctcttgtcggcgcgtaggaacgtcatgaacgtcctgatcgactcctccagtatcagcaggaactgcaccgccgatatcaggtcgtccttctcgtcatcctcatctctgaactcgggcaccaggagcagcttgggcgtggagttcttcatccgggcgtacacctcggggcggcggccgtgctcgtagggctcgttctcgatgaagcggtggagcaggacctggaactgctggaactcctgcgcgacgcgcgccgggcagcaccgcgccgcgatgttgccgtcgccgccgttgagccgccggaagcctgggtgtagttccagttgagggcctcccaggtgaggcacacctgcgccacgtacgcgcgctccaggtcagggtacgggtcccgc

SEQ ID NO: 41015 - DNA, 1020 bp, Setaria italica
  Peptide Sequence Number=SeqID_106989
gtttgataatcagcttggaccatacaatttggaatcttatggagattggaaacaactctcgaactacttgtcacagagtaccattgaacgtcttgaaccaattggaggggaaattacaattgcatgggagtcatcatggatggataaagctccccaaagtgacatggagagacgcctgatggaacaactaagagaaagcaagtttacaaagaatgttcctgtgcagtctgagcggagaggatgctattacacaagtatccctgcttcagttaagcatatgaacggtaacttgacagcactgaacttggacaaacaagcttgctggaaagtgttttggccaaaaattatcaaggccaagaagatttactcttgggagagctgcagtttgctttcatagcttttatgatgggacagtcactggaggcttttatgcagtggaaagcattagtcagtcttctcttgagctgtagtgaagctcctcttcatacaaggactaacatgtttgtaaagtttctaaggacattttactatcaactcaagcatgggtttcaacgtacccaagattccagttccagaagtgaggatgtgggcaactccccgtttttggatgaagcatggtttcaagagacatattcctgtaccgtctttccaaggatttctttacagtagtatttgaagcccccgtcgtcgatggagaccttctatcatgggctagaaaattaaagcgcttctggagactacatttggatgggatcttgaggacaatgcagttaacctcattgatgaagatgacgagtttgctcctgtggttgtggaaatggatgggtcataggctaaggaagtcagattccttgaaatctccggagggcatggtacgcttggatgaatgctgaaaacttgcaatgggtcaaccttttctactctgatccgtattttaagtcatgcacacaatgttattagaatcttacaacttttggtgtctataggcacatggtgctgcgctgtattgttttattgtaa

SEQ ID NO: 41016 - DNA, 878 bp, Setaria italica
  Peptide Sequence Number=SeqID_106990
ttgttttgttaaagttttcttaaggtactatttttagttcctttgttatgaagaggagcttcactacagctcaagagaagactgaacaatgtttagtaaagtttctaaggacattttactatcaactcaagcatgggtttcaacgtacccaagattccagttccagaagtgaggatgtgggcaactcccgttttggatgaagcatggttttcaagagacatattcctgtaccgtctttccaaggatttctttacagtagtatttgaagccccgtcgtcgatggagaccttctatcatgggctagaaattaaaagcgcttctggagactacatttggatggatcttgaggacaatgcagttaacctcattgatgaagatgacgagtttgctcctgtggttgtggaaatggatgggtcataggctaaggaagtcagattccttgaactctccggagggcatggcacatggtgctgcgctgatgtttatgaagttttactgcctgtaacttgaatgatcgatttggttgccagttggcaacttttctgaagatggatattagtaggatcctttgtatagtggtcccgtggtatctgcatcaacaacggtgtatcttagaacctgatagtgtgctatgtaccatgggaaaatttgtacttagaactaatttgtatattagtaggatagtacgtagagaggggggaaaacaaagatgattcccattgtaggactggagtgaaccaactgaaattgcgttgggagtaaatcgagttgacattttgttcaatgggttattgagggtagtaaaatagacatctatttaataaaataaagagtgcattcgcggactaattttaaactaaattaaaaaaaaaaaaaaa

SEQ ID NO: 41017 - DNA, 240 bp, Setaria italica
  Peptide Sequence Number=SeqID_106991
tcagcgatcgacgagctgcatcgatcccccaatcaatcatatccaaccaaaccatgtcgtcgtcgtggctgcactcctccgaccgccgctggaagcgcagcagctggacggcgcgggcgctctcctcctgctcgctcccgcctcccggcctgctcgccttcttcgccatcgtcgtcttcttcctcgcagtctccggctacgtcgactacaaggccatcgagcgccgcgcggagatccggg

SEQ ID NO: 41018 - DNA, 710 bp, Setaria italica
  Peptide Sequence Number=SeqID_106992
ccctttcctgcgtcgtcgtccttctcccctctcccagttctttcacctcggcgtctcctcctccctctcgtaaccctagacaatccaccccacccacccaccggatcgggtctcagcatctctgggcgcacgagaccagggattccctcgcgatcctacgagtgccatggcggacgctgagcctgttgatcagaagaataaactcgaggaacgttgcaagccactatgtgtaaaatcattgtatgagtatgagaggtgtgtcaagagagtcgagaacgatggaagtgggcagaagcactgcaccggccaatatttcgactactggtcatgcgttgacaagtgtgtggcaccaaagctccttgacaagctcaagtgatgatggcatgctactacatttgacgtgtgacttcgttggacactcgcactcccccatttcagttctcatgaacttaaataaattgacctgtttgtcgtgcctctgcttttatttgccgaccctgtaacaggatgccttattttgtctaactcttcgagcagcacagcaaacacggatgggtgcttgaatttaaacgggtcttatcatctaataagtgcaggcgtttacatgtacaagaggaatcacgttcctctgttttacacaagttcatgagaactgaaatggggagtgcgagtgtccaacgaagtcacacgtcaagtgatgatggcatgct

SEQ ID NO: 41019 - DNA, 2668 bp, Setaria italica
  misc_feature (2609)..(2668): n is a, c, g, or t
  Peptide Sequence Number=SeqID_106993
ccagggattgatgaggatgacgatgggatgctttaccaggaggaaccagaggaggagctggagatcgaactcaatgaggatgagcctgcattcttgcaggaaaggggcgctccacggctgacttgtctccagtgaggatttccaagaatcctggggggtcgatgagccgtgcggcggcactgcagtctgcacttgttaaggagaggcgtgatattcacacccaggagcaaagaggaatggttgatgcaatacctaaggatcttaatcggtcgtgggaggaccccatgtcaggtggacggtacctgatgcaggagttgatgggcatgggactaacagcacagagtgtgccagaatggaaggtgacatgtgggaaggctggaacatatgggcagaggtcaaggctttcaattcaggagcaaagagagagccttccaatattcagactcaagaaggagctgattaatgctgttcatgacaaccaagttttggttgttatcggtgagactggctctgggaaaacaacccaggttacgcaataccttgctgagtcagggtatactgcaacgggtaaaattgcttgtactcagccacgcagggttgctgcagagtcaatcgcaaagcgtgtagcagaggagtttggatgtcgattaggtgaagaagttggttactctattcgctttgacgaccgcactgggcctgaaactgtcatcaagtatatgacagatggtatgctcctacgagagattttggtggacagagatttgtcgtcttattcggtggttatgcttgatgaggcacatgagagaactatctacacagacattctcttcggcttgctaaagcagctaattaggcggagaagtgacctcaagttaatagtcacttcagccactcttgatgctgagaagttctctggttatttttttgattgcaatattttcacgattcctggaagaacttttccagttgagatactgcatacaaaacagccagagagtgactacatggatgctgcgctgatcacagtattacaaattcatttgactcagcccgaaggggatatcctcttgttcctgactggccaggaagagattgaacatgcttgtgagcgtctccatgagaggatgaaggcatttggtggggacataccagagctgataatttgtcctgtgtacagtgctcttcctactgaagttcagtcaaagatcttcgaacctgctcctcctggtaagaggaaggtagtcgtcgccaccaacattgcagaagcatctattaccatagatgggatttactatgttgttgatccaggctttgcaaagcttaatgtctataacccaaaactagggctggattcactggttatcactccgatctctcaggcgtcagctaagcaaagagcagggcgtgctggacgtacaggcccaggcaagtgttatcgtctatacactgagagtgcatatcgcaatgaaatggtccccacaacaactccggaaatccagatggccaacttggggtggacggttattaatatgaaggcaatgggaattaatgacctattgacatttgacttcatggatccaccagcatctcaagcactcgtgtcagctatggagcaattgtacagtcttggcgccttggatgaagagggtcttcttactaggctagggagaaagatggctgaatttccacaggagccacccctttcaaagatgctccttgctagtgtagaccttggatgcagtgatgaaatactgacaatcattgccatgatacaaactgggaacatattctatcggccaagagagaagcaagctcaagcagatcggaagagatcaaattttttccagccagaaggtgatcatctcaccctactcactgtgtatgaggcatggaaggcaaaggggttttcaggaccatggtgctttgagaattttatccaggtaaactccctaaggagggctcaggacgtgcggaaacagctcctcgagatcatggataagtataagcttgatgttgtctcagcagggaacaatcccaccaagatagggaaagcccttgccgctggattcttcttccacgcggcaaggaaggatcccagtggaggataccggaccctctctgatcatcagcaagtatatatccacccaagcagtgccctctttcaccagcagccgcagtgggtgatctaccatgaaatcgtcatgacgacgaaggagtacatgagggaggtcacagccgttgacccgagatggctagtagagttggcaccaaggttctacagatcggtggacccgacgaagatcagtaagcggaagcgccaggagaggatcgaacccctgtatgatagacacagtgagccgaactcatggcgcctaagcaagcgccgttggtgatttgtatttcctttcttgtagctctgccatgtaatgttactctagttgtagatattaagctgctctgttaatccatgtgctcagatgattgcagtgcggtgttgcatgtatagtttttgttccttaaagttggaagccctgtgaggcaaaaagcatgttaccacaacaatttgtttcaactgttgcatggattgaaactagttcaatttttaaacnnnnnnnnnnnnnnnnnnnnnnnnnnnnnnnnnnnnnnnnnnnnnnnnnnnnnnnnnnnn

SEQ ID NO: 41020 - DNA, 1104 bp, Setaria italica
  Peptide Sequence Number=SeqID_106994
cgcggacgccgccgcgctctgcgcctcctgcgacgccgacatccactcggccaacccgctcgcgcgccgccacgagcgcctccccgtggcgcccttcttcggcgcgctggccgacgcgcccaagcccttcgcctcgtccgcggcagccgtgcccaaggcggccgacgacgacgggagtaacgaggccgaggcggcgtcgtggctcctcccggagcccgacctcggccccaaggaagaaagcgccacgacggaggtgttcttcgcggactccgatccgtacctcgacctcgacttcgcgcgctccatggacgacatcaaggccatcggcgtccagaacggcccggccgagctcgacctcaccggcgccaagctcttctactccgaccactcgatgaaccacagcgtgtcatcgtcggaagcagcggtggtgcccgacgcggcggcgggagcggcgcccgtagtgccggtggtgagcaggggcctggagcgggaggcgcggctgatgcgataccgggagaagcgcaagagccggcggttcgagaagacgatccggtacgcgtcccgcaaggcgtacgcggagacgcggccgcgcatcaagggccggttcgccaagcgcacggccggggccggagcggacggggaggacccgctggaggagcacgaggaggagatgtactcctccgccgcggccgccgtggccgcgctcatggcccccgggggcgccgacggcgactacggcgtcgtgcccacgtattgatcggtgcaggtgcagcgaaacgcaacgccgacatgttgtacactagctatagcctcgacctttgggttggggctgtaatttttgctgcatgctttgcatgcaaagctgtcgcgtagcattgattacctgtatgattccacggaagccatgaggacttccaggctgtcttcatccctgatcattccatcatatatgtatattatcatctgctgctaatctgcaactgtaatttttggtaatcactagtcagatggttgtgttaactaagggcatgtttgatgggatagagattatgtaaatttggattgtggatagggattaaataaaaagatggataattaaaaaaa

SEQ ID NO: 41021 - DNA, 942 bp, Setaria italica
  misc_feature (8)..(8): n is a, c, g, or t
  Peptide Sequence Number=SeqID_106995
gtttcganagggcttctcgaactggtattgcatgcatccgcagctggccaacaatctttaatttctcctcgccactttccatccgggcccctgatgatctcagtagtgcccacatgaagtcttgagccccttcggttattcctcggaagcgaaaatgaaccggacgagaagaacaaacgtgcagtggtggacaaaaaggaacgggaaatgcctcttttccggcctcttgctgatccttttgtgtaccgtacgtggcgggggccatcgtgatgatctatgcggggagataggacggcggcatgggcaggccgacgaccttgccgcagcggaggctcgtctccggcatgttgtactcgtccctgagcgaccgcgccggcgaggtgacgctcacgtacagctgctccccgaggtagtgcctctcccagaggttggaccggatgttccacatgcccgcgttgtcgaacgtcaacatcaccgccgtccacgacctcgggtacacctggatcgtgtgccggctcaccgtgtccagcaggttgtacgtcttcctcagctccggcgaccacgtgcccggtcccatgccgacgccgaagaaggcgtagccgtcgaggtggagtgagtccatgctcttctcggggttctcgaagatgatctcgatgaaggtgcggaactcggcggtgatgacgttggggatgaggctgagtggcccgttcacggcggggggcacgtcgcccatctggttgtagctgaacaccccgtcggtgacgttgaagtactcggcgagcttcagtggggtctcggtgtccctgtgggagacgccgttgaagccgtacttgagcttgccgtcgatgtgaccccgggagaccgatgagcttgatggtgcgggtgatgttgatctggccgtagtggtaggagccctgcgggttggacgcgccgcgctggccg

SEQ ID NO: 41022 - DNA, 558 bp, Setaria italica
  Peptide Sequence Number=SeqID_106996
ataaccgtttccctggtttccagtaagaccaggcgttttttcacccaggcgtcctcctccgtttctcatcccctgcagcccacatctcgtcacgcgaacagggtggaagtagaatcctacacgccatgtcttctcgctggctcaaggcggaggtgtacccgctgttcgcgacgacgggggttgcggtgggcatctgcgtcatgcagctggtgcgcaacatcaccaccaacccggaggtgcgggtcaccaagcagaaccgggcggccggggtgctcgacaattacgacgaggggcggcgctactcgcagcacggcgtccgcaggttctggctctccaagcgccgcgactacatgcaggccatggacaaggtgcccacggaccccacgccgaccagcaagtagagagatgctatgcaatgcaatgcaaacggctgatcgattcatcggataactagtattaggtacgtgtttgcactgcaagcatttgggctgtcttaattgtggacgagatgcccatgggtgaccagtttcatactgggatttctatttcggtttgttt

SEQ ID NO: 41023 - DNA, 528 bp, Setaria italica
  Peptide Sequence Number=SeqID_106997
ggaaggttggtttgcttctgtaaaagattatgttcactagctgaagtcattgatcgaaaaatgccagtcggtttagtgagcccgatcacctatggcagtctattattttccttagcacatgtgattccagttccaggcagtttctggctctcgtctggcgatctaccgtggctgcaggctggagcaaaacagttcatgtcgaagtgtaacctggttgtatggtaaacatgttctaatcttcatatgagtgtcggacttgggtcacagacacagagtgaccgctttctcggttgcttcaacgatacctgttaaagtactgatggtgatggtgatagaataatgtattagtagtacccgtgtgcgcttagtgcctgtgagcactagtatccatgggtggttcatgcatacatgtaccttatcaccaattactgctttagatgctcttgagatgatttgcttagcttctaagccacctacccatgttggcctatatgtactccaaagctgcctttatggtgtgtggaatgg

SEQ ID NO: 41024 - DNA, 900 bp, Setaria italica
  Peptide Sequence Number=SeqID_106998
tgatagctggttctctctgaactccttcagctgttccgcccccatgcacaatgtgccttggccatcggcatctgttagtaccaggcttgtaagtgtgggatggtccttgataattgaccggagaagatagtgcctcgtcgatgccgcaatcagagagctgattgtccagacgacgcggagcttcagtccgccattggtatagaaagactctggcatgcttccattatcctccaaagatggttcatgctctccaccaacaggcctgcgatcaacccgggtaccacccagaatcacacaattctggagtgtactcccatactctgcccgccatttcagtagaactccctcctcagtacccacatcccccagaggggagctcaacccgaagattccggatgtgcgtgaagttccggagcacctgtgctggcgagtgctgtgagagctgcgcgaacagtggcctcccattaccattcgggttgcgcatgttgtggaacggcttgatgattgtgaagagcatcagcttcaggaagtgcgagaagatgttccgaggcttgggcgaggacaggttgagcgcgtcctcggcgtcgccgtcgacccccacgacgcggtcaatcttgacatacacgtcgtggacgagggagacaagcccgcagaagcgcttggagacggcggagcacctgcccagcgaccgcacgtcctccaccttgttgaggatgagcaggacgagcgaatccggcaggcagtcgaactggtccacctccagcaccgggtccgcgtggattcgagccttgggatgcatcgcacggcacaaaaggccacgcctttcagccacgcagaacggaccagatggcccagggttgccaagaaacgctgctgccccgcagcgaaaccttcgcgcgt

SEQ ID NO: 41025 - DNA, 1052 bp, Setaria italica
  Peptide Sequence Number=SeqID_106999
aactaagaaagaacaaaaactaacaaataagaaagacaacctagaacaacaaaactacatcatgattgcctaggaaatctcctacaaggttcttatccaaaccagctgtgtagcggaaaaaacaagccacactctggggatcaagcttctcgggcaacagatgagtgccttgaagaaactccagacctttctttgggtccctgttgaagtgatcagcgccaatcattagcctccttttgacatacttcctttgacggacaaacttcacccaatgccgaggatcagagaagttctcacacttaacagtccagaaaggagtgtattcatcgagctccacaggcatgagctcagggcgtgaggttgcattcccgatacgatcagccatcccctgaatcacagcaatcaaaccttctagagcaagtatgtgcatggaagacaagggacagttgataggaaaagcactcttcgatagaagatttgcaagctcctcaaaaacattcctacaggttatatcacagtcaagattggcatacatctccaccataaaaatttttctgccgacagaagtctacaagagcttcccttgtagacttctgctgatgatatgttgctccaaaacggggttgtgcaagccttataattatacaagcaaagaaggcctcaagctgtagcttgagctcagtccggaggtgatgataaagattcaatgcaatactgcatactattgaaaggatgagtggattcatcgacaacccgaactgcattaagtttctgaaaagctcatcttgcactaaggacaacagctttggatgtttctgaattgaagacccaccaagctcgattgctgaattgatcaacttaagagcaaacaaaggaagatcttcatctaagccaatctgttcaacaacattgaggagagagcacaggaaatggaagatctccaccatgcaagggacaccataaggctccacaacaagaccacggccatccgcagatttctcatcagaggtacttgtctcagacatgtagcttccgttaccattttccatttg

SEQ ID NO: 41026 - DNA, 245 bp, Setaria italica
  Peptide Sequence Number=SeqID_107000
aagccttagaaaacccatttacagttaatgttctttcccacattccaggcaaagaagcaaagcttgtatgtttagcaggttgatagataatatgctcatagatctcatcagataaaacctggaaggaaacattaataatgtggtatatcaatattcaagaggaagtcttgatgacaaaatgtctcgactccaaaatacctgaatgcaataagatccgagtgctaaccaggagcctaggatgcttt

SEQ ID NO: 41027 - DNA, 247 bp, Setaria italica
  Peptide Sequence Number=SeqID_107001
atggccatggtcttgacgggcggagcgcactcacccgcgggctgatggtcgtgtccaccgcctccgccctcaccgccatcctggccctgcacttctgcggctccctcgccctgcgaatcaaagagacgagcaagccttcaccaacgggcacacaccgacgacgacgaggcgggagaggaaggctggcagaggcagcgaaaggggactgctgctggtcaggcagatcaccagggaatgagacggagac

SEQ ID NO: 41028 - DNA, 368 bp, Setaria italica
  Peptide Sequence Number=SeqID_107002
aaatttgaaatacggtatctcaaatttcactcgtatcggcgccttcttttctggggcaccttcttccgctgttatgctaggaagactaaattctgctctgcacatgtattccttgccaccaggaaatgattttactttccagaccattgcatctctctcaggggcatatgcagcagaacccattgaagttcttatatttgggtttgtggcatctgaaggaacaggcacttcaatttccacatttgttgccgtgctgcaaatgcaaaaaggtaacccgttctttgaaacagcccactcctgcaagagatgcaattttttgttagaaaacactcacctcctttccttgaactgactccttgccttcacca

SEQ ID NO: 41029 - DNA, 953 bp, Setaria italica
  Peptide Sequence Number=SeqID_107003
acactgatgaaatttgatatcatcaaggtctatcgctttccctttagttgctcggccttgagcctccaaaagaaccctatcattcaagccaagtttgcactctggcattccactcaaatatgttctcatcttcagtgccccaacaacatctgatctcacaatctgcccattgctgttaactagaatgttaacactctccactacatccaagaagacttcattcttcttgtaccggatcccctcacttctccatgacacagcatttgtcacagccatgggtggcctctgcgagacctccatcctgtaggcgtctgtcttgatgaactcgctcaagatcttcgcctccgtgtattgtgggtacccaaaatccatcatctcatcaagcaactcgtacacgacgacaaagttatctctgagcgactcctcctccaactcctcgaagtagtgcttgaacacatctacgacgcggtggaggaagaggaggatgctggccgcgttgcagttctggcgggctgcggtgaggaggaagacgttgttgtgctggatgaacatgtacgtgacgccagcgtcgtcgtagaccaccggcgagtgcacttccgcatctccctccttgtcgaggagcttggtgaagaagcgctcggcctggagcgcggagacgtcgccgcggtagtcgcgccagactagaacgcggcccttgatgtccagcaggaagagcgcggacaccgcgcccgccatggtggtgggggcgatctcgtccacgcccgcccaccggatctggatctgcacgccccgcctgcgcctctctctatctgcggccggcggcggccattcgggaggggcgcgggggagggatgccctcggatctcgcctgccgcaccggcacccgacgtgctcgcggcggtgcggtgctgcggtggatcggagccgggacgcaaagatcgggaagacggaag

SEQ ID NO: 41030 - DNA, 1409 bp, Setaria italica
  misc_feature (1)..(10): n is a, c, g, or t
  Peptide Sequence Number=SeqID_107004
nnnnnnnnnngagtagaagatcaacgtagtttcaacctgcagaattaccaccccatttatgacacgaggtgtttcgtcgaactcaaatcagctcaagttttccgtgtaatacaaaaggaaacaaattcaagtttggtacccacaaaaataaatcaataataatacaagtgaactgaaaagtgaaagtttcctttttttctccaaaactatacttgatgggtaacttacagtaaccatgggtaagcctaacaagatgaacaacaagccacagggggggaacccttgtatggcagagcttcgggagaaaacttccatgctacatcggaatgcaaaccgtttgctgcatatcgggcaaatatgtcttcagagtcttacggtttcatcggtgtcttccagcagcaagaaaagagataactcatataagtctcagctcatattcaccagccattgtaatgtatctaacccagggaagtgcctggtaaccactcttttcaattatcttcagataccgaacctgaatgcctgatacggtgaaatacggtatctcaaatttcactcgtatcggcgccttcttttctggggcaccttcttccgctgttatgctaggaagactaaattctgctctgcacatgtattccttgccaccaggaaatgattttactttccagaccattgcatctctctcaggggcatatgcagcagaacccattgaagttcttatatttgggtttgtggcatctgaaggaacaggcacttcaatttccacatttgttgccgtgctcctttccttgaactgactccttgccttcaccatgagttctatacggcttctagagtgcttctcgatttgtgcttccacccagataagaggttttacctgagtgctaagcctgtacgtcattagatcaaaggatccatcaggaggtatgaaggatatagttctatcattctcaaatctagccaaacgtacacactgatgaaatttgatatcatcaaggtctatcgctttccctttagttgctcggccttgagcctccaaaagaaccctatcattcaagccaagtttgcactctggcattccactcaaatatgttctcatcttcagtgccccaacaacatctgatctcacaatctgcccattgctgttaactagaatgttaacactctccactacatccaagaagacttcattcttcttgtaccggatcccctcacttctccatgacacagcatttgtcacagccatgggtggcctctgcgagacctccatcctgtaggcgtctgtcttgatgaactcgctcaagatcttcgcctccgtgtattgtgggtacccaaaatccatcatctcatcaagtctaagttcttaaacttttcgttttactttaacgtttacgttacttaaagtttta

SEQ ID NO: 41031 - DNA, 522 bp, Setaria italica
  Peptide Sequence Number=SeqID_107005
taattctgttactgataggctttatcaaaatttttaactgaaatattggccgacttcaattaaaatcacaatgaattcgtttctttgtgcagatcagctggtcttgtgtcatacgctcaagaatcccatttttgacagccttccatgaaaatcgtttgtgtcaaaaatctgattagcaacatgcacttattggatctcacaatggagggggttcttgatcttgtgcgtcaaagatgctgccaatgaggtgtcaactctgtttttctatgtttatgttgcggagccaaattcaattgattttccggatctgtcggccaaatgtgctgatatagtcaatgggaccaaagagttatctagttatctactggtgccagtaagctagtgataggtggttactttgagtagataattgttcttacagattccgaggtgttaagaagctctgtaaatttctcatattatttactgttgatgtactgtcatttgtagtctagtcaatttggcaaagaagatatattgttt

SEQ ID NO: 41032 - DNA, 825 bp, Setaria italica
  Peptide Sequence Number=SeqID_107006
tggaaacgaaacaactcctgtcatgctgcaacgctgattgattatccttccacactaggaacgcaagtaatatctccccaagctccaagccaggatattcacctctagatccctctgaaatggtgaattattggcagtacctttttcactttctgacgattacatcataaggcaaacaaatcctcagggaaaaagaagcgccaaactgatagtagcttgacacaatggtcctactacaagacaccgtcagtaatacaataacgtgtccacccttgccaagagcagagacaagtttgaaatgatactatgaaattcagactagagtaattgtaccataattaaacgagatgtgagaactttggttggtggtattgcattttcagaggtcactagcttggcgcacaaactgaagtaggcaaaaccaaacacttatgagcttgattcgctggggtttcctctttctccgctgcagcagtagaagtgaggcagcttcactcggccacagcacctgcaacggacaatcactggcacaggcttcaaggctttgggtccgttcctcaagcccttcttgtatttggagaccttcttcttgggaacggccatgagctccatggaaggtcccacggcggcgccgaggccggggaccacgagcgactgcgcctcggtgagaggggcgggaggaggaggcggtacgaggggaagtccggaaggcaggcgaggcaccgccacggctgccgcacgccggagccaacccgccgccgccatggatcgcccttggggttccgggggttacgagcagaagtggggaaactcctcagagaggcg

SEQ ID NO: 41033 - DNA, 381 bp, Setaria italica
  Peptide Sequence Number=SeqID_107007
tactattgttctatttagttgcaccgatttgggtcctattttgatatcttttattaaccttaaaaatcaagcaggatcattgacatcataatttattactacggaaaaggagaaaacgtagggacagcgtttaatgctgacctagaaattagccgtgtatgctccatctacgcctacaatcaatggaatatggaccatatatttcaataaacacaagatatcacatgcatttgggcaaaatattggcatgctacaacaacatggcaaagctaaagcttaaaagtactaattcaggttttaccatgcggtccattagcgtatcactcaaatcagcaccagtgaaatttgccttataagcaacagccttttcaagataggcac

SEQ ID NO: 41034 - DNA, 1100 bp, Setaria italica
  Peptide Sequence Number=SeqID_107008
taagtacaaagactagtcgaatgggcgtctaaattgtgcggtccatcatccagaacggcagctctggtcgctgccgatcgatgcatcagcaatgtttgtgaaatggagtggaaagtttatttaccgagacaatccggtcaatcccatgttgaacttctgcttttggatgtattggctccagaaaaaaagcagaggggccttctttcgagcaagggacacatgatatgatctgtttcaaatacatacaatgctatgtatatgctgttcactgctcattgcccatatttcatctacatccgaagtttctgattctgctgcaaccttacaacagttgcaagagaagacgaagaaaaacgattgatttctctgcactatcctgctctcactcaatctccaatgtatatacagcatccagtgaccagtttctgtgtttgatcaatcctctcttactttgcatcgcacatacctgtacccgaatcacagaaaccatcgcggtcaagaagtttctgtggtggggcactcaacagaggggatgaagggctcccatatgcatttcgacggctattgccacatcctaggctttttcgggtgcttacccctgttatggggttggttccgcttgcatatttgcataatgcctgtttctgtggtaggtcaataacagcatcactgaagtcagcgccttcaataatcgctcctccaagatcactacgtgtgaggactgaccgtacaagaacagcatttgtaaggttggcttcattgagaaccatgcggtccattagcgtatcactcaaatcagcaccagtgaaatttgccttataagcaacagccttttcaagataggcaccattgaatgtggaaccactgaaatctgactctctcatgtcagcagatgtgaagttggctctcctgaagttctcgttaacatggacggccttcttgaggtcggccgagccgaactgcgcggcggagccgatgccgaactcgccccgctgctcggcctcgaacctgttcaggtccgcgtaggccggcatcgccgcggcgaccacggccgccgcgatcgcggcggataccgcggcgcgccacctcggctgctgcgg

SEQ ID NO: 41035 - DNA, 328 bp, Setaria italica
  Peptide Sequence Number=SeqID_107009
ggaggagccacggggtgcggcggcgcagcagggcgggcccaacgacgcggtcgaccatttcttccaggcgcgcggcctccgcggactctacacccccatcgagctgtcattctcagcgacaaaactgcggaacatggatgctttttccaagagtgatcctatgttagtagtctacactaacataaagggaaagctagaggagattggtcgtactgaagttatattaaattctctggagccatcatggatcacaaaggctacaatgtcttaccaatttgagattgtccaaccactcatattcaggatatatgatgttgacacaaagtac

SEQ ID NO: 41036 - DNA, 903 bp, Setaria italica
  Peptide Sequence Number=SeqID_107010
acgagggcgggctggacgagcgcggcgcggcgctgcacctccccaggctgctggccggcgtcgtctccggcgccctcaccggcctcttcgctctcgctggagccttgaccggagccgtcacgggcgcggtggcggggagagcttcggacagcggcgtcctgcggggagcaggactgggagcgttcgccggagctgtcctctccattgaggttcttgaggcttcccgagcttactggtgctcggaccggctgggctcgcacggtgcatcctccatggccgatttcattgagcagctcattcaggctcgttttgcgcaagagcaatatacatcttcaggatatacatcttcccgctggcaggtcagcatatcagattttggccatgatgacctatatgacatctttggagacatttcatctaaagggctctcactagagtcattgaagaaactaccaaattatgtggtcactgaccaaatgcgggactcctttggggaaatcctgtcttgccctatctgtctacaggaccttgtagccggtgagacagcgaggaggttgccaaattgctctcacactttccaccagccttgcgtggacaaatggctcgtcgaccatggctcatgccccgtgtgcaggcaacaggtgtaagataggtaaccggcttaaattagatgaagaaattagttgggtgaagtgaagtgtttgctcccacacttcgtatagagatactccgtcctgctgcgtacggtgatgtaaattactagtagaatctgcctgttttactaccagcgaaagcgcctctgtagaatctgactttgtttcttgcacccggtgccaatttgaaatgaaataagattgctgctgtcgcagcagtttctattaaaaccaaaaaaaaaaaaaaaaa

SEQ ID NO: 41037 - DNA, 647 bp, Setaria italica
  misc_feature (1)..(26): n is a, c, g, or t
  Peptide Sequence Number=SeqID_107011
nnnnnnnnnnnnnnnnnnnnnnnnnnattgcaaacatttttttggaagcgaactgcaaacttatacggccgtaatctggcaattgtcactgagaactacatcatggcaagtttcattacttagacaaagtggcaaacatcattaccaaaagtgggtgttaatccggtgttttcttttacttctcttcctaaaactaacactaactacatagtaattccctccaccatttcgtgcaacactagcagtacagtaatacatacgtacctctctcacttcgtagtccaaaataccaccccaaaaaactttcgcagctagaccctctccgaagacaaaaattccaagaacggcctctcgtcacgcggcggcggttccctcaacgtcgacctcgcccgccccggcggcggaggcggcctcttcggccgccggcgcctcgcggtcgtggggggacagccacttggcccgcatgtactcgggcttgcgccacggcgggaggtgcaggccgcgcttcttcaggctggcgcgcgcggcgtcggcggcggcggccacgaggaggcggagccggtcgtccttgcccacgaacaccgccggcagccgctgcagcagggaccggtacgccttggtcggccgcgccacctcgaacgcggacc

SEQ ID NO: 41038 - DNA, 650 bp, Setaria italica
  Peptide Sequence Number=SeqID_107012
cattgcaggcttcaacctaccagagcatcactatagtagtccttgttcacaggattcaagtaggaattccatagaatcctgataaagttgctgctttggaatttcctttggcagaacataggatcaggcaatgcgaggcttgaagtatccatcaggacatcgctgacttgacggtatgaaatgtagtccctggggaaaacaacctgagcctttatggaaggattgctcttcaggcccaacttgtgcctggtcgatctagcctgcttcctcttgtcgacagggacatggaaaatcttcatgagctgaagcttcttggcactctccagtagcatattggcgaattgcaggccgaaggtatgcgtatgcacccacaagtcgctcaggacgatggttttaacgctgtctctcagacaagcaacacgtccagccaattctaggagattggcgtagggagcttcagaatacaatgtgtgtctgatggaagggtcggtgtagatcttgatgttaagtgtttctacgcaagggaaatagttaagcacctgcagcataagctccacttgagcaggattacacaagttcaagcacagtccaaggatcttgacactgcggattgggcatgacggctccagaatcatgcccagcatcataat

SEQ ID NO: 41039 - DNA, 556 bp, Setaria italica
  Peptide Sequence Number=SeqID_107013
tgggtctttcgtactattgcgcgccggcacggtcatctcgctggcctcggtctacgacgccgacgccggcacgcggcggcgggtgctctaccgcggcttcgtctcggaggtcttcgtgccgtacatggatccggtggaggagtggtactaccgcacgttcctggacgccggcgagtacggcctgggcctctgggcgttcccgctccagcccggcgccgactgccccgccaacgccgcctacttggacggctactacgccggccaggacggcaagcccgtcgccggcgcgaacaggatctgcgtgttcgagaggtacgccggcgacgtcgcgtggcgccacaccgaggccgggttcccgggccaattgatcacggaggtccggcccgacgtgaccttggtggtgaggatggtgatgtcgctcggcaactacgactacattttggactgggagttcaagaccagcggctccatcaaatttgtggtgtctctcaccgggcttctagaggtgaaggggacgccgtacacgcacgccgacgagatcacggcggacgcgcac

SEQ ID NO: 41040 - DNA, 385 bp, Setaria italica
  Peptide Sequence Number=SeqID_107014
tcagattttacctttggtggaggcttttgagtctatcaaatttgatctggtgaggaaactatctgaactcataacttatcttgtgtactgaacatatcttctgtcttttcaaaactcaattgtctgccagtttttacattgtatttcaacaattcctgtctttgattgatagtctgaaaaacggtggcatttgtttattaattaggatagtcaaggtctttagataatgagaaattaacactgctctcatgtgtcttgcatatatgcatgcttgaagtgaaagcatactatcagaattagtagcttgttaattatccttttatttttgcatgtccttgtttgaccatagaactctataagtgagagattgtgtttatgtttttct

SEQ ID NO: 41041 - DNA, 348 bp, Setaria italica
  misc_feature (218)..(218): n is a, c, g, or t
  Peptide Sequence Number=SeqID_107015
tgctccagatggtcgatctgcaaagcctagctccacaacctgaacacacttcctttgatgactggtgggcaaggataaactccgaagttcctggagagattcagaaagggcttgattcactagtgattctaggggcttggtcgatttggaagcataggaatcactgtctttgatggcattcttccaaacttagctggtatgctgctgctcgctaaggnggaaatacatctttggggtttggccaaggcccgaggcctttcataccttgcagccattgcgacaggcggtttagatgtttctgctcatggtcgatgcacaattaagtcaaaggcgtgaatgcaatctaag

SEQ ID NO: 41042 - DNA, 351 bp, Setaria italica
  Peptide Sequence Number=SeqID_107016
tttgttcctttgttgctggagcttctcgactttggagcaaccttgcctgcgttttcttcttcccagtccagtccagggtgtttagcgtcatttccgcccgctgcagcgacgtcgcagcggcgagcaagcggacatggggagcccagacaagctagtgctttgtcgcgcctcgctgaaactatgatttcgagttactagcctttttgttcgcttgcgagcacgccatcctcaacagcatccctacatatcttatcactcagatcacatggcaaggatcgtcgcctaggacattaaagaaattgccagcgacttatgttaatctactggctcagcagagaaagacaggggagg

SEQ ID NO: 41043 - DNA, 480 bp, Setaria italica
  Peptide Sequence Number=SeqID_107017
cacagctaaactctgccagcagcctctagcagattctaacccatcttggatattccgtcttgcatagctcggcaagatgccgccctgtgactactcctagattagcagatagtgactggataattagtgcgaagatgaggccaatcaggatcacccagaggagctcatatttgtgattggctccagcctgcaaatctgtttccaagtttccgggatcaaggtaggccaagcataccatgaatcctggtccaacgtggcacaaaaaccttttccatgctggctccttagtcgcggcgctccctctccgtccggcgagcgcctcgacgtcgaccaccactccccgcaggcgcctgcgcggcgtccataggtcggcggtggagcagcctcgcacgatcggcgcgcgcgcgatgatgatgatgatgggcagggaagaaccgaaggaggaggaagctctccgactacgctggttgcgagatcggt

SEQ ID NO: 41044 - DNA, 785 bp, Setaria italica
  misc_feature (333)..(333): n is a, c, g, or t
  Peptide Sequence Number=SeqID_107018
atcattgacttgcataagttatactgcttcccttgtgatgaaggataaagcaaaaagtatttgttggaaagccacaatgagtttgagtttgagatagggacgggtgctgttggtaatcaacttgaatcatgtgtaactcagctatcagtcaatcaatctgcatgttttgtagctgaactgcctcctagggatttgatcctggctgcagcctctgagttctcacatgacctttccaatgtatctagaggtgaaccacttgatcttatcagttttactaaactcaacctttcgaatcaggctgcagcatatgtacatattttgtaacatccttgngctctgctgcttcctggatctctgtaaaggttttgtcaggtaactgaaccgttagaagatagaatggagaaagccttgttcagtcctccattatccaaacaaagagttgaatttgctgtgcagcacatcaacgagctgcatgctaccacacttgtaaatccccccatcattctcttgtcccttgtttatgaaaattattggttttttcatggtgagggtgcattttcaggttgattttggttgtggatctggcagccttcttgattcactgttacagcatccaaccacactggaaaagcttgtcggtgtcgatatttctcgaaaaggcctcacacgtgcagcaaagagtcttcatcagaagctgagcaagaaattgctggtgcaaacaactgttccaactgctgtgctctacgacggatccataacagactatgattctcgcttatattggg

SEQ ID NO: 41045 - DNA, 2126 bp, Setaria italica
  Peptide Sequence Number=SeqID_107019
gggagggtacctttgtcggctattgctgcatgtgatgtgaaggtcaatacattgtgtaaagtgattgaccctaaggcagaatttgatcctctcttgatcttgtctttagtttacaatgctgcaaaacaatctcctggagtctcggtcagtgatagcaacttctggattcagagtcaaaagccctattctccagaggctgttgacttggcacttaagcgttggtctggtacatcagaccccgtagaagtagaagcgattcttgttccctgtgtgttggaggatgaactgaagatagtaagaattaatctacgagacaatgaacattatatgagttatgtcgcagaaaagctcacagcgagtgattcctctcatgttcttgtatcaagaacaattggaaaagcatcttccgagataaggctgtattttgcagccccagatgtacattttgtttctgatatatcaaaaaatgtgcttgcttgtcatggggatggtgacatcaactgccaagtaaataagcgagcctcctatatttcgggtcaaacaatttatggagatgcgcttttggcgaatattggatacacaaggagagattcagaacttcacactgaagatgtcaatctatgtacctattacaggatacttctgggaaagttacctgatggaaattgtaagatgtctagggatgcgattcttgccgcagagcttccatctgtgtactctcgtttcagttggaaaggcctctctccacgggatctcctttgttcattctgtcgcaatcagaggttatcagagcccctttttgctgtcagtagggtctcctgtgatatgttaacatcagctgtgagctctgaagaaagaggagcaccagcaaagagtgtagaaaatcagttcaatgatgttagaaccgacaaggaaaactcagatagtttcaaatgtgaagtgaaaatatgttcacgaaagcaggagattttactagaatattctgcatctgacacttggagcaaggaatctgacgctattcagaattctgcattgaaggtcttgatttggttcaacaattatttcaagcaaataaacacaaaaagggacaagctatatctttctgagtgcactgatggtttcaagatacatcctaatatttttctgcaagaatttgtaatgtgcttatctgtttatggcaatactggatgcaatgattcaggaatgtgcagtgcagttggggcattttctatggatacactaaagaaacattttgaaagcaccacaactttaacacacatcgagggtccagattctggtgtattcccatcccatggatcattgacttgcataagttatactgcttcccttgtgatgaaggataaagcaaaaaagtatttgttggaaagccacaatgagtttgagtttgagatagggacgggtgctgttggtaatcaacttgaatcatgtgtaactcagctatcagtcaatcaatctgcatgttttgtagctgaactgcctcctagggatttgatcctggctgcagcctctgagttctcacatgacctttccaatgtatctagagagagctgcttcctggagttctctgtaaaggttttgcaggtaactgaaccgttagaagatagaatggagaaagccttgttcagtcctccattatccaaacaaagagttgaatttgctgtgcagcacatcaacgagctgcatgctaccacacttgttgattttggttgtggatctggcagccttcttgattcactgttagagcatccaaccacactggaaaagcttgtcggtgtcgatatttctcgaaaaggcctcacacgtgcagcaaagagtcttcatcagaagctgagcaagaaattgctggtgcaaacaactgttccaactgctgtgctctacgacggatccataacagactatgattctcgcttatatgggtttgatattggcacatgtcttgaggtgatcgagcacatggaggaggaccaggcaagtttatttggcaatgtcgtcttgagctcattccgcccgacggtgctcattgtttccactaccctaaacgacgtaaaccctaacctccagaggtcagctatgcccaacaaggacgacgaggcggaacgaaaacg

SEQ ID NO: 41046 - DNA, 398 bp, Setaria italica
  misc_feature (381)..(381): n is a, c, g, or t
  Peptide Sequence Number=SeqID_107020
agagtcttctctcatctcatctcatggccctcgccagatgcaatactaagagagccatttaccttacagctgttgttttcctgatccttacgatcatatcttcaacctccccatcatgccaaggccaagaccagccccagccccagccccaggcgccccggcaccgccattctcccccaccacggcgagcgacggtggctccacgaccgccgtcacggccgttgtggtggtggccatggacaaagaaaacgtgctacccctacaatgacgtatactgcttgactgaagactgcaaatggatgtgcggagcaaacggctttgatggctatcgtgccatctgtattaagagacggaatggtaaatgggattgctgctgccacnttaagcagtgtgtaatt

SEQ ID NO: 41047 - DNA, 292 bp, Setaria italica
  Peptide Sequence Number=SeqID_107021
aaccgcccctcccgcctcgcacctctctcgcgttcgaggcgaagccgacgacgagctcagcagcgccgacgccgcaccgcaaacggctcgcccctccctcgagaataggtgtaaactacagtaaagtatagtgatgtggtgtcgctgggtttgctgcaattgccaagtggatgaatccgatcagcgtgaaaatgggcaattcaaggtcacaacgaacaatgctgacgggatgacaaagggattcaaagattcttctactggaaaagtcgagcctcagaatgctgcctccccc

SEQ ID NO: 41048 - DNA, 473 bp, Setaria italica
  Peptide Sequence Number=SeqID_107022
ccaagcaagtatatatggtaatagttaacatggtaacattccgattccaccagaaactagcatcctagaacgagcatactttccaactgtatttccgccaacgccaactgaggtcaggacttttgaggaacgcacctacacatctactctgctcttagcagcagtttggttttagacgacggctgttttagctaacaaaggcaaaagactataactcctgttcttccccaccagatgtacattcaccttagctgtcagcgaagcgagcacagatccttcgctcgatgggagacctgcaggatgggcactctgtcatgcccacctcttggtggcgttggttgcagcctgcacaaaccacctgatgcccacatgggaggaaaaccaccgaaacctcctcttccaagcacatggcacattcttgctcccgttgtacggaatccatcgcgaaccctggagggggcatgaacattgcg

SEQ ID NO: 41049 - DNA, 1438 bp, Setaria italica
  Peptide Sequence Number=SeqID_107023
aactggaggcatcctgcgccacctcaagacgctcgtcgccgtgggcctcatgctcggcatgatcgccgggttcctaaccggcagcatcttcttctcctaccagattgggctcgagggcaaggacgccgtcatgtccctcaagtcccatgtcgagaagggcaactactccgagaagattgggctcaagaagtggctggacgacaatgacatccctggcttggtcgatcagtactccgccaagatctatgacaccgtctgggagcaggtcgaccaattggcagtgcagtacaaccttaccgatttcactagcggattccggcatttcttgatcagccaatcagttgacccaaagagcaaggcgctcatcagtgccagaccgcacccatactcaatgaagttgcaatcaattgctgcgcgtgtgaagaaaagggagtggttggagatttacatggagctggactcgttctttagggagctattgatcacaagggaggatttggtggtcaaggccaaggagctggctttgcagggaacggaaattgcaaagaggctgctgtcaagcagcacatcagtgctcggtggtagtgccaatttgatgttatccgttgctctccgcattgtctcaggtgcagctgaggtggtcaattttctatcgcagttgatggtcttcttgtgggtgttgtattacctcattactgtagagggaggtggagctacggagcagatcattgatcttttaccagtgtcaaaacaagtaaaggaccgctgtgttgaggtcatcgaccatgccattagtagtgtcttgttggccactgccaagattgccatattccaaggaggcctgacatggctcttgttcaagttcttcaaggtgcactttgtgtacacatcaactgtgcttggattcatcagcgcacttgtgccaatacttccattttggctgtcctcaatattcgctgcagggcagctgctcatggaaggtagatatgtgcttgcactggtggtaactgtgatacacctcacactgatggattatggcacaactaccattctggaggatatacctgggtacaatggatatctcaccggcctcagcataattggtggcatgactctgtttcccaatgctttggagggagcaatattaggtccccttataatgacagttgtcatagcattgaagaacttgtacacagagtttgtgcttgctgatgcagaggagaccagcagctagcatcagatccaaagctaaattacttgtattttgagagaagtacatgtgtaggattttttacctgctatatttacatgatggttttgctcttgtattgtacctgagagtatatgcacagccattgcagcagttgtgatccattccttcttgttgcaacctgccctctctgtagctgtatttaatatatattgtcgttccaaccaa

SEQ ID NO: 41050 - DNA, 415 bp, Setaria italica
  Peptide Sequence Number=SeqID_107024
tattagacaataaaatagttcttcatttcagaataactgtaaacaagttaacgagggagtatgaaagtaaatataacatgaaacatacatgctgagtgcgtccaactgtgtcagtgtgtcaccgatacagagacacgcactttttcaaagacagaaattcagcagcatggagaaagtaagcttgtatatgggcacagctgtatattggattattgttgatacataaaaaaaatctcaaccaatggggggaaaagaccgcccccagagctttgcattaagaagaatctcttactgtcccggtcgagaaaagaccccgaagaccggctgcctggatgcaccacagtgcccaggacacatgggccacgtgcatctcgctgaaggcagccgcagtggttacatgtataactaggaacac

SEQ ID NO: 41051 - DNA, 644 bp, Setaria italica
  misc_feature (558)..(558): n is a, c, g, or t
  Peptide Sequence Number=SeqID_107025
tatgtgtggaactgctagggcacaatgtgggtctttaggatttctaacttgcactaggagccctatttatgtttgtttcctgttatgggtgcacatagttatacttgagcttctgattggcaaggaagggcgatgtaactatgcatactgatgtttctgtgggttgggaattgcttgtgtctcgttaattagatgcaaaagagggctgttgatgtgtgtactcatcaagggttgactctagtgtttttcccccacacgggataatagggttggtttaactgcattgtgttgatgaatggctggatagagttgtcaacatcaagataatatgctggtggaataaactttcttggatatcaaggtctcaaagcacacgcctttaggtctatggtctaccctgtctattaacaatgaggtgagaaatatgagcttacataactaaaatagtccttgtttccaaccgaaagcatcttgatgcatgataattgtgaaattgttagatctgcaattagactactgaacggattgaatttctcagtttaaccacggctaaaaacngttttattccaaatgaaagcatctagatgtatgttggtttgcaaagttgccagaatcgtgattaataaactgactaaaacaaatag

SEQ ID NO: 41052 - DNA, 373 bp, Setaria italica
  Peptide Sequence Number=SeqID_107026
gatctcgcattccctctcttttgatctcacaggacactactgtccgaacacagcaaaactcccctcattgagcctcttggcaacagtttccactttttatttggctttgctgttcgcataactgcaaacctcctgagcacacctgtttttaccatcctatgtgatgcgcacacatggtgctcggcagcagagggaggctgttaaaagggctccaagggaacaaatgcaatcagtttttgaggccttgaatactcttgggagcacgaagtggagggttaacaaaagagttcttagtatcattgacagaatatggtcaagtggtggccggcttgctgacctggttgatcgcactgatgttccattacctgagaag

SEQ ID NO: 41053 - DNA, 743 bp, Setaria italica
  Peptide Sequence Number=SeqID_107027
ttttttttttttttttaggaagagagaaaaccactctttaactctttattattaaattattatcttacaactacaaaattagctatgaaataatctttcgtcagcaccagccaagacgtgttccgctcagcagaatatccctctatagttcaagaacaagaaaaataaatatattagtggaggccaaaaactacataattacatttacaggatcagtaagtgactttgctatgcgtaagcctgtgagatcaaaagagagggaatgcgagatcaaaaaaggacactactgtccgaacacagcaaaactcccctcattgagcctcttggcaacagtttccactttttatttggctttgctgttcgcataactgcaaacctcctgagcatatctgtttttgactacttcaaggcaacaataatgccttgccttgtgcctgtgctcgaagtatccaattgtgcagctcagcgagaatatcttctatatacttctgcaaagccactctttgggatatatgttatgcatgatgtcttgaagatggtacccatcagccagtagaaggtttgggttctgtactcaaaaactcaggatgggtccaaggctgtaaataggcagcagagtgtggggaccatgcaatgtcatcataattgtgctagttgaaaaaatccggagactcaaggacgtccttcatatcaaagtctccccttcttcttggtctaattggttgggtaatttttaaacttta

SEQ ID NO: 41054 - DNA, 439 bp, Setaria italica
  Peptide Sequence Number=SeqID_107028
aacaacaactgcttatttctacttgaaagattgtacacagaataaatgcatactgttttgacaatcaaataaaaggatgttgtgcagcaacaggtttgtgttatcagttctcagcttctacatttcaacgctaccttaagaaaaaactattggatttctctgtagctggcagagcagaccttttatactgatcaattaacaaaacatctatagtaattcatatcagatttgaaaggtaatcttgtaatgtgcaaactgcaaatttgtaatactgtcaaaacttttcttgacttgtgacacataatgcgtattttgtggtgatgcagttcacaaactccactctaacaaaatctaatctgaacaggcatgccctgcaattgcactgccatagttgctaatatttgtcaactagctaaaatggatgacaaatagacattga

SEQ ID NO: 41055 - DNA, 366 bp, Setaria italica
  Peptide Sequence Number=SeqID_107029
gccttgccgtcgacctggaactgcttggcgccgtacttgcgccagaagtgccacggctgcatctccaccttgcaggcgctgctgcagctcttggaggctgcgccaccgccgccgccgccgccggcctctccccactccctgccggtcttgtccttgccggcgcccgccgacccttcgatcgacacggacaggccgtgggtgagcaggttcctgcaccatgtcaccgtcaccaggcggtcgtggccggcgatcccggcgcggtagaccagcgtcaccgcgctctgccccgacctggttgccgccgcgggcgccgggacgtccgggagcttctcgccggccgagaagcacgacgggaccgagaacaaa

SEQ ID NO: 41056 - DNA, 1075 bp, Setaria italica
  Peptide Sequence Number=SeqID_107030
ttttttttttttttataaaactgaagtgatactctcgtccattttattcatgtttgcttcacaggaaacataagtgacaggaaacggtaaacagcacagcgataggaaaaaaaaacaaccgcgatctgttacagtcctactcgatccaggcatccagcgtttaccagcgagacactgatgaacatacctcgccatcgatccatcgagaactgcagcgccattagcacatggaccacgatgcatcaatgcgtgcgcatgcacgctagctaaagcactagctcttattgacctctagtagtgatcggagacagccatggccatggaaggcgtctctcttcttcttcacctcatgcatgggtagtgcagcttggccctgggtcactgccctggtatccgtcgaggcagtagtagtagcggtgactgccctccagctcgaagcagcggttgcaggtgcacttgtccaccttgtccatgcagtaccacacctgtccctccgtcgtcggcccggggacggccttgtcgcagcatttccatggcctccccttgccattttctcccttcttcgaccccctcacaactgccgccatctctttaggaccggcatggacgacgaccacttggttcgtcctcccttggtgctcgtggcacatgggcgcggggatgcctctgtacacgtcctggcaaatgtagcgcggagggtccgagtccctcaccttgccgcactccttgcaggcgtccgagcactgctcaagcaggtcccggcaccggcagaacgctgggatcgacttggtgcatgtttgcaggtcgcagcacttccacggcctctcacctgacgcggtgtcgctgggaaggcgaatggcgccgcccatgtcctcgccggagccgccagccaccgccaccgtggtggcggcgggggtggagagcccggcgacaaggagcagagcctggagcgaaagcatcatcagcaggatccttgaagcaactcttttctccatgtatgggtgtggctgcctcagtcttgttactcgtgtgtaagttactttagttttaactttaacgtttaagtttaagttaa

SEQ ID NO: 41057 - DNA, 460 bp, Setaria italica
  Peptide Sequence Number=SeqID_107031
taagacaataaaagacaacaaaacaaaattaagttgtcagagcaagtaagcggaaaatacaacacatgatgcattgatctctatttgtttggatggaaacatgcatgctgttgattaacattatatctctatttgttagttgcataatatattaaatgatctcatgtgcatgttgcctagctatttacatatacgtaaatggattgttgctccataccctttctcaggttagtcaagcttgtgttggatgcatctaatctataatatgtactttgaggtcatagctaatcattaaagaaaaaaaacatggaacaacgaagcctaaaatgtgaaaattggtccacttaaaccataaagctatatactaacacaaggtaagtggcttaaaaatgacaccatgatgattgaatagagtacatatgtatgcatcaattcttaaacattatttgacttctaggcc

SEQ ID NO: 41058 - DNA, 415 bp, Setaria italica
  Peptide Sequence Number=SeqID_107032
cgcggcggacggtggtgacggcgaacccagtgaacgtggagcacatcctcaagggcaacttcggcaactaccccaaggggaagcccttcaccgacatcctcggcgacctgctcggcacggggatcttcaacgtcgacggcgagctgtggtacgcgcagcggaagctggtgagccacgagttctcggcgcgagcgctccgggagctggagttcgcggtgctcgaggacgaggcccgggaacgcctcgtgccggcgctaggcctcgccgccgccagcggcgacgccatcgacatgcaggacctgctccgccgcttttccttcgacgtcatctgccgggtgtcgctcggcgttgaccccggctgcctcgacccggcattgccggcgccaaggctggcggcggcgttcgacgccgccgg

SEQ ID NO: 41059 - DNA, 374 bp, Setaria italica
  Peptide Sequence Number=SeqID_107033
atcatctgcaatcatgagactaagcggcagttcttcgaacagaaacattttgctcttcctggttatgctgcaacttttataaagaagatcagagctggtatgcttctctttctgtttgagcatgaggagagaaaactctatggagtgtttgaggcaacttcagatggagcactgaacattcttccagattcatgtgcttcattatgcaaatttcgaccagctcaggttcttttcagaagagtttggttttgtaagcccctaactgaagctgaattttctgatgccatcaaaggaagtagtctcctccctcaaaggtctttcttggtatatcataccaactaggttttggatcttgtggacttatttacttcaag

SEQ ID NO: 41060 - DNA, 465 bp, Setaria italica
  Peptide Sequence Number=SeqID_107034
ctgtaagagacctgcagaaaaggatgatatgtttctgacattagcaaagaagccgtacacagctgctgggaaggagctaaccatgttaccattcccagaaaagggtctggagttccgtggatccagaccaccagatccacaggcacgagacatgcctatctgtctcgacgagcctgaagcggatctccgacttggacacagagagtcacaagccacatggtcagctcctgccaacgcacacaggcctctgaagctgaaacctggagcgaagcatgtcctgcagccgagtgccagcggcgtgtaccaagaaaatccctggcccgtgcattcagttgcgccactattggccccggagaatgacgcttgtacactgagtacgtccaagacgcgaggcgccgaaacctacaaattctagcgtgtcttggctgtaagtgaagtacctgtatgaaactactcacactgagt

SEQ ID NO: 41061 - DNA, 635 bp, Setaria italica
  Peptide Sequence Number=SeqID_107035
ggacgtcttccgcgacttccgcgcgcgccgagccggcatcgtcaaggcgctcaccacggatgtggagaagtactactagaagcccgacccagagaaagagaacttgtgcctttatgggttgccaaatgagacttgggaggtcactctgccagctgaggaagtacctcctgaacttccagaaccagcacttgggataaactttgcccgtgatggaatgatcgaaaaagattggctgtctctagttgcagttcatagtgatgcgtggctactgtctgttgcattctactttggagctcgctttggattcgataaagatgccaggagaaggctcttcaccatgattaataacctgcccactgtttatgaacttgtgacgggggttgctaaaaagcaatcaaaagcccccaatggcagcagcaaaagcagcaagtctaactctaaaccatcaaaacagaccaactctaacagcaagcccgcgaagcccgctcacccaaaagaggaggaggacagtggccaggaagatgcggaggaggatcaggcatacaattgtggctcctgtggggacagctatctgaacggtgagttctggatctgctgtgatgtctgtgagaagtggtttcatggcaagtgcgtcc

SEQ ID NO: 41062 - DNA, 1306 bp, Setaria italica
  Peptide Sequence Number=SeqID_107036
cctgctccctccacttccagtccaccacaccaccaccactaccctcgcttccccgcaaaccctagccaagggaggcggtggccggcgatggacggcgacggaggcggcgctgcggctggggccgcggccgtgcaccaccacacgcgctcccccgaggacgtcttccgcgacttccgcgcgcgccgagccggcatcgtcaaggcgctcaccacggatgtggagaagttctaccagatgtgcgacccagagaaagagaacttgtgcctttatgggttgccaaatgagacttgggaggtcactctgccagctgaggaagtacctcctgaacttccagaaccagcacttgggataaactttgcccgtgatggaatgatcgaaaaagattggctgtctctagttgcagttcatagtgatgcgtggctactgtctgttgcattcttttagctaaaaataattagaaagttattggagaacactttggagctcgctttggattcgataaagatgccaggagaaggctcttcaccatgattaataacctgcccactgtttatgaacttgtgacgggggttgctaaaaagcaatcaaaagcccccaatggcagcagcaaaagcagcaagtctaactctaaaccatcaaaacagaccaactctaacagcaagcccgcgaagcccgctcacccaaaagaggaggaggacagtggccaggaagatgcggaggaggatcaggcatacaattgtggctcctgtggggacagctatctgaacggtgagttctggatctgctgtgatgtctgtgagaagtggtttcatggcaagtgcgtccgcatcacccccgccaaggcagagcatatcaagcagtacaagtgccccagctgcagcagcaagcggagccgggaatgacaaggccctgggacaggtgtgctccctgttgacagaagtgtttagaatccttaggtagcagcgaagcggtgtgggttaatcgcttcgcctgtttagtggaccggtgtgtacgccggctattgtacttgtttcctggtgcgatgctgttgtaatggacatggtgttagctagttgtgatgtgtcgtgtacttgtgttagcaggctaactgctgtcatcgtagcgtgagatgaactgctggagtttggaaactcgcatgttaagtaattataagtgctgggttagtgtgtatgatgattgcctcctgattctggcaaagctagtgagcactgggccgacattgacgaaaacttcactgctgagtattagaaccttgatgaattaaactaaaaaaaaaaaaaaaaaa

SEQ ID NO: 41063 - DNA, 362 bp, Setaria italica
  Peptide Sequence Number=SeqID_107037
ttacttggtattggtctaccgtattgtagggtaaaggtattgttgttcgtttcaccgttcgacggcgagacttttccatgcacatcgagctgttcttgctgcccgctcgccggtcttccgggcggagctgcttggttccatggccgaggcaacaatgtcgtgcatcaccctgcacgacattgcccctgcaacattcaaagctatgcttcagttcatgtacactgatgtcctgcctggagacgaagagctcggggactgtccaaccgagatgtttgagaatctgcttgttgcggctgaccgctatgcattggacaggctgaagcttatgtgtgcccacaagctgtaggaaaatgtttcagtgg

SEQ ID NO: 41064 - DNA, 336 bp, Setaria italica
  misc_feature (1)..(17): n is a, c, g, or t
  Peptide Sequence Number=SeqID_107038
nnnnnnnnnnnnnnnnntttttgtctattactttctcatcatgcaataaaaatttgatatggaaaaataatatcacttgtctattgtgccgcctacctgctacaaaacttcattctccctcagagataactttgccgcttaaaacaaggaacagaacatacagtacagtgactaaatcctgaagaataaaaaaacaatgctacaatcattggacaccagcagctgccttgttcagttgttcaaggcactctgaggagagattgccgatgatgccaacaatcacttgacttatgcagctgccttgttcgggcactctgatgagagatggccagcgat

SEQ ID NO: 41065 - DNA, 864 bp, Setaria italica
  Peptide Sequence Number=SeqID_107039
aaacttaaagttgcaacaaatacttcgtattatgtgagccttcgcagttctggtggaagctgcacaccatgcattactgaatttgatttaacaaggccttgcagctccatcatttcctccttgttgtattttatcctttcatctacaaagcggatatcaggaagcctacttgggctggcgaaactgttaacaacttttgctttcacctgttgagattgcctagccttaggttgggacctaccaacactatttgccttaagttcccacatgagctcatgcctcacttcaatcataggatgacgcttacagaatgttgaaatagcatctcctgttaagatccaacagccgcttaagtccaacacacatagtgtggcagggggtacaaattgcaaaagcccggagctggacaatatattcccacagaacccaagatgaatcaaattggaagctgcagagagggcatgcaatgcaggatcagacaagaaatcacttttcaggtacaaatattttaatgctgcaaacgatcccaagggaggtataacttcagctgatagtggtgtatcctctagatttaagctttccagatacttgagatgctcaaacgcagaaatagacaacattttgtcagcatttacttcagcatacgcaaaacctttgatactcgtatggctcaaatctactgttctcagaaaaggcatcatgctgatatacgctagagcagagtcatcaatttttgtatgagataaagacaatgaagtgaggtttagaactgtccctgccagaacacatagtgcctgagaagttatcccagtacccttgaggctcaaatatttcaagtttgctccaatttttgcaatatgttca

SEQ ID NO: 41066 - DNA, 1086 bp, Setaria italica
  Peptide Sequence Number=SeqID_107040
tcgtgtcaatgaccgcgagcttgagttattgctaaagaagaaacctgcccccatttgctatgtttggtgtgatccctccccctggatgcacatatctgagggcatcataaagactctctgtgttaataaaatggttaaatctggttgcaaagtcaaaatcgtaatggcagactggtttgcccggatgaacccttatattggtggcagtctaaataaaatgcgggctattggcttgtacaatattgaggtgtggaaagcagctggcatggctcttgatagtgtagagctagtgtggttgtcagatgaaataaatcagcatgccaatgtatattggccactcgccatggatgtttcaagaagaaccactctgcgtagaataaaagggttttatgggagtagacatccagcggttcagccattcactgctgctgatgtattttacccctctttgcagtgtgctaccatattatttcagaaggttgacatatggctgttgggcaaagctcagcatgaggcgaacttgttagctagagaatatcgcaagcgtgcaggacgggggaataagccaattgcggtgtcacacaaaatacttcctaatttattactacgccctgaagaagaacataggaggaataaatttctggcgatctacatgcgagatattgagtttgatatcaatagaaaaataatacatgctttctgccctccaaaattggtggaaggcaacccgtgtttggagtacataaaaatatatcatcttaccatggtacggaaagtttgaggtggttcggaagatagaggatggtggtgacaagacgttcctgagcatggaggagcttacagctgattatttaagcggggctctgcagcctgatgacttgaagctggcccttgcaaagtcattaaacaaaataatgcagccgatccgtggtcacttcagaagcaatgctgaagcagagaatacagtggaacggattaaggaatactacaagccaaggtgaggatcagatggctacatacacttgggtcgcaggggaaccgtgcaacagtacacttggcagtggacacattattatccatgtaatt

SEQ ID NO: 41067 - DNA, 392 bp, Setaria italica
  Peptide Sequence Number=SeqID_107041
tcggtaattaatcggaataatctacaaattcaactttgacgccacaaattcacccccaaatttccaaatcccaaaccctagatgtcgtccccaacctgtggtaagatgagttatcagtcgaagaggacgcatgcgccgtcgcctctggaggtacaacaaccaggcatgacggactcgtcagctcaaggtccttggtgggcacctgcaagcattggtgcatctgcatatcctacccaacctcctgagctcatgcgtaaatttatttcaagatcgtgttgtgatgtggtcattaaatttcaagactatgttgtgatgtggtcattgctgctggtgatagtaattccatgtatgcattctctaatctgaacttgttctactcattaacagaacat

SEQ ID NO: 41068 - DNA, 838 bp, Setaria italica
  Peptide Sequence Number=SeqID_107042
cactgtgatgatgaccccgtgcagagcaacaaaccgtacggatttattgctgctcagcttcttgtccacgagtaggatgatgatgagcagggatgctatgaatgcggtggtggtccagacgaagaacgcctggtagcggctgaggtagtgttcctgcagaaccgggtcgctcatcttgtggttgccctcgccccagaagccacctggtggattcagcccggccacatatgtgatggtgactgcaaaggtcgcgagcaacatcaagacctcccgcagttcgtcttcgtgctcaagtgtgctggtatccttgccttgcttctcggtgtcatcgccttgcttcttgggcagcaccaccgccagcaccgaatttttggagatgacaaaggcagagaaagatattacaatgtaggcgaagacggcacagaccagcaaagcagagtagattgttgtgaatgtatcccggcagctgccagcagcataggcccccatgaggccaagtaaatcgagcaccatgaccacacgcagcagagcctcccagcctgtgttcgtcccatcaaggacgaggaggaggaggcagaccaccaacgatgcggcgaatgcagtcgcgttgcagtagtagaaggcgaggtagcggctgtggtgggcgtactggaggatcgggtcgcctgcgcggtggaggccatccttcgtgtcctcctgccaggctccccctggcaggtttagcccggcgacgtacgtcaccgtcgccaccagtgtggccagtagcaggaggtacttccgcagctgaaactccgtggaatgactggaaggcttgttgcccacagcaggctggctggaa

SEQ ID NO: 41069 - DNA, 1000 bp, Setaria italica
  Peptide Sequence Number=SeqID_107043
tgtccatgcacgcaattgttaattttcccagcacagctgctatgtgctatctgtgcgtaaagcttcttaacccactcgccacgtcgattttttgtgagtgcaaaatttcttggtcgcgacccggtgaaccctcttcagcttcccaccgttgtcctctgcggcctgtggatgccgctcaccgtcctcaagatcttgatcttgccagtgcacggtgctgtggtgtgccgtctcggcttcggccgtcgcatcaagaagaggagactctaggctagtccttctcgatttggtgcgcttgggatcccgagcgacggcgtcggcatggagaacgtcttctatccgagataaaactgcaaaggctaagctctcaagggtcctggagtagctctccaagatggcaaacccaacatccttgttgtgctggatcttgcttatgtcgagtgtagattgagggatgccagggaacttgtgcttgaggatgaggagcgtcgtctgtgctcgctcctcgaactcctctcgcttctccaagctgacaccggagccccacgacagcttgttgcatatcttcctctgccagatgacgacggaggcctcgatttggtctttgaggtcgacgatcttgtgctccgttgataggtctactgaatttaggagctcattggggtcgaaaatgtcaccggttatgattctgtacatcgagtccccaagaatggacctcccattctttggcagagactcgatatactcttcggggatctccatctctgtgatgacatcagcgttgatggctatggccgccttgagcacttgcccaacaagctccttctggtgctgaaggaactttttggacgcgtccgacaggccctcatcaggaaccctggcggtcgggatccaccacttgtcgcacgagtcgtcgtcctcgcccccgtccgcgtctttcgccacgtaccagaactcctgggcctcgtggaaactgtcaaggtactcgagtagcatcgcgtcg

SEQ ID NO: 41070 - DNA, 392 bp, Setaria italica
  Peptide Sequence Number=SeqID_107044
ttctaccgactcagtgtgagtagtaaatcgagaccgcttttggaagggtttaggggaaatcggtacagctgctcgaactgatcaccaatttgggggagtttgggtaccaaattattcaacaaaaactgaaaaacacaccaaaattactcgaaccaactggaaaatggcggaattgtggctccgttcgattcaacccgtcaacgctggaaaacccaaccagcaagactgacctagatcgacagcaggagtgagcaaatttgttcgactcccccagcgattccgtaaatcgcgacccgaattccgaagcgaagaaaccggcaatcacctgatggttcgagcgggaggggagcaggagcgcaaccgcccgcggcccacgcccgtgctgcactggg

SEQ ID NO: 41071 - DNA, 1166 bp, Setaria italica
  Peptide Sequence Number=SeqID_107045
taaatattcttcatcgtgaatgaattgggtgtatttacataagtacaaggtaaaaaattagcattacaaccagtctgaagtgactggaatgaacttgagcaattacagattgtacaacatctttacatatgattggttactaaccctgtaggcagaacaataccctaaccgtacgacagcacttgctccgatttgcaagtaccgactaaacctaaactattcttctacgagcagtgctgtggcagctggactcgagagcatacgttagcatgtctgtgcaaaactggtcgtctggtttcaaccacagagccttgtggtaataatttatggcagcctcaaaattgtccataagatggtaagtataagcaagaccagcgaatgcgctcaagcttttggttggaaaagtgagtgccttttcataatatgacactgcattatcatatttcttgagtttccgaagtgcgtgcccaagattcaccaatgttggctcccacatttcattctgagaggatgaagtatggcccagtgtcaactcaaaaaattgaactgccttttgatactctttcatattataagctacgacgcccaactcattgtatataagtggatcagatgggcaaatggattttgcttgcgtgaaaaactgctctgcaagtttgaaattgtgcatccgcacatattgcatgcccatgtacaaagttggcagatgacatccaggaaacaaccgagctgctgtccgaaatgcagccattgcttggtcgccctcctcttgagcagcataagcaatgcctgtacctatccaagcaggaggaaacgtcccatctaaccctgtagctttgccgaagtatctccgagcttgatcatatttcttaatgcagtagtaatagcaaccaacagcaaaccatgaaagagctttttgaggataatccttcactaagttgcaggccaaaagataaagatcattggaatgaccaagctccattgcagcagccaaatgaactaacgtgcactttaaatggaaagggtctctttcaagtaatgaagatgtcagctgccaacatttttggtactctccactctggtggtagtattcagctttgcaggccaaaacatcaatgttatttttcaaagtttcaccggaactcgaggacgaaatactgcaagat

SEQ ID NO: 41072 - DNA, 120 bp, Setaria italica
  misc_feature (115)..(115): n is a, c, g, or t
  Peptide Sequence Number=SeqID_107046
gtttcattttagtatcgtttagtttgaataagcctttataatgttatgtccctgacttttaaacgaagtggtttgttttaggtactagtattgtatgttaaagcaactctcttanggttg

SEQ ID NO: 41073 - DNA, 837 bp, Setaria italica
  Peptide Sequence Number=SeqID_107047
tatacattgttgcttctttgatatactttcgaggggaaaaaatatcccattcatgtagttaatcatattgtgatgtactgtgtaggtccttatcctaggatttggagccattggcattgaagttgccaagaggctcaaaccctttggagtaaaagttcttgccaccaaaagaaattggtcatcagacacactgccatgtgatgttgatgagatggttggcaagaaaggtggtccacaagatatgtatgaatttgctggagaagctgacattgtcataacatgcatggccttgaccaacgaaacagttggaattgtggatcacaagttcctttcgtcaatgaaaaagggatcatatctgatcaacattgcgagaggacgcctcttggactacaatgcagtgttcgatcacctcaaatcaggtcatttagctggtttgggcattgatgttgcttggatggaaccatttgatccagaggatcctattctgaaattcccaaatgttattataacaccacatgtggctggagtcactgaatactcttacagaacaatggcaaagtctgttggtgacactgccctccagcttcactcaggggagccattcatgggaatagaatttgtcaactaaagtgcaggccatattagctattgaattcagatgagaattgctgtttctgtagggaaataatgaatcggcaacttttaggaacatgcaacaagatgctgtcataagtatactatagggtgtgtgcatcccccgcttaggtcgggagtgttttcaagactctgcatcaactcaatgtaatgctcttgagaattaataaagctttctttgtt

SEQ ID NO: 41074 - DNA, 1044 bp, Setaria italica
  Peptide Sequence Number=SeqID_107048
tggaccaagtgcaaatttagggattctgggttcattcacgatggggataaatgggggttcattttctttccgttgatgagggtaacaactaacaattgagcagattatatgagctgttgatcaagaattaaagacgtgttgttcatagattgattacgtgagctacgtgagtgaatgagtggtatatgttgtaggcataggttatttctcttgccagagtttcgatttcttggtggaagttttgttaaggctgtaacctagtaggttgatttgagaattaaggatatatctggttatctaacataacggacgattgatctgtcggtacaccgtattacttgggatagtccaaaatattcttggagactcactaatcttattgctagttaccattgaatttgttgaatgctaagaagcaactagatcttagtccaacaagctgtacaaataggaatatgcaccttatgaaattaacttctatttctttttagaattattcatattactgtgactgaaaacgggagggagagagcaaatggagcatatgctgatgtctgatttaaaagaatgcaaaataaattcaagtcatgtggaaaaatttattaatcattttcaatgctggttgggggatttgtcactagattcaatattttgcagaaaaaaacactgtccagggcattttgagtccattgtgaagttcatgttttctgaaatgaatagtatagttattggtgactggcatagattagtatgtttctagagcaaaaacctcatttctttcaaatctagattctgtaaccatgagcctgttggttcaaattgtttgttcatctggcagggttggttttgaacccccccagtaccttgactagttttttactaccttgtattgcacccatggggtacaggttaagtagaaagtataaaatcaatttctgattaaagtatttgttgtactttttactgaaccgtggggacctgactactgggccctgaatttttcagttacttactttttcctctgctaatctggaattttgctta

SEQ ID NO: 41075 - DNA, 518 bp, Setaria italica
  Peptide Sequence Number=SeqID_107049
tagtacttacgtaacgttggtcgaaggtagaacctctgcgaatgtagtcgttgttgctgacgtggaactccggtccccgcagatatgtgaattccacatctgtgccgttcatgtcccagcaatagatgtccccatagtcggacactgcgaacaccttcccattgtgggcagtgacgtccgtgtagtgtactcccaaccccgatgggtccttcaatggcgtccagccctcgtcgccgtccgccgtgaaagcaagaaagtccaaggaggcactggagaacattgcgacggccaggtagccgttggggtgcgccggtgtctggcacagtgcgacctgctggagatggtgcagcatatagtcgacagagatacagagtttataggggtctgcgaatttcccgatagtgtcgaaggacggcaaggggacccgctcgcgggtgatggggttgaggagctcgacgccgcacctcacgtccgtggtcaccagccagtcgtccttccgccgatccaggtccggttcc

SEQ ID NO: 41076 - DNA, 933 bp, Setaria italica
  Peptide Sequence Number=SeqID_107050
cgcacggccacacaaacccatggaggcgtggctgaccgccgccgccgccgtcgtctcgttgcctccgccgcgaatccgcctccgattcaccaaaccgagcccactcccaccccctcggcggctccaattcggaacctccaagatccggacctccagttcgcgggcatgcctggccgcggcctccgcatccacgccgccggcgccgggaggcggcctgtactcggcggcgacctacgagctgacggcggagaacgtagaccgcgtcctggacgacgtgcgcccgtacctcatcgctgacggcggcaacgtcaccgtcgtgtccgtcgaggacggcaccatctccctcaagctcgaaggggcatgcggcagctgccccagctcgacaacgacgatgaatatgggcatcgagcgcgtgcttaaggagaagttcggcgacgctttcaaggaaatccgtcaggtgttcgacggggaccaaccgccggcggagacgacgcccgaggcggtgaaccggcacctggacatactgcggccggcgattgcgaactacggcgggaccgtggatgtactcgccgtcgacggcgaggactgcctggtgaagtacgacgggccggagtccatcgggagtggcatcaaggctgccatcaaagagaaattcccggacatcaccaacgtggtgttcacccagtagaacactgtctagatatgtgtaacgcagccgacgttggcaaataaggagatgaaatcatcagacttatacatggaatcgtcatacgtgaagtttgcaagatgttgctgtgcttgtattgataacttgaaatgcagcagcgctgtcaatggatggttttgtgcctcatgcctgccctgcgcttaactctgctttggtgcggatgtttgcctctcgtcacctgaattcagatggtccagaatttcctg

SEQ ID NO: 41077 - DNA, 471 bp, Setaria italica
  Peptide Sequence Number=SeqID_107051
catactcctctcatagtctccaaattaacacattcctttatcatgtggccctctttatcacaaagatagcatgtacggatgcccttgctcttgcctttctttttcccatgattcttgactttccctgttcctcttgaaatagtcaatgcttgatcacccaaggatgaagattcttgtggcttcttcaaggacaccgtctccagtaggtatgcaattgtcgtgttgaagttgagagtagttttcccgatgagaatattcattaccaattgctcccatgatgacggtaaggatgaaaccaatatgatgaccttattgttctcctcaatgttctcatccacactaatcaactgtgtgacaagcttgttgatgacattaagatggtcgacgaatcgtgcaccttcctccatgtgcagccggaatagttgaagcttcagcactcaccaatttgtctaacgactttgccatatacaa

SEQ ID NO: 41078 - DNA, 525 bp, Setaria italica
  Peptide Sequence Number=SeqID_107052
ttttgataaaacttttgtattacagtttgttttgctcatttatattgtattgtcacagtttgaaatgcatcgatacagaatctgttacctccgttaaattttcttgtggttttggacataaagactgttgcgaaaaataaacatatttagttagtcgatggtatacaagttgagcctcaactaaactctaagaggtagccaagttgagcctcaactagactataaatgacagtctctcttgatggcaaaaggatagttagatgatggtagtccattgctgcttagttaattattgtgatcagtgtttcaaatcgctaggcactaatttggggatgggggttgactgggcaatgcctaggcggccaagctaaaactagaaagtaactaggcaatggaaggaatggaaaggcttgtccaatcgatggaagggaggaagaggagggcatcctaaacattgtcagcagtggtcgctggcccctgcctttgctttggaaggcaggcgttgttgtgaatgttgacagaggt

SEQ ID NO: 41079 - DNA, 463 bp, Setaria italica
  Peptide Sequence Number=SeqID_107053
gtataatatcataacaatgattgtgaattatattatatctctggtcaatcaagtaatcagctgtgaaaagaaaaaagtcactagcggaagcatctgcatgccatctgaatgggataagaaatatatagctcctttcagacttatggtgaagcttgtcacatgctacccttctgcggctactgtcgctcttggtaaactaatcagtgtggtaaaagaactatctcaaattaatggccgtgattactctgaagttgccgttacctctgttgaaccattccagacaattattgctcttgaggaattgagcacctcaaatggcaatgttgaactttttagctacaaggattgaagcttctcccattgaaacagacattggtaaggaaattggattcctccaaatttgaccgcaagaataaaggtaccattatgcatgatcttactctttgcacgctcaggtttggaa

SEQ ID NO: 41080 - DNA, 421 bp, Setaria italica
  Peptide Sequence Number=SeqID_107054
ttactaaataaatctataattagcccttgttttgtagcgttttctagagagaattgcatttgtgtacccaggtacttcagtacttggttgatttctcccaaactggtgctgcgctgctgccacctgccggcctgccgggctctccggcgatattgattggcttagggtttatcgcagacatccatcgtcaaaactcatcaaaaggttctattgcaccttgcttcttccgagacgtctacgacttctctcccttaaagtactcgccagaatttcagtaggccagtcgttcaatcgcaagaaaataaagcattcaacgagaatcgacataaaaaagcactagccgtaagaaaatgagattaccccttggtagggttaggaccacccgacccgataaattcaactcaacccatccaaaaaaatt

SEQ ID NO: 41081 - DNA, 270 bp, Setaria italica
  misc_feature (244)..(244): n is a, c, g, or t
  Peptide Sequence Number=SeqID_107055
taaatggggaacaatagatgtgctggtaaacaatgcagggattacacgagacacattattgatgaggatgaagaaatctcagtggcaagatgtaattgatctgaatcttacaggtgtcttcctgtgcacacaggtgagtttataatatttctttattttgaaattacttgaattgttagatgcatcttacagcagcatattctttgcaggctgctactaaagtaatgatgaagaaaaaaagggngaattatcaacatagcatctgtcgtt

SEQ ID NO: 41082 - DNA, 642 bp, Setaria italica
  misc_feature (451)..(451): n is a, c, g, or t
  Peptide Sequence Number=SeqID_107056
caaatatagagatcagtagatagtaacaacagtgcaagaactatacagaaatagaatggtgattcttgaatgtggttgattaaaattcaccactatcaattctgcgatagttttctgcctacaaatatgcagagaccaacatttggctatacttttcattttactttctttgtcccctttcctacttgaagagtgctattattgcagattgaagcgtctggtggtgaggctatcacctttggaggagatgtttcaaaagaagctgatgtagaatctatgatgaaagcagctatggataaatggggaacaatagatgtgctggtaaacaatgcagggattacacgagacacattattgatgaggatgaagaaatctcagtggcaagatgaattgatctgaatcttacaggtgtcttcctgtgcacacaggctgctactaaagtaatgatganaaaaaaaggggagaattatcaacatagcatctgtcgttgggcttactggtaatgttggccaagctaattatagtgcagccaaagctggggttattggcttcacaaaaacagttgcctaggttttttttttttttttttttagttcgagacacagtacgatgccgcttaacttttattctctttgattatga

SEQ ID NO: 41083 - DNA, 510 bp, Setaria italica
  misc_feature (506)..(510): n is a, c, g, or t
  Peptide Sequence Number=SeqID_107057
cttaatcctgcagctagctacatcaccggacaggtgccagggaatatgcaagcagaatattcaatgtgaatgctattgcaccagggttcattgcatctgatatgactgctgagcttggggaagagcttgagaagaaaattttgtcaaccattccattagggagatacggccaacctgaggaagttgcgggtttagtcgagtttttggcccttaatcctgcggctagctacatcaccggacaggtgcttaccattgacggagggatggtaatgtaaggttggagtgagcttggtagacttcaacttctcctaggcgatttttggactacaaatgttagggttgtctcttgttttgtaatgctcaccaggaaaaattcaggcgtggtgaagttgaaatatgtatgtttttgttcatggtatgtgccaatttgtccaggctatttgaatttgatcctcgctgatagatttcctctgtttatgcatgatcgccattaggctttataatcnnnnn

SEQ ID NO: 41084 - DNA, 1418 bp, Setaria italica
  Peptide Sequence Number=SeqID_107058
cccccgctccctcatggtcaccgcagccgctgcagcagcagtctcctccccggccgccccggtcgccggggctgctgcggccacctcccgccgggggttcgtcacgttcggcggaggcgccgcccgctcctcgcccgcgctgcggtccggccgcggactctccggtgtgcgaacccatgttgcagctgttgaacaagcagttgcaaaagatgctaccaagctggaagcaccagttgttatcattacaggtgcctccagagggattggaaaagccactgctttggcccttggaaaagcggggtgcaaggttctggtgaactatgcccgctcatcaaaagaagctgaagatgtctccaaagagattgaagcgtctggtggtgaggctatcacctttggaggagatgtttcaaaagaagctgatgtagaatctatgatgaaagcagctatggataaatggggaacaatagatgtgctggtaaacaatgcagggattacacgagacacattattgatgaggatgaagaaatctcagtggcaagatgtaattgatctgaatcttacaggtgtcttcctgtgcacacaggctgctactaaagtaatgatgaagaagaaaaaggggagaattatcaacatagcatctgttgttgggcttactggtaatgttggccaagctaattatagtgcagccaaagctggggttattggcttcacaaaaacagttgccagggaatatgcaagcagaaatatcaatgtgaatgctattgcaccagggttcattgcatctgatatgactgccgagcttggggaagagcttgagaagaaaattttgtcaaccattccattagggagatacggccaacctgaggaagttgcgggtttagtcgagtttttggcccttaatcctgcagctagctacatcaccggacaggtgcttaccattgacggagggatggtaatgtaaggtttgagtgagcttggtagacttggacttctcctgcatgaggcgatttttggactacaaatgttagggttgtctcttgttttgtaatgctcaccaggaataaatcaggcgtggtgaagttgaaatatgtatgtttttgttcatgatatgtgccaatttgtccaggctatttgaatttgatgtacctcggcaactcgacgttcgccagctcttatccatgtccagtggcacctggaagccatctccggtggagctctagctgtttgctaatcagattttgtgcatagccattttatatatttggataagtgtcttagatctggatctcggaaatcaaatgattgtggttgttttgtgccaatttggcaactacgcaataaactttagtcgtgtaaagaatttatgtcaaaaccttgtgtaagtaattaataaaaaggataatcaatagttaggaaaa

SEQ ID NO: 41085 - DNA, 224 bp, Setaria italica
  misc_feature (167)..(167): n is a, c, g, or t
  Peptide Sequence Number=SeqID_107059
tgaagttggttcatccatgaatatgatggatgggttggcaacaagctcaacggcaatagtgagcctctttcgctgttcagtggataaaccatttactcctggcagtcccaccaatgctcccctcagtggtgttaactccacgagttccatcacttcttccacaaacntctttcttgcttctgagtctacttcgtgggggcaaaccgggagccatgctgagtaca

SEQ ID NO: 41086 - DNA, 1098 bp, Setaria italica
  Peptide Sequence Number=SeqID_107060
tagtaacgtaacgaacggtacgaaggaagggcgccgggggcaccgtcgaacgcgttcctgcgcgacacgaccatcaacctcatgctggccggccgcgacacgactgggtcggcgctgtcctggttcttctacctcctgacgcagaacccgcgcgtggtggccaagatcctggaggagctcgagaccgtcaagcagggcacctccgccgtcatcgccccggacggcacggtgaccttcgaccccgacgagctggggcggctcacgtacctgcacgcggcgctgtgcgagtcgctccggctgtaccctcccgtgccgcaggagctcaaggaagccgccgccgccgacgtgctgccgtgcgggcacgaggtgcgggccggggacaagatcctggtgtggctgtacgcgatggggcggatggaggacgtgtggggcagcgactgccgagagttccggccggagcggtggatctcggcggaggacggccgggtccggtacgtgccgtcgtacaggttcatgtccttcaactcggggccccggacctgcctcggcaaggcatggcgttcgtgcagctcaaggccgcggtggtttgttgttgtgtggaacttcgaggtggaggcggtgcccgggcacgtcgtggagcccaagctgtccatcatactccacatgaagaacggattcatggcgaccgtcaagagaaggcggcaggcggccgcgcttgcctgatgacctgacatcgatctgcggttgtctggaagatgaacatgccgttctcgatcagttcttaagcacgtgtgttgatgggcataatggccggccagtacgtacttgatcagtagcttgtgaccacaagggcaccagtcggtacgttagctgacgtgtgtgctagaaggtgcaggcacacgtatacgtactctatgtctccatctcgtggtgttgtgtacgtgtgcgttccgtcgatcgttgcttatctaaaaggcagtgctacgtgtaagtgttgtgtgctaggtttcaaattgtgcgtcgtgttactcgtgtcacgcatatggggtgcctttttgtggagcggtgggtgaaagggaaaccgtacgaaatagaacg

SEQ ID NO: 41087 - DNA, 743 bp, Setaria italica
  Peptide Sequence Number=SeqID_107061
tttttagttttttacgttttaagtaattttaaactattacgctaccaatatgagttgcgcctcagcgtcaccgtcgccttgccgctcgccggtgactcgagacggcggagcgtccccagccccgttcggccgttccgctcccaccgaaggcttctccggtcgattggcgtcgctctcatcctcttccccaccctctgctggtgctgggcttgcgcggcgcggggatccgtccacgctgacctagatcggcactctgcctctgccggtttcgtcgcaatggggttattcaggggcaggcttcactctcttggtgggaatgggatgcggtgtctatatagctcagaactacaacgttccgaacgtcaagaagctattcaacacctacgtttttctggcaaagcacatcgaggaaacctaccggaagccgaagaaagacgacgattgatccttttacattggttttccctgtttatgccctgggaaagtgaaagtacagctaacgtgatacgggaaaaatgcttttttgaaatggtgaagtcaattttggtgatcggtgagttttgaactatggtggattatcttggttagttgtggaattcagttgctgtaaaagcttttgctcagtttagaccatgtatatctagacgagcactcccttttggtcgtgttcctgtgcctgggaaatgcactgaactttgtagctgaagtgtggcgatggatatctcagtctattatcagtgtga

SEQ ID NO: 41088 - DNA, 1009 bp, Setaria italica
  misc_feature (1)..(64): n is a, c, g, or t
  Peptide Sequence Number=SeqID_107062
nnnnnnnnnnnnnnnnnnnnnnnnnnnnnnnnnnnnnnnnnnnnnnnnnnnnnnnnnnnnnnnntttttgttttttttttaattttttctattgacaaaagttgaaattctggcaaatttgtttcatacatgatccgaacatagctcaaggaagacttcgagctatttttcataaattacaaaacccattgtctgaggtggtcaaataagcaaatctctttctaatgtcaaacctttcaacacaaaaacaagctctccagggtactataacaaactaatgttctcaaacatcggagtttcatttattcaaagctactgccagtatgttcatccgacttactatctctccgggctcctcccagatgctgcaacgacataggccacgtaaatggaagctcaagctgataaagtatccattcggtggtggtgggtcgaggaggaatcgaggaggagatcaaggtgcgtccgggcgtgcgaggaagaaggcgtagaagcccgcgacgatggtgaagatccccatggcccagacgagcagctgcgcccagagcggcatgatgtcggcgaccttggatgagaacatgagcgtgaggagcgtggagagtccccagacggcgagtttgatgccttgtccgcccctgtggcctgggccggcgcgctcgagcaggtggaggcagcggaagaggaggatgagggcgacgtaggcgatgacgacgaaggcgacggatgaggggtcgtcccaggaacggtagacggccatcccgcagttgaagctgaggaaggcgaagcccagcgacggcagccagcccgggcggccgtcgcgatccatcgccggagcaaaccggcggcgctcctcctccggtgcggcagatcggaggggatttcgtcggccggtcggtcggaccgggatggatctagcgcctctctctctctctcggttggttggttgggttcgttaggttaggttaatttcgttaggtttaggtttagtttatttttcttttaagtttta

SEQ ID NO: 41089 - DNA, 362 bp, Setaria italica
  Peptide Sequence Number=SeqID_107063
ccccaagacaaggaaggtgcctgcatcagaggtgctttcagcattgtccaagatcaagaaggcaaagcttgacacatcgacattctttgagacactcggcgggacagagtctccaggcaggacatggatgctcatcttcactgctaaggggcggctagagaaagggcagtatttcccagtgactgcagtccagcgcttcgatgctgcggtgagcttctcatgttaattttatgatatgatagttctgatgaccagtgatgcttcaacagtttcttcagttgccatggctgctcaaagttcaaacagattcttgtctgatactgtatagttccatctaacttttgctgaataatgcaagaaat

SEQ ID NO: 41090 - DNA, 1097 bp, Setaria italica
  Peptide Sequence Number=SeqID_107064
cgctcctcttgcgtcctcgttcctcaaccgccacacaccccgcgctacaccttgcaactctgctctctctcgatccgaatccaagagcgaagaagacgatggcgtcgtctgctgccttgctccaagcttccacggccttcgctcctgtcttctgcccgctcccgtgccggccccagcccgcgccacggctccatctccgcggctcccccaaccgtcgccgccgcggcgtcgcactcgccgcttcctccgccgcgtcgtcggaggtagagaaagagccgtcgacatcgccctcgtcctcgccgcaggagtctgagtcggctgtcgcggacagtgtgaaggtgctcaaggaggcggccaagacaaggaaggtgcctgcatcagaggtgctttcagcattgtccaagatcaagaaggcaaagcttgacacatcgacattctttgagacactcggcgggacagagtctccaggcaggacatggatgctcatcttcactgctaaggggcggctagagaaagggcagtatttcccagtgactgcagtccagcgcttcgatgctgcgggaaaacggatcgagaatggtatatatttgggccccattgggtgcttaacctttgaagggaggctatcatggaaaaagaaaatacttgcattcatcttcgagcgggttcgcataaaggttggacctttcggtcccctggaaatcggccttggaagcggcgatgatggcagggaacccagcacaaaggacccgttctttgtttggttctatgttgacgaggaaatcgctgttgcgcaaggcagaggcgggggagtagcttactggtgcagatgtcagcgcgtaccctgaaagagtgaaggttcagttcacttcaatcgttactgtacaagatcaggaaacttcctctgtagtctgtatagttagtgttcatctttgcaatgcctgctttgtctccggaaaataaaaataaaaggaggtgcacatgatggaatattgaggtgatacacttgtaggcttcaattgaggttctgtaatgaactggtgttttcactgaaaaaaaaggccgtgtttcagcttctcaggtcagctttccggctt

SEQ ID NO: 41091 - DNA, 506 bp, Setaria italica
  Peptide Sequence Number=SeqID_107065
tttggttccgtgggagggtatgtaggtttgtgcttgcgcgcgtacggctggctgcagtgtggtaatttcctgtgctgatcctggagtcggatttgggtttgcgttggttatgaatcgggagagttggtgttctagccattccgtttccgagactagtccttctgaatccgaccatctgtgctttagagaatgattgcgtgaattcaggcatccaatttgtggctgttttgtggtgattgaattggcaatttgtggctgttttgcggtgattgtattggcaattgtggctgttttcctgtgattgggttgatctcctagaagttggggaactccttgttgaattatttctctaagaacagagagtttactattgtgtaaaaatggacgtggtgttgatatcctgtgaagttgacttgaagtcatgacttactatttggtggtagagttgacttggaagtcatgactttagccaaaagcatgctgtagcctgtaggcattacatgttc

SEQ ID NO: 41092 - DNA, 149 bp, Setaria italica
  Peptide Sequence Number=SeqID_107066
ttaaccatagcagttaacttttggtggaagtcacgaataatgactcaaatgttggaacatatggatgcttactatctacgccgaatcgtgagcagattgctggaaacctgtcaatgctttgtccataggctgaatattggtgcaatctt

SEQ ID NO: 41093 - DNA, 337 bp, Setaria italica
  Peptide Sequence Number=SeqID_107067
ccaaccatagttctgtcagcatcgaggagccagattattcaagctatacaagggcaagatacatgaaagaatattctgaaagagtacttctaaattgcggcgatgttcttttcataccagaaggatggtatcaccaagttgacagtgatgatttaaccatagcagttaacttttggtggaagtcacgaataatgactcaaatgttggaacatatggatgcttactatctacgccgaatcgtgagcagattggtggataaggagatgaacataatggtgcagaagagtccttttgtcgtttggaagattgcaccaatattcagcctatggacaaagca

SEQ ID NO: 41094 - DNA, 293 bp, Setaria italica
  Peptide Sequence Number=SeqID_107068
ggaatgcaggaggctgcggaagagggggagtacgtgggcgcgcggctggaagccggcctccgcgccgcccgcttcgcgtcccctccgtccgctgacgagttcgcagccgacgtcgagcccaagaacgtccccgcggtgttccgcggcgtggctaaggagtgggcggcctccacccggtgggatcctctccgtggcggcctcgactacctgctggaaaaagtgggacgtgatgtcgctttggaagctatgatgtcgaaaactgggcacgtgttctatggggatctcagaagcca

SEQ ID NO: 41095 - DNA, 1717 bp, Setaria italica
  misc_feature (61)..(61): n is a, c, g, or t
  Peptide Sequence Number=SeqID_107069
ccttcctttcttagcaagcctcctcaatgcgcataaggcatcgcgggtgaaaacaacgcancttttaggcattttcgctgcaatcctcagttctcgtctggttgttcttcaggaaaaagtgggacgtgatgtcgctttggaagctatgatgtcgaaaactgggcacgtgttctatggggatctcagaagccatgagagggtgtctgttccattctccacgttcattcagtcgtgcaagtcttaccttagtcaaatgaatgcggctagtgataaattggtagatcagggaatccttgagaagcctacttgttcgagggagatgtgctcgagcagctcagagaactcagaacaagtatatctagcacaggtatctattatgaaaactgagaacagagagaaatgctcgttacaagttttgaaagaggacattcaggagcctatatttctgagaggaaaatcattttcatcgataaacttttggatgaatggggctcacatgagatcaagtactcattatgatccccaccataaccttctttgcgtggtggctggttgtaaaaaagtaactttgtggcctccatctgcatccccatttttatacccaatgcctgtgtatggtgaggcctccaaccatagttctgtcagcatcgaggagccagattattcaagctatacaagggcaagatacatgaaagaatattctgaaagagtacttctaaattgcggcgatgttcttttcataccagaaggatggtatcaccaagttgacagtgatgatttaaccatagcagttaacttttggtggaagtcacgaataatgactcaaatgttggaacatatggatgcttactatctacgccgaatcgtgagcaggtattttatgagtcagttatgtacatttacttgaacatgtaatacattagccctaggttgattgtccatgttgccgctaaatgtacattctgtacttgctagcgaccttctgtttgccactcataggctcctagtctttaaccagcaacacagtgataagagcatatttgtcacgtaactaccttttttggtatatgctgattgttgttaccatcaaaggtcaattcattgggtagctccttcaaaactttcttcccatgaaaatttagactgatgcatactgatttagctcttagaaatacccctgaacaatctatcaatataattcagactctttaaactaaacaaacttgtcacatacataagcaatctagccaaatatctcaacgactcttctctaagcctaggtagattctggaggacagtagctgctgccctgctgcctgccccacaggtgctgagtgctgactaatggccatagtgccgattccacatgacagaggacaagattttctatgctgactaatgtgatttcacatatgaaaggacattgatggaattaattcctaaccaagttttgttttctgttcaaaatgttcatttcacaatacctgtttttgacctatatctcactgttttaccctttttttccatcctgtctcgtggatttctacttctacaaattatttgtagtgaagattggtggataaggagatggtatgcctcattatccctttctgtttatagtagtagaataagaaaaagaaggcttttcttttcatcatttgaaagccttagaagtgtgttactgatttcttagttcacctagtctatttcactccta

SEQ ID NO: 41096 - DNA, 538 bp, Setaria italica
  Peptide Sequence Number=SeqID_107070
aatggcacagctggggtgtggagaatcaaggctttggaggattcagggggctggatggagcggacgacggtcgaagacatggacatcgcagttcgtgcgcatctaaaaggctggaagttcgtcttcctgaatgatgtggagtgccaatgtgagttaccggagtcctatgaggcttacagaaagcaacagcatcggtggcattcaggcccaatgcagctgtttaggctgtgcttgccagacatcattagatgcaagatcgccttctggaagaaggccaacctgatcttcctcttcttcctgctccgcaagctcatcctgcccttctactccttcacgctcttctgcatcatcctgccactgacaatgttcgtccccgaagccgagctcccggactgggtggtctgctacatccccgcctgatgtccttcctcaatatcctcccatcacctcgatccttccccttcatcattccctacctcctcttcgagacaccatgtccgtgaccaagttcaacgccatggtgtccggcctgttccag

SEQ ID NO: 41097 - DNA, 631 bp, Setaria italica
  Peptide Sequence Number=SeqID_107071
cgtcatcgagcacgttcgagtagatggtggtactcataacctcttccagccaagcctgagcggtctcctcttcggcgccaggcgctgggtgatgagcatggcgcgacagtgcgctcgactcagggacgtattccatgtcaccaactgtgccctgaacgttactgcaagggggaggaaggccgtcatgaagttggcagacaatctgctcgccgactacaccagcagcatctccggcctccctgtggatgcctggagcgtccagtgcggcgaaggcacggaggaggacgtcaggattgtgtacagaaggaacgacgacaccagcaacaccgcggtcgtgtgcgcgagcgcgacgttcctgctggagctgcccatgaggagggtgttcgacctgcttaagaataacttgctgcgtatcaagtgggatgtcctggtgaatggaggctgcgtgaaggaggaagttcgtgtcgccaatggcgtcggaagtgaagatgctgtctccatcctgcatgtcaagcatggcagcggcacaaacaaggaaatcatgatgatcctccagaacagctgctacgacgcatctggtcattcatggtctactcctctctggacaaaaacgtgatggagatgatcacga

SEQ ID NO: 41098 - DNA, 408 bp, Setaria italica
  Peptide Sequence Number=SeqID_107072
ttgaacaattgtcgccatcagcgtcggcgccggcatcggccgtgaaccagaacactgaggcaagggaggcaagggcggtgccattttgagaagcctttgctcaccgtggaggaggatgtgctggccgggcacctagaccacaagcgccagtccccgctacccctgcaaccgtcgacgttcgcaatgccgatccaaatctgtgagatttttgcagatgaagttcaaaaaggaaatcggtcaagcactcatttgaataagaccggttacaagaatgtgatacaaaggtttcatgagaggaccggtattctatatactagacaatagttcaagaacaaatgggacaaattgaaaactgattatggaatttagaagcaactgaccaataagaagactggtatagaatgggat

SEQ ID NO: 41099 - DNA, 596 bp, Setaria italica
  Peptide Sequence Number=SeqID_107073
aagtcatatgacacaagcatatgacacattcataataaaatccacaatagttcagaatgaaagtccatatatacaaataatccatataatacaaagttcgcaataagaaccgtcactgccttctagtcttacccttacccttgtgactaagggcgtcggtgcctggagtgtaaggagaacgtgagcgacgtagtcatgtgcctacaacctgtgtaggccgagtcaagggagcctcgtggagctgagacgggccaagctcctcgggcctctgctcatcgtcgtcgtcgtcgttgtcctcatcctcggatgcaattgctttcgaacctgaggggccttggctagacgtaccgatgcctccttcgcatagggatggaacgtgcacgtctcgcgtcgtggcagtcctgcaaccacaacgagcagcggcactgcgaagccgatttgacaatcgctctaggacgctccgtatctcggggtccctaactcgtggacggaaatgctctatatctctaaccgagctttggagggtacgaccaatcctatccaggattggtcctgcctccacctgccttccaacatgagtactctgatcgtacacc

SEQ ID NO: 41100 - DNA, 737 bp, Setaria italica
  Peptide Sequence Number=SeqID_107074
ttcttacctaaagtcacaaactccccgtcgatgagctgccgatcatctccttccataccgaagctagcactgcaccaacagtgctcgcgacactaacccgcgtggcccaagccgagctcctgccatggctccccgtgccacggttcttcctgtcagcatcagagttcgtcgagtccatgctcgcctctctgaaggtccccgtggtcgcgcccgtgtcggcggcgatggctttcacagcgcttcacctgcggctgcggtacggcgagagtagcgacgggctggtgacccggcgcgacgccgaggtgcccggttcggtggtggtgaggcctgagaggaggctggaccacgcgtggatggtgtactccacgctgaagaagggcagcgctgaggctgatgcaagcgagatgtgcgaggctctgctggccatgctcgttgagattggcaagaacaagaaatcatgctgaccatcttctcatccggagctctggatggttggtttgcttatgcaaaaatgtttgtgcctgaagtctacgtccagtgtcatgaactgaaacttactgcagcactaacgtcacacagagggagactacagcgaatgatagaatattatagcctttacaggaaatagtgaaaattagattgtactttactttgttggaagcaaatacagcttggcaatatgccattttgttgacttttgacgtaacaatatgctctttcgggatgaattatgttct

SEQ ID NO: 41101 - DNA, 428 bp, Setaria italica
  misc_feature (367)..(367): n is a, c, g, or t
  misc_feature (386)..(428): n is a, c, g, or t
  Peptide Sequence Number=SeqID_107075
tcggggtaagggatgtgtgcgggcaggattggttccatgcttactgaaatacgatgcttcctcacctctgttttgttctgcttcgtcatttttccgaactttttaatcaatctgaggcctcaatgcaccaaggtgataggtgaactcctcctgaatgggcgggtcacattgatatctcgatgcacaggtggttcaagtttctgggatgtgcaactttttgggcgggagatttcacttggctgccgaggatgctatgctgttgaggatgcgatgatagcacaagtacatctggaagttctggattgcatttgctgttacatttctcgaacagttccggatttccgtgctcagatgagaagaccctaanaagctcttatcgctgactnnnnnnnnnnnnnnnnnnnnnnnnnnnnnnnnnnnnnnnnnnn

SEQ ID NO: 41102 - DNA, 240 bp, Setaria italica
  Peptide Sequence Number=SeqID_107076
aagggacaagggcaggtcgcgcaagagctcgccagcctgagcaggctggcacagcacccctggggacggcagaactccgaggagattctggcattgctcggtggatcgccgagcacggcgtctgaaattgagcttagtagcaatcggaacatcagttttactgatacggcatatattggaattagatctccacgttagtggtcatttggttccaaaatgcttgagaatgcatgatgattt

SEQ ID NO: 41103 - DNA, 805 bp, Setaria italica
  Peptide Sequence Number=SeqID_107077
cggatgcagcccgctggtgttcgtcctcgagtccggctccgaggcctccgtctcggatcgcttcgatgcggtgtcctcggcgcgcctcagcttcgtcatggagcaggaggaggcagggcaggaccggaagcacgtcgccgcggagcccgtggagaagaaggacgaggtggtcgtccccgtcaagctcggcaagttcaggagccaggccaccgaaggtgccggcggcagcgacaacactggaagccaggacgtgaggcggtgcttttccatggggacctacgagtacgtaatggacgagagctccctgctccgtgtcgccgtcaagccaccggagaagaagcgccccgcgacgcgcatgccggggcaccgcgtcgccatgtcggagtgcgactgccactccaagcgggaaggcttccgcggctttgacgcgccgcccaagcagcagcagccgtcgaaggcctcggtggacaagcgggagagcttctcgatctccaagatatggatgcgcggcgggccgaggcggaaggacgtgtcctccggcggcgcaatcgctgccgggtcgtgctcgaattcgcgccgcgtttcctcgttccggctctcctcggcgctccagcgcgcggcgagcgacgtcggggtggcggcggcggttccgaagcggcgcgcggacgtggtgagccccgtgacggagtcggagtacaacgtgtcgacgtgggacaagagcgcgagcggcagcgtcgtggactgggacctcgagtccgccggcggcggtcacagcctgagctccagggccgacgaggcgcggtcg

SEQ ID NO: 41104 - DNA, 165 bp, Setaria italica
  Peptide Sequence Number=SeqID_107078
ctgttgctgagccaagttgggggaattcagtgttgtagttaacagcaggggcatacaggggctgaatggtgtatgggcctccattaaatccaaatccagcccctgtatgcccctgctgttcaacagcaacaggagatctgtgtgctgagccaagttgggggaatt

SEQ ID NO: 41105 - DNA, 598 bp, Setaria italica
  Peptide Sequence Number=SeqID_107079
ttgttcctttccttattttaaatttccttaaattcctagggttctaaattcttttgtcattgtacctgtcataacttctgtcataatcaggatctttgcgctctgactcacggtctctgaaaattgcaaccctgttgttttgcctgtttctattgactgcaggctccttctcgatcttgcttctgtttgacctgctggccgaagtggtagtcaaactcctttcaagagtaatttcagccccttggcccattctattgcttgagttcaactccaaggaggtggacctatgcagagtattgggcaaagttgcttcctcagctggtctcccatcagcagcattactgctactgctgttgttaaatatccgtgcacgtgccctgttgtattccttctttccttttcttcaactactttttctggtaggttgtctcttgaagagtgagcacttgagctattaatgctatggaaattcttttgaggcctctgcttaatggctactttggccacagtgctgctctcttcttgtggcagattaactgggcacgtgcacggatatttaacaacagcagtagcagtaatgctgctgatgggagaccag

SEQ ID NO: 41106 - DNA, 2410 bp, Setaria italica
  misc_feature (1)..(2): n is a, c, g, or t
  Peptide Sequence Number=SeqID_107080
nntcttttcctaggcagcgcccactcggacaaggcaggcaaggatcactcgacccagcagaacataaaccatcagagttgtacatcacgaagaaagatgggagcaatgcaccatccccctaaccactaaattccactgtggaattggaaaacactaatcactgtagcataatagtcaccatcttagtttaccacctagagtcgtcacttcacatagtagacagcacagtaaacatgcttgggtcactcaactaaggcacattcatgtacaacacaacactcactagtgactagacctcatcaactacagccacgagatcaactccaaatcagcttcaacagcggcgccagcatcttccagtctcggtcgagccagggctgcactaggcaagctagaaccttagctcatcttcagagacaccaacacagcaagcgcctcatcttcgttccagcccatcagaaaccgcatcctgatggcctgttaacatgctggatcaccccaatctcttctctggtccagcacccacataccatcccacatcccaatcttttttcatcatcatcgtcagtcaagggcccatcgaaggagtaagcaacaagatgtgcccctccagcatctgaatgagagcagcacacaaccgcactggcaagagcacggaggtgactgatgctgctctttgcgcattggatctgtccaataaacctctagcatcttaatctgagaggagctagcaacagcaccaagaatagagctgacaagaccattgaggtgactggtcccagcccttcacttctcagcttcttttgcgcattggacctaggggtctgtccaatgaatctgaagtacctctcaacagcgtatgcccctcctgcatcccaatatgcagggagcaacaacaccaagagcgcagaagctggcatgattgagtggatgaatgcctctgcccagcgcttcttggtcattttatgcctgcagtctgccagcagcaattaaattggatgcctcatccaattcacatgttgagcacatgctggcaggtgcaggcatgcccgggcccctcaccggggccgggcaaagcgcaaattagcttctggttgttgttggtgagtctgtccaaactgtcccatggattcaggtggatgtacaaatggcactccagggcgtgaaggcatgggatattgctgcgaagcatgcatgaaaacagatgatctcacaggagcacctgcatgaccaggactgtaaggtgtcatgacaccatctggaggcccatagccgattgcattaggtgcttgtcctgctgaccaagaccccagcatgtgctgagctattggacgaggctgctgttcaacagcaacaggagatctgtgtgctgagccaagttgggggaattcagtgttgtagttaacagcaggggcatacaggggctgaatggtgtatgggcctccattaaatccaaatccagggtcaaatctttgcatgtacctgtcataacttctgtcataatcaggatctttgcgctctgactcacggtctctgaaaattgcaaccctgttgttttgcctgtttctattgactgcaggctccttctcgatcttgcttctgtttgacctgctggccgaagtggtagtcaaactcctttcaagagtaatttcagccccttggcccattctattgcttgagttcaactccaaggaggtggacctatgcagagtattgggcaaagttgcttcctcagctggtctcccatcagcagcattactgctactgctgttgttaaatatccgtgcacgtgccctgttgtattcctctttcctttcttcaacacttttctggaggttgtctcttgaagagtgagcacttgagctgttaatgctatggaaattcttttgaggcctctgcttgatggctactttggccacagtgctgctctcttcttgtggcagattaactgggatatctgcaaggcgcacagcaggtagtcggcactcggacgacatcttacggaggataatacgagaaccagttccatcaggcaaactgttgtctggtatggcgatggactggaggaagtaatgttgtgccaggcggtgtgcagcaagacgcagataagaagttgggagagccgggaattcaaactgtgtctgtctagggtcacggatgaacttcaaaatatcttgctccattcttagcacagagagcctctcccgcggcttctcgagggcctcccggaggaactgatcgacctgcgcggccgaatcgtcgcgcggagggggagcagggccctgctgcggctgcgtcggggccggcaggtcctgctgctgctgctcctcggccaggtcgggcgaggaggacacgcggcgcgcggagaggatgagccggctcatgggcccgtcgatgtcggccgtctccc

SEQ ID NO: 41107 - DNA, 409 bp, Setaria italica
  Peptide Sequence Number=SeqID_107081
gtgcccaaagatgaaccgccatccatgtaggccatggtcatagcggcttaatgttctcctctggagccccttcagtatttccaccatctttgaagcatggcaatgctaaactgaacaagattaggaggtaccaacgggagcactagaagggatgaacaagcccactgaagctttaataggacatttcatataggaaatgttcttaaaagaataatgaaagcttcattgaacttcaggataagatgctatagcatctagtttgtatgtcatggcatgtctgtgtatggacttaaacacagttatgtgtgttgctgctcaaggttcagttcatatatgccttatagttaagatatgttttccttgcattgaacttatcctgttcatctaaacatgctgtttactatgttcc

SEQ ID NO: 41108 - DNA, 572 bp, Setaria italica
  misc_feature (492)..(572): n is a, c, g, or t
  Peptide Sequence Number=SeqID_107082
gtctccgactcagtctatactatcgttgccgccgccgccgccactactactactgccgccgcggcgccctactacatcaacgtggccaagcccagcgagggcttctagtccgtccccgtccccgtctccgtctctcaagttggcgcgtgcatgcgccgatcagctagctagctcagctgcgcgtaggtgtcagctgggcaggcaggcgtggtagttgcgatgtctctttccgggagagcgcgccgcatcgcatgattgcgctacacggagccaatcatgcgttcgcgctgtacgtgtccccggaagtagccgtacctcgacgtacgtacgtacgtgtacccggtcggtcgatcagagccgtcgcgagatcgatcgacaggggtggtcaggagattgaatgtgtgtgtacgtgttgtgtgtgatgatgcagtagtgctcctagcagcacgtaattcgaagcaaggacatggcaatgtcatgcaaccgaaaacnnnnnnnnnnnnnnnnnnnnnnnnnnnnnnnnnnnnnnnnnnnnnnnnnnnnnnnnnnnnnnnnnnnnnnnnnnnnnnnnn

SEQ ID NO: 41109 - DNA, 551 bp, Setaria italica
  Peptide Sequence Number=SeqID_107083
tatcagttgaatacaatccgtttgcatgaattcatctgctatcactactgagtcgagactatcgttggattgaaaaaagaagtaattcttacattatatataagctatttaggctccttaatgcaatgatggtacattttatttatgggaactggagaagaattttttcctctcataaacctgaaactgaaagtaaaattgcaaacatattgtgatcaagtgtttgcttgcaccaagaacataatggattggctgcgattgtggagaaaagtaacttgtgcaccattgatttgattccttgcaattgtcaggtgaagtcatgttcatggtggcatagtagttctggcgattcattttttatcattctgtgatatgtccgacatctttgcctagtctttcattcaacatcctttacttaagtggatgttgtagcatatagtcgttttcaatattctggcttattgcgagttaaattcctaggctgtcatgttggttactatggaagtgatgcttacaggctttgttgctcctaattgctgtttaggtctgct

SEQ ID NO: 41110 - DNA, 559 bp, Setaria italica
  Peptide Sequence Number=SeqID_107084
aaactaattaggaaaattttacaataaagtcagccttgggaggtcattcaggtgaaagggctacttcttatcaaagattgaagctggtattctattggcctaagctccaaaaagctgtcaaggattatgtcaaagcttgtcccatctgtcaaaagaataagagtgaacacacacacccttacccaggattgttggaacaactcccagtcccagatatggcttggacacacatatcaatggatttcattgaaggcttaccaaaatcaaatggtaaagatgtcatattagcggtggttgatagattcactatgtactcccattttttacccttgagtcatccattcattgttactgacgtcattcccctattaactgataatgtgttcaagttgcatggaaccccaatggttatggtgactgatagagacagaatcttcacaagtcacatttggcaatcacttttcaaatcaatgggcatcaaattacatttaagttcagcatatcatccacaaactgatggacaaactgaaagagtaaatcagtgtctttggtaaaactt

SEQ ID NO: 41111 - DNA, 808 bp, Setaria italica
  Peptide Sequence Number=SeqID_107085
cggtgggcggcgctggagcggctgccgacgtacgaccgggtgcggcggggcatcctggcgctggacgaggacggcgagaaggtggaggtggacgtggggcggctcggcgcccgggagtcgcgcgccctcatcgagcgcctcgtccgcgccgccgacgacgaccacgagcgattcctcctcaagctcaaggagcgcatggaccgcgtcggcatcgactaccccaccatcgaggtgcgctacgagaacctcgaggtcgaggcccaggtgcacgtcggcgaccgcgggctccccacgctcatcaactccgtcaccaacaccatcgagtccatcgggaacgcgctccacatcttcccgagcaggaagcagccgatgaccgtcctccacgacgtcagcgggatcgtcaagccccggaggatgactctgctgctggggcctcccgggtcgggcaagaccaccttgctcctggcgctggccgggaagctcgacaaagacctcaaggtctcggggaaggtcacctacaacgggcacgggatgaacgagtttgtccccgagaggactgccgcgtacatcagccagcacgatctccacatcggggagatgaccgtgagggagacattgcaattctcggcgcgttgccaaggtgttggcactagatacgaaatgctcactgagttggccagaagggaaaaggcagcgaacatcaagccagatcacgatatcgatgtgtatatgaaggcttcagctatgggtggacaagaatcaagtattgttacagattacatactgaagatattaggattggaggcct

SEQ ID NO: 41112 - DNA, 343 bp, Setaria italica
  Peptide Sequence Number=SeqID_107086
acaaatagcagcagccacttgccatggaatccaagctcctagtgctcttcctgtgcctagcatttgcagcatgttctgccagccaccaccatgacccctccgtcgtcggatactctcaggaggatctcgcattgccaagcagactctctgaactcttcacctcctggtcggtcaagcatagcaagatctacgccagcccgaaggagaaggtgaagaggtatgaggtattcaagaagaacctgatgcacattgcagaaacgaacaggaagaacgggagctactggctgggcctgaatcagtttgccgacattgatcatgaggagttcaagaccagttatcaggg

SEQ ID NO: 41113 - DNA, 581 bp, Setaria italica
  Peptide Sequence Number=SeqID_107087
tgttcttttagttagcagtgattgtgtgcgtgtatgtgagtgcccatacttataggcaatcttaccctgcgcaaagtgccacatgatatacacacaccatcctcatggttttgattcctatcacattggcatatatatataggacaaatctctcttacgtggccacccctctacccgccactagtgatctaacaatactgtctctcacgcaaattaaagcctcatgtttttttcgacgaattaaaatctcatataagaagggtccagaatgcagttgcatttacgtgtcacttgagatatccaactttgggtctataacatcttgaagctacatgggtacgagacgaaacagccccactagcgagaccccaagcactgcacccgatcccctgtaagtacaggcattagggtctagagattttcatgtgcacaaacaaaatcacacttgacatatacacacataccacacgcattacacacctaccataatagtagaaagtaaaaccataaccctcaccattgcaagaaaccacaagaacatgagcagataagccaacaagtagcatcgctcctaagtccta

SEQ ID NO: 41114 - DNA, 1070 bp, Setaria italica
  Peptide Sequence Number=SeqID_107088
taaacaaaaagaaaataaactaaagaaacgtaaaaggaaataaagtttaaaattacaagttagttacaaaagttttttttctacgagcagatagtttaaattcagttgttcaaagaaaattctagcagaaaatgacaatcagaatttgctgcgcctgagccgacacaactaaagagaagtaccaagaagttccgatgtttggcatctgaacagaccaccttccgtataaataggcacagccctagtgtcctcgctcaaagtaataatgacacaatattacagggtgatggatggtcaacagcgcaccaaaaggtccacaagagcaaaatctgaccatctcgaaatattatattctgctacctaaatgaacatcctttcgaaaacatgattctcggttagatcagttgtagcaatagagaaactttcgtacaggccatcaaaatacgtagatgcaggttaagatcagtcctgcttgttacgagcctggcgagcacgatgcctgagctctgcccttttccaccttacgatcagcatgcagagcgtcacaagagtgttcaccaaaataaggattgttatcaaaaggaggggaccagaccagacaactgaaatgaagaggccttgggaatcaaaatagttttggctagagaagctcttccagttttgtcctagaaaggtgtttattctctcagcaagaaatacaccagaaaatgttaacgctgacaagataagctggaaattgacatttctcctcgagatgatggtaaccagcagcagaatggcatgaaaagttagcatgctgatcaaccaaggctccttccagtcgacggcgtggaagaatccgatgaaggagtcgacggctggtgcgaagccggtgcgaagctcggaggagacgcggccgaagagctcggctacgacgtcggcgtgctcattgagggcggagcgcacctcctccacagcacgcccgaccaccgacgaccccgcggcggcagcctcctccgccatctctctcgatcgagatctcctcccctctcctctcctctcctctcctctcctccaaaacttgtcgtagt

SEQ ID NO: 41115 - DNA, 811 bp, Setaria italica
  Peptide Sequence Number=SeqID_107089
caaacatttaatttgtattgtatgagtggttgctagagcacggcctgtgccttgcatacttactgactcaccatcacaacgttcagtaaagtatattggctccttgggtagcattttgattgtgttatttaattttttatgatacacgtaaaacaatcaattctagtgtatcaccaaggaggctaacctgatctgtgaggtgctgagtcgtggtgccaagcccatggtttacttaatcatccagagcactgagatccgcatgtgcactttaagtcttatgtaccaccaattatatggagttgctgccgctgctgctatggtgggaatcatgaaggagaccgataaaatatgtgactggatgagcaaaaacaataagccttttgacccgtttgacatggacttggataacgatttcgagttgggtcgccaagttcggttcagaaccctgcacttaatgatcagcatactggaaaagtctccattttctgttcctgctgctgctgggcacaaagttgttaaggaaaaatcttttagtggaaatgttcctagtaatgatgagaataatattactcgtgctgaagcagcaaacactacaggggacaacttacaagatcaggaaaagataactgttgcagatattagtaagaagaggaggatggaagatacgaacaaagaagaaaaatgaccaagaactttgcagctgccaaagtggaagaaagctaatcaagacgggaggcaaccttgggcttggagacgatcatggagtccctcttcggcaggagtacctcctcagtggggagctcagaagaca

SEQ ID NO: 41116 - DNA, 313 bp, Setaria italica
  Peptide Sequence Number=SeqID_107090
aagacttatgcaagaagaagagagggctgcaagtgtgagtagttccggacgtgtttcttaggatgtacagtacgtatggatttgggatgtatggctgctcgatggtagttggcttaagcgcgagagaacgttgtctcgcttgctcattctaggcgttggcatggattgtgtgttgtaaggttaagcctgaagcctgtggtacgggtgtgccagcgccattgctgcacgtcttgacatgtgcaatcaactgcgtatccggagcctggttcacatgtgcaagccaggctacgccggaccaaccaaccaaaaaaaa

SEQ ID NO: 41117 - DNA, 424 bp, Setaria italica
  Peptide Sequence Number=SeqID_107091
ctgtattcttccttgaagaacccaataaatcctcaggtagaggactaaattatgctagtgcctcaaaggtcctcaacatgcacaatttagtacatgagtttgccagatatgttaccagtcatgatctgtttataatggatggtgaaaggaaaaataatgatatcatggagatatgtacttcccgatatgcaatattgactagatgccatgatgaatccaaaattcgcaaagtatttctcacaagtgtaagggcgatatgtttgaaggactgtatgggagcaaagcttatagaaaacatattatcttctctaaagcacctacaggtattggacctcagtagatgctcgtttctcgagatacctagttctatttaccagttaacccatctgaggtacattgatgtttctaactcactagttaagta

SEQ ID NO: 41118 - DNA, 466 bp, Setaria italica
  Peptide Sequence Number=SeqID_107092
aaggggaagaaatatatccaggagctgctttctgtattcttccttgaagaacccaataaatcctcaggtagaggactaaattatgctagtgcctcaaaggtcctcaacatgcacaatttagtacatgagtttgccagatatgttaccagtcatgatctgtttataatggatggtgaaaggaaaaataatgatatcatggagatatgtacttcccgatatgcaatattgactagatgccatgatgaatccaaaattcgcaaagtatttctcacaagtgtaagggcgatatgtttgaaggactgtatgggagcaaagcttatagaaaacatattatcttctctaaagcacctacagggtgtgtggatcttcacatgaaccttggaatgataccaaataataatctagagaatcttaattggatggatgtcgcaagatctatgctgagcctgggtgactgtaaacttcc

SEQ ID NO: 41119 - DNA, 854 bp, Setaria italica
  misc_feature (1)..(56): n is a, c, g, or t
  Peptide Sequence Number=SeqID_107093
nnnnnnnnnnnnnnnnnnnnnnnnnnnnnnnnnnnnnnnnnnnnnnnnnnnnnnnngtaaaccaaggaccgattctcattttggcaatcttccctgtatttctttgtaatatttacacaagcgaaaaccttattgccgtagacataaggcattcaatgagaatatcatttgacatggttttctggtgcacatcaacaccaagcagcttatgcttaccccagatgaaatatgaccaaaactagaagaaaaaacgaactcgtacgcaattttacagacactctgtcaaatttcaactgacaaaaataaccccggcagagtgtagctggagcaaagcagaggtcgtctcagatggccttgaggatgtcggcggcggtcgcctggtccccggcgaggatgacgatgttcggggagtccatggcgacgacgtcctccgtcaacaatccgtcctcgtcgcggagcagctcctcgctgccgtgggtgactagacccggcaggaccagcgtcttgtgcaggccggggagcagccgctcccggtcggtgtcgcccttgtcgccgacgagcaccgccaccttggacaggtcgatgccccattgaatcgacaggtacctgagcgcacgcgggcgcgaggccgagagcgggatgacgttgaggcgcgtgcacgcgcgcgtgtacacgaggttgcaccggaacccgcgcatccgcagcgactgccggagcgagtccaccttcttcaccttggacgcgccggcggcggcgtaggcgtggcagtgcacggagcaggcggtgtcgtcgacggcgaggccggcctcctgcgcgccgtcggccttcccgagcctccttgggtctacggtcgt

SEQ ID NO: 41120 - DNA, 342 bp, Setaria italica
  Peptide Sequence Number=SeqID_107094
taccatccagttttctgaaaatcacacggccagacgtcctcttcctcgcccgccccagcaacgagccaacgaccaacggaagaaacgagcaaaccgcccatggcgctcgagaaggccaaggagatcgttgcttcctcccccgtcgtcgtcttcagcaaaacctactgtcctttctgcacccgagtgaagcaattgctagcacagttgggggcgaattacaaggctgttgaactggatgtggaaagtgatggatctgatttgcaatcagctcttgctgaatggactgggcagaaaactgttccaaatgtcttcattaaagggcaacatatcggtggctgtgat

SEQ ID NO: 41121 - DNA, 572 bp, Setaria italica
  Peptide Sequence Number=SeqID_107095
tgatatagaaacttctcagaaaacaagcactgacccgattagtgggataaagtcagcttctatattaggcacaaaagtggctcagtgcctggcccaaagggctgagtacaatagccctctccaaaagtcaggtatttttgactgggctgataatccaaataatgatgaatgcacagccattatgatttccaggaaaaaacaaaggatccatgctaacactcaagtgaagcatttggcctcccagagatattgtggcaatggatcaagtaccagggctgggttcatatcagattgtattggtggtgtctcaggcgtggattctttcaagaagccagaacctgttggttctacagatgatttatatgaagcatatgatattgggccatgtactcagatggcagctgaagccatggaagcattgtccaatgcatcaactgtcaattatgttgtcagggacgaggcacatcctgaaagttctattctcggaacaaatttgggaaaagaagcaaagctgataagatatgttcagttgaatcgcaaattcaaaagcgaatcgttggaagttcaagctc

SEQ ID NO: 41122 - DNA, 265 bp, Setaria italica
  Peptide Sequence Number=SeqID_107096
ccaattctttctgtgctcgccagtgcagaactgccggaagttctcggcggtcttgggggcgatgtcagcgaagagctccatcttaatgcggccagcggggatggacccgatggtgacgtcgaagaacaccaccgggttcttcgggttcggcggcggtggagtggcaccagcggccgccgagatggccgctccgccggtggacgccatggcggtgctcgttgggccggcgccggaagcttctcgcaggttcgagacccagccggct

SEQ ID NO: 41123 - DNA, 1122 bp, Setaria italica
  misc_feature (1)..(78): n is a, c, g, or t
  Peptide Sequence Number=SeqID_107097
nnnnnnnnnnnnnnnnnnnnnnnnnnnnnnnnnnnnnnnnnnnnnnnnnnnnnnnnnnnnnnnnnnnnnnnnnnnnnnctacttgcaaattgcaggagttaaaaaacgattgtttgattatcaaagcaggaacagtaggatcgaacatgctcaccacaacagaagacccagctcccgagtcaaacaagaacactaatatcttgtttcgactattattgtacaagcgtagaaacgatacaactcgacccagtgtcaatttcaacatgcttcggcactttgaacaatgttctatattgtttccactgcttcagtacttgcatctaccaaacaaggtctacatcagcagcatcaagagtgcacgattagctgcattcagggatcaagtcacatttcaccgcactcgcttataatgcaggcaagctttggccggttgttcggtccagtcgcaacattttcaatcttcctcacgacaagcagaccgtctccaagaactctcccaaagaccacatgtttgttgtccagccagtcacactttgcacatgttataaagaactgagatccattagagttaggtccactgttggccaatgagagcagtccaggccctgtatgctttgcaataaaattttcatcatcaaatttggtaccatagattgatgtgcatccagtaccatcattcttcaagaaatcaccaccctgaatcatgaaatctttgatcactctatggaattgacagcccttataaccctggggcaaaccattctttctgtgctcgccagtgcagaactgccggaagttctcggcggtcttgggggcgatgtcagcgaagagctccatcttaatgcggccagcggggatggacccgatggtgacgtcgaagaacaccaccgggttcttcgggttcggcggccgctggtgccactccaccgccgccgccgtcgccgacggcggcgtgggacccgccgagatggccgctccgccggtggacgccatggcggtgctcgttgggccggcgccggaagcttctcgcaggttcgagacccagccggctaccggcggaagaagcgtcgagggaggtcgccgggggttcgcagcggagctgaatagaaagactagaaggac

SEQ ID NO: 41124 - DNA, 504 bp, Setaria italica
  Peptide Sequence Number=SeqID_107098
agacaaatagtaccccaaccaccttggtctggcgagggagggaacagtggtggcttgtggtgtgtggccaagccgactgtgccagaagacaagctgcaggaggcaatggactatgcttgcagccaggatggagtggattgccaggagattgctgctggtggtagctgcttctatccagacaacattgcatcgcacgcatcatatgcgttcaatagctattggcagaagatgaagcagattggtgggagctgcaattttggtggtactgctttgctgatcaattctgatccaagctatctacagtgccgcttcatgctgagttgaaagggctgtgctaggatcttattctatggtctttggcaagactgaagatagggatgccaccaaacgcggactaatagtggagcggctgctacatgcaaacgtttggcccatcaattttttgtgatccgtgcctttgcagggactagaattcttaggaaagtgcgtatctgtagtttctgg

SEQ ID NO: 41125 - DNA, 330 bp, Setaria italica
  Peptide Sequence Number=SeqID_107099
tgccggtccttggtcgagctccgcttgggcgccgccttccgcacctgcacctcgccgcctcctgcggcccccgatccattcccgttgccgcccgccgacgtacccaccgcagccgagctggagcatggctgctcctccttcttctcgaggagctgcagggggaaagttggggcggcggccgcctccgccgtcaccggcgacgtccatggtgaattaagccatggtatatatacaccagatagaagtatatatcttggcgcgttataaattttttaagccgggtaaatggtggagtggttagttgtttggaagagagcggaacggatttga

SEQ ID NO: 41126 - DNA, 1233 bp, Setaria italica
  Peptide Sequence Number=SeqID_107100
cgtcttcgtcgtgtccgacctccacacggactacccggagaacatggactgggtgcgccgcctccccgccgaggtcggcgccggggagggccccggcgtcgacgcgctcgtcgtggcgggcgacgtggccgagaccagggacaacttcgcgcgcaccatggaggtgctcagggaccggttcggggccgtcttctacgtgcccgggaaccacgatctctggctgcgccgcgagggcggacgctacatggattcgctggagaaactgactgcattgcttgatgcgtgtagtgagctgggtgtggatacaggcccaagaatgataggtgacttgggaatcataccattgttctcatggtatcacaagagctttgacaaggagaaggacgttaacagtgtgcgcgttccttcgctagagatggcttgtaaagatttccatgcttgtaaatggccttcagatctggcaaatgatgatgagtctcttgctctttactttgacaaattgaacgacaagaatcatgatgctattgaagaagtaaaaaatagcagcaaacagatactaacattttcacactttgtaccaaggcaagagttgtgtccggagaaacggatgctttattacccataccttccaaaggtcatcggctctgatttcctggagaggaggctgagagatatacacagtaacagaaaagatggatcagcttgccatgtttttgggcacacacatttctgttgggattctgttgtcgatgggatcaggtacgtacaagctcctttggcatacccccgagaaagaaaacggagaatgaacggcgaaggctggctaccattttgtgtataccgtgatggcttcaaccctgaaatatatccagccttgtggtcggactactacaacaagaacaagagggagcccgagaacacacagctcgcgccgtgggttgccaggcattttgcaaagtaccataagttccactgacccctactagagttcatgttttgccaaactggatgcagtccgtcccatcaggacggtgttggagcctgcatttacctggaggaaaacgagagattgacgttttacctgtacatgaattttttttatttttttgttcccactcttaccatagacttgtggccaaggaagcgcctgcctgtgttggatgtatgttgaaaaatcagaataatgtgtataagattcttcaaagccttgctgcaaagatagtgacatctatt

SEQ ID NO: 41127 - DNA, 510 bp, Setaria italica
  Peptide Sequence Number=SeqID_107101
gaatgtaatgcacttgagagcagtttgtacaaagccagtacaaacagcttgtccggttgtcccaattgccgatcccaccatccgcaagaagcccgcacagaaccacccaacccaacgtataacgaattgcaaaattgtagctgctgcttgctgagtcactgtacacgtacttgcaagttagcgtgccactcgtccgaaaaactggacccagtcgagtctcgggacacgattcaccgtctgacgggcgtctggccgacatgggatcgaaatctaaccgacttggatggtattgatccatgcgtatcctgttcgttaggtttgtgccgttaaagacgtgtggtgtgcatccgctccggaaaaacgccggacgaaccggctggttgtggttggttgccggacgagctcatgacgctaaccaaacgagacgagcagacgattgccaagagagagatgtccatgaatgtagggataagaagcataagagcaactctaagagaatactaaaaattc

SEQ ID NO: 41128 - DNA, 508 bp, Setaria italica
  Peptide Sequence Number=SeqID_107102
actatgaatgttgttaagtctcagattttgtgaggttttggcaagtatggtgccctcccatgtattgaaggcctgtacattgtgtcactggtggatctggatcaggtccctcatggcatcgaatcgcttcactccctgaagaagctctggctggtgaacctgcacaggggctttctaactcagtggaacaagagtgggatgcaccacaagatgcagcatgttgtagagattcgtgtttaggctgcattactattcttctatgcatgtagtacttgcaaccatctccaacatattgttactcagtcattcacatcgtcggcagtgctccacacttcaatctgaatcatattaatggtgacagtagcacaacttaataattgtgaaatgtttttgttcaatgtcttgggaagctggcctgaatatttgtgctgcctattcagttgctctctgcttgattttattgtaagaacaagtgccatatgaattcaacttgtttttgtcaaaaaaa

SEQ ID NO: 41129 - DNA, 486 bp, Setaria italica
  Peptide Sequence Number=SeqID_107103
acaagtcagtgggcgcgcgaggccgggcggttgggctacctggcgctgcccatggtggtggtgagcctgtcgcagtacgccgtgcaggtgtcctccaacatgatggtcgggcacctccccggcgtgctcccgctctcctccgccgccatcgccacctccctcgccaacgtctccggattcagcctcctgtacgggatggcaagtgcgctggagactctatgtgggcaagcctatggtgcgaagcagtaccgtaaagtaggtgcagatacctacagagcagtagtcaccctcctgttcgtatgcatcccgctctcgcttctctgggtgttcatggacaagatcctagtcctcataggccaggatcccatgatctcccacggagccgggaggtacctgatctggctgatcccggggctcttcgcgagcgcggtgatccagccggtcaccaagttcctgcagtcccagagcctgatataccccctgctg

SEQ ID NO: 41130 - DNA, 601 bp, Setaria italica
  Peptide Sequence Number=SeqID_107104
gtgcaagagcattgacatctatgatcaggacattcatgttcgcagtttacgcacgttatggtatccatcttcatttagctttgttcattgctcgccacaagtgaatgaaagtagttctctgttggcaattgccgaaggttctcagctgagcatatgggacttaagaatgaacaacaatgggggctgcgtacagcgcatttctggatccattggagatactatatactctgtctgtagttcaccttcagggcccattgctattggtggaactgatcgtgctgtcaccatctatgatcctcgcaggtggtctgctttgtcaagatgggtgggctgctccaaatatgagattacaggcctttcattctcatcagttgaccagtctttcatttatgtccaaggtgttgactatgagattacctgtggacgttggaaagaaagcgaacgagcattctcatttcgaggcgattccaattggttgggttttcaaagtgtgccaatactggtgtggtagcagggtggtgcgagtctggaagtatcttcattgttgatgctatgcagctataggagacgaaatgccttcatctgaggtcctggactccgg

SEQ ID NO: 41131 - DNA, 636 bp, Setaria italica
  Peptide Sequence Number=SeqID_107105
gccagatgacaccggcaggatgtgcaaatttgtgccgctacatgggcgaacatgtggagaacgaggagacattggcaaggctgaagcatgtccttctccaaaactactccagccttcctggccatgctctcaaggcctgcttgctatatttgagcattttcccaagtggccatccgatcaagaggaaatgcctgatacgacgatggttagctgaaggattcgtcgaagcagaccatcgacgtagtgccatggatgtttcacaaaggacgactacggcgctcacggaccggagtatcatcaagcccattggtatcagcaacaacacagaggcaaagacatgccaaactcacggcatgatgctcgagttcattctgcagaagtccattcgtgagaatttcatcacgtcgctatatgatcaagctggcctaccggataagatccgccgcctttccctacatcgcaaaggtgctacaagggacaaaataaactcaaacgttgatttttcccttgttcgatctctgacaatcttcggagaagcagttatgcatattgtggaattttccaaatatgagctgctgcgagtcttggatctagaagaatgcgaagccttgaaggatgagcatgtcaagaagttat

SEQ ID NO: 41132 - DNA, 1091 bp, Setaria italica
  Peptide Sequence Number=SeqID_107106
ttttttttttttttttccttttgactgatactcttttctattccttttgtttgaaaatcttttacctccgatcctataataataaatcaagcaataatctgctatctttttttcctttacttattatctatcttagcttatacccaacaacaatacaataccatgccagtaaaaatgttacgtgatcagaactgcccggtgagcgcggcgtagaagaggacgttccaggtgtcggggagcccggcgacgcaccagtgcgtgcagtccccggcgaagacgccgccgtcgtacttggtggggtgcgcgtccttcctgagctgcgagaggtaggtgaagtcgaggaggtacaccggcttggccatcccggccagcacgctccgcaggattgcctgctgagggatcggcccgccggggtacggcgccgtgccgttgagcggccgcgtctcccccatgcacgtcttcttcgccggcgcgccccagtcctggcccctgtagtgtgagggcgagatcccctggaagaagaccttggtgtcggtgtggaggaggttggcgtcgacccaggtggcccaggtgtggagggccttggtgaaggccctggtgcggtccatgtctttcaccaccgtgttgccctcctggatgtagtcccagggctgcgtggggccggagcgcggccaccagtgccacgagtcgaagacgagcacgtcggcgccgagccagttggtggcctggtcgatggcgtccagtttgaggacgcgcccggacttctccgccaccaggtccaccaggtagtgcgtcaggtagtacaccaccgtcacgttgtagtcctcgaagcggacggtgtaggaggggtcgatcttccccgacgccggcgacacggtggtccgggctcccggcgcggcggcgtggagcatgcacagcagcgactcgtactggttcagcgccagcgagtcgcccacgaacatcaccgtcttgccgcgccacatcccaagcagcgccaacccgtcgaacctcggctgcgcgcacggcgggtcgagctgccaccggtacttgaggtacatcttgtcggggcggccgaagcgggcgcacgcgaa

SEQ ID NO: 41133 - DNA, 536 bp, Setaria italica
  Peptide Sequence Number=SeqID_107107
ctattgaatcagatggcattctgaaagatttggctgataaggcgagcaacattgatgctgagatgcagctcttggaaggagagtataaaaaggatctgcttgatcatgataaggttcatcaggagctggctgatgtccaagcaaagagagcgcttatggaggctgtgatgggagagatgaagcagctgcaggaacttggagggcgggcagctgaactcgaaaaggtgcacgcttcacttacagacgagctgcagcggcggtacacgtgccccggctgcggagtcaacaacatgcctaggttggaggaggctgcgaactagagaaggcgttgccgaccagattgtaaataaggaatggaagtagaaccacttcaataaaaaaaaaagaggagtagaaccctttctttgatcggctggttatgcaattcacactggtgagcagttagctctagtcgttgcaaccaaaatcatggaaaactggcaaacgtttttagctatgatgatagagtattatgccaatattaaaaaaaaaaaaac

SEQ ID NO: 41134 - DNA, 294 bp, Setaria italica
  Peptide Sequence Number=SeqID_107108
tttttttccgtttttttagcgtttaaactttatttgtattgtcttctctactacttcccattcgcagcaaacgaacagagcccagagcagcaaaacccactcggcgctcggcgctcctcagccccgccactacgcgcaacggagagccccgctgcgagaagcaaggaatcctgcaactccaccaaatggcgcagagatcctcccgcaaaccccaaaccgacgcagcaagaccgcaggcgagagcgagacccaacccccgattgcctcgaagccaacagccaaacgcaccaaacc

SEQ ID NO: 41135 - DNA, 277 bp, Setaria italica
  Peptide Sequence Number=SeqID_107109
cgtcgccgggccccgtcgtggcggcgatggacacgtcgggggacccggaggtgttcgtctggaacgggcccgccaaggtgtggcgctccggcccctgggacggcgtgcagttcacgggcgtccccgacaccatcacctacaagcccctgggcttcagcttccgcttcgtcaacaccccccaggaggtcacctacagcttccaggtccgcgacgccagcatcgtgacgcggctggcgctcaacggcacgggcgcgccgccgggctgatgcagcggtgg

SEQ ID NO: 41136 - DNA, 1295 bp, Setaria italica
  Peptide Sequence Number=SeqID_107110
tggccgccgagctcgatcgaagactccggctccgccttcacttcgcacgacaacatatcttataactcgacggcccgggaacgccgccgccgttcccttaataatcatcgtgcaaactggtatcgtgttttcctctctctaattaagttaacatatagtgctacgccatccaaaaatcaccattgtaattaatactccctccatcccatcctagaacatagctacatttagctttttttaagacaaattaagaagaatattaaaaaggtctaatatacccttcactaagccgttattgcctttcaatatattgcaggactttcaatatattgcaggacaacacattaaaagaaggaatattttgcatgcacgccttccatttctattccagcacatgagtgcggaggggtattttggaccgtttacatattttatcactagttggaactacaaacttagctatatttgggaaaaaatttgaatcctaaatgtagctatattctgaaacggctacttgaagtatttgaggctgcatgttcgttcaaaaaacggtgctagcacctggacttccgatgagaaatttcatcgagcactccgtcgcaacatcgagaattaactattataatattagatttcactatttgcaacgttaaaaaaatatacataaaaataaccaataaccaacgtctaattataggtagtaaattcccactgcatcatacatatcatgtttggaacggcactaatttgcgaattgttacactaaattgaatatttaataagttatttgacccatccgcatctaccagtcaagttattatactagattgaacattttacaagtggaccaatctgcagccacctaacccatttaatttaactaatgcaacccacaaagcatcggggcatctccatcatggacatgctccaatgctttcttaaagttgattcaacaattcacagaaactatgtcagcatttcaaatataatagttcaatggaatcaaaatttcagatcatcactcgctcatcattcatcaggctccccacctgatactaagcttccgtattctcttatatgattcacaatctatgaatgccgactcaatattttagatagactaattcaacattttcatatgctatttctcctaattgggcctaagacccatgtagtccccttgctacaatatattttcatatgctatttctcctaattgggcctaagacccatgtagtccccttgctacaatatggactcatgaaccctatattgaaccaggccgaaactaagcc

SEQ ID NO: 41137 - DNA, 302 bp, Setaria italica
  Peptide Sequence Number=SeqID_107111
acctacttccgcctacctcgggtattccattgtttaagcggatatcccgtcacgcccgcgcgagcacttttctccgcgcctaaacttttcaaccatacaagaaaaccctagccgggcgtacgacattctactctcgactctcgtacatgtggactctatggatgcgatgttgctgtgctgaactgctgatcgacatcggtggcacaaggtttgctgctgagacgaggatgggcgatcgaatacttcctcttcaccaacacgcatctacattgaaccaactgcttcaactattctccgttgtg

SEQ ID NO: 41138 - DNA, 450 bp, Setaria italica
  Peptide Sequence Number=SeqID_107112
gctagtttctagtcacagtttcacattccagccagccgatctgcacgacgtagcatttttcatgacaagttggggttggtacttgagtccacgaaatctaggggtgaagtcaagtgtcaactttgttgctgcacaagtttgttggcttcatgctagtgcctggagaaaataggcatggttagtaggatgttgtctagtccatttaccatttctgttaccgtcttatgtgtgatttgggcacaagccaaactagattaatcagacaacttaggaagcttgcgaaatataaaatgcttaccaaatcatgataaattcatactgtacaattttaggagatcagactaaaattgtttactgtttacaacttttcaatgctgactgttgtttattttttttctagtaatcagtgaacagtgaatggtggaagaatatgaataggagaaagcatgt

SEQ ID NO: 41139 - DNA, 1348 bp, Setaria italica
  Peptide Sequence Number=SeqID_107113
cctgtctcgcctatcccgcgggcgcgatgagggtgaaggtgatatcgcgctccaccgacgagttcacgcgcgaccgcagccaggacctgcagaaagtattccgcaactatgatccagggcttcgtagtcaagagaaagccgttgagtacactcgtgcacttaatgctgcaaagttagagaaaatatttgctaagccatttattggagctatggatggacatattgatgcggtatcgtgcatggccaaaaaccccaatcatttgaaagcaatattttctggttcaatggatggagatattcgcctttgggacattgctgcgaggaagacagtttgccagttccctggacaccaaggtgccgtacgaggtctaacagcatccacggaaggcgatcttcttgtatcatgtggcgttgactgcactgttcgactctggaaagttccagtgcttaaaatggtggacactagcgatcacattggagacacttcccagccatcagcagtctatacctggaagcatgcattctggggtgctgaccaccagtgggatggtaatctttttgcaactgttggtgctcaagttgatatatgggatcctaacaggtcggagccagtaaatagctttgagtggggtaaagatacagttctttctgtgcgatttgatcctggagattgcaatattttgattacatcagccagtgatcggagtctaacactttatgacctgcgcatgtcatctccagctagaaagctaataatgaagacaaggtgcaattcggtatgctggaacccaagggagcccatgaactttactgctgcaaatgaagacacaaactgttactcctttgatgctagaaggctggaggaagccaaaattgttcacaaaggccatgtttcggctgtgatggatattgactactcaccgacagggcgtgaatttgttactggttcctatgatagaacagtaaggatttttaattatcttggtgatcatagcagagagatttaccacaccaagaggatgcaaagggtgttttgtgtgaagtacacctatgacgggacctatctagtctctggcagtgatgatacaaatcttcggctgtggaagtccaaagcttcggaacaactcggagttcttcttccacgggagcgcaaaaaacaagaatacatggatgctgtgaaggagaggtacaagcacctcccagaagtgaagcggattagtcggcatcgacacctaccgaagccaatctacaaggcagccaacatgcggcgtacgatgattgaagcggagtagaattagaattaactaaaattactttacggtacttagttaggtaaagttacctaaaa

SEQ ID NO: 41140 - DNA, 805 bp, Setaria italica
  misc_feature (765)..(765): n is a, c, g, or t
  misc_feature (781)..(781): n is a, c, g, or t
  misc_feature (786)..(805): n is a, c, g, or t
  Peptide Sequence Number=SeqID_107114
acaaattcacgccctgtcggtgagtagtcaatatccatcacagccgagtcagttctacaagttgttactggttcctatgatagaacagtaaggatttttaattatcttggtgatcatagcagagagatttaccacaccaagaggatgcaaagggtgttttgtgtgaagtacacctatgacgggacctatctagtctctggcagtgatgatacaaatcttcggctgtggaagtccaaagcttcggaacaactcggagttcttcttccacgggagcgcaaaaaacaagaatacatggatgctgtgaaggagaggtacaagcacctcccagaagtgaagcggattgtgcggcatcgacacctaccgaagccaatctacaaggcagccaacatgcggcgtacgatgattgaagcggagaaccggaaagaggagagaaggcgaaagcacagcgctccagggagcatgcccgtgcagcccttcaggaagcgaaggatcatcaaagaagttgagtaggggtagtagggtttgcacagggccttgttgttcctgttggttgggctcgaaacgtcaagttgtcgtggagtttgttgaggacatgttgagaatgtatgcgggcgttgagatttgggaccggtagctgaagtttttccccgcctacgtgcatgtgctgtatcgattttgttttgaaattacaaatcttttttatatatatatataaatatatataatatggagccagcggttttttaaaccaaaaaaacaaaaaanaaaaaaactaaaaagngactnnnnnnnnnnnnnnnnnnnn

SEQ ID NO: 41141 - DNA, 450 bp, Setaria italica
  Peptide Sequence Number=SeqID_107115
acgaaaattaggggtagttagacgacgaacgaaggttccaactgcgagtagttcatccggtagttgaagtttgacaccgtgatcttgaccctccagtactccttgtagttcactttgacatgccaatgcactcttattgggcacatgtgagaagtgcactggactagaggtgccaagttgttcttgttattaggatcgttcacgacagaagccagataaggtgaattaccctctacacagcttccaggttcagtgctgttattctggcagccacaagagcatgttgggcagttgacaatagtgtcgttgtaaaacgacgagagtgaaacacagcaggttggagatctttgagcaacaaattgtgagtatgtacaggtcacgttccaagtcatgtgtgcttgggttgatctcctcccatcctgcgatatgaacttagtaggtttcacttag

SEQ ID NO: 41142 - DNA, 785 bp, Setaria italica
  Peptide Sequence Number=SeqID_107116
gttcaggccgacgagggaaacaatttatttctcgctagcctgtctttgctgcaatgactggctagcgagaatgttaaatgtacatgcttggtacgtaactgtacatttgaatatgatctgctccacattcgagacaccgtataaagctccgcgagaaacccactgatcagcaggcaacaacatacaattcaatcaggtcaaaactttctgtgaagcacgtgcatcatcactacgcatgggccagtaggactgccaatgctgcccagacggcaacgaatgtgaggagaagcgaagctgactgccgtggagaggcgttgggcagccacgggtacgcgtccggcggcggcatcacgcagttgtcgccgttgaagtagactcgtcttgggaacgcccagcctttctggaaggtgaacgtggagggctccttccggaacagaagctcagactgaacattcccgtcgggcccggccgtcatcagcagatcgttgtagtacttgatgccccacaacattgcggtgtcgtttattactccgtaggggttcagagatttgtagttgaagctgaaaatggtagtcaggttgtcgaaattggggtgttgcgcgacgaggttccactgcgagtagttcatccggtagttgaagtttgacaccgtgatcttgaccctccagtactccttgtagttcactttgacatgccaatgcactcttattgggcacatgtgaagaaagtagacaacttaggaacttaagaaggttagtacctaaagtttagtttactttagttta

SEQ ID NO: 41143 - DNA, 729 bp, Setaria italica
  Peptide Sequence Number=SeqID_107117
acaggattcctgagagagcagtagacttgttggaactcgtacatagtgatgtatgcggaccaatgagcacgacggctagaggaggattccaatacttcataactttcactgatgatttagtagatatggctatgtctacttgatgaggcacaagtctgaaacctttgaaaagttcaaggaatttcagaatgaagttgaaaatcagcgtggcaagaaaattaaggccttacgatctgatcgtggaggcgagtatttgagccacgagtttagcaatcatctaaagagttgcggaattgtccacaacttacgccgcctggaacacctcagagaaacggtgtgtccgagcgacgtaatcgaactttgttagacatggttcgatcaatgatgagccagtcggacctaccgttgtcattttggggatatgctctagaaacagcagctttcacacttaatagggtaccatctaaatccgtagttaagacaccatatgagatgtggactggaaaggttcctagtttgtcttttctaaagatttggggatgtgaagtgtttgtcaagcgacttcagtcggacaagatcacacccaagtcggataagtgcattttcgtgggatatccaaaggaaactttgggatattatttctacaaccgatcagaaggcaaagtgtttgtcactcggaacggggttttcctagagaaagagtttctcaaaggagaaaagagtggaaag

SEQ ID NO: 41144 - DNA, 425 bp, Setaria italica
  Peptide Sequence Number=SeqID_107118
atatatgcaagattaaatttatttagtcttaagaagtgttctcctattgctggattcagttggtgattggtatgggtgtgtccttttctgtctgaaactttggatgctgctgaacttgattgtacatgtgtagtgtattttctgtccaattgggttctcttccttctgtgattgggaagtgctgcctgcatacctgcttggcctttaacattggataagcagtagccggagatgcccagctgtaatgtgcaaactatgctttcttatgtagtatagccctaggacagaaccacaatgttttattcatcatcggactcatccacattcacagccacatgagtaatagagaggaagaaatcatcatcatctgacgacgaatccagcaccagttgcattggaaggcttcgtcgactcatagcgaatct

SEQ ID NO: 41145 - DNA, 507 bp, Setaria italica
  Peptide Sequence Number=SeqID_107119
gcgggttgatcatgccggagttgaagatggcctccaggatccggatctgctccggccgcgggttccaccgcggcttcggatccggggtccgctcctcgccgcctgcgtagcctgaggaggggtgcttgttgaggcaggagccgccggtgttggtggtgttgccgccgccggagaggagggacgacggcggcgagctgctgatgtcaggctgcggctgccactgctcggcggcgtgcttggacctgaacatgctcggccagtgcctgttgttgaaggaggaggccatgccgatcgagtccagccttggtcgatcctcccccctatgcagcaccaccagatcttcaagcaagctcacgacggcgagagagagtggcgacggctagcagggattctttcttaactattacccgtgcgcctgcagctgccgcagaggaattatgtggaggaatcaacaggccgtggcgagaggatcagtgtgcttagctttggcttccttattacttacct

SEQ ID NO: 41146 - DNA, 531 bp, Setaria italica
  Peptide Sequence Number=SeqID_107120
ctctccgagccggcgaacgcgctctcgctgcccacctgggccgtccacgtctccagcgtcgccgagtgggtgacggcgatgtggctggtttgggactacggggagaggacggggatcaagggctggaagggcctctcttgggggatggttccacttctcggtggagcgatgtgcgcttgcacatggcatttcttctacaattcagagtcccttgaagtccttgtagctctgcaaggtgctctgacggtgattggtaacatgacaatgtgtattgctgcataccgcatcttcaaagcgtcccaggaaagctctaaaacttcataggctgcaagattgtatcttataactggtttcacaaggagtggtttgcaccttctgaaaaatgattatgaccaagttgaataacatggaagtgcatctatcctgtaaatgcctatgaaaattacccagaaatccagttcacttactgacttagataaacatcacaaataaaagcaatgtcactagttacttaaattagttactaactta

SEQ ID NO: 41147 - DNA, 439 bp, Setaria italica
  misc_feature (366)..(439): n is a, c, g, or t
  Peptide Sequence Number=SeqID_107121
ttaggttacccgttacttaagttggttcgtcgtcgtcgggtcgtaggttggtccttgcggtgacgtcggcgacggccctatgggggcggtgggctgctgcggcagcgttggcgacggccgcacggggacgacgagagaagattagtaaagttagtttggtttagtagagtagctcaagctttttagtagagatatgtgtgaaacaatcagtagagtttatgaggatcatttagtagagttagtttttgtttagtagagttagctcagatacgagagtgctaaacttgcaaactggctactcagcatccggatcatttgtgtccttattaagctttctaataaagtcaggtggataccttgaaattnnnnnnnnnnnnnnnnnnnnnnnnnnnnnnnnnnnnnnnnnnnnnnnnnnnnnnnnnnnnnnnnnnnnnnnnnn

SEQ ID NO: 41148 - DNA, 752 bp, Setaria italica
  Peptide Sequence Number=SeqID_107122
tttttctcgtcctgctttcccgtgaaacctagggcccttgcgccgccgccgcggcgaagcgccgaaatctctcctcgtcagatcgttctttctcgccgcgatgtcgtctatgtcgagggtgagttccgatgctttcgtggatctcgagaaaggcgccaccggggcgaaggcgagttctgatgcttccgtggatctcgagaaaggcgccaccggggtgaaggcggcggcgacggcgacagaggaggaggagcagctggctgtggtggaccgtcctgcgatggaccctcgcctggcaatgtgtatcaaggttacgctggatgtgtgggccgtgctgtacgtgttctattacattggcatgaccactttcatggtgaggcatgacaagtgggattcatggccggctgttcttatccagtcgacagtcttgatatgggcaatctggatggcacccaagatgaagtatgacacgaagcctacacgaggaagcgatggcagcgatcttagtaccggactaatagcatataagaaataagctaatgagtgagttgaagtgaataaggggcaccgtttagttaatatttgatatgtggtgccctggtagaggtattggactggtagcatgcatggtgcctgcttttaatctatagctgttgagctttggtacatccttttgataaatggagcatgcaccagatggatgtgaatttcattttgagtgaatacaacttatattgagtggtagcttaatgacc

SEQ ID NO: 41149 - DNA, 239 bp, Setaria italica
  Peptide Sequence Number=SeqID_107123
aggggtatgttgtacttagtgggtcaacagtatatagtatggccgtatgggtttgaggttgtatcatacgtacgtaacagtattctttactgcaccataaagaatactgttacgtacgtatgatacaacctcaaacccatacgtacgtaacagtattctttatggtgcagtaaagaaacccgctgatttgttcttgtaatctttatgatttaattctatcaatatgttttcttgtggct

SEQ ID NO: 41150 - DNA, 163 bp, Setaria italica
  Peptide Sequence Number=SeqID_107124
cttaccaacaacctctgttacacttatgcaaggtgcacacgctctgtaacagaggttgttggtaagagtctgcaactcatcagcagagaagttgttctcatcccacaagacatgataatgagctggacgactagtgcccttaatgccagcatggctgcacaag

SEQ ID NO: 41151 - DNA, 478 bp, Setaria italica
  Peptide Sequence Number=SeqID_107125
attattcgctgggcttctcccagttgattttttgtaaggatataagtacgatcccttatccattcccccgctaactgtccctctctgtgggtcttgccagaccttatataaatcctctatcaattcttgacgatgagcttgagcagacactaatccagcatactttgtcacctctggccaatcttgggaggccacaacagcagcaattgagggactgctgtcctctccaggatgaggatgagtcacgtcagcaccaaatatgattgtaggtctgtcagttaccagaggaatccgccttgagactgcatctaccagtacggtgttcctgcccccaacctttgccaaattacatgatgtcaacttgagtgacacaaaagaaatacaaagtgcaaagaaaacacaaaagtggagggtacttaaccttgacatttatcttcagagcaagatttgcaagaatttgttttgttcattttgaaca

SEQ ID NO: 41152 - DNA, 3605 bp, Setaria italica
  misc_feature (176)..(176): n is a, c, g, or t
  Peptide Sequence Number=SeqID_107126
aattgcctattcagatcgagccaccaaatagtagtgttcggactgatgctgaaaagtcacaggatacatttcgtttctttaagagctgccattggctcccacggggcttaaagcacctgcctgcacaactccggataaccatactaagataccatttgctttacaccgcagacagntggaaatactcaaacaaccaagggtattaccattacaagagacaatagcacgagtgcatacatatcctagcatatggagcatgaggaagaaaccctagaccagcatagcaaacggtaacagtacagcacgcaaagtagcaactgccagattattactcttcccatatttacaagtgaggctagcctcagcagtagaacatgaccctttttacgttatccttcagagctggaagtggcctaacagctgcaccaccagggggccgagcgctgcgggatgttggctgctgtccacggcctgcaggaccacttgccacagaaccactgtcagaggtctctggttccatgtagaaacgagctcggaaggcagccaggtgagcataatacgccggtggaacgattgatacagagcgtgtgcaccttgcataagtgtaacagaggttgttggtaagagtctgcaactcatcagcagagaagttgttctcatcccacaagacatgataatgagctggacgactagtgcccttaatgccagcatggctgcacaagtagaagtcaaactcagtaggatggcagatcttcgaatctacaaccgtacctgggagtatgtttccactcctgtcaattgaattttgatcattgtggttgtgagcaaataatctggtatgatggcgcttctgaaccacaacaaaagtcaccttcggttggtagttcgcttccagggaggcacatgcctttcggattgcatggagctcatacagcagaacttgataaaattgtccttcactaacaccatccctgtaaaatattattcgctggggcttctccccagttgattttttgaaggatataagtagatcccttatcattcccccgctaactgtccctctctgtgggtcttgccagaccttatataaatcctctatcaattcttgacgatgagcttgagcagacactaatccagcatactttgtcacctctggccaatcttgggaggccacaacagcagcaattgagggactgctgtcctctccaggatgaggatgagtcacgtcagcaccaaatatgattgtaggtctgtcagttaccagaggaatccgccttgagactgcatctaccagtacggtgttcctgcccccaaccttgacatttatcttcagagcaagatttgcaagaatttgtttgttcattttgaacacctgctttgtacaacagcactgtgaaactatcccaagatctatttcacatacacgcttcaaatcaccgtaaagtgagccgttattgtcaggtagtattccgataagtaaatcaagttccctgcgttggggtccaagaacattcatggcatcatggtacctagctttcagagctcgctccacttgatcaggacgtgcatatagaggtggaagaacaggctcccgagaaaagtccattcctgacgcttggcacatcagtgcaagttcatgacagaacccacgaacaacactctcttgcacattgcgggcgaaattgacacatatccagcttctgactttaccaccatttaccattttcttgttcatcatattccactgaccaactctaggcaagcaatccttctctcgaccagtctcattgtacttaagccgtggagctggtaaaatccgtgcctctactgatgccagacgatcgctaatcttaatgccaaactcttgcgcataatcatccttctcataggcgttatgtttaaccatccgaattatatcacgttcacgatcacgtgggtgctggcatgtctcctccaaaagagcccttatctgattttggtttaatctcttggagtacctctgtccctccactattttgcagacctccatgggcaagtaatttggacgctgttgattgccaacttgaaggcaaggaaggtaggtgtgttggatggcaaagccatatgtctcttgaaagtattgtacaactgacttcattgtacccccttcatcaacaggaaaagttaactctcgagtcgcctgagtagttaatccagatatccgatactttctccgcatgttgccacgatgagtaacttccaccttaactcctctcaaggccttcttgatcttcacacgttctgcgtctgcaaggggcctagagtgaatgtcagaattcagcagttgtgcaacaaattcaattacaggtaatggctcaatgaaagccgttgctgacatatcgatattcagtgacaagcccatctgggtaggcctgatgctctgataaaatccccgccagctttctaatccatcgccaaggggctgccttcggcccaagacaggcgaaaagaacgaccggccaaatggtgcatatcttgcagaaggcagctcccgcagcacaatatcaagaacttgcaatgcctcttgaggagcttctgcatgcctcccagctaaaaacatctcgagacggtggaggtcggctcgtgcagcaaatttaatgactaccttaaaactcctacgtcgcctctcggaaccagagccatcatcatcatcaagtaaagtgatatgaaattcctgggaagtaaacggcaacgcgccagctgtgtacaggctcttcctaccatcataggctggaaggcgcccacccaaatgagattgcctgtggagattcaccaactccttgattatggctcgactaaggattcgtgacgtgacttctggtgtgattgagacatcatactgatgaagatccctgtctggcagttgcgcaaagaaatgattggccttaaccaaacacctggtgccaacgctaccttttcctgggcgcaaaggaaacctgaccgacttgcttgatgaaggaatcgcaggcgcaatctcactgcctgcactagcctcggcgagcttgtgctcctcaatctgtggttgtgattgtgaaggacctgcgtgcagtggtgaggcttgagcaagctcgtgaggagcttccattgcttggcgcagctcgggagctaaagggctcgatgatccggtggctgacgggccagccccctgcccaggcctagcagcacgtgggtactgttgcggcagcggccgtgttccaccacgagcatgtcccctgcccggatgctctcccctcggcggcggcggctgctgctgggcctcgtcagcacgagctgaacgccctccaccgcgcccctgattcccaccacgaccgcctcctcttccagcaggctgcggatgcgggggctgtgagccctcgccaacaccaggatgctgccttcccctcctcgaccccatggccaaggtttggggtccaaactttgggcttgaggagcaggggggaggggattgcggtgaatcgagtcgaatccaatccaatcggcaacagggaagcgagcacgaggaaagggggatggcagttgctcttgcatgtctggacgaacccgaggtgagagacgagacgagcaga

SEQ ID NO: 41153 - DNA, 355 bp, Setaria italica
  Peptide Sequence Number=SeqID_107127
tttttttaattgtattttaggttgtttacttgcaaatcattatttaagtggacatctacatccaaaaagaaaccgaaaaataaaaagaacaaacaacgtagtatgtcgacgtcgacctaacagctgacacctgagcggtggaatggcgcgaacatcacaaatagacgagcaatatggacacgtgcggaatatagcttgttcgtcttgcacttcagtggcgggagatgaagctcttgatggcgtcgatgagctcccgcgcccgctccccggtgacggggtccatgtcgacggcgtacttgttgaggtagaaggagtggctcatgcctcggttgatgagcacctccacctctgccgg

SEQ ID NO: 41154 - DNA, 661 bp, Setaria italica
  misc_feature (1)..(48): n is a, c, g, or t
  Peptide Sequence Number=SeqID_107128
nnnnnnnnnnnnnnnnnnnnnnnnnnnnnnnnnnnnnnnnnnnnnnnntttttttagttttgtcaagaacccaatatatcagacgttgtttgcatctatacattccacactgatacatcgctgttagcaatttagaacttagaagctacagtcatcccactcagctagctgggaagaaatttctacggtctccctgaactaacctgcatgctaccccattgctcgtgacctcatgttaatcttcaggcatgcatcatcactgcgtggatggcacgatccatcagcttgcttgcccagacaaccctgacaaacggcaaaggatcttttcaactttgcacaaaccaacggtgctgcaggaaggggtcaaacgagcaactctaccactaccatgcacgccaaaaaagaaactggggtggcctgccatttggattttggacgtccaccacatagtcacatagtgctcactgaccagcttccatcactagcaccaaaggatccttcaaacttctgacatgttgtcttgctgataaggatgttgccttgcctgtcctctcaaaagcaagtgcgctaagcccccaccgatactaagatctctaagcttttcctgacttctagactatatccactaatgcatgcagtgagattagactaggcttatcca

SEQ ID NO: 41155 - DNA, 529 bp, Setaria italica
  Peptide Sequence Number=SeqID_107129
agcttgctaggcatccaaatgaagaagactgccctcaattcgagcgcgtcagtattgcatcccgccacctgaaacacctgattttgtcagaatccttcttgagcgacagaatgctaagacagctctcttctcagtgcccttgtttggaagtcctggacctcaaggttgctatctgagaggccatgagatatcatctgcctctctcaggagcttaaccattgtcaaatgcagtattcaggagaatctcaccattgctgctccaaaccttctatcgctgtgctgtgtcaagctgtacttccgagttcccttgttccagaatatgggatcaattgccacggccactatcgtgcttgacgactccttgcatgttggttatgaacacgagcctaaactcacccatgagtctgcacatgatggaggcagtgacagtgactgttcacttgaagatgaacctaaatactgtagtgattcctgtagcgatgcaagtacctgtgaatacaatgaggtcctatctgataactactcacac

SEQ ID NO: 41156 - DNA, 843 bp, Setaria italica
  Peptide Sequence Number=SeqID_107130
taaggggaactaatttttactactactactctaaatacaatgaaacgcagctctcctgcgttttaaaaaaaataataataagatagggatatgatttagggttagaggttgattcccactctggtgtttgcttgaatttgaatacacactagatttatgagacgaagggaactaagataaggataacctgttgtggcattttttctttctttcttttggtgtagaacctatgtttggagtgtgggtttcattgtaatatgttgaacattttaataaaaaaagttgcactagggccacaaattaaattttggagggctataaatttttagagagaataaatgttcaattggcccacatcactcattatggtgttttcctaaccactggattattcgatattgaatggaattgcgatgccaacaaactttagtgaaaaaaatgtagtgggaacagactctggatgttagggttgcattacttttaatgcataaatgtagtgcgctaccatagatatctgaagtcaaatgcatgggagctggacagctgggacaaggggattaacagggaataaacaatttccattagaaaaaatagaggtggaacaaggtggttatagttcaaacttaagaagtttttttatcatgactcctgtagtcctgttacatcaggtagctgcgtcagaaagttatttcattagaattaggaatatttgtgctaatcaatgcccaatttggatccttctgtaatctgttcagtgttcactttgctgtttatgttatgcagtcacaatgtgcttcaaacgttcattcagtattcaatttcatatatgctgtcatctattag

SEQ ID NO: 41157 - DNA, 275 bp, Setaria italica
  Peptide Sequence Number=SeqID_107131
cgagggagagcattatgcatataatctgggagactgataggtggctgcagaagtactgtgcaactaatcctgggaacatcaaggatatggaaacgaatgttgacacatcacaatcacctaatgatgctgtactggatcatgaagctttgaccttaaacttcactaagatatctagtttgatcaagttgatacggttggcctttgctcaaattgtttttaggaagtcaaaaaacatatgcaatgatattgattggttcctatgcacagaacaaaat

SEQ ID NO: 41158 - DNA, 418 bp, Setaria italica
  Peptide Sequence Number=SeqID_107132
tttagtgtcacacagaaaatacgttttaccttttcccacccgcgtgttggttgtcaaccctggaagattgagaactagtggagttatccgtcagtttataaaactattctgaaaacaaggcagaaatgctgcatccattaatttgtaaatcagatattgtgatttgagacctggtacatgctgcattcttcaatactatgaaatgaggtactccctccatcccaaattgtaggttgttttggcatttctcggttcatagcttttgctatgcacatatacactatgtctagatacatagtacaagctatgaatctagaaatgccaaaacgacctacaaattgggatggatggagtattacttatcccacacacatttctaaccagaggttcctagttaacgggcatatgatatgtggca

SEQ ID NO: 41159 - DNA, 233 bp, Setaria italica
  Peptide Sequence Number=SeqID_107133
ttttaaataaaacagcataatgcttaacagaacatttcccatttgttttttttcaccaacaccgtttagacaaaccaatatacatttacagcttcctatgtcaatatatagatacactgtcttacatttgagtcgaaaacctaaacttgcgctgcactccctgtcaagtatgcaaacagaccgggtgcactctacaaatgcatggcggcataacaaggcacacaggggatagg

SEQ ID NO: 41160 - DNA, 536 bp, Setaria italica
  misc_feature (529)..(536): n is a, c, g, or t
  Peptide Sequence Number=SeqID_107134
aaggacccgaacctaacaaagactctggggcttcggcgacgagcgcaccatcctcatggagctcgccgccggcctccgcgagtccggccggctgccattgccgttcgagctcctccgcaccctggaagccaaaggcgttctcaaccggcggaacgtcacccgcgaagaaatcagcagcaagctccacggcctcaagaccaagttcctctcggccatcaacaagggcggcccgggccacaaatcccgcgaccagaagctctacgagctgtccaaggaggtctggccggagttgctcctgaaggcgccggagcttatttgatttcccttctctattaaagttaccaattatcagttgccacaactctcttcggttaaattaaaaatgcctatttccttcatcaattgttctgggaaacatattcaaatggtttcgacgccatttctttggattttcttcagatttgtgtgcctttccatggatattgcatcaatatgagtattattgtcctatatgcaaaaaaaaaaaacnnnnnnnn

SEQ ID NO: 41161 - DNA, 579 bp, Setaria italica
  Peptide Sequence Number=SeqID_107135
ttgggtcacaaggtgcaaggctgcagtgatcactgcagctgttctggcttatcagaaatttcagactggtttcaaagatgttacttagacatgagttttgattcaaaatcatcaacagatattgccttatcctttctggcattgtatatggaggaggatgacatgctattcagtattctcttacagctttttgatgctccacacattttcctgaaaatagatagcatgaattctactgaactgattggtgcaaaactgttctcaagtattttcgacccagttcacctattccatctgttgcttttgctgctgcactatgatcacatggtacttgttgattacctcatatctaaagatgttggtgtgcattgtgctcagtatctcttaaggtgcttacgcttggtttcccagtcttggcatgcttttgttgatgattccatgtacttgacaaaaatagaaaagattgactgtaaaaaggacagaaggaacctaccaagggaataataaagtaagtagaccaagaagaccaagactaacaaaagtaaaaagaaagttaaattaaaagaaaattaaggttaa

SEQ ID NO: 41162 - DNA, 1655 bp, Setaria italica
  Peptide Sequence Number=SeqID_107136
cgcctgatgatgctgcactgatcacacatgttgatcttggcccaacaatggtagttataggtttagtgttcattgtaagaccagttggaggccacagacaagtgcgtccttctgatggcacaagtttcacatttgtatacagcatctgcttgctcttggccgcttatctgatgggcgtcatgctactggaagaccttgtcgacttaagccagtcaatgactgtcttgttgaccatcattctaatcatgtttttattagttccaatagtcatcccagtgctactcagcttcttttcagatgacgatgagactttgtatgcactattattgccatcacctcggaaagaagaagcaagtgcatcaacatcttctgaggagcaagaggaggttatactcagtgaggtggaggatgaaaagccaaaggacgttgatcttcttccagcctcagagaggcaaaaaaggattgcggagttgcaggcaaggctagttcaggcagctgctgttggtgctgtgagggttaagaggaggagaggtccacgacgaggtgaagattttacactgatgcaagcgctcatcaaggcagaatttttggcttctatttttctccctactgttgggctctgggtccggtctcactgtgattgataatcttgggcaaatgagccagtcattgggttatgaggaaacccacatttttgtgtcgatgattagcatttggaacttccttgggcgcattggtggtggttacttctcagagattattgtcaaagattatgcatatccaagggcaattgcattagctatagctcaagttttgatggcaattgggcacttcaactttgcaatggcttggcctgggacaatgtacattggcacactgctcgtcggaattggctatggcgctcactgggccattgtgccagctgctgcctctgaactgtttggggtgaaaaattttggagcactgtacaatttcctcacagttgcaaatccagcaggttctctggtattctcagggattattgccagtggcatctatgacgcggaagctgcaaagcaggctcagcagcgccacaactccacattgttgacaatgcctgcaagagtggttaccatgatatctgaagctgctccagcactgaagtgcgagggtgccatctgtttcttcctctcgtccctgatcatgtccgggttctgcatcattgctgttgtcttgagcttgatcctggtttataggacgaaaattgtgtacacgaatctatacgggaaaccacgcacttgaaagatcagttcccaagggccggagggcatgatatagtttcagagttatgaagacatacttcagttttaaatttagtctgtggtatcccgccgttcctgtacaggcggtggtggactgttggccttcaacttgttctgcaccatgttcctttggagagcaggatgggaattttgcgttctttacgaagtgctgttgatgagcaactcgagtcacagaataagctcccagcaggtgggatcatgggaggtattgggtacgacatcgttaagtatatgaaaataaagtaaatggtagaattgtgtcttttgcagttttgctcaaattttgttgtgtttagttggaaacaaaaaattgtatcacactgtaataagccg

SEQ ID NO: 41163 - DNA, 454 bp, Setaria italica
  Peptide Sequence Number=SeqID_107137
ggcgccgagcagcagaagcagcgaactagagtctgatcttgcaggaagcatatatgtatcgtggattatatatctacgggtgttgtgccgtcgtacgtcggtcgattagttattggtcgtttttagttggttgttaattgttggattattgtcgtctcgtgtgtgtgagtgattagttgcccttggatgtcagatcaccaataatcaagttgtgtggtagcgtgtagctgctatgtttgcgtgtggtctagtagtagtagctaggttgcagtcttatggcctggtcctgatctctctggtgtaggtagtgcttgctccggagacccatgcatgagattgtaacagggcatctgttttagtttaacgtattctttgtgtgctgtgaacgtgctgtctctagcttgtagctacatcagtgtcgtggttgatatacgtgtggcttgtcttgtcctcg

SEQ ID NO: 41164 - DNA, 512 bp, Setaria italica
  Peptide Sequence Number=SeqID_107138
taaagacctgcggggcggctgactttcaccattgaaataagttaagatgcgttcaaaatacttcacatatctctgtaatttttcaaaatattcagaacaatataaagacaaaattatatggataaacttgtgtatatcaatgaagttcactcacaatctgacttggaagaataagccccttgccgtctacacatcttttctggttatagtattcaatggactcctcagcagtaggaaagaactttagaaacagtagaagactcgagatcatcaatcctgttcttgccttcccagctttgcaatgaacaaccaccacgttctctatatcctctttcaaccatgagtaggcactatggcaaaatgatatgacaagttgtattggagggcagttatgatcatcaaatgggaagcaggccacctttccttcaaaaagggatgcatcatatagcctttcaagaaacaaaaggttagtaacaaccttaataacttaccccttaataggtagacaataa

SEQ ID NO: 41165 - DNA, 2553 bp, Setaria italica
  misc_feature (1)..(52): n is a, c, g, or t
  Peptide Sequence Number=SeqID_107139
nnnnnnnnnnnnnnnnnnnnnnnnnnnnnnnnnnnnnnnnnnnnnnnnnnnnaactttgtaaattttttttctacaaagtcttctgtaacactcgaattcaagtaattgcaccgtttaaggttgtgtacaaagtagtcctgtgaagaaataggtgaggtatcaacaaagtccagtcctgagtttcaacacgttcatctgggaacaacatcacagattgatgcaacttgtacagtgaaaacaaaatgcaagaatgaatcaatcttttttttccaacttctcttcccatctgctttgaactgacattctatggtgacccccagaaggcaccaaactgtacaatgcgaaccaaacaccatgaaagtgactattcactttcataatcatcttcatctccaaacgagaacactgaggcatctgctgcaatcgccttgaattcgctcatgctggaagagtcaacagctggagatggtgctgtggtggagctgcttttgctgctgacttcagttttgagggatgtagcatccggtgcctttgcagctccttgttcgctggttatagctactttttccagtctactagcagcagctgatgcctcctcctgtactgtgcttgtttcagatggtttagcagcatttgcattgctttgaccaccactggaagccttctcctttcttcccttggatgatccatcttccccttcactgtcggagaaaacttcatctttatcattgcttccagttcccttgttggattctggaggtgcagcattgctttctttagcaactgtgctacccgaggagtcagcatcagttttattatctgatccagcagctggttttggttttggtgcttgtgagccatcataatctactagaacaacctcaacctggaagccaggtgatggcaattttctcttatcaaaatcatcaagatcggttggattcaaagtcaccctgttctccatcattgttgtatttagccagcagtagaaatctccctgtcgatcatgaaactggatcttgaaatcaccagaaacctcagctaagccaggttctcccggcaatgcaaaaaccataatccccttctttggtgcactaaaccagaaatcttctggcattagttcttttgttcttggatgcttctttgtagaaaaaagaacgccgttgtgattagagactgtaattgatggcctgatccaataggggcatctatgaagacgaaaccctctaagcatacacctgcggggcggctgactttcaccattgaaataagttaagatgcgttcaaaatacttcacatatctaatctgacttggaagaataagccccttgccgtctacacatcttttctggttatagtattcaatggactcctcagcagtaggaaagaactttagaaacagtagaagactcgagatcatcaatcctgttcttgccttcccagctttgcaatgaacaaccaccacgttctctatatcctctttcaaccatgagtaggcactatggcaaaatgatatgacaagttgtattggagggcagttatgatcatcaaatgggaagcaggccacctttccttcaaaaagggatgcatcatatagcctttcagaacaaaggttgtacaccttatacttccccttatggtgcatttcaaagaacctgatgacttcctccatgtggttgcggtagaaaccctcaaaatatccaaaaagccctgaactcaaatcaccagcaggaaaacccatagcaattatgttctcagtaatatatgtcatatctaaatcaaatcctccttcctggtatcgtcttttattctgtgagaccatgtggcgagccttgacttgcactgcctttacagcattcttggaggaatctacaatgccttttgtcaaagaaccaaaaacaccaggctgtcctgttgttggggaggtgcttccctcagcaatctcatcttgctgtgcagcttttggagacaaacgcaatccaaagccacttgtaaaacgggcaaaggtattctttcctgttggtgattcttgacctgatgaaggctgaggaatttttaggttcttagcccaggatgataaaccagatgtagaaaacatggatgccggtgcctcacgtcccgcagcatcttttgcaggagcagcagttggtgcagagataacagcaggatctacaccagcaacctgactggaagaatcagttgaagcagccggacgaacagggtcaacagtggtaacaggaggagttgcagctgaatcctggttgtccgaattagttggtggcagatcagatggcttgacttgctgttcttccatgactgactaatagatgttaattactcttaaggactggagaaaaatgtaacatctgaaggcggggggtgacgggatcgagcttcgggggcgaattgcgtcacagatgagcaccggcagaggaggtggtggttgcggcagagggcagcgtgggagatggaggcgggcggcgccggcgagatctcgcgaggaacaaccgaaggaggcgacgcgagggctgaagcgcttgggtaaccttggt

SEQ ID NO: 41166 - DNA, 934 bp, Setaria italica
  misc_feature (1)..(39): n is a, c, g, or t
  Peptide Sequence Number=SeqID_107140
nnnnnnnnnnnnnnnnnnnnnnnnnnnnnnnnnnnnnnnaaccgtttttaaaccctttatttctttccgtaatttgtcccaagagtactggtaacaaacctgagtgcttttacaacttgatatccaaatcgaccatacctaagtgcctaacattctaccaaaataacaccggtacataatagggataatagggatacttgccgctaaacccatcattacggtagagctcacttgtcccgaagcaaaaaaaaggattacatgtgaaaacgagcaccgtggcctcaggtttttcatgctgaagccctcctcagtggcacagattttgctgtcctcgtctagataaaacttgggcataatgaacaggaagcaatcccttggtaacccatcagagagtgtcgtgcttggcacttggaattctgaagaccgggcatggtacagactgttcttccagtagttgaaggacatagcacaccggaatttcgggtcagtgtcatgaggccacacgcagaacaccgagatgacacagccaaacgactccgacacaacgttgagcaggaacaactgcttgtcttcgccggagatgacacgaatcccttcctggatgttggcgtaaaagcaccagtcatacctgaacttggtggaaggccactggtgcacggcaatgaaatgttcttggagcattccagttgatccggagaagctacagccggtgtcaggacagaagcatggagcatgtgagcatgttgtctcatgatcttccctctcgtagtagcttgtcttaatggagcatccgtacttggtgttggagcaaggaacttggatagatccaatgatttctcaatcccatggcagcggttgtagtcactttcgcgggagcagtagtggcatttcttaggatttgggagagctgtgtcaagaagaggcgtgcgaggag

SEQ ID NO: 41167 - DNA, 426 bp, Setaria italica
  Peptide Sequence Number=SeqID_107141
atgagcagcgccttgacgttggtcatggtgaagccggccttcccgtcgccgccttccttctcgagcctgagcatgtactcgaggaagtctggggtcttcgtccgtccggtcctttgctcggccttcaccctctgctcgatgatcctggcgaacatctggttgaagcgctccttgagcacgtcggatttcctccggatgccctgcaggtcgaagcgcgcgagcgccgggaagaagtcggagacgttgggcgcgccgagcatctcggtgatctcggcgacgaggtggcggaactccttccccaccgcggcgcgctgggcctcgtcgccgatgttccctccccacagcgtgccggtgatgacgttcatggtggtgaggaacatctgcgcgccgacgtcgacgggggcgccggcggccgcctgggcgtgg

SEQ ID NO: 41168 - DNA, 430 bp, Setaria italica
  Peptide Sequence Number=SeqID_107142
gctcgtacgaccacagctgaagcagcaacagacagccaacaaagatgggctccatcgagtctaccttgcagcagcccatgcaaaggcccctgtaggttgctgccaatacagctgaaccccagttgtactgtggaacctcacaagcggggcctccgctatggccctcatgtaaggaagtaggtgattaggcatcgagttcccctgggacgtgcaaaacatgatccacccgaagagccacagcaagtacgcctccaagtgccgtgcaactgtggcatcatcgacatcgtctgtcatgtagtcggcctgcacaacaataaaagttagttgacaaaatcacaaaagttagagaaaatgatatgaaaagtcaggtaattaagtactcacactgaactacatgagccacttcttcatgggccagtgtgtcgtgctg

SEQ ID NO: 41169 - DNA, 599 bp, Setaria italica
  Peptide Sequence Number=SeqID_107143
aggatgtgaaagctcaaaaatatttgtttcgagataaaaaaatgtataacccagacaattatgaattcaaacaccagttcctgcaccaatatgtttcacaggtagaacggatatatagcatcgacgtaggacagcaaatttgtctcgcaccagcgcttgtctaagcgccaacagccggcccatccctcccaagagctgcatccgcttcgccgggctcgcgcgctgaggcagagccatcccctccggccgtggcgagcgggatcaggcccttctcccggcacgtccggatggcggcgtcgaacatgtcctccaccgtgtacctgaacgtgaacccgtggtcgaggagcttcttggacgagaagtgcacgggctggaggtcgccgtcgtcgatctcccggaacctctccgggatgcggtactcggggtacctctccctgagcatggcggcgaggccgtggatggtggagtcgtgggaggagcagacgtagcggccggcggcgtcggggttctcgaagaggaagatctcggcgtcgcagaggtcgtcgaggtggacgaactgcacctgcttgaggatggagtagtgggcctcgttccccgtg

SEQ ID NO: 41170 - DNA, 473 bp, Setaria italica
  Peptide Sequence Number=SeqID_107144
aacctatcctgctcctcctctgtcccaactgaagatatgcccctttgggtattgtagtcacatccataaatcccaggaggcagcatgtgaaaaactactacttacccctataagcagagctgtctttactctgacaaatcaggccatcactttgaactgttgggaaagaattctccatgggtctctcgtgtttctgcatgtcttgcaaatgagtcattgactgatctttattcaaaactaccttttcaaggagtttgtatggtgaacagacttggaagatacagataatgcctccctttggtgaaaagggcaggcatgctcactgtccagcataataaaggtaatgtttcccagcaaatcgaaggaaaggcatgcttactgcccattaaggatttaggctcctaaacttaaagttcctctccagcttttgtgagtatcctctggccctcttcctagtcactctgtgggattgg

SEQ ID NO: 41171 - DNA, 417 bp, Setaria italica
  Peptide Sequence Number=SeqID_107145
cggagggtggggcgcggggtacggcggccccggcggcgggtacgcgcacggcggcgtggacgtgccgacggtggtgtgccaggagaagggaccctgctacggcaagaaggtggcgtgccccaagaggtgcttctggtcctacagccgctccggcaacggatacggcgccggcggcggcggagggtcctgcaccgtcgactgcaaggacaagtgcaccgccacctgctgatttcctcatcgatcgcatcatggatgggcagaggcattgtagtacgtacgatggagatagctgctggagtgctagatgatctatatatctgtggcatgtatgacgatcaatatgtagtataatgctcctaaaataattgcaaaatgttgtgtgtgcagtgtcctttatctactactatgttcttatgt

SEQ ID NO: 41172 - DNA, 571 bp, Setaria italica
  Peptide Sequence Number=SeqID_107146
atcgataactttgaactatcataaaaggtaaattctggagatacaacctgggcttcaaatgtaaaatttaacatttggtttgccggagcattgctggcattctggagagttctcttgttatgttcttcaagttttagaaggtcctcgtcatcattaccgaaagaactttctaacactgaaacctccacaccatcttcagcagcgattgagtagctacttccagtgctcaagtatacacatcttctaagaagggcaccattctcaattttaacattttttaatcgaagtcttttaccatgcccaataatgattatagccccagagcatagctggcccttcttatcaaattcttcgcataatgatatagtgcctccacagccatcataaatgaactcatcaatgtcacaaccatcaactattagctgccttcgaggagagagttgaatgacattctctctttgcaagaaaacatgttcagaaagtataatatcatcagacctcataagaggatcattctttgggtctagactttcatctctgccagttattgtgcctaaagaaggcacaaaat

SEQ ID NO: 41173 - DNA, 475 bp, Setaria italica
  Peptide Sequence Number=SeqID_107147
acaaaggaaatagttagctcagactcagtgtgagtagtggcagctgaaagttcgtgtggtggcttcacaagttgataacagatcagacgatgttgtagaaggcagcgttgtcttcacacctttgaaggccggctgtagcagcgctacatgtgggcttggcttctgtaaggtggaaattactgtggcttggtctcttctcgcgactttggcgaagatgcgctttctatctgtttattaggcgtggctctagccataatacttgaagctggtcagtggcatttcaaagctctcatttcagagctctcgatctgtgtttattactcggcatgacgaccgtcgatctgttcaagctggtgagcttatctattactcggcacgacgaccacagggacgtgctccaggtggcgctccacggtgacgccggcgtggtgacgctggcgtggtcgcttggagcactggtcgggaacgccgaggt

SEQ ID NO: 41174 - DNA, 375 bp, Setaria italica
  Peptide Sequence Number=SeqID_107148
taaagttaggtttttaagtggttttgagaagtgatttatctagaatggacacctactacatcattccaacagggaaacgcataaaaggtgcgagtgacttggacaagtttctggaggcaaatcctcactacaaaggtcgcatgtctgcttcagacttcaactttgcaacacccaaggttgttgaggagactgtttctgcctggaaggctgctatggccaaggagcaggagaaggcatcaggcccttgagagggcagaagtgatcggagctctcaactctgcctgtgctatgttttggtgatagtccgctttggatcatgtcgcacttatctttatctagtatcttaatgaactggagttgctttaagttttatcg

SEQ ID NO: 41175 - DNA, 627 bp, Setaria italica
  Peptide Sequence Number=SeqID_107149
atgggcttgaacctgggatggagcactatggcaccatggtggatcttcttgggcgagctgggaagttagatgaagcatggttgtttatcaaagacatgcctatacaacctggcattagtgtttacggtgcaatgttaggtgcttgcaagttgcacaagaatgtggaattggcagaagaatcagcacaaaggatctttgagctggggccagaggagggggtgtatcatgtcctcttggcaaacatttatgcaaatgcttcaaagtggaaggatgttgcaagggtgaggactactatggagaagaaaggcctccagaagactcctggatggagtattattcaactgaaaaatgaggtccataccttctactctggaagcacaaatcaccagcaagcaaaggaaatatatgcaaggctggctaagctcatagaagagatcaaagatgtgggctatgtgccagacactgactcaattcatgatgtggaagatgatgtcaaggcacagctgcttaacactcacagtgagaagctcgcaattgcgtatgggctcattcgcacagctcctggcacgacaattcagataaagaagaaccttcgagtttgtaatgactgtctattaattgtacgta

SEQ ID NO: 41176 - DNA, 2535 bp, Setaria italica
  Peptide Sequence Number=SeqID_107150
tctgaatcactgccagagaagacttcagcagggccacggaagatcgaaatatggacgccaattaggaagtcccttggcaacattgagcagatgatgagcctgcgtgtggagaagaagcaatcttctgctggaaagcagcaagttgtcagaggccaagcagatgatggaatccatcccgtgaaagttgaagaggccaagttgtcggaggactcggatgacgagttctatgatgtagataaggttgatcctagccaagaagtgcattcgggagatactgggaacgccgataatggaagcaggggtcatgaggaaacttacatttcaaaggaagagttggagtgtctggtccatggtggactaccaatggctttgaggggagagctatggcaagcctttgttggtactggagctcgtagggtagaagggtattatgacactcttgcagcagaaggtgaatcagaaaataacaaatcttcagattcttcaacctcagaaggtgtccatgaaaagtggatagggcaaatagagaaggacttgcctagaacttttccgggccatcctgctttagatgaggatggaagaaatgctttgagacgcctgcttatagcttatgctaaacacaacccatcggtcggttactgccaggcgatgaacttttttgctggtctcttgcttctgctgatgccggaggagaatgcattttggacattggttggaattatcgatgactattttgatggctacttttcagaagaaatgattgagtcacaggtggatcagcttgttttagaggagttagtccgagagaaattccctaaactagcaaatcatctggattaccttggacttcaagttgcatgggttactgggccatggttcttatccatcttcacaaatgtgcttccctgggagagtgttcttcgtgtctgggatgtgcttttgtttgatggaaacagagtgatgctgttccggacagctcttgcgctactggagttctatggtcctgcacttgtaactacaaaagatgccggtgatgcagttacccttttgcagtctttatctggttccacttttgacagcagccagcttgtcttgacagctcgcatgggatatcaatctgtaaatgaaacaatattgcaagagctaagtaataaacatcgcccatctgttatagcttcaatggaagaaagagcgaaaggtctaggtgcttggacggataccaatggtcttgcatcaaagctgtataacttcaaacgtgaccctgaaccactggtctcattaagcgattcagcagaccagttgagtgatgtgggagatggggatgccaatcaagaaagtgatcctggaaacatggatgatatgtatggtggcgtgacagtcaattctgagattgattctttgcctgatccaaaggaccaggttgcctggctgaagttggaattatgccgactgctagaggagagaagatcagctgttctcagagctgatgaactagaaacagcgctgatggaaatggttaagcaagacaataggcgccaattaagtgcaaaggttgagcagttggaacaagaaatatctgaactaagacaggccctgtcagacaagcaggaacaggaggaagcaatgtttcaggtcttgatgcgtgtagaacaagaactgaaaattgcagaggaagctcgcatctcagctgagcaggatgctgctgctcagagatacgctgctaatgttctacaggaaaaatacgaggaagctatggcttcacttgcccaaatggagaaccgagcagtaatggcagaaacaatgttagaggctacactgcagtaccaatctagccagcagaaagcactgtccccatgtccttctccaagaacatcaatgctagatgcatcccctacggcaagccagacatcacaggagttccagccaagaaggaaaaacttgcttggcccattttcactgagttggcgtgataagaacaaggaaaagcagaacagtgctgatgactccacaaacacaaagtttagtaacagtaatgatgaaatggtagaaacctccaacaaagatgacgaaaagcagagagaaacaccagagctaaatgtcgaacagacagcagaatcacctgaagaagatggcaagctgagagcagagatgcctaatgaagacaatgagctgccaggagcccgaatagtcacgagcgatctgaatgggcaccatgaacagatgcaagaaataaaattggattgataagcagtgttgcactttacaaaatatccatgccaccgcgttatatcagtatacatcttaacatggtgacggttgaggtatccctgagggtggattaaattttgaaatcctcttaccatatattgctgtacttgttcatgccactctcggttcccccttcccttgccttttttggttcttaaattcttttagctaccacgtcagtaggtctataggctgtttaattcttctcctattttttatgatttgagaagaagaaaagggagcaagttatatggttgtccagttgcc

SEQ ID NO: 41177 - DNA, 410 bp, Setaria italica
  Peptide Sequence Number=SeqID_107151
ggagcaggtcgtgatccatcgagacatcaaggccagcaacgtgctgctggaccacgagatgagtggccggctcggtgacttcggcctggcgaggctctacgaccatggcgccgatcctcagaccactcatgtggtcgggaccatggggtacctcgcgccggagctcgtgcgcaccgggaaggcgacgccgttaaccgacgtgttctccttcggcgtgttcctcctggaggtcgcctgtgggcgcaggcctatcgaccgcgacgaccgcaacaacagggtcgtgctggtggatcgggtgatcgagcatcaccgcaacggatcgatccttgacgccgtggatccgcggcttgtggggaagtatgaggtggaggaggtgaccctcgtgctgaagctgggcttgatgtgcgcgc

SEQ ID NO: 41178 - DNA, 483 bp, Setaria italica
  Peptide Sequence Number=SeqID_107152
cttttcgtggcagctcattggttgggtaatctattgttaataggagttcagtaggacttagttgtcagcatgttgtcatatagtgtacctggctattacccatgtcaggctactagctacaatttaactttttgtagaacacacggtagagttatgtattttctaaataaaaaagctgtatgttttcaaaaaaataataattcaaccccggtgcaggtacgggttcagacaaagcatgaaacattactactgtagagggaaaactgcaacaaaaaaaaacaacgaaaccatagggtaaactaaacacagctagcttcagagctgttttacgaaggcgcaaactttagagatgtatagtttgcactgcacgtcgatcacatggtgccggcaattttaaacgctttttttttgttgtctaaacttcagacttgtatatggattatccgccaactggacacaagaagacgccaataatcaaccagc

SEQ ID NO: 41179 - DNA, 243 bp, Setaria italica
  Peptide Sequence Number=SeqID_107153
tagaatagaaaacatatagaacaaaagtttcacggctacaaggaaatatcaccaatactggaagaggtgaaaaaagcaataagatgggtggatacaaagttaacataaatgttatcaaaagatggtgatgatgaagtgtttgaattttattcatcttaggttattttggacagcacatgctgttgaatttcatcaggattctcttatttgtggatgaatggatggcgtgaggtaggagtggag

SEQ ID NO: 41180 - DNA, 437 bp, Setaria italica
  Peptide Sequence Number=SeqID_107154
gcgccgccgccgccgtacgagccgtggtgcccgcaccggctcgcgcagaagccctccaccgccacgtcctgcgccgtgagcaccagcgcgacgccgccgcccaccttcgccgggcgcgccctcgccgccagcgccgggagctgggacatcttcaggctcttccccagcgagcaaccctcgtccgagacctgcccggccaggaccacccgcgcgatcctggcgccgccgccgtgggcgccgttcttgctggcggccgccgccttggagaggtagagccggttgatgttgctccaccactgggcgacggacggcccctgcgccgcggcggagagggagaggaggaagtcggtgacgatggccttctgcgccggcgtgaagcggccgtaccagaggacggagacggagatgtcgccgctcagcacggcgccgtcgtggta

SEQ ID NO: 41181 - DNA, 448 bp, Setaria italica
  misc_feature (1)..(34): n is a, c, g, or t
  Peptide Sequence Number=SeqID_107155
nnnnnnnnnnnnnnnnnnnnnnnnnnnnnnnnnntttttttttattgcaaatgcaagttttgtggcacacgaatacacgatatatacaacaaaactttacacgtccttatttagactgggactgcccggcacgttacgtacgatgatactcactgtacatactctacagtatttacacccagcaacaacatttaaaagcttttttatccgtcgacgtcacttcgtctctatccggtccacggcggctacaccagcgtggagcacgccgacgtgtcggggtcgaacagcgccggcagcaggtacttcctccccctcgcgccgtgcgcgttgtagctggcgcccgtcgccttgtccacgagcagctccccggcgtacccggggtaggcgcccctgccgtacacccccgcgcacgccgtggcggcctccagcggcgcgccgcggtcgccct

SEQ ID NO: 41182 - DNA, 1541 bp, Setaria italica
  Peptide Sequence Number=SeqID_107156
tttttttttttgagaaacagatacttcacattttatacagtttacatccagttggtgtttcagggtctaattggtttgatgtcaaaatgttggcatgctaaaattttgaccactatttacaaatttttttttccatatttagcaagtcttttatccaacttttagcttgctaaaactctaacatgctaaaattttagcatccaaccaatcagacccttagacaacactccatttcgaccttcgccaaattactacacacacgctgacgcacaagcacatcgtcactttatcttccactgacggatgccaagacacggcgccgcgcgcgcgctctcttctcacaccaaggtggcgcagtcacccgtgtcggggtcgtagagcgccgggagcaggtacttcctcccgcgggccccgttggcgttgtagctggcgcccgtcgccttgtccacgagcagctccccggcgtacccggggtaggcgcccctgccgtacacccccgcgcacgccgtggcggcctccagcggcgcgccgcggtcgccctggtagaacccgtccccgaacgggttggtgaccgcgccggccaccacggtggccacgttgatcaccacgccgtccatgccggcgtccccgctgggcggcaccagcggcggcgcctggggcccgtacgccggctggtggaacggccacgcgcactgccccggacactggtcggcggggttccccacccacgcgtacgccgcccgggaccgcgggtccgacccgtggtgcccgcaccggctcatgcagaagccctccaccgccacgtcccgcgccgtgagcaccagcgcgatgccgccgccgccgccgccggacgccttcgcagggccacgcgccctggctgccagcgccgggagctgggacagcttcaggctcttccccagcgagcacccctcgtcggagacctggcgcgacaggacgacccgcgcgctcctggccacggcggcgccgccgtgtgcgccgttcttgctgacggccgccgccttggagaggtagagccggttgatgctgctccaccactgggcgacggacggggcgggggacggcggcgccccccgcggcgcgggcgcggcggagagggagaggaggaagtcggagacgacggccttctgcgccggcgtgaagcggccgtaccagaggatggatacggggatgtcgccgctcagcaccgcgccgttgtggtacgtgaggaggttcggctgtggctggaccaggaacgccgctgatggcgcggcgcccatggttacggcgagcaccatcagtagcaggaggagcgcactgtgcttggccattgggagaaggctctcgagaggtgctagaatcttggaagaatctttaattctctagctcggtgaggcggcgactcagtttgggaatgggagaggtgatgttttgagtgtggggagcagagccaggcagagaactgcttatatagaggcgctcccacaccggagtggcggagtggcattgatgcgagcgtacgtggatggcatatgatataagca

SEQ ID NO: 41183 - DNA, 826 bp, Setaria italica
  Peptide Sequence Number=SeqID_107157
ttttttaggggctgagatcaataattaatcttttggacggagtggtgattgaaaacacatatccagttgcaactccggatcccaccatgtgggcaagcatgcaccacaacttcactagacagcaatacatacatgggagatcaaagaaagtcgctggcaagttggcagcacatgatgaaataaaaacacaaaggttactccacagctgttgaacatcaggtactgctctaatacggctagccaccaccatatattctcttattcaagttgttgccttgcaaggccttatacacaaacgggatggagatgtacatgtggaaatcatgctgtatcctgggccccacccaatgaatctcttcccacagggacccaggaagggagctgatcaaacagatcagtgctttgcgcaaacatgtacaggcagaagatgcagagcgcagcataagcaaccgcagcgcctgacacaacccttcccaaagctgctaggaaatacaatgtaaaaaccaccttgaaaaagagcttcttgtcatgtccggttgcagccaccctcaatacagactcagcagctccaattgtgttagccaaagatgcaactatgctatttgccatctcctgagaaatctgccattcaagaggatccacaggcaccgagatgtggaggtggcggaagaggaggccgaggatggagagcgagcagaggaggacgaggaggacgtcggcggcgagggacaccgcgctggcgcgccgcaccgcgcagtggtagtacaccagccccccgcacaccgcgcccacagcccaccgcccggctcccgttccccctcctcct

SEQ ID NO: 41184 - DNA, 455 bp, Setaria italica
  Peptide Sequence Number=SeqID_107158
cagacagagctgctgccggtggcttgaatgcacctcgggcagaagggctttgaccttttgctcttgcggcagcgagcccagaagttgacgtggaaccacaactggcccttgaagcgcacgctggctcccatcagaggcttcacagcatcaaacccttcacgtgggtgtttggcattgtaatggtggagagcatagcaggcatggcggatgatggaggcgtctcgctcacttcatccaatgtaatgtgagaaatttgattcgagctgcgactctcaaaggcaactttttgttgactgtaaatcgatctacctatgctctgtgcaagtggttattgtgtaatcaaaattaactgcagccttcaacatactatagcacaagatcattaagttaaatactgctttcttctaggtctagtagtgatctgggactttgttgcttccatctgattcctaaag

SEQ ID NO: 41185 - DNA, 647 bp, Setaria italica
  Peptide Sequence Number=SeqID_107159
cctgctctgctcctctgcagacaccgcgcaagcgcaaccaactgattgctccttccaagtgagtgcttctcctaaaacctgaaaacaaatggaggtggaggcggcggcgcctacggtggcggggatggatttctcggcttctccgaggttcgacccggataagctggagtctcccccgccggtggagggaagtggcggcgagaatggcgccgccaccaagctgcagaaggtctaccgcagctaccggacccgccggaagctcgccgactccgccgtcgtcgtcgaggagctctggtggcaagcgctggacttcgcgcgcctcagccacagcaccgtctccttcttcgacgaacccaagccggagaccgccgcctcgcgctggaaccgcgtcagtctcaatgcatccaaggtgggtcagggtttatccagagacggcaaggctctcaagctggctttccagcactggatcgaggctattgacccgcggcatagatatgggcacaatctgcacttctactacgatgtctggtgtcaaagccaggccgggcagcccttcttctactggcttgatgttggaaggtctagatcctttccctctccaacatcaagccagtagaagaagggctgcccggcctggctttgacacc

SEQ ID NO: 41186 - DNA, 708 bp, Setaria italica
  Peptide Sequence Number=SeqID_107160
taaaaaaagaaactaactaaataagaactaagggaaagaaaagaagaagaaggtagtattccagcattccagctttttagcaggaggcactaccatagctgctggaagatttacagcagaaaatggaattatcaagtccatctgggcctatagtggtcactacaaaccaagcgcagagaacctcagcaatttcatgaacttccttgaagagaatggagttgatctcaaagaagttgaggtgcgctcatccatcagagaagactacaatgaagatccagtgcgtgatggttcacagaaccttactgctgaatccatgggatcagaagtgatctccattccaagcatgactgaatgcgatgaaggcgagaacgctactgcagaacaagccaaaccaacctaccaaagaaccttgtcaggtggtcttcaaagccccagagccaccggtgtcccgcagaaggcaattcttgagaggatgaaatcaaagggcgagtccaagtcctatcagcttggccacaggctgtccctcaaatggagcactggggctggtccaagaattggatgtgtcaaggactacccaatggagctcagaatgcaggctctggaaatggtggacctatcgccaagggcatcaactccctcagctttaaggagactaccttcatgtttgtcacccactgaggccacctcaccgacatccctgctcgcgcc

SEQ ID NO: 41187 - DNA, 1826 bp, Setaria italica
  Peptide Sequence Number=SeqID_107161
gctgactgcacaagcagaaccgttctcgctcctaaaatctcaaagaaatggaggtggaggcggcgccgcctccgctggggttggattctacggatcctccaaggtttcagtcggacaaactggaatctccgtcgccgccggtggagggaagcgccggcgggagcggcgaggatggcgccgcgacgaagctgcagaaggcttaccgtggctaccggacacgccggaagctcgccgactccgccgtcgtcgtcgaggagctctggtggcaggcgctggacttcgcgcgcctcagccacagcaccgtctccttcttcgacgaacccaagccggagacagccgcctcgcgctggaaccgggtcagcctcaatgcatccaaggtgggtcagggtttatccagagacggcaaggctctcaagctggctttccagcactggatcgaggctatcgacccgcggcatagatatgggcacaacctgcacttctactacgatgtctggtgtcaaagccaagccggccagcccttcttctactggcttgatgttggagaaggaaaggagctagaccttccagagtgtccaagagcaaagctgaggaagcaatgcattaagtatcttggtccgcaagagcgtgagaactatgaatacataattaatgagggaaagattatccataaacagtctggacaaccacttgatacaagccaggatcctaaagggactaaatggatttttgttatgagcacagcaaaaagactctatgctgggaagaaagagagaggtgtattccagcattccagctttttagcaggaggcactactatagctgctggaagatttacagcggaaaatggaattatcaagtccatctgggcctatagtggtcactacaaaccaagcgcagagaacctaagcaatttcatgaacttccttgaagagaatggagttgatctcaaagaagttgaggtgcgttcatccaccaaagaagactacaatgaagatccggtgcctgatggttcacagaaccttactgctgaattcatgggttcagttcctccagaagtgatttcctctccaaacataacagaaggcgatgaaggcgagaacgctcctgcagaacaagccaaaccaacctacgaaagaaccttgtcaggtggccttcaaagtcccagagccactggcatcctgcagaaggcgattcttgagaggatgaagtccaagggtgagtccaagtcctatcagcttggccacaggctgtccctgaaatggagcactggggctggtccaagaattggatgtgtcaaggactacccaatggagctcagaatgcaggctctggaaatggtggacttgtcaccaagggcatcaacaccatcggcttcaaggaggctaccttcgtgcttgtcaccgacagaggcaacctcaccaacatcgccgctcgcgacgatgcaggcctccctgcctcagccaagttagaagctcagaggagcttatgtcacgcaactagcatgaagccccaagcggttcagctgtctgattactgtaattctgccttgtcaattttctacactgcaaagctcatatccttggtttgctcgtgctgcgattcacctgttctgtggttacagtcagatgtactgcactgcaaagttttcaagtgtgcctagttgtggaatgtggactgtaactattgcagaaataggttctgtgcagaatctcttatatagtatatcacagcccggacagcttgaagcagatatgacagtatttatgtaatctatgaatgggcacatcataaaggctagccctacgttattcctcacgagatgc

SEQ ID NO: 41188 - DNA, 1084 bp, Setaria italica
  misc_feature (1)..(39): n is a, c, g, or t
  Peptide Sequence Number=SeqID_107162
nnnnnnnnnnnnnnnnnnnnnnnnnnnnnnnnnnnnnnngttaaacatccacacataacttttcgaagaataagatttatattaactaaagaagtaaaatggtcgatgattccctccctggcactgttgtgctccgtatttacagtacacatagaagagtgtttttcccttccgaacagcaagtacgaaacggtcaaggttcctctagtgatagcggagcaagaaacagttgaacacctcgtaaaactctgacggactaatgcgcccgtgaataaaaatccccgcagatgaagcgggaagagaagggagaaaagaaagggaaaacaaacaaaaaagaaaaacttccagagaccctcatcaagaacaaaaacaattcctgcgggtgcggtctgcagcgcccccgcctactgatggtatccgttctgaatcggcgtcgtcctgaacccgctggcggccgcgaggctgaggttggcgcaggagcctgaggagggcttctttgccatccctcccagcgcgacgtagctcttgcaggacttgatcttctgctggtaggggttgtccttcttgcgcaggtcctccaggcagcgcacctccgacatgcacgcgaacgactgggacttgccctcgtagtaccgcgacaggcccttcttggctgggagctgcgacatcatggacgccatgtcgtagatgctgtccgagttcatcctccggagcggctgcggcacgaacaagcgctggtggtcctggtcgccctgcccagcagcgccgctgtcagggaagtggtccccctcgtcggcgtcggactcctcgccgccggagacgtacgacgccgtctcgaacagctcctcgtccccctcctcgcgccccaccgcgcccccaagcctgaagctcatgtcgctcgctgtcggcaaacctcacctgacctgaccacgctctcacctcgctagttattagctgcccttgcccacccaaacccaaaggaaacggcccggccggaagaaacgctgctctgattcagccgtttgcgtttcgtttccctttacctctctgctgatctctcccggggggtttgcccactggcctc

SEQ ID NO: 41189 - DNA, 817 bp, Setaria italica
  misc_feature (765)..(817): n is a, c, g, or t
  Peptide Sequence Number=SeqID_107163
cgaggacgagaacaccaatcccattccccacccaggcggagcgagcgagcgagcggcggcggcggcgagcggagaagatggtgcggaaggcgaaggttgagttcgatgaacagccgccggacaacttcgacccgaagaacccgtatggggacccggtggcgatgctggagtaccgggagcacctggtgcgggagaagtggatccagatcgagaccgccaagatcatccgggagcgcctccgctggtgctaccggatcgagggcatcaaccaccaccagaagtgccgccacctcgttgaccagtacctcgaggccacccgcggcgttggatggggcaaggatgcccgcccgcccgagttccatgagcccaagaaggtcgccgaggcggagtagcggcgctgctgctgcggcttctcgtactgctgttccaggattggagaggtgatctgatccttccgttgaattgaaacgagtaacttggaactgctgcagttcttttacatctgaagctgctgatagacttcaaataatgttgtccaagaaaacattcttgtgcctgtaccttttcgtggcctgttgtgatattgagcaaaccgatccttgaatcttcgtgcctttttttcagttcccaatgctgaagtttatacggagtacaatctgtgcattttttggttttcttttccacttaattgcatcttttatctgaaacaatgtcaaaggcagttgttgaataccagtgtctttactgatcaaagttgagaacttnnnnnnnnnnnnnnnnnnnnnnnnnnnnnnnnnnnnnnnnnnnnnnnnnnnnn

SEQ ID NO: 41190 - DNA, 275 bp, Setaria italica
  Peptide Sequence Number=SeqID_107164
cgctccgcctcgccgccgagctgcccgccgtcgtgctctccgccgactaccgcctcgcgcccgagcaccgcctccccgccgcgctcgacgacgccgagtccgtcttctcctggctccgctcccaggccgccgccgccggcggcgccgacccgtggctcgccgagtcggccgacttccgccgggtgttcgtcaccggcgactcggccggcggcaacattgcgcaccacatctccgtgcgccacgggtccggggagctcccactcaccccgctccgg

SEQ ID NO: 41191 - DNA, 642 bp, Setaria italica
  misc_feature (1)..(38): n is a, c, g, or t
  Peptide Sequence Number=SeqID_107165
nnnnnnnnnnnnnnnnnnnnnnnnnnnnnnnnnnnnnncttgggaaacgtaattctgatacgaacaaaaaaagttcaaagttattacaactgcagttacaggaaactcaatttattctcaacaaggaaaccaagcagaaccgacttattcaacacaaagtgtatattgtagaatcaaatggaattctctgagaaacagtacaaggatattgatgatgagaattgagaaaagctcccccaggttctccatagtccaccattaattgacagaagtcggtttgtaatcaattatgagggccttctccaatacaggcaagaactcatttgcgaattcaacatgtgcagggtgctcaatgtactccttgattccttctgtgctttcgaatgtggactcaaagacatgcgtgaacccttgatgcatgttttctatgctcacatcagttccccagtggaaggccttcatgggggggacaacgcccacgagcctgtcgtagccccggatgagctggtccaatcgctccggcgtcacgtcctccttgaagcgcgccagcaggatgtgcttcaccacgccgccgccgccaccagccgccatgcctccgggcttcttcgctcgaggcccctcacctcctctgtttggtcgtgg

SEQ ID NO: 41192 - DNA, 3244 bp, Setaria italica
  Peptide Sequence Number=SeqID_107166
aaacaagacaacctagcgcccctcgcgacgtcgctgccgccgccgccggcgtcggtggcgtcggcggccacggaccccgacagggaagtgttgaatccaaaaggggtggcggttgatctggccaggctcgcggagctggttgacccgtacggggtggagctacagcagcggacggcagggttggggtcggagtccgagctgctgggattcatgaatgccctggaagggcaatggggaagccggcggcgtcggaggaagtttgtggacgccggcatgttcgcggaccacctgcctcgtggttggaagttgctacttgggctcaagcggaaggagcgtgttgcatggattaattgccgtcgttatgtgagccccaaaggacatcagtttgcgacttgcaaagaagtgtctacctacctcaggtctctgcttggatatccagaggcaaagccaactaccacacagattaacagtgcaggagtgcatgacttagatatcaattctgcaggtcatcagcaaaccatctcaattgagcaaaggcaacttgcagtgccacttacttcggttacattgtttagtcattctggtgattcccatggacaaaaacttcagaaggatgaagctcagatggaagtgaatccaaaggagtgccggaaatgcaacttgacgtttcatgatcagggtgcctatatgcaacatcagttgtcctttcaccaaaggaaagctaaaaggcgcagggttagtaaatccagtgaactaggcacctatgtagatggaaattatgaaacccagcagaagactcttggagagggatttggcaattccagccatggtgttgcagatgtaaggtatcaaggtcagagtccagcaaaactgttcgatgggaccttttcaggccagttaggtgttcaaccatcgttgaaggcagcgccattagggtttcaggagatgactgtgttgcctcctcaactagaaaaagaaccttttgctggagagccagtctctatgaacaataaggaccctcctgaggagatgtctggctttctggaacaggaaagagaatctgctgctggagaacccatttctaggcatggtaaggaccctcaggagatgatcaactttcctgaacaggaaaaagaacctgctgctagagaagcagtctctggttcaaccagcgcagctgaactggaaaaaggaccttctgctggagggcccacctcggggcatcatctggatgctgttgacaattcagaccatagaacacatgatgaaacatgtgacagtgctgtagcttctctttctgttgatgctgaaagtaaattgagtacttgcaatgccactaattttcatgagaatgactgttcaaaagatctagaactttcaaatacagatcattcccaaaagtccaacaggtctgatgaaacttatggtgtacctaaagaggtttctccagcagcagatgatcctgttgaaagcaaaagcacaaatgatctgatggagtgtactgacataacacaaacagaacaagtctctcagccctatgatctgcttcatggaaaatttggcagttctgaaggaaatgattttcacaaccagctggaaagtaacccactttctggaactagggatgagccggatcttaattcaattggtatggaggtggatgatggtaatataacttgtagtgtggagaatcccacaagtttcaaaagtgagagacctcttgatgacaagattatggagtgtgaaatgacttctttgaaagaggatggtatcaaaagtggcgtcacaataaggaatgtaaacctcaattcatgttcggatacaatatcttctcctgtttctggtggaaactatgaaacatctagtactcctgatgatgctattcgatcatccattattgcccaatgctttggcactaactctaatgatgaaaatgctggtaaggatggaaactttgccaaccaaaacagtgctggtaagggggaaaattttgtcagtcaggaaaatgacatagtgtatcaatctaatttgaccatgggccctatccctcctgctcaaattaatgtggattgtttcacttcttgttcaatgactcctgaaatcaagagctatggcaacagaggtgaagatgatggcaaagaagcattggtgaactcgcagaacatggcaagtaatgaaacaggttttgatgttgaaacttataacagtgatatcttcaatagtactatcacagaaagtagtcttgcccagctgaataatgccatcaatatgaaaaacgattttgcaagctgctactcattatctgacctaaacacacttactggtggttctgcaactgatgaaattgacatccacggtatgaggaattcttttgttagctccaccagtcgcactgatcaaaatgaacattgcacactggattttgatatcaagggttccatgcttgaggcactcgaaaaatctgacagtgacttggacaatcaatacaatggtgcgggaccttcttgtgactcactccctgcggctggcacaaatgggaacattgatgattttatgtccatgcaaaccaattttggtagctttacctctttggttcgtgctgttgaagatgttccactgagcaggattcttcaagatcagtgtgatttgcaacttggatttggtggcccgaagcagcccatgtatcctagctttgagcagcagctaaggatggcctctgctggagctccaccgtatgggaacatgggcaggcatgacactgtacctgtacctgagccgacactgatgttaggatatgcaccaccacttggtagctgccctcctccgttccagttgggttggggggcaccatcctattcaaagatggtcggtgtgcttcaatctgtgtgcgtgtggtgcaacagccaattccagcattttggcaccattgctgagcagcaggcagattcccttggctacatttgtccgtcatgcaagggaaaattttctggtcatcttggcatcaatgggccgtctatctgagatccatttcatattgtaacccaaactgctggtgaatcactatcaatcagtttctagttaatatgagtcaagttgcacttgttggggtgtgtatgtagccccttgaacttgtggccttgtgctgaggaatggcttaccttgaaatctcaggatattgttaacgtgggcgatccgaaacaaattaaaggactgtttacaataagttaaaaaaaaacaaaaaaaa

SEQ ID NO: 41193 - DNA, 245 bp, Setaria italica
  misc_feature (232)..(232): n is a, c, g, or t
  Peptide Sequence Number=SeqID_107167
gcaaacactggaaagtgggaagagatgaatagggtacggaaactgatgaatgagaaaggtgtggtaaaggtgccaggctgtagctcaatcgagatagataacacagttcacgagttcttcgcaggagatgggaggcaccccaaatcacaagaagcaaggaaaatggttgatgaagtgattgaccaactaaaactggttggttatgtccctgatacttcacatgtgttctatnttgtaataggtgg

SEQ ID NO: 41194 - DNA, 529 bp, Setaria italica
  Peptide Sequence Number=SeqID_107168
caaagcagcatagaccgacatgtgcaaccttcaaacgttcaaacctcaagaaatgcaaagatgcgatgagataagatattaatagtgtattatatgacaaggggtggagttatcatttggaagagacgcctatgtgctcaccctgcaagcaattaaaaatggatccttggtgcgtcagcattgcatggtcaaattcaacccagcaatgatggacgttgataatgaagataaaaattgcaacaggattacaggtgtactcctttaggaatttgtaagtttctcaagattcaattagaactggtttcactaaataagagagtgctaataaattattccaatttgtggtgtatgagataggtgaaaatgattctgctgtgaatcaacttgcaaggaagtttattgcaacatggcgaggctatgctgtctcagcagcaggttctcaaagtaatgtgagtatttatttttgttctcacattgcaatccttgtgcttttagttcttttaggcttgtttttccttgcctaaatcat

SEQ ID NO: 41195 - DNA, 442 bp, Setaria italica
  Peptide Sequence Number=SeqID_107169
tgttagtatagaactttctgaggaagacttgaacatacagaattcaaccaaaaaataatctttaggcaaagttaccctggtagaggatcatctggcgaaaaaaatgaatctagagatatcacagtcctcaactggtaggcaggacctgtgaagctcctttgcacaatcttcagtgaatatcaagtcgggagttttcaccctgaatcatctgcttgagaacagatcataagaaagactgaccatggcaacatcccaacctactagcttagtttgtgaaattgttcagaaattgcaaccatttggcaactgctaaagcctaaatttcaggatcattgaggagatggtttaaaactccagtcagtatgtacctttttttcctcttacagaaaagggtggagactctaacgcaaggtaacacaatcacatccaaatatgcttggga

SEQ ID NO: 41196 - DNA, 341 bp, Setaria italica
  Peptide Sequence Number=SeqID_107170
cccctcctccccctccctctctcctcgctccccacgccacgcatcgcctcgtctcctcggaaggcggcagcgccccgccgagcacgggaaggaagggagggagggagcggggatgaggatgttgtcgaaggcgtgctcgatcgtggcctcctccctcccgcgctgctcctcctccgccgcccccacgatgagagggcagccgtccttgctgccgagcgtgcggaagcaatggctcgggaagcctctgctgtacggaatcggctccctgttggtcatgccgctgaggacgctgcatggagtagggcgtgtgtttggcgcagggcgcttcctctgcaacatcg

SEQ ID NO: 41197 - DNA, 1378 bp, Setaria italica
  misc_feature (1327)..(1378): n is a, c, g, or t
  Peptide Sequence Number=SeqID_107171
agtcaccgtaatttcgctgcgtgtgtagttctctgcgaatttcagttttgagaaatttcggtctcgttctgttgtctacttgtcttgcagatgagagggcagccgtccttgctgccgagcgtgcggaagcaatggctcgggaagcctctgctgtacggaatcggctccctgttggtcatgccgctgaggacgctgcatggagtagggcgtgtgtttggcgcagggcgcttcctctgcaacatgaccagcgtctcatcttccttgcaaattgagcttgtaccatgccttcgagataactatgcatatatcctgcatgatgttgatactggaacagttggagtggtggacccttctgaggctatgcctattataaatgcattggaaaagagaaatcagaacttgacctatatactgaacactcatcatcactacgaccatactggtggaaacttggaactgaaggcgaaatatggtgcaaaggttattggttctgaaaaggacagggatagaattcctggcattgacatcactcttaaggagggtgacacatggatgtttgctggtcatcaagttcttgtactggaaactcctgggcatacttcaggtcatgtgtgctattattttgctggttctggagccatatttacaggtgacacgttgttcaatctatcatgtggaaagctttttgaagggactccacagcagatgtattcctcactccagaaaattatagctctgcctgatgagacgaaagtatactgtggacatgaatatactttgagtaattcaaaatttgccctgagtgtagaaccaggaaataaagaattacaggaatacgctgcaaatgcagctgagttgcgcaataaaaatatacccacggtgccaacaacaattgggagagagaaacagtgcaatcctttcctgcggacctccaatccagaaattaagagtactctgtccattccagatcattttgatgaagaccgtgtgcttgaagttgtccgtcgagcaaaagataacttctgactaacaaaaggaaattctcgtgacatgacaactatcttgttaaagttcggacaaagaaacccctaagacacaagaaatgtaggaaagaaaggtatataagtttgggctagattttgaaatgcttcggcaaaattgtgtcgagtgtatgtagcttgggcagtgcttgtctatagcagccagtgattcttttgtctactacaaataagcatgttctgccatcatctactctgtaaaaagaacgtgagtcagctgttcgatagtttaatctcagttcttgctcttcaataaaaaaaaaaaaaannnnnnnnnnnnnnnnnnnnnnnnnnnnnnnnnnnnnnnnnnnnnnnnnnnn

SEQ ID NO: 41198 - DNA, 433 bp, Setaria italica
  Peptide Sequence Number=SeqID_107172
ttttttttttacaaagaccttaatgaagcacaacccccactaaaaacatactgagaccaagactcatgatcctctgactgagtacaacaactaaattcttcaccacagatgactctaggcaggtaacaaggatccacgcaagtttttaagacgacacgcacacatcaggtgaaacgatggcttattacttgaaatgcataaatgatcgatcatggggtcgatgatccagcaatcatccagcagggttcgtcgacgaccatgggcgctgccggcccgtcgagcaggaacggatccagagagctggcctcgcctaccgggtcagtcgacgcgacggccgcacctgaacctgaagctttgtggccgagtcgccgtcggtggcgccgacgcgcagatcgttggcgacgcaacgcggcagcggcggcggcggcggcat

SEQ ID NO: 41199 - DNA, 263 bp, Setaria italica
  Peptide Sequence Number=SeqID_107173
tgtttctcgagtcccaagttgttgtggggagaacagaacaggggaagcagccggagagcagagcagcatgtcgtcgggcggtcgccggcggctggccctggtggcggccctggccctggtggtcctcgccgccgacgccggggtgacgagcgagtaccggcggaagctggaagcgacggtggagatgccgctggacgccgacgtcttccgcgtgccgccgggatacaatgcgccgcagcaggtgcacatcacgctgggcaacc

SEQ ID NO: 41200 - DNA, 628 bp, Setaria italica
  misc_feature (523)..(523): n is a, c, g, or t
  Peptide Sequence Number=SeqID_107174
taagtactaacaaagcttgattgtgaagacactactttcatactccgcagcttcttcacatgctgaacaggagaagatacagatttgacctcactaagtcactatcaagattcaagacttacagtgattggcccacagaactgttacagcttgatgaacattttaaaattttttaaactagcacaccaaggatggaccgggacaattcgaagagtcaaatcatgccccttggtttaacagcatgcctaaaattaaacaaacaagggaaggtaactgcacagacaagaatgcttccaatctgatattgtcatcttgcccctatctgatctgggtctgatggataaggttgctgcaaacaaacaaaactatctaacatagcaaatccgcttaatcaatcaatggctttcctcctatgaatagattaaaccattgcttctatttgtctttcgtagtgccatatatttgattatggtacactgtagaaagcaatttttgcttaaccagtgaaatggctttccccaanaacaagaataaagtatcatttcagttagccattcatagtgtcacatctttaattttgctaggcatgggacagagctgcagaagtgcgtctgtcagtacgaagaat

SEQ ID NO: 41201 - DNA, 415 bp, Setaria italica
  Peptide Sequence Number=SeqID_107175
ataaccttgctaatccaccagttgttttcttgttcatagtagcaaatacacacagatttggcgccacttcccacagcaaacttgttttctttcgggctccattgaacacataaagctgcacggtttaactttaggataacaagggtaggtacccaatcagatccttcttgtgtccaaacatatgaatttctatcatgtgaaactgttacaattttgttggatgatctactccaatctattcccgaaactatttgatcatgctttgacagaacatgaagtttctcccacttgtctttgataaacttataaatatgcaattcattgttgtttggacaaaaggcgatcatcgactggtcggggctccaggcgtggcaggtgatgcactcggcgaactggtggatcgccaccgccgccg

SEQ ID NO: 41202 - DNA, 682 bp, Setaria italica
  misc_feature (649)..(649): n is a, c, g, or t
  Peptide Sequence Number=SeqID_107176
gaactccatttccgtaattccattaggcctgcttggaacagcccaatcccagcccaccactggactggaccgggattgggtgcatctaaacaaagccttaccaagaaccagcagcataaaggtctggacatactttacaactgaaaagaaatcctgaatcagatagcccaccaaactgtttttgcaggcagggcctgcaatatagaagtagcaactagaggcaaactggccattggcaactcttgcaacatttctgtatgagcaaatgaacgacaaagttcaaaccaaactccacaattcaggaaattgttggttcgccaaacacttacccatgcaggaaaaagcaaccttttggtgaacaaggagagaatagcaccctcatatagtagcaaaatagcatcaaaggtataatgtgcataaccatccacaaaaacaaataaaaaatagggaagaaaaaacagtagacctgtgaggcttttgaagttgatggggtagctttcctctcatccaagaatcttacaaaactccaaagcccagtctgatctgcagcaaagatcataggattgcagtcaaatccaacaccaatcaccatgcgttcagagacaaaaagacatcacggagaggcagatctcgcagcgtcaaattttgngccgcaggagccgattcaacttcatcaacgaat

SEQ ID NO: 41203 - DNA, 665 bp, Setaria italica
  Peptide Sequence Number=SeqID_107177
gacccaatttacaaggtaaatatttatcgcaataatgaatcccatgatctattactcctacagactattaacatcataacgaaaatacttaatataaaaaggaattcaaggatttattcacccattccaagtaactcacacacttctcaaagagtacttgggcattaaagtaaatactatgcatatttagtggtagtagtagtatggtttcacatgctcctctattaacaatagtagtaggatagcaaaacggagttatactagggcaaaaataaaacaaaaaggtgtcttgagaaggtgcctatggcaaacactggtccatttcactttataaccatgtcaattcgacaattccccaagatggtccatggaggaagacacattcataagtgtacaaaagcgcaggagctactgctaggaggcaatattcaggtataccactacacgtctcatcaccattaactgaatccatcaaattttcgtttaacttgacatttttattaaactgtcatgaggcacaatttaaatacggttcagcttaacagaaaacatcccaaacgtcaaatccaaatggcagcaatacatagctgtacagaaaaatggtgaaaaccattgtagtctattcctacgtaccaattcagtattaccggtacttatttttgttt

SEQ ID NO: 41204 - DNA, 1057 bp, Setaria italica
  misc_feature (813)..(813): n is a, c, g, or t
  Peptide Sequence Number=SeqID_107178
acaatttgattggtacgaaaacctcccttccacctatttttgcaaccgtgatgtggttttctaaatcccataccacaatcttaccatccaatcctgatgtgctgaatcgttttatagtaccatcccttccttttgtcaacggcacgatacacgttatgcaattctcatgggcaccacctcgcggctttgatggttcaacagtgtcgctactagtcccttgctttgattggccatatagctttccaagggcttcagagagctgaaatatatttttttctgtattagtttgtgtgatgttgacttggtgagttcaactcagtcacttagtttgtcattgtcattgatcagaacttcagcagtacatagccatcaagttgcagtcaactactactaaattaaattttatagccctgagaaagctccatgtaactacgtttagcattcaataaagtcaaattacacaaataagcagtaattgctagatataacagcagagtgcaaaaaaaaaggacttacactggtcactatctgctgagtaaggaccaattttcctaaccagtaaaagaactagattggtttggcatctaaataggttacaagccacgaaatagattgcttgtgaacctttttgacaaagaactccatttccgtaattccattagggcctgcttggaacagcccaatcccagcccaccactggactggaccgggattgggtgcatctaacaaagccttaccaagaaccagcagcataaaggtctggacatactttacaactgaaaagaaatcctgaatcagatagcccaccaaacngttttttgcaggcagggcctgcaatatagaagtagcaactagaggcaaactggccattggcaactcttgcaacatttccatgcaggaaaaagcaaccttttggtgaacaaggagagaatagcaccctcatatagtagcaaaatagcatcaaaggtataatgtgcataaccatccacaaaaacaaataaaaaatagggaagaaaaaacagtagacctgtgaggcttttgaagttgatggggtagc

SEQ ID NO: 41205 - DNA, 394 bp, Setaria italica
  Peptide Sequence Number=SeqID_107179
gtcatgaggcacaatttaaatacggttcagcttaacagaaaacatcccaaacgtcaaatccaaatggcagcaatacatagctgtacagaaaaatggtgaaaaccatgagcatcccccaacaaaatagtccggtatctgattggtcgtggaacaacccttagacatggcaattagcatttgatccccacggatgacataggtactaatcccgcacgaaccgaaaccctaggaatccgatcctgaaccccacgcgcactattccgaagcccccgtgctcgactggtcggggctccaggcgtggcaggtgatgcactcggcgaactggtggatcgccaccgccgtccgttcgtccgtcctattcggggttacgttcgtaggtcgttaggggtttgtt

SEQ ID NO: 41206 - DNA, 1694 bp, Setaria italica
  Peptide Sequence Number=SeqID_107180
tttttgcaggttccaacgaatcaaagtgcgtctcaacagaacaaacaagatgtccacaagtaccagtaaagcatccgcggataaattccacgtgtggttattttacacaggccactcaaaaatgaaacacacccgaaaatgccgaaccacgtcattgcctacctagctaaaattatacaggttacacaatatatcggattcaaaagacaaaattactcgccaaaaatgaagctacttgatagatgcaagctgcccctacgctaaagaaatgtttctgtgtacaggtacaacaaaataagcaatctacctgggctggccctggatcttgaaaacctgcaggacccactgccaagaatggtccccgattacgatgggtaatggcagaagttcatacaatttgattggtacgaaaacctcccttccacctattttgcaaccgtgatgtggttttctaaatcccataccacaatcttaccatccaatcctgatgtgctgaatcgttttatagtaccatcccttccttttgtcaacggcacgatacacgttatgcaattctcatgggcaccacctcgcggctttgatggttcaacagtgtcgctactagtcccttgctttgattggccatatagctttccaagggcttcagagagctgtgaggcttttgaagttgatggggtagctttcctctcatccaagaatcttacaaaactccaaagcccagtctgatctgcagcaaagatcataggattgcagtcaaatccaacaccaatcaccatgcgttcagagacaaaaagaaccacatcacggagaggcagatctcgcagcgtcaaattttgtgccgcaggagccgattcaacttcatcaacgaaataaatcatggagttgtgccctgcataggctaatgtttttccacttggtgaccaccttacaccaaatgtccaagtagatgatagatcaagctgagcaatttgctctccaaattttgaatcagttgaagtgctcgattgtgatccccttgtatccacacccttgatgaaagttgagaatactctgcatttaccatcagtagacgttgttgcaagatatatattgtttggatgccaagcgatactagtgacagaagattcatgccttttcctgataaccttgctaatccaccagttgttttcttgttcatagtagcaaatacacacagatttggcgccacttcccacagcaaacttgttttctttcgggctccattgaacacataaagctgcacggtttaactttaggataacaagggtaggtacccaatcagatccttcttgtgtccaaacatatgaatttctatcatgtgaaactgttacaattttgttggatgatctactccaatctattcccgaaactatttgatcatgctttgacagaacatgaagtttctcccacttgtctttgataaacttataaatatgcaattcattgttgtttggacaaaaggcgatcactggaagagagaaaaagttcccagtcgaattaaagatcaaactccatgataggtgcaattacaaaatggtaaaagtggccaatgccatgtatgtttagctttattagaatgcaagcaattttttttcttaaattgcacagggctgtttgcaattgcaagcagacacatcatctactatgcagcattttcctacaaacaatagaaatga

SEQ ID NO: 41207 - DNA, 439 bp, Setaria italica
  Peptide Sequence Number=SeqID_107181
tgggggtcgtccaaaggtatacattggaagcaagacaggacttgaaatgtatggaacaatgagaggacctacatccggaaaagagagagaatggacaacactacttatgtcctaccagctagactctcaacaacgaggagaaagaaagcatgtttgtttgcttgaatagtatgaaagtctcatccgcatactcctctaatatacagggaataataaatgtgaaagagaagaaattcacaaatctaaagtcacatgactgccacgtcatgatgacatagttgcttctggttgcactgatgggtattctaccagagaatgtgagattgtcaatcgtaaagctatgtgcgttcctcaatgaaatttcacataaggcaatcgatccaaacaatctaataaagctaaataatgacgtggttcaatatcttgtcagctttgaaat

SEQ ID NO: 41208 - DNA, 779 bp, Setaria italica
  Peptide Sequence Number=SeqID_107182
ttttttttttttttttttttttttggtcgaatgagacataagtacttccattatacaatgaaacacaaatgaccaaatcgaacccatacacataaatagtcgagcactcaatctgtacatatacaaagtaatcaatgacaaaacccggcacctctccaaaccaatacgcaaaaatacaaaaccacacacattaaaaaggaagcaaatggaaaactcgatcgagcgactcgacaatcagacatcggcaatggcagaagctactccacaaatgcactgaacccatgcttcattacgccgaaggaggaggcgccaagaatggcatcggcacgccggggatggatggcatcggcggcagcgtcaccttcgggacgaagggcatcggtggcaaggtgaccttaggaacggcgggcatcggcggcagcgtcaccttcggcacggcgggaacggccggcatggggggcaacgccgccgcgttcggcatggcgggcaccgcggggatcgccggcactgccggcatgggcggcaaggtcgccgcggggatcgccgggacttggggaactgccggcacggtgaccgccggcacagtcggtacggcgggcatcggtggcagagcggacgccggcacggttggcaccgtcggcaccggaggcttgggcacggaaggaatgcccgggacggcggcgggagcagctgccggcgccgtgtccgcaaggcggcgcgcggcgtggctcgtggtgctgccggcgagcatgagcgccatgacgagcgccgcggcgaag

SEQ ID NO: 41209 - DNA, 542 bp, Setaria italica
  Peptide Sequence Number=SeqID_107183
ttcctggtccagcccggcgtggagcagcgcgtggtggcgcgccaccgcgcggcggccttggacaatccgccgctgccgtggcggaccgtgttcgcgtcggcggggttcgtgccggtgcaggccagcaccttcgccgagtcgcaggccgaggccctcctcaagaggatggccctgatggggttccgcgtcgagaagcgcggcggcgcgctctgcctctactggcagcgcggcgagctggtctccgtgtcggcgtggcggtgctgaccaccggccactacggccgccgccccgcggccgcgaatctaccaccgtcgatcccggtttagctaggactaatgatcctactgcgagcaagaaagtatttttcaccgtcgtcgttgtaaacttgtaatggtctgatctgatcgcctgcttattagtgtcctaaattggagtgcgtcgtctgtcgcctggcttgcagccggtcgctctgctcatcttgatcagcagagtaggttgtaaaaggtaggtacggtgcggtaactagtgcattctaccacccc

SEQ ID NO: 41210 - DNA, 590 bp, Setaria italica
  Peptide Sequence Number=SeqID_107184
aaggagcacttcagaatgatgcagaagggtcatgggctcataccaaggatggagcattatgcttgcatggttgatctgcttgggcgatcaggccttgttgaagaagcactagattttattaatgaaatgccttgtaaagcagacgcattggtctggaagtcgctgctgggtgcttgtaagacccacaacaacatggatatcggtgagattgccgctaatcatgtcatagagcttgaaccacaagatccagccccctatgtcctgctctccaacttgtatgcagatgctggtttgtgggatcaagttgcaagggtaaggagcacaatgagggacaaaaacttgatgaaagaaacagggttgagctggatgcatgttgagaacaccattcacgagttccgagctggtgataccaaccatccacaagcagaggagatatatacagaattggacagattgatcatggatattaaagaaatgggctatgtaccagacacaagcatagtgctgcatgacatgccggatgagctgaaggagcagtgtctgcttcagcacagcgagaagatcgctgtcgcttttggttgatcagctgt

SEQ ID NO: 41211 - DNA, 540 bp, Setaria italica
  Peptide Sequence Number=SeqID_107185
taatagtttgtcccaacgtgatgtcacaaaagtgactggttgtagtaggaccctccactattattgttgaagaagggttctctcattttgtaacaaagggttcacaaaatggacaatattcacaatacatacagcagacaaaaaagctaagaagatttgcattcctcaaaatgaagaaactaaacctgacccagaactccatagctgatccgacttcccccatccaccgacttgccacctttcttgtactccccatagatgtacgatgagaaggcccagagacaaagcaccatcgcgacgcctttctcggcgccaaaatcgtccccaaacaccaccacgccgccggcaacgttcaccgccagcagtgccgtcatgcagatgccgccgtgcagtgacgtggtcaggaacaccgtgcccgccgtgccgaagaagcacatctgccagctgaggacggccgcgccaaccaccgcgtagtaggccgcaggtgacaggtcccacgtcgcctccacgccactccatgggcccttgccgcctccggac

SEQ ID NO: 41212 - DNA, 335 bp, Setaria italica
  Peptide Sequence Number=SeqID_107186
ggcatgtgatgccaactaactgtacgtgaccatatgcatcagctatggtaacaaatccacaaaggaaaggagaacttgtttcactattgcctgtagtgaggataggatgcacggagggtggtgttgaagccatttcagggtatgaaaatggtaggaagtgcagcgtgaccatgtcaagccccccaccatgagcacaataaaatctctctggaacaaggggatctagaaacagggacaaagagctatcactaggagtttttggtagcgctaaatccacaattgcaagccttagcaaaggaggggagtgccccatccaaacggcttcttaattgttt

SEQ ID NO: 41213 - DNA, 343 bp, Setaria italica
  Peptide Sequence Number=SeqID_107187
gttcccgcgtatgagaaatacacgggctgttttgggacttcaagtggtgtagtttcgttctccagcatggtcaccaccgatgacatgagcggcctgtaatttggattgtcttggacacacagcagtcctatctggatacaccgtaaagcttcggtttggaaacaactcttagccagggatgagtccaccagatccatcgctttgccatctacccataagctccacgcataagaaagtatgttggggaagcccttgtagttagttaaagtgatcttcaaaccacttataatctccaggactatgacaccgaagccatatgtatctgacttgacaagaaaggcgc

SEQ ID NO: 41214 - DNA, 444 bp, Setaria italica
  misc_feature (417)..(417): n is a, c, g, or t
  Peptide Sequence Number=SeqID_107188
cctaattaccaatagttgataccagcttagtcgaaggggaagagcccttcaatgtgctggagatgaggaacttacctgcagatgcaaaattcagctttgtcccgacacaccatgcacctaatatggtgagttacagttcctccgaggaggaagatgccagcagtgacagatcatcagatggccaggaagaaggtcgtggaagagttacagctgaggtccaggaaattgaaatggtgactggtaatggtcattgttcttccaatggcaatggcaacacatttgattcgacaggcatcaaaacagaacctgaaaggcgcaagtatttgtccccagtgtcaaagcgcagaagattaaccgaaagtaacagtggcatgaaggctgatggaggagctccctccatttggaacagcaacatgngccgtgatccttccgaggcaacagaag

SEQ ID NO: 41215 - DNA, 375 bp, Setaria italica
  Peptide Sequence Number=SeqID_107189
atgccgctgcgacatccagtattccggtacacggtattcttatgaactgcgagctgctgcaatatgatagcttgtgaacaacgacaagaggcatacagctcaccagcaattattgtcagcagaaggccgaaagatcgcttgcctttgaccaagaactcaacagctacgcgatgctcctccctgttcaatgctcatatcacaaaggcatcagactagcatctaccctgctgaagtctgaagagaactagtacatcaattcagagagctgacatcgccagattgataagcgagctgtccttgctcaccaaggtatgctagtttttctttccttcttggaaacattccctgacaagtgataagcagtgcctctgagtt

SEQ ID NO: 41216 - DNA, 281 bp, Setaria italica
  Peptide Sequence Number=SeqID_107190
ctgaaacctagtcatctcccttttgctctctgctttgctaccctgttccccgaccatggccgagctgctggacgagttcgcgtccaagcttgtgggcatcctggcaggcatggtgaaggaggaggtggagatgctcctcggcgtgccgggtgaggtcatcaagctcgagaccacgctccgtgacctgagccacatcttgggtgatgcggagaggaagcgcatccgtgacaaggccacggagggttgggtgagggagctcaaggacgtcatgtacgacgctg

SEQ ID NO: 41217 - DNA, 462 bp, Setaria italica
  Peptide Sequence Number=SeqID_107191
cgcgatatcctccgtgtacgacgaaaccagcccgacggcgctgctcgtgcaggggctcctcgaggccgcggcggctgggatcctggtctacatggcgctcgtggacatcctcgccgaggagttcatgagcgccaaggtgcagagcagagggcgcctgcagctcgcgctgaacgcctcgctgctgctcggggctagcttgatgtctatgctagccatctgggcctgacggcctgaccacgagatgtaacaagctctcgaagcgcaggcgtattgtttcaacctttccatcatctgagaacgaagcgggagtagatagtgtttaggcggaggttgcaacattggtgcactgagatgcactccctctatttcaaattgtaggtcgttttagctttttattagttcatatatattattatatatctagatatagtatatgtctattgagtataaaggtggggagca

SEQ ID NO: 41218 - DNA, 335 bp, Setaria italica
  Peptide Sequence Number=SeqID_107192
cctgaaaatcctaggcatttctaattaacatgtaagtttgatcacaaagaaaacagcatgtaaattccttttactaagatttggtcctgcattttaatcagaacaaagcaaaaatgaataatatccatcgtgtattcttctttcgcagaatcatagctcttcacatgttcagagttctgatatctgaaggaacctgtgggcgttaatgttgctagtcatggtgggctccaaagcctccagccagcctagtgtcttggtgggcccacaaggcagtcacgcaacacacgcagcgcctcccaccgctgcatgggcaaagccatctccctcctccgacc

SEQ ID NO: 41219 - DNA, 391 bp, Setaria italica
  Peptide Sequence Number=SeqID_107193
atggaaccattcattgccctccatctgaacttggtgggcgcggcaacgactatatgcatggtggtgatcctgacccattgtccgattccaatttaatcaataacaagaaaacaggtttgtctagtcaacaatctgagtctatcaagtgggaagctgatcctgatggaaccattcatggcccttcatctgaacttggtgggtgtgtgcatggtggtgatcctgatccaccactgattccaagttaatcaataacgaagaaacaggtttgcctagtcaccaatctgagtctgtcaagtgggaagctgatcctgacggaaccattcattgtctcccctcaagaacataaaggttaaaaaagaaaaaaccaaaaaaacaaaaaaacccaaaaaaa

SEQ ID NO: 41220 - DNA, 1053 bp, Setaria italica
  Peptide Sequence Number=SeqID_107194
aacggggtgaccatgggccgaattgggccatgtcccctcgcccaagatttggcccaggacgatgcagtgatgtctgatggtttttgttttttttttttttgaatgctaaatgctttggataggcctttatttattaaattaaagatggcgcataggccacttattcttagagaactagagatcaccacagagatgctaatatgatatagcaacggctccacaggtcacagctgatcagaaatgctgctgggagtagcagtcgaggttgtcgccgtagccgacgcccaacatgtcgcagtagtgcttgtagtagccgatgcggttgacgttggcgtcgttgggccccatgccgcactcgagcccgccgttgatgatgttggtgatcacgccgtacccgggcacccgccccgcggaggtgtcggcgctcgtcggcgtccagttgcccaggatcacgtcgtggcacgacggcttgggcgactgcgccgtcatccagaaccagatggccgtcttgaacgagatcacggggtccgtcgacaccaggtccgggttgcccaccaagtcggcgccgatcgcgctcccagcctgctggtagttggcctgccctgtcaattggatgggtccccgtcccgtagtagggaggagaggttgccttgctgatctcctccttgaagcagtacccccatgtgtactgaccagcagcaccgccgttggtctcgtgggaggtctggccgaagaaggcggcgagctcccgcttgttggcctcgtcgctgccgccgctggtgccgaaccccgggaaggagttggcggcctggatgaaggcgtcgtaggtgtagaacccgttggcggggcagatggagttgtcgcggttgggcagcatggcgttgtacacgtcctgcgtgatgatggagcccacgtccgccgctgccacgccgagcagcaccgccatcgccgccgcggcgcacgccacgagcgccagcctcgccatgctagctgggttcgtctcttcacttgcttgcgctctcggatcgctgctcgtagctgcaacgcttggtg

SEQ ID NO: 41221 - DNA, 513 bp, Setaria italica
  Peptide Sequence Number=SeqID_107195
aagacaatggataattgcttgaaaggaacacatatgtggatgagcttcgtggttccaactcaacaagtttctttgctgcaactttccctccctcttcatccttgtgcattcgacatgctgcaagatatgtagcccagatcacaccatcagctctgaagggtaaatggtcaataacttcttgagcctcttcaagatgaccaccacgtccaagtagatcaatgaaacatgcataatgatctactctgggtgttagcccataagcttggctcatagaatcaaagaaattccggccttcagaaattaaaccagcatggctacaagcaattaaaacaccaaggaatgtaacttcatcaggctttagctgtgactcttgcatcttctggaagagaagaagtgcctcgttagcataaccattttttgcaaaaccaacaatcatggagttccatggcattatgtcttgcttgtttttcaatcccttgaagatttcaaaagaagatattacgtccccacact

SEQ ID NO: 41222 - DNA, 255 bp, Setaria italica
  Peptide Sequence Number=SeqID_107196
acacttctggagtggaagagttgctctaattgaatcccaaaagtcggcatgatcaccaatgactctttcttcacaggatcacatcgcaaccattttgcaattacaccagcaaaggaaatactccaaagggaaccgagacctaaactctcctttgacaacagggtgcagcaaacagtcacgagaaggcagattgtgctgatataatacagcagaatcctgaaagtgctcttcttgctttgtacctaacgtaattaa

SEQ ID NO: 41223 - DNA, 488 bp, Setaria italica
  Peptide Sequence Number=SeqID_107197
cgtgagccaaaagctcgacgaggatccagatcaaggcgctgaagaggacgaggacttccacgcgcaccagccggccttgagtgctgccccagctctgggtaaaggctgtggtggaattcttgatccccatggcttctccagtgacaggtaatactccaaacttgtccatgctagttggaggcagaagaagagataattagaccaaattaacatgaatggtgatgaaaaagtgagggaggatgtcatgaatcagaaccggacctgagggctttggcgaatggtccgctgctgtagaaatggctgagtttgtattgcgatgagatgcagtagaacaagtgcaattcaatgatcaaccagaacagatcacccggagatggaatattgagtaaacgtaacgttacttactcatcctacaacattcaaacgctcggtacttgcagcaccttccaatggtcatggatatggagagcacacacggaagaaagcat

SEQ ID NO: 41224 - DNA, 1442 bp, Setaria italica
  Peptide Sequence Number=SeqID_107198
tgcatccgggactacattattgcgcaatcaattgcatttgtggtgtcgaaatacttttagatgacctaattcccaatcatactcttagaagtacaatctcaagcatgttgtcatcaaggggtggtggcatttcaagtggtacagggaatcttgcaagctccattagcagcaatttagatggcaaatctatcagcttctccagtaggtcatcatgagactgccttcagcagcaacatatggacagtgcgccatcaattgctgctgaaggcagtctcctgataactgtgtgcaagaatccagtaggtcatcatgagaaattgaaacattctgatctccagagtaaaactgaagagaccgaaaaagcatcagtgaagaagaccatagcagtggcaggtgccatggaaaccgctccagaactaagacgtcagaaacggttgccacctgatggggtagtaatagtttcagggaaccttcagcgaaaagtggttaagagtaagtcatcaaagaagcaaaagaaggctggcacaactggaaagggtgacaccaactgtgatgattatgattgcaacattccatttgagccatcatgctacaactcttcatttggacttggaggactgccttggggagctgatccttacagcatgtactttatgtctaatatggcttccagcggctaccctatgggcctgtataatgtcaatggtatcagtaacttaccactgcacgctcctggaatgcaaggctacccagcaagctattacagcagtggattccagcccacagttttccaggatcatgaagcttctgcacacgcaagtctgtccaacagccacaagggagcaggtccacaatctccaaaaccagagggttatcattcccgcgcctcgactcagaaaggaggatccaggagtgggggcagatcggttccagagatgcgggacagcagcaccgagtcccatgactactatgaggagtatcacaatcggaaaaaggtcggaactcatcctgctagcagcagtccaagggacagcggtcagcgtactgtggacagtagtagctttgagtcccatgactaccgtgaggagtttcatagccggaagaaggtgggagcgcatcctgctaggagtccaagggacggtggtcagcacagacgtgccctggacgacggtggtagctttgcgtcccatgactacgatgaggagttccatggtaggaggaaggagcgagcgcgttctaggagtcggaaatccagctccaggcactcgtacaggaggcgtgcgtacgagggatcgacttggagcaacgaggagagcaacttgaagcaaagatggtagggcaggggaacatattggacaagatgctagtcgctgctatctataaaggaagagaagatcaccttgaatgagaattgtcagaagttggagatcacaatcatggag

SEQ ID NO: 41225 - DNA, 741 bp, Setaria italica
  Peptide Sequence Number=SeqID_107199
acttagttagacaaaccaagaagtaagcaactgtattgcaactgcgtagtaactagttgcatcaagtagtaactgggttgcaattgggtagtagtaacttgttgcaacaagtagtgattgtgtggtaatgagttgcaacaagtagtaactgggtttacaaccggacaaaaacttgttgcaactagtaacaacgggaaacaattaggttgtaactggttgcaacccatgataatcggttgcaattctattcagtaggagttgcaagcatacctagttacaatcagaatggtaactgggttgcaattgattattaactagttgcaactggaagtagattataactggttacaacccatgctaaataggctacaatcaagttgcaactgagttgtagacgtgcttgcaactcaaagtacaacttagttgcaattacatacttaaaaaagcttcatcaaatatagccttcatagatcttgttttgttaagcacattttttttccaacaacctacttcaaagggatctaaaatcttccaacaacctacttcaaagggatctaaaatcggatctgcaatttagaagatatcgtatttttcgaatcgaatccagaaaagattccatccatgtacgctgacgagctaaggttagaagacaagcttcctggtgggtgggttgacttgtgaggtggtgtcacgtggttggttgtttccatttagttttgcatacatgagcgcaggtttgac

SEQ ID NO: 41226 - DNA, 577 bp, Setaria italica
  misc_feature (1)..(62): n is a, c, g, or t
  Peptide Sequence Number=SeqID_107200
nnnnnnnnnnnnnnnnnnnnnnnnnnnnnnnnnnnnnnnnnnnnnnnnnnnnnnnnnnnnnncctctcaaacatgcaagagagctgtgtatcatttcattaaaacgaaaggaataattacaacgatccagcacacccaactcaaactcaagagcacacctgaacacacaccttgaaagaaactaaaacagctcgtcacacacaaaattgcaaacgaaccagcaacctaaacacatatttacatgtctagggcagcaaccttaagagcaaatcacggagccctacttctctagccgaacaccatagggcacactcatttgtcactgcttgaagcatcaccgcgaccattagagtattatccatttcctcttgcttcatcatataatcatcaggattaatgatctcaccgaagtcatcccattcagcagtattttcaaacaagggaaaccttggagcaacactggttgatggaggtataaatccatgaatgcgaatatccatgttatcaccaaaaatgtgaaccagcattggagaatccatgagatgagcttgcatcaatgacactggatcaaaaagca

SEQ ID NO: 41227 - DNA, 380 bp, Setaria italica
  Peptide Sequence Number=SeqID_107201
cttgcttcatcatataatcatcaggattaatgatctcaccgaagtcatcccattcagcagtattttcaaacaagggaaaccttggagcaacactggttgatggaggtataaatccatgaatgcgaatatccatgttatcaccaaaatgtgaaccagctggtagtaccaaaaagtaaaggagtcaattattaataacatatcatatcaaatagtaaaaaccttacagaatataaaacaagtttggggaaactaaatggaacagcagatatgttagcataagaatcattctggacacataaatatagttaccagtcatgaaagtggatattgaacctgatcaggtcaaagcataaagcaggcagataaaaagtaagacagag

SEQ ID NO: 41228 - DNA, 1374 bp, Setaria italica
  misc_feature (1359)..(1374): n is a, c, g, or t
  Peptide Sequence Number=SeqID_107202
cccgctcgcctccggcgatctcgccgcccgcctccgcgagatggcgctcgccgccaacgcctcggcctcctcgcccgaggaaatgatcgaagcggcgagggcggctgcggaagccgctaccgatgcggccgcggctgcccgagccgccgcggccgagaaagcggccgtggccgccaaggctagggccgctgcgcgggctgctatggagttcctcgattccttttccaggacaggcacgtccaggaacggcctccagttcaaggtcaagtcgaggaagaagcatgtccaggtcaagatgttgtacaggcccaatggaaccctgggggatgctcccaagcctaggaggcgcaagcagtccgatgaagagatcgcacgcaatttgcaccgtgccatgaatagctcaccgaggatctctcacactggaccacccaagaggcctcgcggcaaagccggtgatggcaaagatggagccgcccccggtgaaggtaacagggaaggtcgtgacgatgcttgcaatggttcttcaactcatgcgccaattgaggctggcggtggcttatctaatggatgctgtgaggagaaatctagcgagacaactgttccattgttcaagcatgggggtcctgatgatggtggtgatgacccatctaggcatgctgcaaagagtagaggcgatgttactgataatggagttggcactggaaacttgagcgctgctcggaaagtgaagatcaagaggaaggaattgcttctgaaccaacataacaataaagaaacagaagagcccaaggaaacagaaccctctgtacaacctataggacaggatgagccaaagacgaatggaaatggaacagaaaagcatgggagtccagcagatgcaaaggccccaggtgacggcacggcgtcgatgaagattacatctgtatggaagttcaagaagttaaaaacgtcacactgttcatccgacagcaaggtgttgcacaacgtgtgttcctctcctacagcagccgaaacttcagcttcggtgaaagctgattagcgaggtaccatagcgtatagtcggcagatgcttgtcttagctatgcttgttgtgagatttttgtatgttgaagtggttattcggaccaagagggagaggaggtaaatctctctcggtagatcttgcctttgctttgattttttatacaaatgtgcttgttttatggtatataagtgacaaggtatttctaccgtattgtttctgttccacccttcccatttgatgtcattagtaatagggagtgtgacaaacccatttagttgtacctgttatgcatatcatcattctaataaatggcacggtgtaaccaatggtcttcnnnnnnnnnnnnnnnn

SEQ ID NO: 41229 - DNA, 357 bp, Setaria italica
  misc_feature (295)..(295): n is a, c, g, or t
  Peptide Sequence Number=SeqID_107203
tggggcacgattaagaatatagtttttaggacagacatgaacctctcaaaaggccacatatcatgcaggaatactgtaccgagaatagtaatctctttgactagatgaaccaggaggtgcgtcataatattgaagaaggatggtggaaataccaactcaaagctgacaagacattgtaccacatcgtggtagctttactagcttggttggatcgattgccttctgcgaaattgcattgacaaacgtgcataactttacgagcactaatcgaacattctccggtagaatacccctnagtgcaaccggaagcaactaggtcatcaacatgtgacagttatgggtcttgagatttgtgaa

SEQ ID NO: 41230 - DNA, 433 bp, Setaria italica
  misc_feature (1)..(2): n is a, c, g, or t
  Peptide Sequence Number=SeqID_107204
nncggcttgctggccttgtccttctccttctcgagtgcgtggagctcgacctcaagctgaatcctcttcctctcgaggttgtcgatctcctccggctggctgtcgagctgcaccctcacattggcgcaggcctcgtccaccaaatctatggccttgtcgggcaggtgccggcccatgatgtatctcgctgagagctgcgcggcgacgacgagggcgcggtcctggatcctcacaccgtggtgcccctcgtacttctccttgagccccctcaggatgctgatggtgtcagcgacactgggctcggcgacgaacacctgctggaaccgccgctcgaacgccgcgtccttctccacgtacttgcggtactcctccagagttgtggcgcctattgcaccggagcttggccctatcgtcgtacccttacgtaacgtaa

SEQ ID NO: 41231 - DNA, 394 bp, Setaria italica
  misc_feature (328)..(328): n is a, c, g, or t
  Peptide Sequence Number=SeqID_107205
tttaatacaaaatcgcaaagaataaaaagaacacaacacacaagcagcgatctaagcacatcatctatggccaaatgctcctaagacatttggctcctgccatacaccatattctagcctcatccctaatgtcctgcatgatgacattgaagtttggtgaggcccctcaaacagacatgtattcctttgtttccaaatcaaccaaaccaccaatataactaaggagttgaagcccttgcggtgctgcttgtgaacttgcatcattgcttggcgctgcaactgaagatgagatcatctggccctgctgctagctattgcagatcaactntttacagagccgaaaaccaaacttcttttgaaaacacactagacatgagcaaatgccagacatttt

SEQ ID NO: 41232 - DNA, 478 bp, Setaria italica
  Peptide Sequence Number=SeqID_107206
tctattcctttttgtactaaattggtaaaaaagtaagtattcgtagggttgatattcatgtgtccccaacagaagaagacaatggaggtactgctgggagtgacattgaggaggtgtccccatcctttgacaatggaaaaagaagatcgagggttgtcatagacaaaggaaagaaagcaaaaacaggtacaacacttgtgattcaagaaaaattgagtgagatagctgaacaagccaaggctttcacatcaaggaaggttggcgaagttactgttgaacaagtaatggaccttgtcttggactgtggagcggggtatggtaccgatgagcatttcattgccactgagttgtttgtgaagaaagatcaatcatgactcttccaactaagaacattagattcggttggcttacgaggaagttcaacgccaaatatgggaattgaagaccatcatttgtgttgttggatgtccttttcatg

SEQ ID NO: 41233 - DNA, 254 bp, Setaria italica
  Peptide Sequence Number=SeqID_107207
gtagtgagcaggggagctactgatgtcgatgtgaagcgcctaccaaagaggccggcaccgccccggttcggacggaaattgactgacgcacaaaaggcaagatcaagataacaatagctactttttccccatcaacttgaagcctcagcatatatgctataaactgcaaataccccatttttttccaggagagagccacacacatctgccttgattgtggatacatatacttcctacccaagccttttgaagag

SEQ ID NO: 41234 - DNA, 1035 bp, Setaria italica
  misc_feature (1010)..(1035): n is a, c, g, or t
  Peptide Sequence Number=SeqID_107208
tctatccaccatcatccttgcagccccacaccatggctgccacgatctcctacgtggccgccccttccctcatcaaccgcagctccattgccagagctcagcggccggcgccgcctccagtcatctcggcatcaactaagaccaagaccggcttccatggggtgtcgctggtggacacgaggtgggcggccggccaccggagaggcggcggcgggcggaggaggctgctgcaggtgaacgcgaggtcgacggcggccaagaacatcgaggtggaggtcgacaagccgctcgggctggccctgggacagaagcccggcggtggcgtcgtcatcacttctgtggagtctggagggaatgcagcaagagccggactgaaagccggtgaccaggtgctgtacacaagcagcttcttcggagatgagctgtggcctgcagacaagctgggattcaccaagacagccatccaggcgaagccagactccgtctactttgtagtgagcaggggagctactgatgtcgatgtgaagcgcctaccaaagaggccggcaccgccccggttcggacggaaattgactgacgcacaaaaggagagagccacacacatctgccttgattgtggatacatatacttcctacccaagccttttgaagagcagcctgatgactatggttgcccacaatgcaatgcggcaaagaagcgatttgcaaagtacgatgcggccacggggagggccattggcggtgcgctgccacctattgcggtgatcgtaagtttggtaattggcatcgccggagtaggggctctgctagtgtatggcctgcaataggctgttcattcttcagaaccaatttttgctgtgcgcaagaagctcagctgactgctgctgtactaaaatctcacgaaacactgagtgatacataaatatatcaaagggaatggaaacatactatgcttgaggccattggctagtctaaaaaaaatgccgaaaggcagcgcacttttcaaaagnnnnnnnnnnnnnnnnnnnnnnnnnn

SEQ ID NO: 41235 - DNA, 324 bp, Setaria italica
  Peptide Sequence Number=SeqID_107209
gcatggaattcagtccggaccggcaggcgtgcctggaaccagccaaccaccaccaccatcgtactaccattaaatttgattcttatttttctgtactttggttgttttcactgattataactcatcgtatagtgctgcaataccgccatccgagccctgtttagatggcatgtggtagctgacagatatgagcaacgaatacatgaatatgtttgggttttcattcattgccaaaattggccggtgtctttttctactttcatggcaaccactgcaagcctaggaatcacggattggtttaagtctagttggtttgtttttctt

SEQ ID NO: 41236 - DNA, 392 bp, Setaria italica
  Peptide Sequence Number=SeqID_107210
ttcctgtgaaccaaactgcaattgaggggattgtgcagccaacagtaggccctgatggaaagataaaggagcctgagagtaatgtacttttagcatcaattgagaacatgcagtatgctgtgacagtggatgttttgcacactgtgttttctgcttttggtactgttcaaaaaattgcaatgtttgagaagaatggtggaatgcaggctctaattcaatatccagagaggtgtcggagttcgggaaggcataaaatggacatctgcaactttcaacagctataaagttgcctttagtaatttcttgatcagcagttgctaaacagccctggagggacactgcatatatgatggtggttactgcgcatgatgagagaagcagggattacacac

SEQ ID NO: 41237 - DNA, 762 bp, Setaria italica
  Peptide Sequence Number=SeqID_107211
cggaaccactagctactccgacacagccttccgcggctccgccccagcccaaaaattctcaaaccctagcttcgtcttctccggcctcaccttctccgtagctgtcctgccggccaagatgtcgtcgtcgggcgggggcgggggccagcagttccgctacgcgcagacgccgtctaaggtgcttcacctgcggaacctgccgtgggagtgcgccgaggaggagctcgtcgagctctgcaagcccttcggccgcatcgtcaacaccaagagcggcgtcggcgccaaccgcaaccaggccttcgtcgagttcactgacgttaatcaggcaatctcgatggtttcttactttgcatcatcatcagaaccagcacaaatccgtggcaaaactgtttacattcagtattcaaataggcaagaaataattaacaacaagagccctggagagactgctggaaatgtgttgcttgttaccatagagggtgttcaagctagtgatgtcaccattgatgtgatccatatggacttctcagcatttggatatgttcaccgtttacaactatttgaaaaggctgcaggttttcaggcattgatccagtacagtgatgcagccactgcttcagctgctagagaagccttagacggaaggagcatcccaagttacttgcttccagagcacgtaacgtcctgctgcttgcgaatttctttctctgcacacaaggatttgaacatcaagttccagttctaaaccgtctagtctagggt

SEQ ID NO: 41238 - DNA, 702 bp, Setaria italica
  Peptide Sequence Number=SeqID_107212
tagaacaagacatcatgtccccggatccttagcaccctgtaaattcttttcttgttttcgagtggaattgctaatcttgttttccctttgctatggagttatagcattaatatttagtagaggaacacatattcatttgactgacaaaaagctatatttgcagatgtaacaactgcagcagttgctaaacaagccctggagggacactgcatatatgatggtggttactgtaagcttcatctgtcatactctcgtcatactgatctcaatgtaaaggtataaatagtagtttcaggctgtgtaaattagcaaataattgattgacttcaatatcttgtggactaataataatgaagttggctcaattagtaaaacggaatacctattgctgttcattcaatttgacaaagtacgctttctcaacattgttttccttggagcttcctgttttcgccttggtctaactggggaccatttgtttgcattcaggcgcatgatgagagaagcagggattacacactttcagaccctaatgcgcaactgcaagctgctgcacaagcaccagctccaggagtggcatggcagaacacttcagcaccagctgctccgttttatgcaagcacagcagcatcacctcctgctggagttggacaagtgcctgcttggaatcctaacatgcaggcaggggctttcgcatctgca

SEQ ID NO: 41239 - DNA, 620 bp, Setaria italica
  Peptide Sequence Number=SeqID_107213
gaaggaagcattggaagggcactgcatctacgatggtggctactgtaagcttcacctgtcatactctcgtcatactgatctgaatgtaaaggtataataggtgcattttctttagtgttattttgtcacataaaacatcttgatggtacatgtgtcccttcacagaaccctctgtttcacaattgcgtatttgtccacgatatgaagtcatgttccattcgtctttcaggcacatggtgacaagagcagggattacacaattccacctggtgtaatccaaggggtgccacaaccacccggtgcagcagctacatccactgggtggcaaggtaatattcaaggagccggggcatatgccccacccggtatccctgcccaaaaccacagcgccaacggacaagtgccgaattggaattccggcaactcagggtatcccccagccccaggagcgtatccaggtcagatgtactcgtctccagctcagtactcagcatcagggggctttcctaatgccccacccgctgctccgcctcagtatgcagcatcagggggcttcccgaccctcctgctgctccaccgcacgagttgcatgcttcgcagcagatgccgcctcagcatgg

SEQ ID NO: 41240 - DNA, 569 bp, Setaria italica
  Peptide Sequence Number=SeqID_107214
aacaaataccaaatatcttccaattaactattctgccatggatggtacattacagcctgctgttggtgctgatggaaggaaagtggaggctcaaggcaatgttcttcttgcatcaattgagaatatgcaatatgctgttacagtagatgttcttcatactgttttctccgcatttggtacagtccaaaaaattgctatttttgagaagaatgggggcacacaagctttgattcagtaccctgatgtaactacagctgcagttgcgaaggaagcattggaagggcactgcatctacgatggtggctactgtaagcttcacctgtcatactctcgtcatactgatctgaatgtaaaggcacatggtgacaagagcagggattacacaattccacctggtgtaatccaaggggtgccacaaccacccggtgcagcagctacatccactgggtggcaaggtaatattcaaggagccggggcatatgccccacccggtatccctgcccaaaaccacagcgccaacggacaagtgccgaattggaattccggcaactcagggtatccccaagcct

SEQ ID NO: 41241 - DNA, 685 bp, Setaria italica
  Peptide Sequence Number=SeqID_107215
gttaaatattctttcgcccatacttttgtacatcatgtccccggatccttagcaccctgtaaattcttttcttgttttcgagtggaattgctaatcttgttttccctttgctatggagttatagcattaatatttagtagaggaacacatattcatttgactgacaaaaagctatatttgcagatgtaacaactgcagcagttgctaaacaagccctggagggacactgcatatatgatggtggttactgtaagcttcatctgtcatactctcgtcatactgatctcaatgtaaaggcgcatgatgagagaagcagggattacacactttcagaccctaatgcgcaactgcaagctgctgcacaagcaccagctccaggagtggcatggcagaacacttcagcaccagctgctccgttttatgcaagcacagcagcatcacctcctgctggagttggacaagtgcctgcttggaatcctaacatgcaggcaggggctttcgcatctgcatccaccccgtaccctagccaaccgatgatggcaaacgccatgcctcactatcctgctgttggaaccagttcaggcgccccacctgtgccatttcaggcgtcacagcagatgccccagtacggcatcccccctggttgtctaccgtccgtctacgtctacctacctagtcttggtct

SEQ ID NO: 41242 - DNA, 1497 bp, Setaria italica
  Peptide Sequence Number=SeqID_107216
aacaacaagagccctggagagactgctggaaatgtgttgcttgttaccatagagggtgttcaagctagtgatgtcaccattgatgtgatccatatggaccatgttaacacggagaaaatgtcgttatcaacacctgcaattggagagataccatgtttgttttgctgcctctgtcttctaactagcacattcaaagttcttatgaactctcattgtctcatcttgaggatgcaatctaagtatcctccatcaacgcgcttatctccggtgtagggcacctccctgtttattcaagttactgatgaaaggttttctcagcatttggatatgttcacaaaatagccacctttgaaaaggctgcaggttttcaggcattgatccagtacagtgatgcagccactgcttcagctgctagagaagccttagacggaaggagcatcccaagttacttgcttccagagcacgtaacgtcctgctgcttgcgaatttctttctctgcacacaaggatttgaacatcaagttccagtcaaaccgcagcagggattataacaatccatatcttccaattaactattctgccatggatggtacattacagcctgctgttggtgctgatggaaggaaagtggaggctcaaggcaatgttcttcttgcatcaattgagaatatgcaatatgctgttacagtagatgttcttcatactgttttctccgcatttggtacagtccaaaaaattgctatttttgagaagaatgggggcacacaagctttgattcagtaccctgatgtaactacagctgcagttgcgaaggaagcattggaagggcactgcatctacgatggtggctactgcacatggtgacaagagcagggattacacaattccacctggtgtaatccaaggggtgccacaaccacccggtgcagcagctacatccactgggtggcaaggtaatattcaaggagccggggcatatgccccacccggtatccctgcccaaaaccacagcgccaacggacaagtgccgaattggaattccggcaactcagggtatcccccagccccaggagcgtatccaggtcagatgtactcgtctccagctcagtactcagcatcagggggctttcctaatgccccacccgctgctccgcctcagtatgcagcatcagggggcttcccgacccctcctgctgctccaccgcacgagttgcatgcttcgcagcagatgccgcctcagcatggaattcagtccggaccggcaggcgtgcctggaaccagccaaccaccaccaccatcgtactaccattaaatttgattcttatttttctgtactttggttgttttcactgattataactcatcgtatagtgctgcaataccgccatccgagccctgtttagatggcatgtggtagctgacagatatgagcaacgaatacatttaccggtacaaactacaagggtaatacccccaagaccccaaggtaagtacgtta

SEQ ID NO: 41243 - DNA, 1905 bp, Setaria italica
  misc_feature (1770)..(1905): n is a, c, g, or t
  Peptide Sequence Number=SeqID_107217
ggcgcggttctcccccccggttccgtctccaaacacccccccgcccgttcgcgataagaaaacccaccaaaccctaaccctagctgcagcgccaccactgcgcgcccgcccgcccgccggagggacccgagccagccagcgaggatgccgtcggggtcggcgacgcagttccgctacacgcagacgccgtccaaggtgctgcacctgcggaacatgccgtgggagtgcaccgaggaggagctcgtcgagctctgcaagcccttcggcagggtcgtcaacaccatgtgcaacgtcggcgccaaccgcaaccaggccttcgtcgagttcacagatcttaaccaggcaatttcaatggtttcctattatgcttcatcttcagaacctgctcaagttcgtggtaaaactgtatatatccaatattcaaacaggcaagaaattaccaacaataaaggcactggtgattcttctggcaatgtcctgcttgtcacttttgaaggtgttcagcctaatgacgtcaccatagaagtcattcatttggtattttcggcatttggattcgttcacaagatagctactttcgagaaagcagctggtttccaggcgcttatccaatatactgatgccccaactgctcttgaagctaaaaactcattggatggaagaagcatcccaaaatacttacttccagaacatatcaatgcctgccacatgcgcataaccttttctgcgcataaggatttgaatatcaaatttcagtcacatcgtagcagggattacactaatccttatcttcctgtgaaccaaactgcaattgaggggattgtgcagccaacagtaggccctgatggaaagataaaggagcctgagagtaatgtacttttagcatcaattgagaacatgcagtatgctgtgacagtggatgttttgcacactgtgttttctgcttttggtactgttcaaaaaattgcaatgtttgagaagaatggtggaatgcaggctctaattcaatatccagatgtaacaactgcagcagttgctaaacaagccctggagggacactgcatatatgatggtggttactgtaagcttcatctgtcatactctcgtcatactgatctcaatgtaaaggcgcatgatgagagaagcagggattacacactttcagaccctaatgcgcaactgcaagctgctgcacaagcaccagctccaggagtggcatggcagaacacttcagcaccagctgctccgttttatgcaagcacagcagcatcacctcctgctggagttggacaagtgcctgcttggaatcctaacatgcaggcaggggctttcgcatctgcatccaccccgtaccctagccaaccgatgatggcaaacgccatgcctcactatcctgctgttggaaccagttcaggcgccccacctgtgccatttcaggcgtcacagcagatgccccagtacggcatcccccctggtgcaccgccgcacgcaccaccagctggccaaccaatgtacttcccgaaataaggcggttccattcgatgatattgtcagagagcaactgcatgttacctgcagccagttgtggtctgcatatgcccctttgaaattttggaagtgcgttgtaactcttcaatgtagctctttgtaacttgcgagctcgcatcgcaagtatacctctgcgccggttgtctgtaaaactgtccgccgaaattagaaatgttaatctattagcctgaatgatgtattgttgagctaacaaaaaaaaannnnnnnnnnnnnnnnnnnnnnnnnnnnnnnnnnnnnnnnnnnnnnnnnnnnnnnnnnnnnnnnnnnnnnnnnnnnnnnnnnnnnnnnnnnnnnnnnnnnnnnnnnnnnnnnnnnnnnnnnnnnnnnnnnnnnnnn

SEQ ID NO: 41244 - DNA, 640 bp, Setaria italica
  Peptide Sequence Number=SeqID_107218
tttttttttttttttttttttgagtggaaatacctttaatccaaattattgatttttttatttggcattacatgtttgagaaaaaatgcacacacaaacctcatgtaccaaagggatcatcgaaagggggaaaaaacaaatcacaaggtttcattacaaccaatgtccaatggaagcggaaataaaatactgcacatacagatacaacggtatctgcaacaccggcaatcatatgaaccatgcacgcaagacgcaacaacgacgacgacgaacaaatcgagtgtctcgcggtgatctcagttgacgccggcctttgatcctccgctcacagtgggatctctcggcttgatcgcaatcggctgaacatttggcaacttggtgggctcctcgggcacatccttgtttgcgccggcgccggcaccgccgcagttgacgacgcggtcgaggaggccgaggagcttgtccttgagctgagcggcgaagttggccatggaagacatagtacctgttgctgttctgcgttggctctgcgctactgcctccgagcttttagtatcgaagcaatagtgctagaactagaacgatggcaggcacgcgtgctaagctactacctgaggtcagggatgaattggagttggag

SEQ ID NO: 41245 - DNA, 424 bp, Setaria italica
  Peptide Sequence Number=SeqID_107219
gatacctcagaatacacagtggtgagaaaaatgtcacttggaacaggccgcggcatcaggggattaaggcacattttggttgtgcccaagactccatgagagccagatacctctcgttgttgggatcctgacgaggcacgatttcatgcccgagcatgttcatggaccgttcccgaatctccacaagtcccgttgaggaagaagcgttcagtatcatgttcagtttgatgttgccttgtacaccgtactagcttcctgtgtgaaaaagaagccgctttgtgcaatgcttgctaccccatctgcctttttgtttcatttatatttcttctggactactccaaaaacttgagataattggatcatatcgtatttgatgtaaagacctgattctcgggattttccaatcaattgagtggattttttg

SEQ ID NO: 41246 - DNA, 229 bp, Setaria italica
  Peptide Sequence Number=SeqID_107220
gttcagcaagtgccatccccccggcggcgtctcctctcacgccaactactctgatgagcccaagcacgcgcaggaggagcaaggcaagtagactagactactggtgctgccggcaggctagctgattggcctttgatctcaagttaaattagcagcagaggcatggcctattattggcggctcacactcactatcgattgctttagtagctagaacagcacatgacagc

SEQ ID NO: 41247 - DNA, 982 bp, Setaria italica
  Peptide Sequence Number=SeqID_107221
ccgcctccgcccccttccttcacgcgcacatcaaaaaggtttcatcagaaagaaaaaaaaaattgttaggccgtgatcgaggctccgctcgatagagcactgaagcagggcggcaaggaggagaggccatggcggccatgaagctccccgagctggcgctgagggtgtgcgtgatcccgctcgccgtggcctcgctatgggagatggccaccaacaggcaggtcgacgacacctacggggaggtcaggttctccaatctctccggcttcacctatttggttggcatcaacgccgttacagctgcctacgcggtagcatccatcttgctgtcgtcgttcaagtccttcgctcggtatgactggctgattctcgtcctggatcaggcgtcggcgtacctgctggtgacgtcggcctcggcggcggcggaggtactgcagctggcacgccgcggcgaccgggacgtgtcgtggggcgaggtctgctcctacttcagccggttctgcggcaaggccaccgtgtccggtggcgctgcacgccgccgcgctcgcctgcttcgtcgcgctctccctagtgtccgccttcagagtgttcagcaagtgccatccccccggcggcgtctcctctcacgccaactactctgatgagcccaagcacgcgcaggaggagcaaggcaagtagactagactactggtgctgccggcaggctagctgattggcctttgatctcaagttaaattagctgctgtttttgtgcgttgatgctgtcatgtgctgttctagctactaaagcaatcgatagtgagtgtgagccgccaataataggccatgtgtaagactaattcgcgatacgaatctattaaacctaattaatccataatttgaccatgttgtccgcattaggccagtcacatcttggttgccctggtccatgtgccagcgaccgagacgagccttcattccgtgcattatttcaggttcctac

SEQ ID NO: 41248 - DNA, 965 bp, Setaria italica
  Peptide Sequence Number=SeqID_107222
cgcgccgccggcgtccaccaccagacagagcagtcgaaaaaccctcgccgccgcgccgcctcgtcgtctccgccgcagatctcccaccagaaagccccaatctccccgcaaccccgaagctccccgccatgtcggcgatgctgcaaccgcaggtcatcctgctcaaggagggcacggacacgtcgcaggggaaggcgcagatggtgagcaacatcaacgcgtgcacggcggtggtggacaccgtgcgcaccacgctgggaccccgcggcatggacaagctcatccacgacgacaagggcggcgtcaccatctccaacgacggcgccaccatcatgcgcctccttgacatcgtgcaccccgccgccaagatcctcgtcgacatcgccaggtcgcaggactccgaggttggtgatggaactactactgtggtgcttctagctggtgaattcttaaaggaggcaaagccttatgttgaggacggtgtacaccctcacagtctaattcgcagttatagggctgctggccatttggcgactgagaaagttaaagagctggcggttagcatagaagggaaaagccttgaagagaagaaattactgttagccaaatgcgctgcaacaacgctctcatcgaagttaataggcggcgagaaagagttctttgcttctatggttgttgatgctgtgcttgctattggaaatgatgacaggcttaacatgattggaattaaaaaggttcctggaggtactatgagagattctttccttgttaatggtgttgccttcaaaaagacgttttcatatgctggatttgagcagcaaccaaagaagttcctgaatccaaagattcttttgctgaacattgaactagaattgaaatctgagaaagaaaatgcagagatcagattgtcagatcctctgcaataccagtcaattgttgacgctgagtggaacattatttatgat

SEQ ID NO: 41249 - DNA, 632 bp, Setaria italica
  Peptide Sequence Number=SeqID_107223
aacttagaaggttaattaccgaagaacaaactttagtagaacaaatagctggatttgatgcaactgatgtgctaaataagctcagacagaagcatgcatctggtgaaggtgctaactatggtgtggacatcaacactggtggaattgctgattcttttgctaactttgtgtgggaacctgcagtagtgaagatcaatgctataaatgctgcaactgaagctgcttgtcttattctcagcgtggatgagactgttaaaaaccccaagtctgaaagtgcacaaggtgatgctgctgctatgggtggtcggggccgtggtggagctgcaatgcgtggccgtggtggaaggggtatgaggcggcgataatcaatcgataccacatagtatctttgggtcacttgagtgggtcaaattttggagctgggcccttcctcttcctatatccatgctctccctgcgtggtgttgtttgtgagctctatgatttcctagatgtgctaattggaacagcaaatggattgcaaatattgctgttatgtaaacattacaggcagacaattgggagcttttggccccatcttgttcgtttcctgcgtagcactcggtagtgttcgtcttgtgaaccagatttatg

SEQ ID NO: 41250 - DNA, 1612 bp, Setaria italica
  Peptide Sequence Number=SeqID_107224
ggccatttggcgactgagaaagttaaagagctggcggttagcaatagaagggaaaaagaccttgaagaaagaaatttctttaattttctttaagtttcgagcgttaatttggttaactacttatgttaatgtactaaagttgtactaatttgtaggtgttagccaaatgcgctgcaacaacgctctcatcgaagttaataggcggcgagaaagagttctttgcttctatggttgttgatgctgtgcttgctattggaaatgatgacaggcttaacatgattgggattaaaaaggttcctggaggtaccatgagagattcttttctggtgaatggtgtggcattcaagaagacattttcatatgctggatttgagcagcaaccaaagaagttcctaaatccaaagattcttttgttgaacattgaactagaattgaaatctgagaaagaaaatgcagagatcagattatcagatcctctgcaataccaatcaattgtcgatgctgaatggaacattatttatgacaaactggataaatgtgtgaaaagcggagcaaagatagttctgtctcggttagctattggtgatctggcaacacagtattttgcagaccgagacattttctgtgccggtcgtgtcactgaagaggacctgcaacgagtggctgcagcaactggtggaaccgttcaaacttctgtgaataatgtcattgatgaggtacttggttcttgtgaggtatttgaggaaaaacaagtgggcaatgaaagattcaacatatttagtggctgcccttctggtcagacagcaactattgtcctccgtggtggtgcagaccagttcattgaggaagctgaacgaagtctccatgatgccatcatgattgttaggagagctcttaagaactctacagtcgtgccgggtggtggtgcgattgatatggaaataagcaagtatctcagacagcatgcacgaaccattgcggggaagtctcagttctttgtaaattcgtttgctaaagcccttgaggttattccacgacaactttgtgataatgctggatttgacgcaactgatgtgctcaacaagctcaggcagaaacatgcatctggtgatggtgctaattatggtgtagacataaacactggtggaattgctgattcctttgctaactttgtgtgggagcctgctgttgttaagatcaatgctataaatgccgcaacggaagcttcctgccttatccttagcgtcgacgaaacagtgaaaaacccaaagtctgagagcgcacaaggtgatgctgcagctggtgcaatggctggtcgtggaggaggtgcaatgcgaggccgtggcgggaggggcatgcgcaggcggtaaattgagccacgtcgactctgtaacttcatgttttgatcgcctgagggctgttgtatcataactgcacgtgtgatgtgaatgattcagaagcaatgatagcctttgtttcagaacagcagagatataccaggcatttatgaatgtagccgccaccggttgtgatatagatctgagccttgttttttttctctcgagctaaaggatgtattccttttgttgcgatccttgtgcgctgaagccta

SEQ ID NO: 41251 - DNA, 298 bp, Setaria italica
  Peptide Sequence Number=SeqID_107225
ccttgaccaacttgagctgaaatattgaaatcgcttgttgctccagccatttcttcaaatgtgaagcatttcacgccatcaaccttgatagaaaaccttgaaagtagtgaccgccttgaaactgttcgatgctttctgcgctttttcattataaaaactgtagaaaccacagatactgcaacggcagcgacaattgtccctaccaaaatgccagctagtgcactcctttttaaacctgatgacaccacagtaggaaattcatctgcataggaaccaagcgtgaaattgagaagctcat

SEQ ID NO: 41252 - DNA, 687 bp, Setaria italica
  Peptide Sequence Number=SeqID_107226
ctgacagggtgatctgccatccagctagtacctgcctgagccgcaccacctcagccgtattgaataaaggtgtattatttgggaataactttaaatgcgtattaagccttgggcctgtctcccgcatgaatcgttcaatgtacagctgataaacacgcaattccagcagagaggttaagtttatctcaaaagtttctttatagggaaggaagtcaaatatgcctggactctttagtcgaaatccaactcccagaggcacagcacataagcaaggtataggggatgctggattgtattcataatttttatccgtcgggcaaggaggacacaatgtattaacttgtcttccctctccagatggttctccaattacagatttaggctggcaaagattagctgccctggctgcattagatgtcgtgcatacagggtttccataaagtagcaaagtgacagcttctggaggctcaaatgcagctggaatagtgtcaagggagttattttggaagtccagaataagtgttctatttcccgtaaaagtaatgttgctccaaattgtcggtggaacagaaccattaagaggttccattgactgacaataactgaaggttagtagccctgagaagtttggtggaatggttccatcaagaaagttatgtgacaaatcaattgtagtgatagttgaag

SEQ ID NO: 41253 - DNA, 532 bp, Setaria italica
  Peptide Sequence Number=SeqID_107227
taatggtatactaccataaaagaaagcatggcaattttgacattgtcaatgtgactgacagtatgagacttactggggtgcccttaacaacagtagagatatgagctggcagagtcccttcgacatcgggcactggagcaagccttgaaagaccaaagtcagccaccttcgctacaaacttggagtccagaagaatgttgctggccttaacatcacggtgatatataggaggatttgcctcagtgtgtaggtacagaattccttttgcagcaccaagcgcgatgtgcaccctccgaccaaaggtcagaggtctttcagtcttagcagaaagatgatcacgtagggtaccattgggcatgaactcatacaccagcatctgctcgtcttcttcatcacaatagccaacaagagagaccaaattacgatgatgcaatcttgacagcaactctatttctgtgcagaactcctttgagccttgcagagaatcttcatgtgcacgcttgattgcctacagctgtccatcaactaagtt

SEQ ID NO: 41254 - DNA, 348 bp, Setaria italica
  Peptide Sequence Number=SeqID_107228
gggtgcctactgtaaggataaattgctctaatcttaaatttctattttaaactgtcccaaagagccacgttcatagtaacaatcattagtcataatgctaaactacattaattggagaagtaatactgagatgcccataagctagtccagtgtcctcacagatagccaagttgaggtatgctactcagatcaggaatagctccttgcaagctgcagttcctaagactcctggtaaaacaagaaatattatcctcagcctttattgattttgtataagcttaggcattatataatctggattttgcacaacggatgcttgtaattaccttctgagtaaagactaaagct

SEQ ID NO: 41255 - DNA, 878 bp, Setaria italica
  misc_feature (1)..(41): n is a, c, g, or t
  misc_feature (54)..(54): n is a, c, g, or t
  misc_feature (877)..(877): n is a, c, g, or t
  Peptide Sequence Number=SeqID_107229
nnnnnnnnnnnnnnnnnnnnnnnnnnnnnnnnnnnnnnnnnagttcaataaatnaggggtataggttgtccagcccatcttttagcaagttttagcaacaaaaacttgttaaagtggtaaactttagcaactcaactttaacaagttttagcaagggtgtttagcagtttagcagctaaagctaaagtttagcagggtggaaccaaaaacccccttaaaatcacagaaatgtggacgctggctacctacaaagctatacaaatcattgtcactcatcaggtgtctacaaaaccatctccaacgcggccggcgccggcaccgccaccccctaccggggagccaccgtgccggaggggatgccgctgtcgacctggccgctgccggacatatgcgaggacacgtagagggcccccgtgggtgtcgaagacgacgacatggtcttggtcagcaagcccgaccccgtggtctcggacagcgcgtcctctccctcgggcagcatgccccggatggtctccagctctcggacgatgtcggccatgtagggcctcgcctcggtctcgtcccggcagcacttgatcgccagggagaggaacctcgtgacgcactccggagggtacgagggcatccggctgtcgatgatcctcgagatgtcgcctgattggtaagccatgtttacctctctaacaatgttttaccatgctggattggcctcattccagtcaatagttcaagaagtacaacgccaaggctatacacatcacttctttctgtcagtttatgagttaggaaatattctggatcgaggtcgacctacggtactacgtacccggacaagacaacttagaatacgaccaagggaagaaggaaacctacgtana

SEQ ID NO: 41256 - DNA, 2713 bp, Setaria italica
  misc_feature (1)..(22): n is a, c, g, or t
  Peptide Sequence Number=SeqID_107230
nnnnnnnnnnnnnnnnnnnnnngtaacgcccaagacaacatgtcaatattctcagctctattcatttacagaaccatatctgaaagctaaaaaggctacgtcaataacgttcctgacatcccgtgtgtgtcatacaaaggacctgggagtgctaagcctataatgttaggccctccgttttggagtacaaaacaaatttgttgcatattcacaaaattacaccatgaaaacaccatgactaccgaggagtcacccttccagaaatcatgccgctgctcgcatcaagactcccagagacctgcgacgagatgaagagggtcccagacgctgaagccgacaatgacttactaacatcggtcgagtctgtctccgaggtttccagcagaaccaggtcctctttaggcatcatcctcaagatgagctcaagttctctcacaatctcccacatggaaggcctgtcatcagtttcatcctggcagcacttggttgctagagataggaacctgctgacacattctggagggcacaagcccatccggccgtcgattattccagaaatattgcctgattggcaagcagagtttacctctctcactatgtttttaccatgctcaattggcttcatcccggtcaacatttcaagaaaaacaacgccaaggctatagacatcgctcttgtccgtcaatttgtgagttaggaaatattccggatcaagatagcctggggtgcccttaacaacagtggagacatgagctggtaatgtcccttcgacatctggcactggagcaagccttgagagaccaaaatcagctacctttgcgacgaatttcgagtccaacagaatgttgctggccttcacatcacggtggaatataggtggatctgcttcagtatgtagatacagaattccctttgaggcacccaatgcaattttcagcctcaaaccgaaacttaaaggtcttttggacttggcagaaaggtgatcacgtaaagtaccatttgacatgaattcataaaccagcatctgctcatcttcttcatcacaatagccaaccaatgaaaccaaattgcgatgatgcaatcttgacaataactctatttctgtgcagaactcctttgagccttgaagagaatcttcatgtgctcgtttgattgctacaattgctccatcagctagaaaacctttgtagacttttccataacctccttggccaacttgggccgatatatcaaaattatttgtggctatagccatttcttcaaatgcgaagcatctaacgccatcaattttgacagaaaacctcgacattgaacgcttcgagactgttctatgtcttgaacgccttctcagcatgagggtggtagctaccacggaaagtgcaatagcgccagctattgagcctgccaatatactgcccagtgcagccttgcttaaacctgttgaagctgcatttggaaattcatctgcataggaacccagtgtgaagttgagaagctcatatggaccaaatacatctgaaagagtaatttcccagccagcaagtacatgtctgagtcgcacaatctcagatatattgaataaacttgaattacttggaaataacttcatatgcatatttagccttggaccaacttcccatatgtagtgctcaatgtttagctgatagagaaacagttgcagcaaagaggttaagttgataccaaaggcttcttcatggggatgaaagtctgtaattcctggacttttcagacgaagtccaactccaagtggcaccgcacaaaagcaaggaataggcgatgacggattgtactcgtaatttttatctgtagggcaaggttgacaactaaaggtagagccttgttcctttttcgatgtttgctggtttactgacatgggtttgcacaggttggttaccagagctccattagtattcctacacacagggtttccataaagcatgacagtgacatttgggggagggtcaaatgttgccggaattgtgttgagagaattgttttggaagtctagaacaaggcttctattcccagcaagattgatgtcattccagattatcgagggaacagaaccatttagattattatcttcaagtgataatatctgaagatcgggaagccctgagaagttctttgggatagttccatcgagcatgttgtgagacaaatcaattgtagtgatgtttgaagcaagcttattagtcggtatagatcctgtcagctggttccagctaatatccagatagccaagttgaggtatgctactcagatcaggaatagctccttgcaagctgcagttcctaagactcagctttagtagtgtggatatgttgctatatgtagtagggatggagcttccactgaagttattattatcagcctgaaatatttttaaagcaggcgcctttgcaaattctggaggaagaggtccagatagattgttgttgtcaacaagcaggtgaagaagtagaggcaatctggacagttcggatgggatgctcccgcttaatgaattattgttcatatgaagatgtttcacacttcttagattggcgaatgatttaggtatggggccaaataattggttttggtcaacctgtaatctatttaagttttgaaggttgccgatctcatctggcaaaataccggagagctgattgccattcaaaagtataagtttaagtgtagtaacattgcc

SEQ ID NO: 41257 - DNA, 745 bp, Setaria italica
  Peptide Sequence Number=SeqID_107231
acaggttttgcctcttcaaaccctttttcttagcaaaagatacatatttttgttatgactttgttccagaaataatttaaacaaaaaaagaagatgcgaaaaaaccactgcacaataattcctacccaattcatattgtgcttgaagagatgtgtagatatatcatgttaaccattgtaaccaagattcatatatatatatgttgcatgtgtgcgcgcctacttaaatctaaaaacttccaaagcatgctagaaattagaatcagtgaagtttagctaattagtgattttgaacttgatgggaatttttcatatttctcacttaacagtgagggcatgcaattaagaaaactttagtcaataagaggcatcctaagcagattattgtgactgtgcagtaacagacagaaccaaactaccccgtactgtgcatgttattgggaagtcatcagttattgtattgccattctttgctacctttttcactcttttttcttattattatctcaacttggtttctcacttgcatagaaaccaaatacttctgctagggaaaaaaatgaaaaagggtgtcccctaatatttacagattcacaaaaatggccaaggggaaaaacaaaaccggagaaatgtgactttatccacacaggtagaggcctctcagcgttctcaggtgtgtaaggatctccatgtaggaaaatctggtaaccacaaacaaaagtaaccagacaaaagcaaaccttgtc

SEQ ID NO: 41258 - DNA, 957 bp, Setaria italica
  Peptide Sequence Number=SeqID_107232
aatagaagacttttagccaactccacaacaacaactccgccccagcagtagcctgcagccccaacagaagacactcccttctccttgagagcagcaataacaggttttgcctcttcaaaacccggagaatgtgactttatccacacaggtagaggcctctcagcgttctcaggtgtgtaaggatctccatgtaggaaatctggtaccacaacaaagtaaccagacaaagcaaccttgtcggctatcttccttcatgagataagtgattcgattactcgagaagcaattatcgattactatcaaggtccatttatcactgaaacttattagtgcatagaaaaaacttggaagtactgcagactttagaactacactttaaagaggccataggacattatgtaactttagtgaccagattaagaaccaggttcaagtttagcacagtaacaaactgcgtggcatccagtccccagtctgtgaaaacattcagatgaaaatcatttatccaaagtgcacggattgtataaatggttaattcacaaagtagagaatgaggaatatccgattatccgaatatgtagtagtcacagtgatgattttccacagacaagtagtagaacacggtgaaagaccacccaaagacacatattgtagaaaatcagagtaaaactatttgcaactaacctagcaattttacagatctccagaggcacggacctttgcaaaaatcacagatataacgaacataaaaacaaaaggtcaaccgtcagttggcacagaaattcatacctcagattcggtgattggaacccgaagatatcagagatgaggatgacggctgccttggactcgtcggagccggcgacgtaggccttgagcccgccgaagctgtcgacgaccttgccctcccgccggtggggttcagcgccggagggttgtcgcagcactgcgaacctg

SEQ ID NO: 41259 - DNA, 1147 bp, Setaria italica
  misc_feature (1)..(8): n is a, c, g, or t
  Peptide Sequence Number=SeqID_107233
nnnnnnnngtttttttgttttgttttgtttttccttttctgaaactctcagactaatttttaaccataagttcagtatattttacttcacatccatggaaacaagtatacactgagaaatatagagcccatttgttacagatacgtatacttgtaataattgctagttctattgcgttcacaatctgctgctataagtatacgtgacgagaaatcagcatgagtcaccaaataactgaagatggaggacctgaattgcagataaccaagaatacttgcaacagtgagtagagtagcaagggcttatagaatttaaagctgtgacttcagagttcatttcaggttcttgttaaaccagtcgattgtgtcccctagtgcttcctcagcactcttcacggcagccggatcatcatggttgtatctcacgctccacccatgcgccacaccagggaaaatcttcacaaagtgagcaactcgtgagtttgctaaaaggacctgctcgaattgcttgactaattctggtggagcagtatggtcaaactcggctccaagtatcgaaattgggcacttgacctctttgatatcatcaacggcaataggcccagggtgcaatactacagcagcatggatttcatgagcttttgccaactccacaacaacaactccgccccagcagtagcctgcagccccaacagaagacactcccttctccttgagagcagcaataacaggttttgcctcttcaaacccttttttcggagaatgtgactttatccacacaggtagaggcctctcagcgttctcaggtgtgtaaggatctccatgtaggaaatctggtaccacaacaaagtaaccagacaaagcaaccttgtcggctatcttcctcagattcggtgattggaacccgaagatatcagagatgaggatgacggctgccttggactcgtcggagccggcgacgtaggccttgagcccgccgaagctgtcgacgaccttgccctccccgccggtggggttcagcgccggagggttgtcgcagcactgcgaacctgccatgatgctgagccgaggctggcgtgcgtggaatggaagcgacaagatcacaagacggccgtagtggaagccagtgtaaatggaaatggagacag

SEQ ID NO: 41260 - DNA, 541 bp, Setaria italica
  misc_feature (463)..(541): n is a, c, g, or t
  Peptide Sequence Number=SeqID_107234
ggttctagcagcagcagcagcagcgccggcggtgccggtgccggcagcggggacgagctagcgtggcagtctcaggcggcggcggaggcgcacgcggcggggtgcctgctgccgctgtcagtgttcaactagccttgtagctagccggatcgaggtagggcttaagcaatggatggattaatcaccacccggatcggaggtttatctttatctagtgttaagatcgatctcgtcgtgatgggtcgatcaacacgcgtacgtgctgctgctgttcgtatggattttctctctactcgatctcttttggttggttggttacatgcttttcctgcagctgtatgctgctgggaaatagtagtggtacttggtactgtagggtttgcaggatgctgcttggtttgtgtatgcaatgcaatgatgatggagataatataatggaaggcttaattaccaaggaaatctnnnnnnnnnnnnnnnnnnnnnnnnnnnnnnnnnnnnnnnnnnnnnnnnnnnnnnnnnnnnnnnnnnnnnnnnnnnnnnn

SEQ ID NO: 41261 - DNA, 523 bp, Setaria italica
  Peptide Sequence Number=SeqID_107235
tcgccggattgccggtggaactggaggcccagcggccgcccgcacacgctctccggcaccaccagcttcttctccggcgcgcacatcgccacgttcttgtgcttggagttgtaggcgtactcggtccatccccggaggccgccttcccagcggaggacgcggccgtcggagacgccggagtagggcccgccgccgcgcccgtcgaaggcgaggctctccggcccggacaccggctccggcagcgtcatcacgacgagcccagggtccatggacttggtctcgtacgacaccgccgccaccccggccgcggacagcaccacgggaggtattagcaggagaggaagcagcgcgaggaaggaaagcgacgaagaatgagcggcgaccgccattttcaagctcggcgtggccttagcttcgtctctatctcttcggcgcgcacgcagcgtgtagctgccgactgtacccaacccaactcgcgttcaccactgctagtaatttctaatcatggatagtttctcagcac

SEQ ID NO: 41262 - DNA, 876 bp, Setaria italica
  Peptide Sequence Number=SeqID_107236
ttttttgtttttttgtagtttcaaaatttgccaatatcttgcaaagataaatgaaagatattggcaagttgcttgcccaacttttagctagccaaaactttggcatgccaaacttttggcaacaacccaatcaggctcagcgacaagacagaatgactccgactgcttctgttccttatctgttgtctcataacagatacccgtgaacataccaacaaaccgtgcagagcaacgattgcatcaagaacagaccttcagaaggttttaatttttgtcccatcatcttcaattgcaactcttgtcactctaaagccacaaaggcatgaatgaactaattgtagggatggctcgtgtaatcactctcagttgtcaatgtcatgatacattcaggctgtggctacttggacttggttgatttctccttttttgggcatgattcttcattacttgcgagatacgattccactctgacattctcctgagcctcgttctttctgaattccttagcttttttctttaatgacttcgctaaatcacctatcccactgttgtcattggcagtcttgtcagattcagatggacctgtggtgttctccttcggaggaacaaatgcagcctctctctttcttttgttttcttcagctttccctgattgcttctccagcttctcttgccatttcttttctgatttctttttctcactcatgaaatactcaccagtcataagctcctcatcaatcttgctaggctgttgaggtggcggaaagggtgtgtatggtttcttctccttagtttgaggcttcttctgcttgacattcttcttcttgaacttggggagaaacctatcccagctttcagtggctagagcaggatttt

SEQ ID NO: 41263 - DNA, 1125 bp, Setaria italica
  Peptide Sequence Number=SeqID_107237
ttaaaacaaaattaaactttaaataagaacaaatacctactaacggcctctctctttcttttgttttcttcagctttccttgattgcttctccagcttctcttgccatttcttttctgattctttttctcactcatgaaatactcaccagtcataagctcctcatcaatcttgctaggctgttgaggtggcggaaagggtgtgtatggtttcttctccttagtttgaggcttcttctgcttgacattcttcttcttgaacttggggagaaacctatcccagctttcagtggctagagcaggatttttggctagctcgcgtttgattaggagttccttgatgtggtacactggatgctttacattctttatgcaatcctctacaatccttctaacttgtttcagtccccttcccttataggaacccatggctgcaactgtgtttccctgcactaagatgtagcagccagtcaaaatctcaatggccttcagcgtagataaattagggcctaaaaggcgttctctccttttaacaaaacgttccttatttcttacaaggccaccaatctttataatgtcacagttcatctcatcatcgagaattttgatcgcctgaggtgcagggacgctcctggacaatagctttatcagttctctggcctttataataatgaaggggtccctggtcttcctggtggtcgaaacagtcatggatccctccaccaaattaagctcgcacgagatgccgtgctccttcaatgcgcccttcacgatcggccacgactcctgcaggtacttctctcggtactgggggaagagggtggagaaggagctgacttcgagcatgccgccctcgttccaggacgggtcgaacttctcgatcttccagtggtcgatgttggggtcctcgtcccacggcttgggcttgtcgtgcttccccttccgccgccaggtcttcccctccgccgcctccgcatcctcctccgccgccaccgccgcagcgttcgcttcgtcatccgacgccatggctggaccgaagagggctagagtttggtgggggcctcgaggaacgggagcaggaggatgcggcgtagtcgttcgccgtcaagattagggttggttgcttg

SEQ ID NO: 41264 - DNA, 383 bp, Setaria italica
  Peptide Sequence Number=SeqID_107238
gaggagatggggattattcgctctggagaatcgacgacgaggaatactacagggagacgatgctcgacgcctcctgatccgtcgatgcatatgatatcgatccatccattcatctttcatatgctggtagagctagattattatctgaatgctctgcatgcgacgagtgttttcacatcatttgtacgtgtaagagaaaaattaggagcgatgatgagcgaggtagattatcatggtgagagaactgtgtattgatggtagctgaagtagtgactgtctgaatatatagtttcaattgtctgaatcacatcacctgatgcttgtagcctgtacttgctcgtgcagcgtcaaaatcgatgatatggtggtcctatttggataaa

SEQ ID NO: 41265 - DNA, 548 bp, Setaria italica
  Peptide Sequence Number=SeqID_107239
caacatggaattatagggtgcgtttgccagagctcggagagcagcttctaggttgaatccaggaggagttttgccaaacagttttcctgttagaagtgattctatattgattctgtgaagtgattatctgaaatgaactaaggggctgggagctgaaaaactactcctgattcgcttcttgcagaaaagctctttatccataaaatttatcatagagaatcactttcagccacaagagtcacttgtctagaagaatcaacttccatagaagaatcggcattagatggaaccctaccaacaggctcgtagtatcaaaaactgagcatactcacctcaaaccgtagttaaccgtgaactcatagaatcatggttgtcaacatgaagccgtaatatcacaaaatgaacatacctcatcatcttaatttgtagttgaccatgaactcacgcagttatggttgtcgacatgaagttgtagtatcgcaaactaagcatatctcagctgaaaaaggtttgtggaacctatcccctgaattggaatttctattcga

SEQ ID NO: 41266 - DNA, 432 bp, Setaria italica
  Peptide Sequence Number=SeqID_107240
ttttccttcttctatttttattctactaattgtttcagaattcacttggtttgaggctttgagctacctgttgtgcggtttgatggcatcaaacaccagcactactgctgttgcagtcgggttagagaagacatttcttcccttgaatgaatcgctcttctttctctcaccctagcaattcatgattcagcacagtactctagatctaatcatggtaggtttaagtccttcagcaatcgacagaacacataaaattccgtgcttcacatcataaagtctgttcatgtgtagcacatcagcaatgaagtcggattggttgctttatcctcaaaccacaatgagattgtctatactggatcattgcaaattcagtgcccaaatagctctcagtacatgctcagatattcatcttcagattctgaagcacccata

SEQ ID NO: 41267 - DNA, 444 bp, Setaria italica
  Peptide Sequence Number=SeqID_107241
acaacagttaaattgcttggacaaaggtgcatgcataccattaaaagtttaataggtacactgtgcgtgtctccttgttctgatattttgagatcttcaaaaaccataaaagtcattcaccaatttttttttaaaaacgaaattcagtaagctgtatttagtagtaaattttactagattgcaaaagtccgatagatcaaatacaaagaatgccatatcaatgtgaatgaatttgtccttggtttgctcttggatatgagacagctactattgcatcacagctgtgttaaggttgttgagtttcttatgagtagtagcttttctaacgggtatggttaatggttatggctgtatattgtcgtgtgatgactttgaatatgctatgatttttcttaatcaattgactattttttgtttttatttttgttcctacgtaagttttca

SEQ ID NO: 41268 - DNA, 305 bp, Setaria italica
  Peptide Sequence Number=SeqID_107242
agcaacaccaactggttcggcggcttctccatccgcatggagggctcgccggacatgaaccgctgcaccgcccgcgtcgtccagggcaccggccactgcggtgcatccggcgcccccccgcgcgagctcaccctcgccttccgcatgctcggcctcgcgctctacaccgtgccgccgctgctctcgcagccggaggaggccatggacttctgccccggctacgacacccggcgcaggtcaccgcgctggcctgttgttgccccggcgccctcatcgcagccgcagtcaccgccggcaccagcttc

SEQ ID NO: 41269 - DNA, 500 bp, Setaria italica
  Peptide Sequence Number=SeqID_107243
ttgttagagtgcatgctacatagcttaaaatagaaaaacaaatatctaaatttgttttacctatcgtgtgcatccttagtttcaggaataggtagatctacataaacttttgctgcattggttgatgatattgaataccctgagaaaatatcaatgatttattttcttaggaggttagtttgttgaatgaaaaatattgaatagctcatattaaatgatgactcactgccgaatttcctcacagttgtagatgttattgcgatgacatgggatttgtcctatcatcaacctcctcaactttgtctcctcaaaatctaactttaacttcatggtcactgcaaatttaaaattttgtatttaaatatatgtatttaaatatctgactgcaaattaaattgtttggaggcgcactatagaagatatgttgagttcaaccagaagttctgtagcatgcatgtaaacattgaaagttttatagctgtttggatgagagaaaagtg

SEQ ID NO: 41270 - DNA, 438 bp, Setaria italica
  Peptide Sequence Number=SeqID_107244
aagacagcggtgttgggactgacagcaacaaaatagggccaactttacgcctccctgcctccaatagttagccagtgttcgcgttgttgctaaatcttatgttgttttgcatgacataagctgcccctctgcctttttagtccaaactaatcttctatccagtgattggtaactgcaccatagtctaccagaacatgtgcatcccagttaccattgtagattcgacaaggtgaatatcatatacaatatcatcatggacacagcacacataactgcatatgctcttgctggcaaggtgagtactacataagactgaacaggttcattgaatgaacaagacgatctgtcatgcaatctggaaaaggggagttttgcacataacttaaagcacttcaaggattaagtaactctgtagctggaatctgcccatgtcaatag

SEQ ID NO: 41271 - DNA, 419 bp, Setaria italica
  Peptide Sequence Number=SeqID_107245
aatacaagcggcacgtcgcggcgcgccgacgcgatcaggttcgcctgcagcgacgccgtgccatgcaccggcatcgtgctcagcgacatcgacctgcgccgcagcgatgacgacggcggcggggaggtgcagaccgtctgcaactgcgccgtcggattcgactacggctgcgtccgccccgccgtcgactgcctccgcagcagcacctgcggtggcgcgcccgacgaccaccctgaccacgacgacgacaaggagaaggaagcggccgagacgacgccggcgcccattctccataccgagctgtgacgagcagctcgaatgtgctcgttgatcatggctcattagatctcattcttcgatgctaatgcttgctgtaatgctgttgctgagatcaacgtacttagcagtcacttttgaca

SEQ ID NO: 41272 - DNA, 496 bp, Setaria italica
  Peptide Sequence Number=SeqID_107246
acgtaacgccgacccggaactccggactgggactccagcggcggcgggcgcgggtttggtgcgagtgaccgaggttcacttgtcgatgcggtggctcatgatctgccccgctcgtcgtcgtttggtgtcgatactttcacgttccattcatcagcctgtacggcgagcgtggcgtgtcggcgctgggagcctgggactctcgcgcctggcatcgccagggcacgggggtggaaccgaatgatgttcagcttcctgtagtgttgttcggtaagcttgttctctcggaatctgtctctctccgtttttttctgtttaatttggaataacagcaaatcagacggagatggtgagcgagaatgtggagatgcatgtggttcgtctacattgctcgccatgaatatggcgaggtcgatcttacagttcagagggttgcggccgcgaagagtatcttcggtagttctccaggaatggactgtactcgatctcatcactggat

SEQ ID NO: 41273 - DNA, 908 bp, Setaria italica
  Peptide Sequence Number=SeqID_107247
aatacaatattctattagagtatcataacccaatttgatccctcgcttaggggccatggtgatgagagaaccctgctccacgatgataggatcatccctgctaacattgacgacatagttaagcaatggttccagatcatcccgcgctgctatgtatccatataactctatctttccagcatccacaggaattttagccacctttaatgagaaaatttgtagcatgcgacgaggtcgatgccacatgcaagttccatattcttcatccataacgcaatccgtgggatttgataacatcattgcctccaaccgagtctctctgcggtccacaatacggaattcttttttccatcccgacgtgtccctgtagatagaagcatcacggtggctgctatctggaagtattcagagggactaccctatcaacagagtaacgaagtatctctgctgcacagctcatattttcttcgtcaccaccgaccatgatttgcccctcgcgacccttggtttccctcctatctttgtccaccagaactcccccccatttcccccatgtttctcgtttgccatctgtgccctccacggtttttctatgatattcttcatcaccataaatggcatccatgcttctccttccaccttcacagaactccttggttgtgtcactattctcaacatttttcatgcgctgggagtgctcgcccagggaaatcataatgtcctttacagaaggtatgagcggtctgctgtctggtttaccagattcttcctcgcctcttactccactgccgctggccatgctccgagatccatgggggaaatgggtggatcgggagccgccaccagcgaagtggagctgatgccataggggaggggagaggtcgcgaagtagagaagaggcggcgcat

SEQ ID NO: 41274 - DNA, 555 bp, Setaria italica
  Peptide Sequence Number=SeqID_107248
tccaggatttcaagcagcatatgatcgagcttccgaagggctggcagattgatgtataaatctgaccgtggtctacttgtcatgatctcgagcctggttccgtcggggaatgactgccacgtggggaccagctcgacgatgtggtcgctgacgcagagcagccagtccatctcccgccgccacattgccttcttctccggcgggagcggctccagcctccagagctgcccgaagatggtggcgcagaggttggtgatggcgttggagatggcgagcgccgtgcagacgcccttgccgctcccggacatgtcctcgccgagcagcagcttggcgaaccgctccttcatcagctccatctctgacggcgctctgcgcttgtgcttgtgctgctgcttggccacctcggagtcgggggcgcagcagcccggcggcttcctcgccggggccggcacgggcagccactcgtcggtggacgcggcgtcggagctggagctgctcccgtcgacggagttccgttgtaacgtccgtccttcgtctttcgttcgttcctttctt

SEQ ID NO: 41275 - DNA, 420 bp, Setaria italica
  Peptide Sequence Number=SeqID_107249
cgcctgccacggccatgcccacggcgtgctcgccttccacttctgggtcttcttcatcatgctgttcgtggtgctcgccgtcagcgtcgtcgtctccgtcatcggttgatgtcactagctgccatggcttcttgcagtcttgcaccgctgcacgaagcgagtttctgacgcgagaataatcggcgcctgttattgttggcacatcgtagcgtatgctcaatagtacttatattcttgtgcaaatagctagcctctgagctgatcgaacacctacaggtagtcaggtggtagtaggctagcagcacaagctgaggtgccttgttcattatgaaagactcctacccgagatgatgatacgtatttggttggtgatgaactgatgcttaagctgccaggaattggctcgttccagctaggctt

SEQ ID NO: 41276 - DNA, 777 bp, Setaria italica
  Peptide Sequence Number=SeqID_107250
taattccggcgaggtggccaaggtgcggaggccggaggcggtggggcaggcgggtcatgacaatgctccagcggatccatcgggcggcaacgacgtagccgcacctgatccatggaggaggcgccaggatcccctcggccgccggcggcctccatggaagatttctccccgtgcgtcgagctactacagtgaggagctcgctggggaggccggcggcgccacgcgcttggagcccagatccggtgcaatccttgaaaggtaaggccaccgactttcggatccctccacccataggtgcctccccctcccccgctagcctccccacggcggcgcacggctcgacatcgccggagaaggcatgtgccagtaggaggaggtagggtcccgctacggtctttgtggatccccccaagaccctaaccttccccacgcgtacaactacagcaagtaatgcggcgacaaacatgttattgcttggtgtttcttgcgagattggaagatgtggatgttgtgtgtctggacatcactcgaaaacatcttgagaagagcacaagatctgaaattatgccttccactatttttgaagatctgaaagtagttgtttttttatttttcttgcaagctcatgctttctaatacaataaagtatttttatgatttttatatgcctgtaactttgttatgaaattgcccttatgtaacatttgcggaaaaaatagatggaagatgtttgcagcaaccattcgcgtggttcatgtatgttgaaaagaaaattgg

SEQ ID NO: 41277 - DNA, 237 bp, Setaria italica
  Peptide Sequence Number=SeqID_107251
tctcttcatttcaaaggctattgagaagagcccttttgcaagatggctgctgagaagtttctggccttgagcctggtgaggtcagctctatcacagacagcagaaaattcctctcctgaaaagattgagaaatataaatgtgagcagcttttgcaacgtatttgttatttatacttcatctatgataatcttcccaaatatgaatctcaagcacaggtcatagcaagcaaaagctta

SEQ ID NO: 41278 - DNA, 1490 bp, Setaria italica
  Peptide Sequence Number=SeqID_107252
tttttttttttttttttttggtcctgggaaatacaggatgtattccattctaaaaaatggacaacagaatacaagtacccaaccacaggaatcatacactgtattcaggttcaatctaacaagcccaacaaaagaaacccattacatcacactacacaccaatctgatatacctcgcaacaggaggaactaagagttaattacacaaagaatattacttattctatattttgaatacaagctgtaaccacttacaccaccaccacccttttaattcctgtatgctaatgcaaccacaccaatgcatcattatatacacatcaaacaaagcaaactatgagacccttgaggtaggcacacttcatgcaaaataggagtataagacagccaatttttgtatgttgtggagcatagcaggctttgtattcctggccctttggccctgaaaacaggagaagcttcatttcaaaggctattgagaagagcccttttgcaagatggctgctgagaagtttctggccttgagcctggtgaggtcagctctatcacagacagcagaaaattcctctcactagcagtgaattttggagtaggcatgtcatcagcgtagtcggcgtacggttggaatgttgcaactgtatgagcaggggaatgaattccatagatggaagcttactatctttcgcaaccacaggacttcttggggatgcaaatgtttctgcacctgctttagctcggagaactgtgtgagaaggggaggtaaattcaacacattggagtctgctatcttcaacaacctcgttaggcttctctggtgctggtgtttctccacattccttagtttgaaaatttgctagaacaggagaggtagattctatgcattgaagtctgctttcttcggcaacctcgctcgaatttgtagatgctgctttttcttcacctgggcaaggttccatacttccagaaagcacatttctgcaaagactgttatcttctttgcaactatctgctgggcaagcttccatcaattcatcaggggccatgcctggtgttagttccattgtagcttgtgaatgaccataagactggttattgtgcgcatcaatctgcccattctgttcccttatgttctgttcatcttcctctgtattctcatacgggtctatgataaaatcatcaaaatctgttagaccaggagatgtagattccactcgttgaagcctgctatcttcggcaacctcgctcaaattttcagaggctggtatttttgcatctgggcaagcttccatacttcgagaaagcatgtttctacaaagattactaacttctttgcagttatctactgtgtgatcttccatcatttcatcagggaccatatttgatgttacttccatgctagcttgtgaaggaccggtacagtgctcattctccacatcggtttgtctttgtccattctgctccccttatcttctgttcatcttcctccttact

SEQ ID NO: 41279 - DNA, 629 bp, Setaria italica
  Peptide Sequence Number=SeqID_107253
aatacgagattcagctggaagatccaatttatacgccacttgacccacccgttgcaagacttgaaagggcccataaaacttgaatgcaagtttttgattagaccgagaggctactgaggtttgaatatacggctgaagtttcaaataaaccatatctccaacctgaaattctcgctcagagcgatgtttatcggcctgagacttcatacgctgctgagctcgcaacaactgttgctgaatcaaaccattcaacatgttcctttctgtcaaccagatctccaaatcaggaacgctagtactagacagtggagaaataccaaagtgccttgggggatggccatacaacacctcaaatggagaatgacccaaagctgaatgaaacgaggtattgtaccagaattccgctagtggcaaccatttgctccatcgtcgtggacaagagtgaacagaacaacgaaggaaagcttccaaacactgatttaagcgctcagtttgaccatcagtttgcggatggtaagatgagctcatcaataattgagtatccgacaacttgaacaactcctgccaaacattgctaggaaaccttaacgttaacgcaaataaattagaattaggacttacaaggacaa

SEQ ID NO: 41280 - DNA, 678 bp, Setaria italica
  misc_feature (630)..(678): n is a, c, g, or t
  Peptide Sequence Number=SeqID_107254
gggaagagtgtaggatcatcgtcgggccggagaagagttgtgatgcttttttattggtcaatccaaaggacgcctgcattacctgagtcgacgtacagacagcactagcaagatgactgaactgtccatttgggttcttcaggagcacaatacagaagattgggttctgaagcacagggtgacctttttgcagctgtttggaagaatgagttgccgagatcaagactacaatgtggttgccattcacccggatcgtgatttgatcttctttcttcagcactgggacctgcaactgaaatcatatgacatggatagcaaggaagtgtgtactctccacactctaggggtgggccctcagaatattttcccattagttccctattatgcggagtcatcggcccttgctaataagcactgatcttgcgccttgtgaggtactggtcaaatttgatgttccaagtatggagacaggagctatatctgtagaattaggctatgtgctctgatggtgcttcgatggtaccttctgattccttttgtacattaaaagcaaacacttgaggcatgtgtgtaagttaccattaaatatgtaggcaattgcacaatgcatgatgtttggaacttaaaccnnnnnnnnnnnnnnnnnnnnnnnnnnnnnnnnnnnnnnnnnnnnnnnnn

SEQ ID NO: 41281 - DNA, 879 bp, Setaria italica
  Peptide Sequence Number=SeqID_107255
tagtatttcgacaccacaaatgcaatttgattgcgcaataatgtagtcccggatgcatttatcacagaaactatcataacagcacttgcttgtcaacattgcgtctgtcataaccttcttgcatagtgggcagtggagttctgctactaacttagcactcacactgctagacatggcccgggcaagttctgctgggatgccattatcagagctagatattatgggaatcagtgaactggttcttctggaatcatatttcgtgtcgccataatttgggcaagaatgaataaagtgccctgggactccacatttgtggcagatatagccaggtggaggtggcttgctctctgatgggcaatgccaaatgaaatgtccaggaatatgacaaatgcggcagacatagccaggaggcggtgcctctccttccaacggacgaccataacggtggcccaactgtccacctccgccatcatatccacctccagatgaagaaactccccacttaatctcagctgcatcaatcacagttctcattgatgctgcctcttcatcatcagcttcagtaaatccacttgatttcaatgttgattcagtaactggcttgttggatgccatcccatcattctctaagactatgggcgaagtgataatcgcgtctgtcggatgtccagcaacccgatggaccaccactgtagaattttgaggaatcaaggtattctcatcaacgtactcttccccggtacgggggtcgcagagcgcgatgccgtcccgcgggccgcggccccgtgtccggccggtcccgtgccgccccgtggccgcgatcgccgcttgagctcggcgacggaggcgaaggcgccgggaatcggcaaggagaaggtc

SEQ ID NO: 41282 - DNA, 413 bp, Setaria italica
  Peptide Sequence Number=SeqID_107256
ttaagggttaccgtaaaacttatagggctccgaaactgaaccaaaattcccatgcctagggtgagaaatcaattcaaaatgcctatgcctcagcatgcacagcatcccccatgccttgccaatggccttccattccaactcaaggtagcaaagctatgaatggtggccggagggggtgaggaaggagataaacattttaagtgctgccaggcagtaaaaatgacgaagtgcaataaccagaggcaaaggaggtaatggaaaaacagcaaggtgtgcatagcatcaacgcgtatcccacaaccccgttcctcaacccggttgacccaggcgatggcatgaggtgagtggcaacacaaggcaagtcggcaatgtgtggcagttgggctgggactaattataaagcaagcaggtaa

SEQ ID NO: 41283 - DNA, 781 bp, Setaria italica
  Peptide Sequence Number=SeqID_107257
ttgcaccttctaagcccatgcacgataaagttgcttctcatgaaaacgtagagacgcaacaggcggaagcatgttgtagtccaaatgctgccaaaagtacacctttgtttcctgcagaagtcctgagcaacaaatcaagaaatgaagttcggagcagctctctgggtcccaaccgtaagatgaatgaatcactaatggcttccagggcagagtctgttaatatgcctctgcagagaaatacaaaggggagccacagaaagctttcaagcactgctagtgtggatgaaaatcaaggaagttcatctcagagggtgccaaattccaaatcaagtaaatcagttgcagaggggtgtcgtactgctgatgctgatatggccgattcaccaactattgaaaaaactgagacaataccatcaaagtcaagttttagtgaggcggtccctccacaaaatggagaagaaaaccatcaaaagattttaaccagtgcaagtgaagctgaccatggagtatgtacagcaaataaagtaacagacaacagagtgcgcaaggtagtagccaagaggaaattgtctgctgtccaaaagaaaaattctggcagtgtatcggtatctgaagataaatctgtctcatcagcaagagctgcacagagttctagaaatgctaacaaggtaatggtggatcaagagctgcagaacaccaaagaggataggacgaatgatacctttggatcattatgcaagatgccataaaaggagatcgaaagacatgcagagttctaaat

SEQ ID NO: 41284 - DNA, 469 bp, Setaria italica
  misc_feature (3)..(3): n is a, c, g, or t
  Peptide Sequence Number=SeqID_107258
atncggggccgaacggtcggttcccatacagtagtttcccgatgttcaacgtttactaaccatgaatattaatacgatgatttttcgtacaaagtacgctcacataaacgtacatctgatgactcgatcaagttatatcttaaaattgacaggtcactgtccactgcttggcggctggaagtgctcatttcagaattgaaaagtgtgaattcggaagcaagtcaacatatattcatagttagcataatggtagtattcagctattatcttttaaaatgacttgttttttaaggagaaaatgatttggatattttttcacgatgagcaaagccttaatgtcatcactaaattctaaccaaattacaaagcaatctgtatgttcaaaaaatgatttggatataacgatacattttttaagaaaaagaaaatggtcaaaatgtaagttttatagtcaggtcgaaataaataa

SEQ ID NO: 41285 - DNA, 701 bp, Setaria italica
  Peptide Sequence Number=SeqID_107259
gatccaatcacgccgcctcgtgccgcgtcggcgccggccaagcgggaggcggatgcggcgttgccggcggtcagcctgacactttttatctctctttcatcagaagtaagctagacgagcatgcatgccatgaaatggctggagggcttgttgtgcacctgtggaacgcgtgggcaatccaaatactcgtcctcctcagcttcgccctgcaggtttcgctcctcgtctgcgctggtatccgtcggcgtcaggcctcctctgcgctgaggctcctcatatggctgctctacctcgtggccgactccacggcaatatacactctcggccacctatccgtcaccagcagccgcagctcacagcaggagcagcaccagctggcggcgttctgggcaccgttccttctgctccacctcggcggcaaggatagcatcaccgcctacgcattcgaggacaaccggctgtggctacggcacctgctcactcttctcgtgcaggcactggcagctgctttcgttatctacaagtacgtggccgccgacactgcagcaggggctggcacgacggcgacgacgaccttgctgcttgcggacatcttggtgttcatcgttggtgtcctcaagtacggcgagaggacatgggcgctcaagtgtggcaacatggctgacatcgagagcacggtcttgagctcgaggcatcataca

SEQ ID NO: 41286 - DNA, 321 bp, Setaria italica
  Peptide Sequence Number=SeqID_107260
ccctcgcttgtctcctcgctttctcccaaatcgccgcaacaatggaaccgccgccgccgccgcaggcgattcctcgggaggcgtgggagggctgcagcgtcctcctcgacatcaacgacggcgaccgcctggccttcttccgcctcacccccgcagcgacggtgaagattgggaacaagacctgctcgctgcagccgctcgtggggcgccctttcggctccctcttccgcgtcggtgctgacggactcgtcccctgcgccgccggggatgccccatctcgtgaggatagcatggaagatggtgccgatggccaagtgcagg

SEQ ID NO: 41287 - DNA, 604 bp, Setaria italica
  Peptide Sequence Number=SeqID_107261
ttttgggttagaatagtttgctggtgcactactaaaaaaattggttctgctccatggcagtttgacagttaaatcatggaaaaaaattcctgatgttagctaagtggaaccattacatttatcttctgctagggatctatacatgactgctgttaataattctggatgtcatctatcagtcttcaagttccatagatttaaagatgttcttctttagagaatttgttgttactcttacgcaaggaatagcttgatttcttttgggtttgtgttttgtttcttctcttctgatgacaagcaggagtgaagctaatatggctgccttgccattggccaccgctgaagtatgcgatgctaatcctcatttgattatgaatggcgagcttcgtgctctccatcccatcttccaaatctacggaaggcgccaagtttttgctggtcctattgtgacactgaaggtctatgaggacaatgttctgatccgtgagttccttgaggagaaaggccacggcagggtccttgtagttgatggtggtgggagcatgcgctgtgccatactgggtggcaaccctgtccagcaggcacagaacaatgggtgggccgg

SEQ ID NO: 41288 - DNA, 1054 bp, Setaria italica
  Peptide Sequence Number=SeqID_107262
tgcactctctgtgtcactgtgtgcgtgtgtccacgtcccctgccgctgccggatcggcggatcggatcctcctccaccaccaccccaccagccgctgcccccaacccaaccctagccccattcgttctgcccgatctcgatcgtggtcggcggcccctcttctcccctttcaccgccggggcgccgccatcaccgccgcgcccacccgcacccttctcgctcagtctccctcctttcttggtcttcctttcctggcggcgacgactgggccctttgccggcgacgagccccgaccaggagtgaagctaatatggctgccttgccattggccaccgctgaagtatgcgatgctaatcctcatttgattatgaatggcgagcttcgtgctctccatcccatcttccaaatctacggaaggcgccaagtttttgctggtcctattgtgacactgaaggtctatgaggacaatgttctgatccgtgagttccttgaggagaaaggccacggcagggtccttgtagttgatggtggtgggagcatgcgctgtgccatactgggtggcaaccctgtccagcaggcacagaacaatgggtgggccggcattgtggtgaacggctgcatcagggatgttgatgagattaatggctgcgacattggtgtccgagctctcaactcccaccccatgaaggcaaacaagaagggcattggtgagaagcatgtccccgtgaccattgcgggaactaggatttgcgacggggagtggctctatgctgatacggacggcattcttgtctcgaggacggaattgactgtgtagatccattccccctttgcacgtgtgtataagaattgggcgcataaagcagggctgctcctgaccttgcttgccctcttggtgttatgtctgaacttgtaataatggattgttgttggatcgtacggttacctggaataattggatgttacagattgttgttgataaatttttgttgattatgaaaatagcaactcttattctggtgactttttcttaaccaaaaaaaaaaaaaaaaaa

SEQ ID NO: 41289 - DNA, 465 bp, Setaria italica
  Peptide Sequence Number=SeqID_107263
ggagaggttgctcaaatttaagttatgaagggaattcaaaattcagtcacttctaatgggggtttctgcaacgcccctaatttggttcaaattcatgcttagagcaagatatctgccgcagatttgacaaagggtgtaaaaataataaccgatactcaactggtcacccactcaccccactgagtatttgctgtaactggggtatgacttttgattatgtccaaactacagattatatggtaagtagtggcttctgtgccttgtgcatgatcgagtatagagcttataggtctggtagagccatttttacagcattgatgttgaactgctgatcccagcaggtatttttacacaaatatacgattggtaatccgtgtgaagcagaatacggtatgtaggtatggtatacaagaagagtatggtattggtagtcatggacctggccatgagtatgtgtatatatct

SEQ ID NO: 41290 - DNA, 387 bp, Setaria italica
  Peptide Sequence Number=SeqID_107264
gcgccggagcatgcagcgccggcagtccccgccggccgcgggccgccccgtgcaggagcacgccgtgcccgccgcggcggcggcgcgcatgctcttgatggccgcctccgtgtccgcccggatcctgctctcggccgggctggtcttggacagggcctcatgcagctgggaatgttgggtccgccagaaggccttgctctcggcggtgtcgccgccgctggagccctcgtcgtcgtcgtcgttctccggccaccgctccctctcgaaatcctcgaagaagcccagcaccatgttcgacaggctcatctcgctgtccatcgcctcctccatcaccatggcgtgctgtttgtgctgcgtatttggtttctttcgttgtggctgcccaac

SEQ ID NO: 41291 - DNA, 262 bp, Setaria italica
  Peptide Sequence Number=SeqID_107265
agtagtggaccagccggctagttgcatggcatcatttcatctatatcgccattcaattgttcattttctctttggagttttgaagcatgattttcagttttttacaattttcataaaccaaatagctgcagatggaattacatagtaagatttaatatccgttccttacttcaaacgtttaaactgaacccctatccagcaactctgtttttttttgaatggctacggaaggggagagagtcccccactgattcattccatt

SEQ ID NO: 41292 - DNA, 449 bp, Setaria italica
  misc_feature (416)..(449): n is a, c, g, or t
  Peptide Sequence Number=SeqID_107266
ccgcggtggccttcgtcggcgtctcccacctcaacctgctcctcctcttcggcgcgatccgccgcttcgagctctcgccgcccgggtcctagacgcgcggccgtgccaggctcgccgtgtggctcctgaccgcgaccctcaccgccgcattcacatggaagatcggcgcgattctgcccctgggcttcgcggtcgcggcctgggtcatggcggcggccacagttattggtgggttctacatgctcttcctccatggcgagaagtgatctagatcgatcccgtgcgagagtgaattcatcatcagcgcccgtggattggatgtgttcctgttgctaacgttgcttgtaagttgtgagtatccaccctgcttctcttcttatgcgcgtgctgagtcacatccgtaacaacataaaatnnnnnnnnnnnnnnnnnnnnnnnnnnnnnnnnnn

SEQ ID NO: 41293 - DNA, 350 bp, Setaria italica
  Peptide Sequence Number=SeqID_107267
tgtgtgtcgtagctgattggttacttgggctgtgtttggtgtgcggattctaggctcggtatcttgacactagttagccatgccattatgccaattaggtgctgacatttattgatcgttgtctacggggtgaacagggtatgatgccgctggttgttcatcagttgtgatgtttagggttcttttcagcttttaaaccaccaggattccatttgttgttcatttctttccgctgtcaagcgagtcctagttgtagtaaatagtaatctatttttgcacgacctacgggtgcaacaccatccatggacaagatcaagtggccaggcactgtaaaggttgtggcagtaatc

SEQ ID NO: 41294 - DNA, 466 bp, Setaria italica
  Peptide Sequence Number=SeqID_107268
ttatttagttttaacttacccctttaattttctttttcttttttcgtttatttgtttgttcctttggtttcctacttctatttgttgtaagtctttcctgaaccggtttgaccataggcaaaaatgcacacattaaacccatcaagaactgatctgatcaatggctggatgtcagagaatacttcagcttgagaagcacgtgtattaaacaccttgttaaacttgaacattcgacacccatccttcccttgcttgaaggggtttgtgatgaaaatctcaccattttcaccaatataatcaactgtagttgttttcccatcttgaccaggaagaaatggtctgacacggcaataaactcggatattacctgacaataaatattagagtggaaaggaacatgttaaacagaaataaaatgtgccctagtgcaaacatattgttgtgcaggaaaataccttttaattcc

SEQ ID NO: 41295 - DNA, 791 bp, Setaria italica
  Peptide Sequence Number=SeqID_107269
tctacgtctaattagtagtcatttgcttggtgtttgatccgcataagcaaaaggtcaaacatagcctcaaatcttctgccagcggaatgcctcacttctccccatctctacagttacaatcatatatgggccctacagctaccccagggattcacatgaattacaatggatatcaaacgagcaacacgatcgtgcattcatgcttcacttctgccatcttttagagcccctggctgaagctcctgtcaattggctcgatggagcttttgtattactcggagttttcaaaacagcatcctttagctttgatctagacgactgcccatttttcgtgagagtgaatctggttatccttgatggggctctgtgcagccgttccgctgtcatctcagcagctttctctggattggaattctcggtttcacctgctggtaaaccatcatcagatgcattgtcctcatattctgcttcatctaagcccataggtgcaatgttggttgaatctccattcgcctcagcataactctgaggatctgatagaactctgtcactaaacttgagcatccgttcgccagataatagttggctaggttggtttactgtgttcttcgtcaaaccagccccatttctatcaaacgataaatttggggattttactttgtctttgttgagttggagctgctcaatttccatatctttgcgtgaaattgtgtctttcaaagacgcaacctgttccaatagctcctgatgttgagtcatattcattccctccttgttgcttctcgcagcac

SEQ ID NO: 41296 - DNA, 458 bp, Setaria italica
  Peptide Sequence Number=SeqID_107270
taccaggattcagtgttaaggatctggaggagggatcagtgtcttctgtagtggagtgtctcctggctctaaaggacaatgtgactacaggaatgggtcaaaacatttcaaacaatgttaagacacccctcagaaggagactagagcttcgagaatccgatgggcctataatttcggttgtgacgccagggaaaagatctcccagggatctgaagtctcaacaaagaagcgttcttcattcaggacaaaaggtccatgatgctttccaaattaagcggggctcctacactgatcttcctgctgccaaaatttcagagatgatgcattcaagtagtctagatcgtgttgtttacttgctaaggaatgtagttcaagagattgagcatcgcattgctattcaagcagatcacataagaaatcaaaatagcatcataaagactcgggaagacaagtaccgt

SEQ ID NO: 41297 - DNA, 2042 bp, Setaria italica
  Peptide Sequence Number=SeqID_107271
ttacttgctaaggaatgtagttcaagagattgaggcatcgcattgctattcaagcagatcacataagaaatcaaaatagcatcataaagactgccgtccgaaacggagaggtcacaggacgacagggaagctgttgagcctgagcgctgcgcagcactccgtccagcgcgaggacgacgacgacgaggggagggacagggagaggccaagaaaacccagaccgaaatcccccgagctcacgccgatccgcctcccgcattgcttccaggcctctcgattcggccggacccgagctgccccgccggagggctcgatctgggcccagatcggcctgcatttcggtcccgtgcaggctccggttccggcagtgagggatggggaacgtggacggcgagtatgacgagttccatgcagccaatcggcgtgctgaggtgatagattggctcggtggattgctgccagagttcgacttgccgttggattcttcagatgaggaactgcgggagtacctcgtcgacggtgcggcgctatgctacctcgccgagaaactcatgcccggtattcaggaggaatgtggggtggtaatgcatcagaccaaaggtcaaatgtgaagaaattcctctctgttgtcgcggagatggggctaccaggattcagtgttaaggatctggaggagggatcagtgtcttctgtagtggagtgtctcctggctctaaaggacaatgtgactacaggaatgggtcaaaacatttcaaacaatgttaagacacccctcagaaggagactagagcttcgagaatccgatgggcctataatttcggttgtgacgccagggaaaagatctcccagggatctgaagtctcaacaaagaagcgttcttcattcaggacaaaaggtccatgatgctttccaaattaagcggggctcctacactgatcttcctgctgccaaaatttcagagatgatgcattcaagtagtctagataatgcacctactcaatcactgcttagagttgttaatggcattttagatgagagcgttgagaggaaaagaggagaaataccacatcgtgttgtttacttgctaaggaatgtagttcaagagattgagcatcgcattgctattcaagcagatcacataagaaatcaaaatagcatcataaagactcgggaagacaagtaccgttcaaaaattaaagcacttgagacattagtaaatggaacaaatgaagaaaatgagatgacagtaaatcggcttgagctaattgaggtagagaaatcaaaaattgatgagaaaagaaaactaggcgaacaagacatggttcggttgatgcgagaaaaggagaatgcagagaatgcaatagcttcccttcagcaagaaatacagatcttgagtaggatgcatgaacagtaccgtgagcgaatggaaacagaagcaagacagatggaggaacacttgactacgagaattaaggaggctgagtttcttctaatgcaatcaaaaaggaaagttgaagagatcgagtctgcttcccaactgaaatctcaactttggagcaggaaggcaaacatttttcagacttttatggataatcaaaaaatctccattaaggacataaggctatcatctcagtcaattaagcaggaaatgtttgcccttcaaatgaaatggagggacgaaatatgtaacattggaaatgatctaaaaggcttagtagatgctgccgacaattaccataaggttcttgctgaaaatcagaagctatttaacgaagtacaggaattaaaaggtaatatccgagtttattgccgtgtcagaccatttcttcctggtcaagatgggaaaacaactacagttgattatattggtgaaaatggtgagattttcatcacaaaccccttcaagcaagggaaggatgggtgtcgaatgttcaagtttaacaaggtgtttaatacacgtgcttctcaagctgaagtattctctgacatccagccattgatcagatcagttcttgatgggtttaatgtgtgcatttttgcct

SEQ ID NO: 41298 - DNA, 2129 bp, Setaria italica
  misc_feature (1)..(37): n is a, c, g, or t
  misc_feature (52)..(52): n is a, c, g, or t
  Peptide Sequence Number=SeqID_107272
nnnnnnnnnnnnnnnnnnnnnnnnnnnnnnnnnnnnntttttttttcccatnggttttccagcctataatcggctgaatgcccattatcattactcagtagaatgtcgacaggcgaacccggtacagcgacacacataccctacaacaaaaccacacgagttcagcacaatctgtctgcgtcatattacagacgcatgacactggcttcccagcacaatgctgggatcttatctctctaccgccttttggggggttttactgaagatcctcctccagtcacctggcttcccgtagatttagtgcgacctggaggttttagagcagactcccttggttttggtttggagtttcctggctgcccattctttgtcaggaacagcctggctatccttgatggggccttctgcatctgttctgctgctgcctctgaagcaccgccaacagaatactccgttcctgctactgagcagccgtcatcagacacattatcttcacattcggcttcacctgaccccgcagcccctgataatcgccggatctgttggctactgtcatttctatccgttgatgaacttggagatttggatttgtccttcaggagttgctcgatttccatatctttccgtgatattgtgtctttcagatatgaaacctgttctagcagctcttttatatctttgccctctttgttacttcttgcagcacctaactctactccagaaaccctttcagcaaactttaaagtgctcattgtttctgaatatgattcggtatctggatttatttgaacaaacatcagtgtctttgcttgtccacctaaagagctctgtagaacttgagtcagcttgctgtttctgtatggaacatgggcatttttctgtgccaaagcaaaaatcacatcaccaagagcagacagagatttgtttatatattgtgcttcttttaatctgtctccaattgcttcagatcgctcaactctttcactcccagcaagatcgatcaaatgtagacatcctcgggaagtagatccattcttcaaatccagccctctaacatgcactgttagaatgctgtgagaccgactgctcctttcatttagagctgttgatccgactgctctattggtttgtccaatttccattaagtctagcacatctgatgttgatttgactggatgtaagctcgcatcagggacgacaagtccattcggctgagaagtattccaaattccaagtcttctctgtgcaatatcatttgatagaagatcgcgaacttgttcattgtatatctcaaccatctgtactcccacctcatacgagaaggcatttatcctacttagtgaaatatcgaacaaatcatttaaagcacgataattgacaccccagtcttgctttgatgtgctaggcccactcatagtgtaagtcttgccagaaccagtctggccatatgcaaaaatacaaacgttgaatccatcaagaactgatcgaatcagtggttgtatgtcagagaaaacctcagcttgggtagcagatggactaaacactttgttaaacttgaacattctatgcccatcctttccttgcttaagtggatttgaaataagcatctcaccattttcccccatatagtcaattgtggtagattttttatcttgaccaggaagaaatggcctaacacgacaatatactcttatattaccttttagttcttgcacttcattaaacaacttctggttctctgccagaactttgtgataattgtcggcagcatctactaagccttttagatcatttccaatgttacatatctcatctctccacttcatttgaagcgcatacatatcatttttaattgttcgtgatgatatccttatgtccttgacatataattgttgattatccatgtaactctgaaaaatgttctctttcttatcccacaactgtgattttagcttggaagcagcctcaacttcttcaatttaacttaaaaattgaaaaaaattaaaaaaagtaaaaaaaagtaaaaaaaagaaaaaaaattaataccccaagttaactttactaagtaacttacttacctaacccttacttacttaactttacccttaagttacttaaagtttaattta

SEQ ID NO: 41299 - DNA, 501 bp, Setaria italica
  Peptide Sequence Number=SeqID_107273
gggcctagtcacaatttgcaaaaataaaaccaccatcaactaaaagaaagttaaatagactaactcaaggatcaccaaggaagaaaacacatgataaacttgctcctacatttgaactagatagaagaatttactgcagaaattgataaaggatacggactccaacttcaaaattcccatttggaagtagggtgcaatgcagtgcatcatcaatatctcgacaacctggtgggtccacactaaagactctcacgtggcgcaagtcttgtctattaggattagccaaatcttcttgtgataatgtccatggtaatggtggcaaacaagcaaggacttgtgtagagaaaggcctcgtgttgatatcattctctattaagacaacctctgtttcagtttctttgtcaccaatatctccaatggttcgtacgtagtgacctgatggatatcgagacaaaacaccccatgaatcaaccgcaacaacaattcttttgttcacgagat

SEQ ID NO: 41300 - DNA, 2382 bp, Setaria italica
  Peptide Sequence Number=SeqID_107274
caaagctctttcacattagctctttcacattaacagagtgtagcactgtataattctcagctgcgagtaccgttcagaaccaaattcccatgtacagagaaaaactatccatattccaatttgatagtacaaaaccctgaccatgaggctagtgttacaaatcgtaaatcaccaatgttgaattaaagaatgggctggagaacaaagaggtgtaaggctgagaacactaatgttacagttcagctgtacattttcaaatgagggtgagttgcagctttgggcggtgaggctgaggctcaactacttccatatgaatcctaacagtttgcaggacagcataactgatgtttgttccaggcttggttaccctctggtgcacctcatcaactacccagtcgccacccttgtctcctttaggagtaaggtggatgggcccttctatgccaaactttgggacgaaaactatgaaaccatttgccttgacctttactatcctagcttcagtatcagttggccttgtcctgaaatatatgagggtgtggagttcaactgatgctctgcttgccatctgggcatttcgatgtctgtaattcaaattgtcagcgatgcctgtaagttgtggaccatcctgaaagattggtgggagctttgcaatttctagagctgcagctagcaacctatgaacaacaacatctgcatatctgcgaataggagaagtgaaatgagtgtaaagagaagctgcaagcccataatggtaatactcagaaaaggtcaaatctccactgcaaaaataaacggcctgtgtcatgcatctagttgccaaaattctaataagcttattgaagtatgggtcattgctctttgcattgtcaagtgattcagctaatgcctttgaggttgacacgtccagatttaggccaatagaagaggcagtacggagtaatggctcaagcatctcctttgttgggctaggatgacgccttagtaaagaacatagggggaagtgcttcaaaatcttctcagcaacagaaatatttgcagccaacataaactcttcaatcatttgatttgcctcgcggatttgataaattcctatgtcaagagggtcatgagtttcactatcgatctcaaattttacttctgcagaagcaagagtcagagcccctctgtcacaacgtcgctgtcgcatgatctttgccaatgaatttaagttccgcaagtctacagttagtggatcaactaaacggctgtcatccattcttgcctgggcttccacataagacattgcagcacaagatttgataacactctttgtatatctcgtggatatgatatcagcatcaggagtcatttcccaaatgacagagaatgccagcctttcaacatcagcacgaagtgagcaaacatcttcagtcaggggctttggaagcatatcaatccgctgcccaacaagataaacagatgtgcccctttgcgcagcttcctcatcaagaggggtaccagggtgaacaaaattagtaacatcagcaatatggactccaacttcaaaattcccatttggaagtagggtgcaatgcagtgcatcatcaatatctcgacaacctggtgggtccacactaaagactctcacgtggcgcaagtcttgtctattaggattagccaaatcttcttgtgataatgtccatggtaatggtggcaaacaagcaaggacttgtgtagagaaaggcctcgtgttgatatcattctctattaagacaacctctgtttcagtttctttgtcaccaatatctccaatggttcgtacgtagtgacctgatggatatcgagacaaaacaccccatgaatcaaccgcaacaacaattcttttgttcacgagattttcaagctgccttgtttgaattcggattttaggaattcttctatcttttgaaacaaataaagcatgagcaacgcctccactaccagcaggcatgggcattggctgcaaggatccacagtacgaattccaatttcgcttgattataccaacaacacgtccaactggacgactagagacagaaggagctgatgatccaactgatgattgtgtggaactggcattccgaggagcatcatcagcactattaggaaccagatggacatcttcttcttcttcttcttcgtcatcgtctgctataaatgactttgactcatgccattgatcttgtggcaagagctcaacagcaactatatcaccatcaaaggccctgttcatatttgagcggccatggataacaatctcatcgccaatgctctcacttcccacgtaagcttcaaatggattgtaacgattaactcgaagctttccttgatggtagattccacagcgcagaccagatgtaa

SEQ ID NO: 41301 - DNA, 784 bp, Setaria italica
  Peptide Sequence Number=SeqID_107275
ttttttttttttttttaaagttactttagaaggacgggacctaataacagcttgcatacaaatatagaatagaacaggggtacagcctgatgtacatgtgtggaaaagttataaaaactccaaagcctgccttaatccgttttgttaggatcttgcaccaggtaaatcttgcgttcagcagactatctttctattaatattgacagatttgttggccttaaacacgactccaagagtcataagcagagctcagagaagaaaacgactgtcgactgttttcttccacggtgaaagatatgcacatttcttctggagagaacctaccattaccacaccaaaactcaccctaattaggactggtgatcttttgtaagtgtctgttttgagacaagaaatccaactttgtgatctcctgcaatttaccaccttctagcgaaacaattctgtcagccattagcaccatttcctgctgatgagcaatgatgagaacagttactgtgtggtttgtcattagattcctcagtgcttctttcagtagcagctcagacctgatatccaaagcagaagttgcttcatccattattagtatggaagagttctgatagactgccctggcaatagctaacctttgcttctgcccaccgctcaaactagaacctctttgccctacatttgaatcatatccttctggcaacatcttaataaactcctcagcatgggcaatcttagcggcaataactacaaaccctaggaccaattaatttaaaattaattaactaactaa

SEQ ID NO: 41302 - DNA, 312 bp, Setaria italica
  misc_feature (265)..(312): n is a, c, g, or t
  Peptide Sequence Number=SeqID_107276
gattgacatggtatgtgagagcatgcctgaacttcagcaaaaagagatcagacaatatctgaggaggaggattgacaaatgtgttgagtggttgccctacaaatcttctttcagatatactgtacataggagtttggctcaatagaaactattttcctctatatatgtttgtgcctgtaagtattgaactaagaaaaattgatttatgcgagtgtaaataggtgagtggtaaattttcaaagggaggaaagttatagcgttgttnnnnnnnnnnnnnnnnnnnnnnnnnnnnnnnnnnnnnnnnnnnnnnnn

SEQ ID NO: 41303 - DNA, 598 bp, Setaria italica
  misc_feature (550)..(550): n is a, c, g, or t
  Peptide Sequence Number=SeqID_107277
cgcaatgaaaagcactgacatgattctgaaggctgcatataatgtgggtggacattcagtaaactcccaaattattcagaactcaattctaggatgccaatcccaccgcccttcactgtgggttcgcacgctattttcaccaacaaaaaaatcagggagctccatgcatccatatgcgctttgtcatccagagccaattgctcactttgctctttccacaggagcattttcagatccacctgtaaggctgtacacagctaagaaattataccaccaactggagcaagccaggactgagttcattcaagcaaatgtcatggtcaggaagcagaccatcttcctgcccaaagttctccacttttatgcaaaggatgctgctctagagttgcctgacctgattgacatggtatgtgagagcatgcctgaacttcagcaaaaagagatcagacaatatctgaggaggaggattgacaaatgtgttgagtggttgccctacaaatcttctttcagatatactgtacataggagtttggctcatagaactattctntatatatattatataacttaattaaattaatttaattaaaatttaaaa

SEQ ID NO: 41304 - DNA, 680 bp, Setaria italica
  Peptide Sequence Number=SeqID_107278
gtcttcaacaaaatcgcccaacagatttttgtttggtgtttcttttcaggtaaaaaggatgggtttccagttgtggaagcattcggatcattcacaatggatctatttactcctgaaagtgaccttgacctttcggtcaactttaatactgataccaaggatctgtatcctcgcaaggacaagattaatgctattaggaagcttacaaaaaccctatattctcatcagagaaatggtcgttgttatggggttttacctatttcaactgctagagttcctgtgttgaaggttactgatcagggaactggtctagactgtgatatttcaatagaaaacaaagatggcatgtcaagatcaatgattattaaatttatttcatcaattgatgaaagattccggatactttgttatctgatgaagttctgggccaaggcacatgatgttaacagccccaaagatcaaacgatgagctcaatggcaattatttctttagttgctttccatttacagacccggcgccctccgatattgcctgcattttctgccatattgaaagatggttcagattttgcaagtatccagaagaatgtctcactattcaaaggttttgggagtagcaataaagaagctattgctgaactttttgatcaatgatgattaaactagtatcagtggtaggg

SEQ ID NO: 41305 - DNA, 621 bp, Setaria italica
  Peptide Sequence Number=SeqID_107279
ttagtaacttcaaggcatcatctacacggtcttgttcagaaaggccattgataagggtgctatagatgataacattaggcatacaattgtactttggcattttctcaaaaacttcaattgcacactcaaccaagcctttttggcacaagtagctgattagggtactgaatgttacttcatttgggagacattcatccttaaccatctcagctataagcctcccagcatcttcccattgctcagctctacacaaacctttcaacatgtaattatatgtaacaatatttcgtttgcatgacatgtttttgaatagcttgagagcatcatccacgctcccatattcaacaaacccattgatgagagaattatacatgataatgtcaggtgagcatccgtagtttgacatttcctcaataacttcaatgccatagccaactagccctttttggcacaaataatcaattatcaacccaaatgtgacttcatcaatggtcagattatttctaatcatctcagcaacaagcttcccaacatcctcccatcgatcagctctgcacagtcccttcagtacagatcgatagcaaacagtgttaggtctccatggtatgctccttagtaact

SEQ ID NO: 41306 - DNA, 659 bp, Setaria italica
  Peptide Sequence Number=SeqID_107280
ctctatatccaagttgataagaagattatcttcatattgagttgttcgttccaacaaactatcaatttctcactctctgaattctaataactaggttcctctttaaaatctacactctccattcactctaacagcctctccatttcgcactacaacaaattttttattttgcactctccattttgtgggcgggatccacacttagcaagacaaacttgcttatcaagtatagagagtgtgggggagaatttagcaagtcggatgggatgaccatgtggctagcaagtctttggattgtaattttctagaagacttgtcaaattgtgtttggcttgtagagtggtaccacaatttgactgaagattgctcaagacggcaagtactggactggaccagtgggggaggattcgtttaaagacaaaccatgctgcttgacgtagcatcgagcttgttgtcttcttctccctttttttttctttgtcgccacatgtaagcatgaaactgctgcttctaacgccaagaagcataagtgcataactgcatatctaatactttgttttggtgggtgggatacgatacgacagactatagtggtttccgttgcatgcagcagaaaatgagttgattagtcccttgtggtggaccttgcttgcctgtgg

SEQ ID NO: 41307 - DNA, 365 bp, Setaria italica
  Peptide Sequence Number=SeqID_107281
cgagcttgggcacgtcagtgaagtgcgcgaggaggcgagggagggtggagtttagtgcgacgaggcctcgacgcgaagcggtgctttcagtcgttggagccggggaggccgaaggcgtgggctcagaagctcttcggggaggttggcactgtagtcttccaatccttggtggcctgagcaatggaggagaggagctgcagtggacgcgaggcgtcactcacgtgggtgcggcagcttgctacagggcgggggcgagggcactagccagcatgcggtggatctgccatggaaggatctgtggagccatggcactaggagagaggggaaaaagttcaggaggagagggagaggagcgaatagtacga

SEQ ID NO: 41308 - DNA, 370 bp, Setaria italica
  Peptide Sequence Number=SeqID_107282
gtgggtggccgccacacgctcgccgcgcccgcgtgcgtgtgctcgcctccctccctccatcccactcccccaggcagccgtcccctgcactgcacctgcccgcgcgcatccggccaccctccatccccggtcgtcagccaccccagccggccgccgcggatcgcctggctggggatcaagatccgccgaggccgaggaacattaatctgggaatggtggctgacacagaaagctcagattcgctacctggaagttcaaatgctgctgctgcgacgcctgttcatgggtctcttgatcaaagatctcaggaaaagactccaaagaaactcataaagctgaacgagagtaagctcaagcgtgatcagttaaa

SEQ ID NO: 41309 - DNA, 418 bp, Setaria italica
  Peptide Sequence Number=SeqID_107283
tgattggttgatgtaatccattcatgaggacagactgaataatacaaacatcaatcattgtccaaacagtcaccaactggtctttgaaagtaatcataagagattatcattattatcagtaactgaggatagaaaaacttcttcactgcctcagacttttacaagaagtgccacgtggccaggggataacttttttaactcatgcagcctgctggctgttgtatcattgcatagcatccgttgcatgagtttcagtgattgtccaacttgattcaatcatctatcatttcattcatctcactctttgcttcatttgagcgctcttgagatcgaatgcagttacagcacaatcactcggagagttcgaattcatcatctcccaccgcacatccctcatcctccatggtgctagcagcaa

SEQ ID NO: 41310 - DNA, 373 bp, Setaria italica
  Peptide Sequence Number=SeqID_107284
taacttacttagtaccttagtaccaaaatacaactacaatagaaactggcaggataaaattaaatccatcaagcgctaattaagtcaaaatatgccatgcttacaaagggctatgttggaataatgaatctacacacagagacacaccatttacgggatgcatactttttgtaccttacagtataagtgtgcaaacctgacactaccaaacaccagcttaccaagtttaggatacttgtaagattcctaagaaacatagcaacattgagtgcaatgcttgtatgataaatactgatcttgagatttaaaaagcactactcacacacataagggcggtatcaccaacaatattgtcaattactagttataaaaa

SEQ ID NO: 41311 - DNA, 773 bp, Setaria italica
  Peptide Sequence Number=SeqID_107285
gtggagaggaggtaccggaggtaccgcgagcagatgagggcggtggcgggggtccttcgtaggcggtggccggggagcgggcggcggcggcgtacacgaggctggcgtcacggacgatatccaagcacttccggagcctcagagacggggtggcggcgcagatgcaggcggtgcgccgcgcgctcggcgagaaggacgcggacggcggcgtgccgtcggccgggatggccaagggggagacgacgcccaggctgcgggtgctcgaccagtgcctcaggcagcacagggagtaccaggccggcgtgctcgagagccagccgtggagaccgcagcgggggctgccggagcgcgccgtctccatcctccgggcctggctattcgaacacttcctgcatccgtatccaagcgacgtggataagcacatcctggcgcgtcagacgggcctatcacgcagccaagtctccaactggttcatcaacgcgagggtgaggctgtggaagcccatggtagaggagatgtacgcggaggagatgaaggacccgcagcaggagggcggcgcctgcagtaacgcgaacagcaacgctaataaccctagcagctacagcgcctcagaactagggcgggccgcggcggcgccagtggggaggacggcgccgagaggaagccgacgcgggcgcagctggtccacgacgccgggtccctggcctccgtcgtgagcatcgggagcagcagcagggacccgcagaacatcaactttggcatgatggacggcc

SEQ ID NO: 41312 - DNA, 243 bp, Setaria italica
  Peptide Sequence Number=SeqID_107286
atgagaacaactcctttatatatttctctacaattatcgttgacataaaacaaaaagtctgttgaatatatgtatgtcatcagcttgttaatgataaaacgacgtagcatgtatcacctatctgaaatataatatgattacacaatcataagctcattggaaatttaaactagcgagtatgtaatgtactaaaacatgagtttttagactcaaggtcctgaatcttaacacgattatctgttt

SEQ ID NO: 41313 - DNA, 229 bp, Setaria italica
  Peptide Sequence Number=SeqID_107287
ggtaacatcatgacacagtgagtaacagcatgtctcaagacatcaaatacacactgaggtggaggagctccactcattatctgaggatatcatgcaatctgttccacctgccattcaacaggtgctgtctgactaccagcacttattcaaagagcccacaaccttgcctcctccacgacaatgtgaacatcttagcgacttgaagagctgtaaaagggtgagataaacg

SEQ ID NO: 41314 - DNA, 957 bp, Setaria italica
  misc_feature (879)..(879): n is a, c, g, or t
  Peptide Sequence Number=SeqID_107288
gggggggggggggggggggggacggacggttcacctccctttatagagccataaagttacatttccgcatccccgttatacccatactcaaccactacatcctaggaatattccgtacaggacagtaacttgggtcctattcaagatgtcgctttcatggtgaaattacatatccaaccttgtacaagattctcattacggagtcgtcctgctatgaagttgtcccagggccatcccgtttaccctcttcctcacttacgagcttcgtcgagaccgagcgagcctccgtaatcttcccgccttctttggtcgaagccagctaccttcggcttctggtcgcggcatccacccgaagccaaatcgctgagagctccatgggggatttaacttcgagagtccttgcctgcaaaacaacaaagtggacaccttcgtgatagttaacttcggtcatttattagcttcgcaaaggggaaggtgatgaggttagggtcgatttaagagagagggtccccgccataccgttcagggtgtgttgtggggcggttcccaacacattggtgaagattggttagaggactgtagtcctatgtgggtaaattggaagaaaaagattatgagatttactcataaaggcaagcgaattactttgaagggggttcagtctgaggtcaccaaatgtactcctattggtgcaagaaaagtgaaagggttactcaggagacatgctgttactcactgtgtcatgatgttaccccagctctcaagacatcaaatacacactgaggtggaggagctccactcattatctgaggatatcatgcaatctgttccacctgccattcaacaggtgctgtctgactaccagcacttattcaaagngcccacaaccttgcctcctccacgacaatgtgatcatcagattgaattagttcctgggcacaaccagtaaacatcaga

SEQ ID NO: 41315 - DNA, 425 bp, Setaria italica
  Peptide Sequence Number=SeqID_107289
cccacctcacctcacctccccaccatctccagctccctccccaccttgctctccaccagccgacgcggcggggcgatgaacacgtcgcagttcatggacaagcagatcctcggcctcgccgcctccgcctccccctccggcggcgggggcggcggtgggggtgtggatctcagcgatctgatgatcccgatcccacaggaggacggtgaggaccgcctccgccgccggcgtagcagcagcagcgccaacgggatcgccgacgacgtgctgcccagctacgactttcagcccatccgcacaactgccgccgccgccgcccccgcgccacacgcctcgtggggctcgctcgactccaaggcaccctccgcctccgcctccgcctccgcttcgtacaacctcaagactgctggtatattggagcctca

SEQ ID NO: 41316 - DNA, 1572 bp, Setaria italica
  misc_feature (1)..(1): n is a, c, g, or t
  misc_feature (12)..(12): n is a, c, g, or t
  Peptide Sequence Number=SeqID_107290
nttttttttttntttttttttttttttttgggttaaaacaaaaacacattccatctgttcgatcttattcgtgtcctccgtgaaaaataatagtatgaatcggccacgtacgtacaaacttacatgctcaaatcgccgtcacctcatatggtacaaatcaaagaaagaatggaaccaaattaaaaagcagcaagcagtggccatgcagctagtgtgtgatcgatgtgtcacggcacgccgggccccacctcgtctcccacctcttgacagcgccgctccacccaccaaatcccccgctcaatcatcgtcgtctcccccctccgccgctcccttccaacgcactccacacttttcccacgcacaaagccacactcctcttagctggccatgtcgacccacccccaccgtccgtccttcctttccctcagcacgaatctcaaggacggccggccggccacctagttgggcttccggcagttggcgcggatctcgccgctggacccggtgagcgggctgatgtttcccatcttgatcatggcggtgatgaagtcccgcgcgaacgccgcgccgttgcgcgcgtactgcgtcgtgatgccgtcgacggggccgccggcgccgaagagctcctggtcggagtggaggaggccgaactggccgacgacgttgcggaagtagccgttgtcgaagcggacggggctgagcgcgtcgagcggggcgaggttcccgtcggtgccgccgctctgggccgcgcagatctgccgccgcttcgccgcgaacccggagttgatgttggtgtcgttgtacacgcgcgaccggaagctcgagcaccgcgcggaacccacggtgtgcgcgccggagagcgccaccaggtcgcgcgagtccaggcccttggacgcgaacgccgagacgagggtggccgcggaagaggacggggatgggaggttgctgttcgccgacgcctggctcgccgtccgcgtgtcgcgacggcccagcggcaccgcccacgtcggaccgctcagcaggttgacgccgtcgcgggcggcgagggcgaggatgtcggcgcaggagacggtgccggggcaggcggcctcgacctgggacttgatggagtcgatgacctcgtagccgcggagggagttggcgttgggcgccgcgttcttctcccccgtcagcgtcggcgagtcgtcaagcagcaccgacgcgtcgcaaccctggacgaagcagtcgtggaagaagaggcggaggatggaggcccccatccggggctcctgctgcacggcggcggccatcgcggagcgcacgatggactgcaggttcgggcagctcccgtcgtagaacgtcggcgacagctgcgccgcggcgccgagcgccagtgccagcacgcacgccacggccgccgccaccgcccgcctcgaggatagcaacgccgccgccatggataaatagctagcaagctctctcctctgccctccctcctctgtgcgtatctacttgctcgactccggaaggagaatgatgggagtagagctagctgataggtgatagctacggccagtacactgccgtgtccgt

SEQ ID NO: 41317 - DNA, 383 bp, Setaria italica
  Peptide Sequence Number=SeqID_107291
tggatatacaacatgctaatgaccacatcacatgatttcacgtagacagcaaactcaatggccacatcatcttcctctgctttcttagtatgtatgtagttgaaatggctcatcagcaacattgcaacaacaatggagtcaccaatcaccagccttgtcgcataccctacaattatgataggcgatgtaaaataggggcaattgttctctacaaataataatgcaaactcagatcaatctggactcatcattcaattaaatgtgtaaccccgctgttgttacctactaataatgcacagcacctattagttcactacaagatatcaaatttaactgagaaaggtgattgtgatgtccatttagcactgtattaattatctttt

SEQ ID NO: 41318 - DNA, 678 bp, Setaria italica
  Peptide Sequence Number=SeqID_107292
gtcgtctagttttgttttttttttttagtagtacaatggtgggtctggcatagaacgagtcccatacagagagaaaaaaaacccagctacatcatttacatttcactctagactccagagaggttcaaagcaaagagagacttgcctttggttctactacatcagcaccacaagttaaccatccacaaataatagatcccaactacctgctactaatgcagtctacgatattaccatgtcctaagttctgacagctacgattcccttagacatcagttctgaacttctgattcatcatggatccatgtttcatgcatgggcaccaagcagagcaactcaatgcatttagctcttgcagttcgctactgctccttccagatcctcccggtgacccgcagcttgagctccttcctgtcgccacccgagaagaacaaggccatgttcctctggatgatgagcccgtcatagctgtcccggactttcctgtggctgtctctgatgctccgagggacgccttgccatgtcatcttacggccactgcctccaacttcaaggctgtagctgtagttcttagcttcagcgtcgtcgcccatgaaccggaggaaggcaatagtagacaggtgccatgcccagctggaatgcctcgaagtgcagacagaagtactggccgaagcagct

SEQ ID NO: 41319 - DNA, 409 bp, Setaria italica
  Peptide Sequence Number=SeqID_107293
accccatttgccgtcaagcaagtgcttgacttagcggacagaggtgaaattctacagttgcatacacacgcaagcatccgaggcattgtctgctttcaagacatcagtgggtctacaagaatcctaggacctccacattagtcatctccagaagatattgaaggatgatcatgagctgggactggcctcattgataatgatatggctataagattttttccttatcattgcttgcagcaaactgtttttcccaagcactgataataacatcagatgcaaggatgtttaccttaccagggacctatctcgcttgtcggttttaactggtgcaaggcagttgtgaatgacctacgagatgctgcagtcacttggcaggtggacaaagcgaataaatcactatcaagatgtt

SEQ ID NO: 41320 - DNA, 572 bp, Setaria italica
  Peptide Sequence Number=SeqID_107294
taaatatcagggtatttgcatgtgtattagcagcaatttgctgattgttatcaagtattgattttactgatcttatctccatcagaaatatccaacactatattttcgcaggttgcatcagcacttcttagtgctgcatttgtgtatgacatattttgggttttcatttcacctcttatattccatgaaagcgtcatgattgcagttgctcgtggtgataacacaggggaatcaattccgatgctcctaaggatacctcgcttctttgatccatggggtggctacgatatgataggctttggtgatattattttccctggattgcttgttgcattcagctatagatttgacagggcaagcaaaaagggtatcttaaatggatattttctgtggctgactgggggatatgctgttggccttttccttacctatcttgctcttttcctgatggacgggcacggccaacctgcgttgctgtacctggttccatgtacattagggcttattgttctccttaggttgggttaagaaggttgaacctagacaatagaacttagtaggaaactaacgga

SEQ ID NO: 41321 - DNA, 2014 bp, Setaria italica
  Peptide Sequence Number=SeqID_107295
tcggacgcattcgagcccacgcggcaactctccatcccatggcggccgctcgccgcgcgtcgcgccttcccttcgcagccgctctccttgtgctgctcctcgcgggcggcgccgcggcggacgacgcctccagcgacgacgatgcgggggccccgcggacgcccggctgctccaacaagttccagctggttaaggtgaagaattgggtgaacgggactgaaggtgcaactgttgttggcctaagtgcaagatttggagcctccttgcctagagatatgcatgaagctcaaaaatcatttgctgtccttgcaaatccatttgactgttgctccaacttgacatcaaagttaacaaattctgttgctttagcaacacgtggggaatgtgctttcactgctaaagcaaagactgctcaggctggtggtgcagttggtttactagttatcaatgacaatgaagagctttacaagatggtttgcagtgagaatgacacttccattaacgtgacaatgcctgttgtcatgataccacagtcagcaggaaagaagttgaaggacttcctagatcatggagcaagtgtggaagttcagttgtattcaccaagtcggccagttgtggaactttcagcatgcttcctgttgataatggctgtaggaaccatagtctgtgcttcactctggtctgaatttgttgcatgtgagcaggttgatgaacgttataatcagctgacccgaaaggatggacctaacacgggaacaaactctggagaagataaagagatctttgagatcagcgccaagggtgctattgtttttattataatagcttcagttttcctcctcctcctgttctacttcatgtcctcttggtttgtttgggtcctaattgtattattctgcattggtggtattgagggtatgcatgtttgcttggtcacacttctagctaggattttcaaggattgtgggcaaaagactgtacaactcccctttcttggggaggtcctaaccttatctgttggaattgtaccattttgtgtggtgtttgcaattctctgggctgtgtatcggcatgcttcatttgcttggataggccaagatatcctcggtatctgtttgatgataactgtacttcagatggcacgcttaccaaatatcagggttgcatcagcacttcttagtgctgcatttgtgtatgacatattttgggttttcatttcacctcttatattccatgaaagcgtcatgattgcagttgctcgtggtgataacacaggggaatcaattccgatgctcctaaggatacctcgcttctttgatccatggggtggctacgatatgataggctttggtgatattattttccctggattgcttgttgcattcagctatagatttgacagggcaagcaaaaagggtatcttaaatggatattttctgtggctgactgggggatatgctgttggccttttccttacctatcttgctcttttcctgatggacgggcacggccaacctgcgttgctgtacctggttccatgtacattagggcttattgttctccttggttgggtaagaggtgacctgcatgacttgtggaactacggaaaaggtcgaacggaaaacttggtcgatgaaccttgagaaggatagtaaaatccttacaactgataccgcagttctggtgacatccatggagctaatttaatcgatggatcttctggggtggtattagagatgcatacaattatcttggccgaaaagtttgtctgttttcttctttgtagtatatagtttcggaatgtattattcaggggctaggtacgattgaactgtcgatgctcattgtataaagacaaaatagctattttggtccctcaactttgctcccaggttaactttgtctctcaactctcaaattggtcaaccaaggcattcaactttgagttttgggtcaagcccatccttgtgttgatgtagtggccaatagtagcatgagattaatgcaaaaatgt

SEQ ID NO: 41322 - DNA, 548 bp, Setaria italica
  Peptide Sequence Number=SeqID_107296
caaatacgaatatctcggtggccttgctgtacaaaccgttctttgcatacatggagagcatggagttaaatatgacgagatcaggtttgtaaccccgggattttacctctcgaaatgccctctcaattccctccagtcggcggcacttgaaattggcaatcacaagggtcctcaagataacccagcttgggaaaactgtacctccgtaaacttctttctcaatcgcagttatccctgcaatgttaccaccctttgcataacattggagcaacagtgaatatgactgttcgtttggcttgaaccccttggtcctcagtttgctaacgattgattgagcagtggaccaatcaccttgtcgcgatagcacattcagcaatgcattgtatgtggtgaggcagggggcgaagccagcacttgtcatttcatcgtacatcttgaaagcatttgtccttgagccacaccggccatatgcagctatcagtgtgttgtaggtgtctcggcaaagctcaaccccacaagacttcatcccctccagaacccgggtaaca

SEQ ID NO: 41323 - DNA, 506 bp, Setaria italica
  Peptide Sequence Number=SeqID_107297
aactaagaattctactagaaaacccaggtgaaaagaaaaaggagagatttttattgacttcataaattcgattgctgttaatttgttgtactgctaacactttctccttatcagtagtatgttagtcttgtgaagttgagctgtaaattcagttgtctcacacccattaaggtcataggatcttaatcttcaaagcgagcaatagaaatcaaattggctgtggttaacagttcgttatgcatacaagcaagattgagaaatgcagtcaagatatctggtaggtgagtgggtagatgcaaacatttagtttacatgaatcttttatatttgtagtttcatctggatttataggtgtcggtcccccgaaagccatcaaattttacaggtctgcgccttttgcgcatcatgaccaggtattaatctgtggttctgaacttgtcatgactcttcctctagtttccttaggtttttgttctagtcctaggttaaaactagttaatttgtta

SEQ ID NO: 41324 - DNA, 247 bp, Setaria italica
  Peptide Sequence Number=SeqID_107298
gggggaacgatatcattgatgattaacattgatctcaagtaaccgggaagcacatgacatagccattgaatcgaaccggccacaaaatatttagaatcggggaacatatcattgatgattaacattgatctcaagtaaccgggaagcacatgacatagccattaagatgtttgactaggctgcaagtttatgcttagaattgagatgcatttgaggatttacagctccattatctcaagtctgaatt

SEQ ID NO: 41325 - DNA, 419 bp, Setaria italica
  misc_feature (304)..(304): n is a, c, g, or t
  Peptide Sequence Number=SeqID_107299
cctgcctcgacggtgctgaacactaagactgttgaaaacgaggtccgaccaagaaggttgtaccgactgagagatgaggctgatttccccccgctccaagctggttgccgttgagactgagaagagacagagatgatccaacaagctaatcgtagcggtagagaggagtgagaggggaagctcgctcgtggagttacagtaggatgatgtctgataggtgccccagcaggattttcgtccgatagcatagcaagtttggatgctattgaccgtcgtggtggcagtgcggtgccgtgtaaaaggntaataataatccttgtctctccttttcttttcttttgtagatgaacatttagttaccttgtaagtaagcaagtaagtaacacctagctagaaggcgtagtgtagcatagtttacc

SEQ ID NO: 41326 - DNA, 253 bp, Setaria italica
  Peptide Sequence Number=SeqID_107300
caaacgtgctggggggatattagatattagggagataataccgctatacatggcgaaaagagtgtgaagggtgaaagaaacaggtgatgctacttggctttggctaagcgtgtacatggagcttcgttggttcaacttgggtatctaggtggatacgtgcttactctctcgttcagttaccttgttatgcagattttggttccttccgtcggttaaattggtttaaactttgaccaaaaaaaaaaaaaaaaaa

SEQ ID NO: 41327 - DNA, 394 bp, Setaria italica
  Peptide Sequence Number=SeqID_107301
tacttagtaccggtaactgccggatcatgcgaattgcttccagcgggatggcacgatgatcgatggacgcttgcggcagttaggggtgctcactgctcagttgaaggccccagaattttggagattaggaaaccgatcgtagtatcccgccacgcagcacatgaaatcaaagcgcaacagaatgcgtgaatccaacacggattggattccagccagggctcactggaaacaagcgactctggtggagatcaaaaatgcaattcgtccaggggagctaggccattcctaataataagcgaaaggcgaaaatcaactagactcgggacggatggatctccacagggcggcctgctggacaagacacagacgcgcaattgaggcaatacctggacgg

SEQ ID NO: 41328 - DNA, 735 bp, Setaria italica
  Peptide Sequence Number=SeqID_107302
acggacgtaccgtagtacccaagtacaaccgacctaggtactaggacaatcaatgagccggcttccactgctcccgaagcctacgccttctacctgcagctgctcgacgcgggcgtgcccccagaggccaagctcttcaacgtgctaatgcgcgacatgattagatcgggcgagcttgccagcgcgcgggacgtgttcgatgaaatgctgaggaggggtgtgcggccgacggttgtgagcttcaacaccttgatatcaggactatgcaaggcggccaatctggacagcgcaaacgctctgcgagggctaatggcgaaggtaggtgtcgcggccagatgtgtacacctcggtgctttgatgcaggggttgtgcatggcagggaggatacaagatgcattggagatgtttgaggaaatgtgtgagaggggcgtgaaccccaacactgtagtgttcacgacattgatagacgcaaattgcaaggagggaaatgtggcagctgggttggagctgtaccgggagatggcagcaaggggtgtccaaacgggatttggtggcatacaatgcattggtgaatggcctttgtcgagcgcgggatttgaaggctgccaatgacattgtggaggagatgaggaatacgggtctcaagccggataaggtgacttacaccactctcattgatggatgctgcaaggagggggagttggacatggcaatggagatgaaacgggagatgtc

SEQ ID NO: 41329 - DNA, 627 bp, Setaria italica
  misc_feature (6)..(6): n is a, c, g, or t
  misc_feature (503)..(503): n is a, c, g, or t
  misc_feature (583)..(583): n is a, c, g, or t
  Peptide Sequence Number=SeqID_107303
tcagangggacgtgggggaacaaaatgggccagttgggcatttcttgacttcggtgctcatacatggtctagataaatcggggtcttgcggggaatagggacagaggataggggatcatcccagcctggcgggggaggaattagccccgttttcgtccccgtggggataaaaatactaccgtccccgtaccctaaggcctagtttggtaacatggggagctaatccagggagtccagggagtacgccctggaggtgaatttttacgggaattctttttcccatcaatttcctaggtggtaaatccctgtcaatcttggagatcatagaaataaataataatttgtcagcacagcgaagcttgtggccgcacaggcgcacaacggtgtcccccagggcccgtgcgtcaatgcacgtggccttgcagcaccgctcctggagcacaacggggcggcgccggtggccgtgcaatagagcccctcgagcgactacatcagcacccctnacccaaatatgaaggacgcgaagcggcgccaagaatcgagccgtcggcacactagctgctcggccacctacttggggttnagcagcgcaagctcagtgagcttctagcaggcccggcgaggtgg

SEQ ID NO: 41330 - DNA, 406 bp, Setaria italica
  Peptide Sequence Number=SeqID_107304
tgttaccccggtaccccatgcgcaacgtacatgggagtgagttcactcatgccgctgcgtcctgtagttcgatgatggaatcaaacttgctccgtgccgaccccgccttgtgcggggtcggctttcgttgtgtgatgggtggtgcggagcgggcgcgttgcacaggtccgccgggacgaatcacggatcaccgtcgatagtgacgacatgaacaggctgatcctgctaggtgaaagggctaggctgagcgatgagcatagctcccctttcagttattgctctggccgtccccgccgctgcgggggcgccttctttcttctgaagtgtggctgctggtcacgctgcaatggctcgcgagatagtcaaggttgcaggcatcacggttgcttcggccgggcggccaagt

SEQ ID NO: 41331 - DNA, 496 bp, Setaria italica
  Peptide Sequence Number=SeqID_107305
tctaaccaaccagacggagtcgggtggtgagccaagtactgtttcgcgccgaggtgaactccggcggtgtcggcgatgcggcggtggcggcggaggagctcctggaggcagtggtgggagcagccaccatcagggtttgcggacctgaggatgcccaccacgtacatcacccggtccatggatccggaatctggtagcacgaccgatgtgttggtgtcccacttgtctctgaggagtgggtagatgaggatcaggccttcaaagctatctggtgaaacgttgtccatgagcaggtccctgaagtcattaatccctgcctttggcacaaacatgttgagccatgggtggtgtacctcccatagcccgatgctccttaggctcatctcttccatcctgacccgattgagaaatcaaagtaggacacctccacactgtataactgggacaccatgtggctcatctgcctagagataacatccacaacctgttccacatt

SEQ ID NO: 41332 - DNA, 442 bp, Setaria italica
  Peptide Sequence Number=SeqID_107306
tgctggcctgtgggccaattaagcctcttttctttagaaattacccagtctccggtatttctttatagtaatgcaagaatggcctaatatgcattgttaagatatagcagaagccagtggggtctccccaagcttagctctatgaaaacaaattctaacaagtagagcataaactagatgtcagtcatagtccataatatcaacattataagcttatgaagtgattccattttatgggtcagtagacccttctgaaggagtataaaagatgacagtcatgcgtcaaaaaggcaatcaaattgattttcaaattaggactcattccactgttaacatataaatactaaaaattattatttattatttattttttttaagtagtacagggtccttgctattgtcccgggtaggtctcaaactcctggcctcaagtgacgctccc

SEQ ID NO: 41333 - DNA, 529 bp, Setaria italica
  Peptide Sequence Number=SeqID_107307
aaaccatgaagtggtggtggacaaggacacttgcaagtggtgcaagaagaagggacactatcagaaggattgtccagagttcctgaagcacctgatgaaaaaaggtgaggatattattacatttgtagatgaatctttggtatttaagttatgaaaaatctacttggtggattaactcaggtgcaactattcatgttgtaaattcattacagggattccatacgaggaggatcctgcaaagaggagaaagaagcattaaagttgcaaatagcgtccaagctgaagtcgaagccattggagaactcccattagaattagtagatggttttgtacttcaactaagagatgttctctatgtaccctctttgcatataaatttaataagtgtatcgcgcttagatgatgatggttttgcttgtcacttcggtgatggactatgtaagatcaagtttaataataagtgtgttttgtcttgtctttctagtactaagttacgttagtttcttttttatttttttgttttacttaa

SEQ ID NO: 41334 - DNA, 627 bp, Setaria italica
  Peptide Sequence Number=SeqID_107308
taaaaacaaaaaaaaggaaaaacttaaaaataaaagaaacaaaaagtaaaactaacttaaattaaagaaggacttagttaactaaaaagtaataactaggtaggtggaaataaagggagcacatattgagaatgagcaacatggcttccaagctcaaggctatggatatggagctcaaagatgagtttgtactctatttgatctttgccttcctacccaaggagtttgaggcttttgttgttaattacaactcacagccagaaaatggggcattgagaagctgatttccatgtgtgtgcaagaagaggatagaataaaaggctcacgtggtgattctatcaactacgtgaagcagaataagaagaggaattatcaaagcaataattctaagccacaagggaaacttcagtgggataatacctcttcttctaaggcacatggaaaggctccactaaatgatcaccatcagagattaaaccatgaagaggtggttgacaaggacacttgcaagtggtgcaagaagaagggacactaccagaaggattgtgtagaattcctaaggtttctgtgtaagaaagggattccatacgaggaggaccctgcaaagaggagtaaagtaagtctatt

SEQ ID NO: 41335 - DNA, 522 bp, Setaria italica
  Peptide Sequence Number=SeqID_107309
gcgaccgcaattaactgcaaggaccagaacagtggagcagatacaacattacaaccccatactgtattttgcataacctgcatttgccattcagtattacactgaattttctgcacatttgtgtagcctgcatttgacattcagtctcgattagatgactgaaatggaaagaattttgatggtcttactgacggttcgcttagttctgaacattggacctgaccagtgcaaaatcgtgttacctcgacagatcttaattgatgcactcacactagctatgtgccagcttgtacacttcttctcttatttcttgttttctcttccttattttgtattttgtaatctgctagagtattttaactcacttccttttaattaagcactgctagcaggccacctactattgttgtgccaattctgttgttctgcacctttaaatttgtccaatggcatttcagagtaatttaattatgtattcatgtttttttgtgctcaaaagattatgggacgcttgcattgttt

SEQ ID NO: 41336 - DNA, 576 bp, Setaria italica
  Peptide Sequence Number=SeqID_107310
atagcaatgaagaacccatacagcaacacaaacatagccaatattgccatggcgtagaaagcatatgggtgctcttcataccaaacatttctcgcagttcatctccataaaatctgtataccaccatacccaagaaagcaactacctatcagacaataaggaaaaccaagattgtaagagaaaacaaagatgtagtagtgcacattgcattatgatcatccaggcctcttccttgattacgtaaaatattatatgttgaattcccacaatgtaatgataaagagtaccgtactcttggtttagtactcaaccaacggaaaagggaaaagaggtgaacttagttcagaaaaccatgctacatatggcttggcgcatgcatgatgcttaattttccctaatgcagaaaacaggctcactgatgtgtctgcttccagcttcagctaaataaataaaaaccataaaagaagataaagagtgattcggtgcaaattaatgttaatgcaggatcgctgaagaatctgctgcattgtactatagaagctgtgagcatcttaaccagttgcaacaataaagaag

SEQ ID NO: 41337 - DNA, 509 bp, Setaria italica
  Peptide Sequence Number=SeqID_107311
cccaatacagcaaaccaaccaaaacaatagccaatattgccatggcgtagaaagcatatgggtgctcttcataaccaaacatttctcgcagttcatctccataaaatcagttgcacaataaagaagatcaatgtgtgatccctaactaccagaagttgaaacttcaaccttaaccaccatctatctggaggtacatttgcacgaagcaagaatgcagctcgacactcagtgcaatgtgaaaatgcaaaaccttcctttgtcgacctccagttatcaaggcaggacctatggacatacttctgtgttcccttgcaacggcatggcgcaatcaagtcatcaccttcattatcaaggcaaatccgacattgagggacatcttgaataacaaggtgagtttcttcattggcgtcaatattttcattgtcatcatcaatgctaactggcttgatttcacatgaggctagatgttctgtggatccctcgactgtgtttagtttgttgtaagctta

SEQ ID NO: 41338 - DNA, 244 bp, Setaria italica
  Peptide Sequence Number=SeqID_107312
gaggagagagcagagagcaaggaacggtctaatttacatccaacagagattggcaccaggagcgcaggggatcgacgtcgatgcgtctaggggcgcgacacgcccacggggaaacatgcttgagcagctggcggagaatgtcctccgtcgagagacagacggcgtcgaagatcatcttgttcctcgccttccagagcacccaggcgatcgcgagcgccgcggtgtgggccgcgatcggtggcaa

SEQ ID NO: 41339 - DNA, 384 bp, Setaria italica
  Peptide Sequence Number=SeqID_107313
tgtctacttgtttgtactgttgattagcagcatctgggtgtggtattttgaaagcacaagttgataatctgcagtgcagaaatccacaacttgtgtatcaaaagccaaacaacacttcaagggtgtgccaccttccaatgcaagctctttaatcaaataattatgacgatgaaatcttgtccactgtgatacagatcacaaaaggtaattatcctagcttttgctttctgattcgcactaaatctgttccatgaaaagcctcaggcatgggtccactaagccatagttatgtcatccaaccccaaggccttcatgagaaatgcatactcgaaggctgtctcatcacagtgcatgaagcgcccaccctccacccaaaactaggcc

SEQ ID NO: 41340 - DNA, 454 bp, Setaria italica
  Peptide Sequence Number=SeqID_107314
tttttttattactatatatgttatcattgatacgggagaatttggttcacagtgaaatgacgagcaaaactgaccaaaaaatgcaaagcatcccggcccggtaagtacagcaagttttgtaatgttgctaccagaaaatgcgattccaagctagcataatctcagcctaagctcaacactaaaacacaccaagtagaaaaacaacgcgaaatatgaaactaaacacgtgagctgtgcagtcgaactatcaactccctatcggaccttgcctccgctatgtactggtattttctccaataacatattatccacatagatctcaaagaacccattaggtgagagcagcttcagtcatcatcttgaccaaattgatcatcagcgtcgccacccagaaatgagccgatggacttgcgaaggatgtggattgatttgtcatcctgcttcatcttcttca

SEQ ID NO: 41341 - DNA, 777 bp, Setaria italica
  Peptide Sequence Number=SeqID_107315
aggttacaaattacctaatagtttacaataagtaatactgttaggatagctttatgttcactgcaaatacaatagatcatgttcctatttatgctattttaattgtcattttttgttctatattttggattaaaatgaactgtgaaatgcctctacttccaacaccactgccagtggtccacaggtggttcctcgacacttgccccgtgctgaacctctacccttcggcaagctggaagatatcgtccagcgcgacaggaacactcgccggtggtgcgtgagtgtttcttccatttctccgcggagggcataaagaagctgaaggcgaaggcaaacgcctaggttgctggaacgccaagttttttaatgttaatcaggttgttgtaatcttcattagtgtgcgagtttgtacctttttatgtaataagacctatgtactagactgattttctcctcttgcttaaatgattccctcagccccagctttgcacaccactaccagtggcaggcgccggcaaggaagccattcacatccagtgcttgaaagcaccacccaattaaagatggaaggcgccaccgtcgaggtccagatcgtgtccaggcgtgtcatccggccacagcaggcgacctcgccggacggcatgccgccggagccggagatcatgcacctgacgccatgggatctcggcgtgatcacggtggatcacatccagaagggagtcctgctgcccaagccccaaacaggaggagaagcggcgcacctcgtcgacagccttg

SEQ ID NO: 41342 - DNA, 668 bp, Setaria italica
  Peptide Sequence Number=SeqID_107316
tgtgaggcgaaggagcgcgtcgtggaagcttcgagctttttggcttgctgcgcaagaagaagaagagaaggcggcgatggcgaagaggctgctcccgtcgctgaaccgggtgctggtggagaagttggtgcagcccaagaagaccgccggcggcatcctcctcccggagacgtccaagcagctgaacgctgccaaagtggtggctgttggccctggcgagcgtgacagggaaggcaagctgatccctgttgctctgaaggaaggtgacactgttctcctgcctgagtatggtggaactgaagtcaagcttgctgctgataaagagtacctcctcttcagagagcctgacatcttgggtacacttgtggactgattttagacaatccgtgaacccatcactagtggtgctagtgtgagagatgcttaggatttgatgccatgaaacaatgcttgagaaattcacgtgatgatgtcatagaattttgtggtggaacatcgtgaactggataacattgttgcttatttctgttgagatgagtaaacttcaccatctgaagtggtgacaataatttgttccgctccatgtccctgcttccaatgtttttgttgaatgttcattggatggattgctgctactttcgttatcctttgcacaaaatatcgaaggc

SEQ ID NO: 41343 - DNA, 265 bp, Setaria italica
  Peptide Sequence Number=SeqID_107317
aacttcgagccaaccccgggaacacccggaatcaaactaaggacgagcagtggagacgggggcccccgagggaggagaagggcgccggcgaccgacctcgctgaggtaccgcttgtgggagtggaggttgtcgacgtacacatcctcctccgggtcccggccgcgcttccccccgccgctgccgctacccccggaggacggcggcgacattgccgcctcgccgcttccgcccgccattcgcagcgcgggatcacgcggtggtgtg

SEQ ID NO: 41344 - DNA, 1141 bp, Setaria italica
  Peptide Sequence Number=SeqID_107318
attttcactcaaatactactatatcagtatttcggcacgctgatgctcaaaaccagagacaacagtagataaagaccatcaaaacagcaacaaaatttaagcagagttataatcctcaaaaatttaacatgagaaatggcacaatatgttctctgtgctatctattcttatccatactggtatcaaatttacaatggctcttgtcttcttgcttaaactttgggtcacttggacaatcatctgatgcgcagctgtcgatgtaaactatatcatgctccggtcgcccaaaatcatgatctggcctttggtacccaacttcatcatcgattgacttactgcaagaggatgatctttccacccgttccaaaccctctagatgctcatgcccatgtccatcttcatgctcgtgaacatgttcttgttcttgtctgatgccgaatggcaggtcatacgcagggggtccttgcaccctcatttgcactgacctcagcagtgctgttcgcctcagatctgccccatggcacatgtcatttggtgaggatgggaaccggccttcattgtcggagccacgacgagcatgtgagcagaccactgatgagagggagcagcttgggagagggtaggggtttgaaggtaacaaaggagattgtggtttctggtgtcggagaggagatgacattggactagtcgaagggctgatcatcgcattagcaccggggtttaattgagtgtcatagcacctgtagtcatctgagtcttctgacattggtgagtattgggatagtatctcatccctgaagctcgaagcagtctctgacctcacaggggactccatgatgttgtcaggcagtgaatctccaacagacaatccattcaggctggacgccattatctggctgaagtacctcgctgaggtaccgcttgtgggagtggaggttgtcgacgtacacatcctcctccgggtcccggccgcgcttccccccgccgctgccgctacccccggaggacggcggcgacattgccgcctcgccgcttccgcccgccattcgcagcgcgggatcacgcggtggtgtgagagaggggggtgggggggcgggggggcggcgcgatgggatggcagtggaagggaaaggaagtgacg

SEQ ID NO: 41345 - DNA, 449 bp, Setaria italica
  misc_feature (377)..(377): n is a, c, g, or t
  Peptide Sequence Number=SeqID_107319
aggtacgtagtaaataggaactttaaaacttgtcaagggctattggagacatggaatttaaacaaaacaagttcttgtcccctgataagcaaattttgaccgcaaatcctgacataaacatcgtaagtgacttctgcagttgcttcacactcctccagctaatcacaggttactatgtaggctattgtgttaccattttgttcccgttgatagctcttgtaatttattcttttctgcaggttgagctttgtgatgatgacgactttcttgttttggcatgtgatggcatttgggactgcatgtcaagccaacagctggttgatttcatccgtgagcatataaacaatgaggaaagcctttccgcagtatgtgaaagngtgcttgacagatgcctggctccatcgaccatgggcggcggagggatgcgataacatgacgatgatcctggt

SEQ ID NO: 41346 - DNA, 1412 bp, Setaria italica
  misc_feature (1384)..(1384): n is a, c, g, or t
  misc_feature (1411)..(1412): n is a, c, g, or t
  Peptide Sequence Number=SeqID_107320
ctctcgctggtacgtttcggagaatgggggtttaccttagcactccaaaaaccgagaagctatctgaagacggggaaaatgataagcttaaattcggcctttcatctatgcaagggtggcgtgcaactatggaagatgcccactcggctttgctagatcttgacaatgacactgcattctttggcgtttttgatggacatggaggaaaagtagttgccaaattctgtgcaaaatatctgcacagagaagttatcaacagtgaagcctatgcagctggtgacctgggtgctgctgtctacagagctttcttcagaatggatgaaatgatgcgtggccaaagaggatggcgggaacttcaagcacttggagataagataaatcagtttactggcataatagaaggcttgatttggtcccctaaaggaagtgattcaaatgatagacatgacgaatgggctttcgaggagggaccacactctgattttattgggccaaattgtgggagtacagcctgtgtagcattagtgagaaataggcaactcattgtggcaaatgctggtgattcgcgctgtgtcatctcaaggaatggccaggcatacaatttgtcgagagaccataaaccagagcttgaggcagagagagaaaggatacaaaatgcagggggttacatccaaatgggtcgtgtaaatggaactttaaacttgtcaagggctattggagacatggaatttaaacaaaacaagttcttgtcccctgataagcaaattttgaccgcaaatcctgacataaacatcgttgagctttgtgatgatgacgactttcttgttttggcatgtgatggcatttgggactgcatgtcaagccaacagctggttgatttcatccgtgagcatataaacaatgaggaaagcctttccgcagtatgtgaaagagtgcttgacagatgcctggctccatcgaccatgggcggcgagggatgcgataacatgacgatgatcctggtgcagttcaagaagccgattactcagaccaaggaagccagtggtgcagagcaatcaactggtgacacagaatgctcggagacgcatgtggccgaggagaatggctcatgatgaacaggtatatccaggaaatggctcttgaagcatggcttgatgctggacctggcttaaacaggagtacgatgttgcaatgtacataccaaccatgtgttgaattggcgtaaaagctgttctttgttccaattgttgtctgtaacccaacctgctattttcttccgggtgtgattttggccatctgacataacctaactgtacatttgtgggtggaaatggtgttatacgatagttcatttgtccgttcgagaacggaaaaaaaaaaaaanaaaaaaaaactaaaagagaactagccnn

SEQ ID NO: 41347 - DNA, 604 bp, Setaria italica
  Peptide Sequence Number=SeqID_107321
tttttttttttttttttagttaagaataggagccaattcatgtcttcagccattgagcagatagattcagcaagctgttcacgaaatcacgagtacactaactcaggcaaaactaaccacttttaccttaagagctgaccttggtggaaactagagtgctgttcacataaagtaagtagatatcttaggtttttctctcagtgcaaacccttgggatgccaccaaatcatccattattaaagatgaaataaactcaacgcaaacatccttaagcatattgcaatgaggttgataggctaaagccaacatacacgccccaatttgcacatccagatcctcacgaagtatggtttggcacaccagcttttgtcaatccaaggcatatcggtctgcagccacaagtatgttccaaatcatttgacttcatatcaaagcaagaaatagatcggttttgtaattagcagggccttgaagataaggttgcatttcttggatggtactcagacgaattcagttctcctccatcagtagtaccttaggaccaattgcaccatactgaccactggcaccttaggacgagcaaaaactagcatgctagtaatac

SEQ ID NO: 41348 - DNA, 477 bp, Setaria italica
  Peptide Sequence Number=SeqID_107322
ttggctcatggttcgaaattgggggcgccttctgctggaagtgatcctaaccagatttatgttgttttcgtgcctgaaagtaaattcactgaagaaagatgttctgaactacttcagtcagtacggtactgtcaatactgtgcgaattccacctcaaggtaggcggatgtacggctttgtgagcttccatgaccctgggacggcagaacggatcttatcagaaatgacgccccatttcatctgtggagatcaagttcgtgtcaaagcgtacaaggaaaaacgtgaactaccacatggacagcgtcatggttccaaattggtgatgccttctgcaataactaattctaacaagattgttattatcttcgaccctaaaagcacattcaccgaaaatgatgcttggaattacttcagcgactatggtcctgtcaataacgttcgaattccacttcagaagaaacgcaactttggtatgtg

SEQ ID NO: 41349 - DNA, 657 bp, Setaria italica
  Peptide Sequence Number=SeqID_107323
tgtagggtgagggcatgactctcagtctccaggctcgtacaaatgatctgcctaccagccatcacaatgtggggctgacaaatggacactatccatctggacatctggatgttaccctgaaccacatgcctgcgacacgccaagatgattctctgcctctacagtttagtgcagcacatgacaagcaaaattctgatattgaacaccgagaacatggttatgggtttccaccgcacttggggaaattttcaagaacttctgcgctgcaaagtttcaatagcaattttggtgttacttaccacccatcaactgcatctgcttcacccttccagcaacaatgttatgttgatgggcaatctcagatgtacaggcccaatgatcagaatgttagctcaaacttcatatggccgcatgatatcggtgtacaaccatactctattatccaaccacattatgtctgtccacaaatgcaacaagtttctggttttgatgtttatcaacatagaagcaatgagcatgctgcagtttgcactcctgcaaatgtcccatcctcgcatattggaacaccaaattctcatgggctggaaaaatgggtatccttacttcaatgttgctgcttttcagaagaggtatagtaaccggctgaataatgcattc

SEQ ID NO: 41350 - DNA, 327 bp, Setaria italica
  Peptide Sequence Number=SeqID_107324
ggaaaccaggagatcctgctaatgaataatatttctacagtttattatctctctgcctttatgtatacaagtaacacctaattagaatttaagatgccacagatatgtatgatgtatttcttattcaaacattctgtggagttcggcagaggtttgctgctgatttctacataacggatgcaaaatcaggtaaaagagccttggtgaaagctggccatcactccaaggtagtgtctctgcttgttgtcacccttttggtgacaacaagcagagacacagagctatcttcaactttgaagtattggctcgatgaaagaaaactttctt

SEQ ID NO: 41351 - DNA, 828 bp, Setaria italica
  Peptide Sequence Number=SeqID_107325
tgcgccggttcgtcgacgggctcccggcctccagcctccgcgtcgcggccgatggccagctcgtgaagatcaccgggtttgtttcatatgaagagatcagtgaaatatctccacatgagaaggttgagaattgtgtatacacatctactctgttaagaaaatgtgctacatggggttccatagtactaaatccttggaatcgatgttccaagtggaaattaacacatgctgagaggtttgctgctgatttctacataacggatgcaaaatcaggtaaaagagccttggtgaaagctggccatcactccaaggtagtgccgctgatcgatgaaaaccttttggtgacaacaagcagagacacagagctatcttcaactttgaagtattggctcgatgaaagaaaactttcttctgaagaagctcagcttattcgtcttgaggaagggtatatcagagaagggatgcggttgagcgtgattggaatgttgagcaagaagaatggggatgccatgatacttcctccgccggaaccgctatcgacaggctgtgtgctgctgtcgtttctcctcccaacttattttgacggaatagtactgagattggtcgacagaagttacttcgtgccaaaccctggcgtctcatgaagggctgtgagaccttggtgggatgtaacatctaacaactcttatgcggtgcccttgccccttgggatcttcttcctgtacgggtccacattttttggttttggaactcgatcatgtggctctttgcaggtaaccctaatgtacattctcacttggtcgatagttgtaatgcctagtcatttct

SEQ ID NO: 41352 - DNA, 392 bp, Setaria italica
  Peptide Sequence Number=SeqID_107326
atggtggtctattcaaatgaaggggggcctggaaacgagttttttcttggacaaacacaaactatgtttatgatgaatttatttagttaaatttgtatctcatttgtttgtttctaggatgcaccggatggtttcatcaacgaggaggatgcacattggtctgatgaagagcgtggtgtacaaatgcctgatgtgcaagaagtgtatgtttctggaaatgatgatgataatcttggggatatttttgattggtactaggctactagcacaacaatcacgatggaaattaggactcatgacctgggatattatgattatgactgtttactttcttctctatggacatgcgttatcattttctttatcacagcaatacaaatatactggtgtgg

SEQ ID NO: 41353 - DNA, 320 bp, Setaria italica
  Peptide Sequence Number=SeqID_107327
gagagagcttggaagctggtatttcctagttctgttaaagagaaggatggtccccatggaaacaggagagactcaattggaatgggagatggacacaataggagaataccatcagcgcatgaatctagagaaaggcttcgcaattcagatatcttcaagaggaagcttgacgagcccaatgaggagaagcaaaagaagtcagattggaactgagaataacagtgatcctgtcctcctatactttcctgaatcgcctgaaaatcgtttggggagatgcatgtatttgtagcgagctgaacctacagccaaacctgaagtgg

SEQ ID NO: 41354 - DNA, 430 bp, Setaria italica
  Peptide Sequence Number=SeqID_107328
gttggatctttgcgtggctggacagcgggaggcggaggtatctcgtctatgctgccgtctacttggctccttacctcagagctaacttatcaatgtcacctgatgagagctggttacctattgctagcatctttatctgcattttacatattcagttagaagcaggcatcaggagtggtgacattgaaagtttcaacttaatcgagagagcttggaagctggtatttcctagttctgttaaagagaaggatggtccccatggaaacaggagagactcaattggaatgggagatggacacaataggagaataccatcagcgcatgaatctagagaaaggcttcgcaattcagatatcttcaagaggaagcttgacgagcccaatgtaggtagtaagtctaaaagtaagttctagtatttggttaacttgta

SEQ ID NO: 41355 - DNA, 501 bp, Setaria italica
  Peptide Sequence Number=SeqID_107329
tggaggaggacggggatttcggcgccacggacacgaggatgggcgtgatggggatcatctccttcctgccttacttcaactggctgagttggatctttgcgtggctggacagcgggaggcggaggtatctcgtctatgctgccgtctacttggctccttacctcagagctaacttatcaatgtcacctgatgagagctggttacctattgctagcatctttatctgcattttacatattcagttagaagcaggcatcaggagtggtgacattgaaagtttcaacttaatcgagagagcttggaagctggtatttcctagttctgttaaagagaaggatggtccccatggaaacaggagagactcaattggaatggtccgaatcaaggaactacacatcttaggctcctggaatctttgttcagctaaactttgattgtcatgttttgtaatttttccagggagatggacacaataggagaataccatcagcgtctcgtcta

SEQ ID NO: 41356 - DNA, 1085 bp, Setaria italica
  misc_feature (1026)..(1085): n is a, c, g, or t
  Peptide Sequence Number=SeqID_107330
cggacctgcagcaggacgcgccgttcgcggccgccatcggcgcctgcgtgctcgcctcgctcgtgctgccccctcccacgccccgcggggaggcgcgcgaagaggtggaggaggacggggatttcggcgccacggacacgaggatgggcgtgatggggatcatctccttcctgccttacttcaactggctgagttggatctttgcgtggctggacagcgggaggcggaggtatctcgtctatgctgccgtctacttggctccttacctcagagctaacttatcaatgtcacctgatgagagctggttacctattgctagcatctttatctgcattttacatattcagttagaagcaggcatcaggagtggtgacattgaaagtttcaacttaatcgagagagcttggaagctggtatttcctagttctgttaaagagaaggatggtccccatggaaacaggagagactcaattggaatggtttgattgtcatgttttgtaatttttccagggagatggacacaataggagaataccatcagcgcatgaatctagagaaaggcttcgcaattcagatatcttcaagaggaagcttgacgagcccaatgaggagaagcaaaagaagtcagattggaactgagaataacagtgatcctgtcctcctatactttcctgaatcgcctgaaaatcgtttggggagatgcatgtatttgtagcgagctgaacctacagccaaacctgaagtggagttgtagcagcatgtggtttcaaatggtccgacgtcgtctttctttcttgttttgaaattagatcttaattagtatagctatagcttccaacttccattccatggtagtgtagaaacaaattgccaatctggtttatataggtaggacacatggtggttttgaaagttcctgatatatctttcgtccacacatctgaatgaaagttgcatgtactttgcagtgtttccgtttgattagttccaagctgctggaagtggtgaattgtaatcggaaaaacnnnnnnnnnnnnnnnnnnnnnnnnnnnnnnnnnnnnnnnnnnnnnnnnnnnnnnnnnnnn

SEQ ID NO: 41357 - DNA, 280 bp, Setaria italica
  misc_feature (274)..(274): n is a, c, g, or t
  Peptide Sequence Number=SeqID_107331
agctgatgcgctgggaggccacgcggcggccgctcgagcagctgagcggcgcgctgcggcggtgctacgcgctcgtcacggcgtgccaggactgcgggtacctccgcagcctgctcgccggtgcccggatggccgaggagctccgcgccgcggagcaggagatcgacatgttcatccgcctcgtcccgctcatctctctcgtcgacgctacgcatgatcgcggggtcaagagtacagagggtgtgccaagtgtggtcgcgaatagttcaaaccntcacgt

SEQ ID NO: 41358 - DNA, 265 bp, Setaria italica
  Peptide Sequence Number=SeqID_107332
ttacgtaattcgatctttcttaccaatggcagtagagactacagttggggatggagcaaacattttattttggaaggacagatggttacatgggcagcgacttgaagatattgcacctctactgtttgctgctgtccctaccagaaaagactaacgagcgcactgtactgcaggccctaaccgatcagagctggattccggatatccaagggtaatcttggtagggatcctcactgaattttgaatctttgggacctcctcttag

SEQ ID NO: 41359 - DNA, 853 bp, Setaria italica
  Peptide Sequence Number=SeqID_107333
tgcgtggtcatttcagcgggccgggcgcgcgccggcgtcagcgacgtcgacgctggtggtgcaggcgaggaggcggcggaagatggcgtgcaccgcgccgcacgacgcctcctgcagcctcctaaccatggtgcaccgcttcttcttctgcttcttcctccgagtccggctcctcctcgccttccggtcacggagcccgacgtcctccctgtccctgctctcgctgcggccgacggcgatgttgctcgcgctgccgaccgagccggcgtcggaggccgccgcggatccgccgccgcgctgcgggaggaaggggaacacggctgcgcgctcccggacgcggccgaggcacgccatggtgcgctcgggcacggtctccttcttcttggagaaggtgtagctgcggaggtacatctgccggcacgagtagctgtccaccacccgcgggctgcagtaccccgccgccagctcgccgctgaggccgccgccgccaccgccgcggcgcatgctgccgctgccgttgtagctgtagtagtaggacgcgctggctccgccggggctctcctgccctccgcctccgcctccctggcgccgcgccatggccaccgacttgacgaactcggcgtcggactcgggccacttgtacaggctgacgtagctggcccgcaccggcgcgcgcgcgtccacgcagccgatggccgccttgcatccggccgccattaatggcgtcgcggccagctacctagctacccagccagctgctgcttaatcttctgctctcagccaattaatcactgttgctgcttagcttcagctcactctgcttccatttgcatgagccgcgcgcgcgtggctg

SEQ ID NO: 41360 - DNA, 418 bp, Setaria italica
  Peptide Sequence Number=SeqID_107334
gcggtatattttaatttcaaattaaacatgtaaaacaataatattatcatattaaagtgagtgaaataaaataggtgtacgtgttcatgtttaacacaaacataagtataaatatgaacagaatgaaacaaataggtctcaatttgtactttgaggtggggccggtgccggagacaccggatgcgtcattaccacctggattagtcatactaatcaaggggtggcctcaggcaatgtcgtcgtacaagccgatgtaggtagatgttcgtagtacagtccctcgaacggcaccaggaagtaggcaaagtagtcgttcaggccaccaggaggtagacgatgtagttgttcagggagtgagcagtcgtgtgaagatgctccccaaaaacctgattgcccgctatcccgttcagaaccttca

SEQ ID NO: 41361 - DNA, 1891 bp, Setaria italica
  misc_feature (1587)..(1587): n is a, c, g, or t
  Peptide Sequence Number=SeqID_107335
tgccacaggtaataactgtactcgtcaattaaatattggcgggttttgaaatcctttcgttgatacgaaaaacggactataacatgctcttgcatcaacagattgaaccccaaaccaacattcttattgccaacagcaaaagcatggtcttgtggcatatagccatagccaggattattacagggcatatgagtgaactgctctcgactgagatagacaaaacggtaacctgtgcaagggttgtagaggtagtccttcatttcagtgcttatcagattcataccatggcatggcttggagcaaaccaccttcatgtcaagccatgtatcatgattgggaatgtgctgcttcaattcatttaggggagcaaaactgaaacccgatcctccagtacccttgcccacaagcatgatctttggcctcctgtccatgttgttatgtgaataataatagtgcatgaagctttcattctcgatcaacctaagccactgcttgcatacaagtttggcttgcacggtataatcacctgggagtcggagtaggatctccctagtcgcctcagccaggggagttgacaatgccatctcttcatttgtttgatgcactggaacaagactctctttaaataaagagagtctaagagcagattgctcagtttgataagatgaataggtttctctaattgcaagaatggtttctagagttcccaacacaggatcgtaggcaattaaccttgcgtttggatgtagcaatgactaccttctttgttgacccgtaagcattaactgaaccgataactctaataatctgtgggtcagttaaatctctagcagcatgctgtaataaatcaatgcgatgcttcagcgaccaaccaccagtgctataatcattcagcttccaaatctccaacatgctacaatcaggtgagacattacgaagatcccggaccatacacaagtgaccagtaagttccaccagatgaacaccagataccacgaagggaggtgaatggacccatctaaaggactcgtctgtgatggaaaatgataggatggcagctcgtggtcttatgactagaaaatcaggatgtataagccaattcagaaatccatctgcaaacaccggctgcagtttatctaatgttgcatgactaatagcgacatcagcagcaaggcaaaacctgaagggtactcctccaacagctggccctccagcaatccccctgcttaccacccagcgtgtatatctcacacttaatatgctgcttctcaagatatttcccattgaacaacctcaccaccttgtactccttagtccgggcatcaaacgtgagtccagcagtggcatatgccgaatcttggcaaggcggcaacctggtgactgttcttgtggctgcattgaaaacatagtaagctggtgccacagcatcgtatagaagggtgagtccatggcacggtgaagatgtcatatccatgaaatcaccacgtacattgttcaaagtgaacagcagaccatcatcagggcccgatgatgagcctaagtacaccgatgtggcatcgaaaccagatgttggtgaggtgaaaaacngcttaggtgtcgctgacgctgcctcagcccttgccatgtgaaggcggcagaattcctcagaagaaagcacatcagcccaggaccggcagacggcccgacactggaggatggatttgacgggcagccgcaggaacacttctgtcatcatctcctccggcagcacctgtgcaccgccagatgttccaaccctcttattccccgtcgtcatggcacccgaaattgatcaacttgatgagataacttgcaccttaaaatcttagcttgaacggcgtcggcggcgtttggttaaggtgagatgaattcg

SEQ ID NO: 41362 - DNA, 982 bp, Setaria italica
  Peptide Sequence Number=SeqID_107336
ataaagcaggcgaagacccattaaagatctttagctgccttaccggtggcttccacgtacaggacttcttcacagaatgtttgcatttgttaacgtcaaaaccttcacaaactccaaaacgtgacgatttttctgcacttctggcatgtagcatctcatcaagatcgtacaagctttcaatagaatgccttcttggatcataaatgcctagtttctttcctgtgttcagcaagatcctcccatccttaggatcaacagccaatggcatgacaacatttgccctgagggaatagcctgaccaacctttcaaatttaccttatatgctatactccattcaccattctccagcttccaaatatctagctcttctgcaactggatttgcaagaacagcacacaaacttccctcaagctctaccacaaaagctagggaagaacatctattgttccatgttgcaatgcatgaaggacaggagatgacaccaaatgaatttgctgctatgtcgaacgacacgatggctctctcataagtctggcccaaccttggttcgctcatccagtagagcagccctttgatataggttggtggcatgtcattcacaggcaaaggcggatacaagtggcattgcgtacagccaatgccacaggtaataactgtactcgtcaataaatattggcgggttttgaaatcctttcgttgatacgaaaaacggactataacatgctcttgcatcaacagattgaaccccaaaccaacattcttattgccaacagcaaaagcatggtcttgtggcatatagccatagccaggattattacagggcatatgagtgaactgctctcgactgagatagacaaaacggtaacctgtgcaagggttgtagaggtagtccttcatttcagtgcttatcacataacaacattggtactaggtaggtcctaaagttatttcttatttgttcttttgtttgggtttctttaa

SEQ ID NO: 41363 - DNA, 467 bp, Setaria italica
  Peptide Sequence Number=SeqID_107337
aatatttgggacacattaactgtctgtttgtttgtaggtactccttacatgcataagaagtatactgaacttgcaaagaatatatgctgcaaaatgaacttcaatttgatactcttagaagaagtgtttatttatttatccgacatgaattacttcacataaaatgtaaaataaatgattttagagagacatgatatttagtgtaaaagtaacagtgtaacacagaatgtgcaggaaaggccaaatataaagtgctgaaaactaagtatcacactgattgggaatcaatatgtgccttgtatgttttccattatggcatagatattctactactacagatctcttgcaaaaagtagtagagcaatcacaggaagacagtgtttccatctttaggtgataacgtgaattccaagttactgaagaaataacagttgaacatttatatccctgtcgggaaaaaagcattt

SEQ ID NO: 41364 - DNA, 400 bp, Setaria italica
  Peptide Sequence Number=SeqID_107338
gagtcacgttgggacgcagccgaggggagcgcagaaaaggaaaccagttccggaaggggacgccgctcgcctccaactccagccgctccaggagcggagcaatctggtgctggaagaaggaggggcctacaatcttgcaatgcaaacgtataatcagaatagcaaatatggggaacttacccgtaatctccgagaaaaccagcttggaggggtgatctttggttgcaagtatgatacaattgacgaatgcttcaaaaaaacagctattcggtctgccttcagtccattattcatatgtgcggaatgtcaaacctggcatgcctttgttcctattcaattatagtgatagaaagctccatggaattttcgaggctgcaagtcctggtcagatgtatattga

SEQ ID NO: 41365 - DNA, 568 bp, Setaria italica
  Peptide Sequence Number=SeqID_107339
tagtacgtcttcgtaagtcgaagataccataaggactgttgagggttattctgatattattgttctgagacattttgaaagtggtgctgcaaggagagcagccgacactgcggacattccaattattaacgcaggggatgggccagggcaacacccaacccaggctttgttggatgtgtacacaataaagagagaaattggcacactagatggaattaaacttggtttggttggtgaccttgctaatgggaggacagttcgttctctggcttatctgattgctaaataccagaacattaagatatactttgtatctccagatgttgttaaaatgaaggatgacatcaaggactacttaaattccaaaggtgttgaatgggaagaaagttcagatttgttggaggtggcatccaagtgtgatgttatttatcaaacacgtattcaaaaagaaagatttggtgagaggattgatctttatgaagctgctcgtggtaagtacattgtggataagaaggtgctaaatgtcctgccgaagcatgctgtgatcatgcatcccttccaaggcttg

SEQ ID NO: 41366 - DNA, 391 bp, Setaria italica
  misc_feature (336)..(336): n is a, c, g, or t
  Peptide Sequence Number=SeqID_107340
caccaaacacacgaaacaatggaggcggtgagcgcttcgcatggcgcgttgggccccctactggggaagctcacctccctgctcgccgacgagtgtgctcgcctcaagggcgtccgccgcgagatccggtcactccgatccgagctcatcagcatgcaagccgccgtccagaagtacaccaacctgcaagatcctgatgtggggtggatccagaacggggctgcgccccgggctgagctgttgaatcacacctaaaacagtctaattttatctaaacctcattttgttaggctaatcagcacataggttaaagggactccatggtctcgccccggntgcaacccgggcctagatccgccgactgatgtccaagtgaaggcatgggtatcac

SEQ ID NO: 41367 - DNA, 619 bp, Setaria italica
  Peptide Sequence Number=SeqID_107341
aaacaagtttgacgaggcacctcgcgctgcactcctccaccgacgcgttgtgcgtgtcgggcagcttcacattccgaacgatcacgaacccgtccgtcatcgtcgtcccattgccgcagtccagcggcacgttccgccggcacccgccggaggcctccctcatgcgccacgccgacggcgacgcagggccgaaccccttggcgcagccgcagaacgacgtggacgcggcgttgacgttgcacaggccgaacggcccgcacctggcgtaggcgtcgcacacgtcccgcggcgtgctgtagaaggtcttccacgcgcggctgctggggtcccagaccaggggctggatcgcgccgtcctcggtcaccacgagcagggagaagggcgcgccggccttggcgtggtagccgtaggtgacctcgccggggctcgccgtcacctagtacgcgaacatgtcggcgtacgaccaggggcggatccagaacgaggctgcgccccgggctgagccgttgaatcacacctaaaatagtctaattttatctcctaagcctcattttgttaggctaaacagcacataggttaaagggactccatggtctcgccccgggctgcagcccgggca

SEQ ID NO: 41368 - DNA, 892 bp, Setaria italica
  Peptide Sequence Number=SeqID_107342
tctattctaaggtacttactttaaatttcctaaaggttgtttgtaattgggtaagtaaagtttgtagtaatttgttggaggtggcatccaagtgtgatgttatttatcaaacacgtattcaaaaagaaagatttggtgagaggattgatctttatgaagctgctcgtggtaagtacattgtggataagaaggtgctaaatgtcctgccgaagcatgctgtgatcatgcatccccttccaaggcttgatgagatcacagtagacgttgatagtgatccaagagcagcatattttaggcaggctaagaacggcctctacataaggatggcattgctcaaacttctgcttgttggtccctgacagttctcgtgcattagcttgtgctgtgtcgaaggatcagaaaatgtagtaataatcagtggctcccattgatgttcaacctgtcagtgctgtgcaggaataaagggctggatccttgcgagagtgcagcagcgaagttttgcgggcaggggcggatccagaacggggctgcgccccgggctgagctgttgaatcacacctaaaatagtttaattttgtctcctaagcctcattttgttaggctaaacagcacataggttaaagggactccatggtctcgccccgggctgcagcccgggcaggccgggccctggatccgcccctgtttgcgggccaatgttaatgtacaaacagtgtccgaaacaaagctttgctgtcttctcatctgggtatgcgggacatcattgattttgcttgcacaaaatcatttggccagttcagtctggatgatgctctgctacattttttagtaaggtcgtacttgtcccttacatatttaggtcctctttgggaggacatattttaaagtgtga

SEQ ID NO: 41369 - DNA, 466 bp, Setaria italica
  Peptide Sequence Number=SeqID_107343
taatttacaatttcaattgatcaaacagcagagtatctacttatttattctagagctggtggacgtcctaccaaagtggagctacagaagaaatcctgtttataatcactccccaattaggagatatgatgtttaggacatctgctgtctttcattgtcaccttctaactgaatatgtaagcacaaaattgtaagacttgtattttgcaaatagatttcatagcatgcactaagatatcatttgcacaagtacatgactgttcaaaattattaagtttgattgcacgcttttaaaaatgtcatatatctccaaatgttttgcagtaatataacatgagtttaccagcagtggcatatgacaaatttccactacaaagacccgtgacaagaacatcaacctaactgtcttgttatgataatcatatagccctgttacagaattttagccagtgatatgtgagtggaa

SEQ ID NO: 41370 - DNA, 518 bp, Setaria italica
  Peptide Sequence Number=SeqID_107344
tatcagtctctttgtacatccattatttaatggatgtttgcacacattacctgtagaaactccagtaagccagtgagacctggagtgatgcagaaaaagcattggatgtatttggtaagaaattagggtgaaccacaactcaccatattcacctttgacggcatcgagcacatcaatgcccccaagcaacggtgttataggaataactgcaagaaccccttctgcaataatgtgccgaagaaacatggcgctattccaaatattgaagatttcaagcaatgacttctacatgtgaagctgtcagagtacagtattgtaagggaaaaagcatggaatctggatagaaatcaatatgcggagatatactgcacaaaaaaaggatcaatatatacaataactatacagttgttcactatgacggacatgtacataaacaggttatgtccatgaaagccatcataagctgttggttctactttctctgacatagttttgcacaggttccccttccccccctt

SEQ ID NO: 41371 - DNA, 468 bp, Setaria italica
  Peptide Sequence Number=SeqID_107345
ttaaataattatttttcatatactaaatttcctaggaagaaaaagaagtgtttggaaaaattttaaaattatataaaatcatcgtttaattattttgttttaatgatatcctgaaattcgaaaatttcagggtatgacaaaatacttatgagttatttataattcttgaaaggaaccatttgatgtagaatatgatgtacagatgtagcatgatcacaagcaaaaacatttagaataacaaaaatgtgataatatgtgatctattaaaaaaattagttgcaaaaggccacatgacattcctctgttttgtacagatcacacaaatgatcccttttaatgttacaattgaacatgtttcatttattagcatatatatactagacttaggttttcattttttttttacattttttaaggtaaccctacgtgcatgcaaactacaaacgggtgtaggggcacgtaggccgg

SEQ ID NO: 41372 - DNA, 303 bp, Setaria italica
  Peptide Sequence Number=SeqID_107346
ggctttcgtatggtaaaacccttctgaagtaggagccaagactcagaaagtcagatttgtttgataaaagtgacatcacctagcttcatcatgcgcacctttcaaagtggtctgaacatcatggaatagacaaagtgggcaacttttgtagcagcctcatagtcctacctgagtacttttggaaatggcagtaaaaatgtaacctccaactttgatgcagccaaaccaaaggcacccattagtccttcaagctgaggcaggatggatctgaaatgattgagctaataattagaacaccgtata

SEQ ID NO: 41373 - DNA, 486 bp, Setaria italica
  Peptide Sequence Number=SeqID_107347
taaactaaattgacacaattggttttcgcccagttaaatccaaaattctacatgataaacagtacaagtttatgactactatttgaaaaaaagggcaaaagcttctgttagtgccatatgacaattctaaatggttgttccaacaatggtaatccccctttgtttagtgcatcttcacatgaaaagttccgttgtagctttgtcatgttcttgttgatcatttgtatttgaatcccgtttggaactacagagttacatttttgctttgctattttaagtattttggttcttgttatcaagtatacaaattgcaactagaaaacgttgcaggaaatagcctgagaacacatgttatcactactaaaagtacttcactttcatacctaatttctttacagtttttcctgatgataaatgtatctctcgtttttgtctatataggatgccagattgggccgatatagcatcctcacttaaccagctttc

SEQ ID NO: 41374 - DNA, 650 bp, Setaria italica
  Peptide Sequence Number=SeqID_107348
cctcctcttctccctccaggatccctccactccggagttcctccgcctcggctccctgcgcaacgtcgccgccgtcgccgcccgccgcggttattccgccgacccggtctccgcgtcatgttccatcgctgtctccgtcggcaagaagctgctccgtgtggacctcacgctgcaggacggcgacgagctggatgtgcagacgcgcgagatcgccgccgtcgagggtgtcaagacgctcgcttgggtcgatgactccgtcttcgttgcaaccgcgactgggtactcactcttctctagcaccgccggccagggtgtggacatattcacgctcccggagtcctccggacacccgagggtgaagccactctccggtggtgacgaggtgatgctcctggtggacaatgttggggtggtcgtcgacagattcggccagccagttggaagcagcttggtgttcaacactacacctgactgtatagccgaggtgtatccctatgtgattgttgctgggaacgccaaggtggatgtgtacagaaggagaaacggggtgcacctagagacaattcctgttgccaggactggtcagggtgttttgattgtggctagccataatgatgggatcggcacagagctagttgtgatcgctacag

SEQ ID NO: 41375 - DNA, 698 bp, Setaria italica
  Peptide Sequence Number=SeqID_107349
tcgcatcttattgtaattgtatcctggaacagtgcacatgaaatatttctaatagctaatcttcacagttgggcattcttgtgaatatgtgctaagttttcttatcaccaccattcaacatgatctgttaaagatgtttgaaatgagagagatgtgtgaattgataccagtgaatccagtgtatttgttacaattggccaatattttgtgtgtagtaacaaatattaatcaatgagtagttctcgtctgaagtcaatttatgatctcatctttctttcaaaatggcaatcctttatccataagcttcagaagcttttgcaccttgatgtttaagatagcacttgaccagtcaatgaagctgtattaggttcacttgtttttttttgggataaaaactctgttcactttgaagatgaaatgttgcatactgtgtagtagctgtcacttgtgaattttgctgttgagtttacatttttgtgtggctggagttggaatcatgttgatgcttgctaattctttctgattttgaaagtcccgtgagaaaacagtttcaccataaaatttgaaaaacagtcaaattcaaaaagtgggttctaggagttggttatgagctgatatttgactcagttcgtactgaggataacaccattatttttttagaatccaatggttgaggatatttgtcaaagtggtacctg

SEQ ID NO: 41376 - DNA, 296 bp, Setaria italica
  misc_feature (247)..(296): n is a, c, g, or t
  Peptide Sequence Number=SeqID_107350
cttgggttcactgcccggtgttcttcttccatagagaatatacagggtttgccgagagagacgatgcagcagaaatggaccgattttctgtaaggtgtaatccctgaactcgaccgtacaggcttcagattacgttttcagttgggactatttttcttgttttcgtggggtgcgtttgtgttcatcatgatgacttgatctataaagatatcgtgtcaccataacaaaaaaaaaaaaaaaaaaaaannnnnnnnnnnnnnnnnnnnnnnnnnnnnnnnnnnnnnnnnnnnnnnnnn

SEQ ID NO: 41377 - DNA, 492 bp, Setaria italica
  Peptide Sequence Number=SeqID_107351
agcctcgtccagcacctccacgccgacctcctccctaacctcgtgggtccatgatctcccggtgccgtcccgcctgcgccgcggtgatgaagacgaaggcgaggcccccttcctcctcctcgtcctcgtcctccaccgggacgaacgccttcctcccggtgagcagctccagcacaaccaccgccaagctgtacacgtcgctcttgctcgtgagctggctcgtcaggaggtactctgggtcgaggtacccaagcgtcccctggaccagcgtggccaccgccaactcgccggtcggcgccagccgcgacgcgccgaagtcggacaccttggccgcgaggttgccgtcgaggaggatgttggcggacttgacgtcgcggtggaggatcggcggcgacgccgacgagtgcatgtacgcgagcgcgtcggcagactcggccgcgactctgaggcgcgcgcccggtggcagcttgctctcgccgccgtcgccaccta

SEQ ID NO: 41378 - DNA, 736 bp, Setaria italica
  Peptide Sequence Number=SeqID_107352
actatgttgtaattgagatgcaagaagccgtgatgaataattagcgttcgtatggtataacggaaacatgactgattaatctaacgaaatcaatttagttttccgcactgcctctgctgcacgacgcgcggtttctgagtcgatggagtttgtcggcgacctccttcattgtcggcctctcctcgccgaccatgctcaggcactgcatgactagctctgcagcctcgtccagcacctccacgccgacctcctccctaacctgtgggtccatgatctcccggtgccgtcccgcctgcgccgcggtgatgaagacgaaggcgaggccccccttcctcctcctcgtcctcgtcctccaccgggacgaacgccttcctcccggtgagcagctccagcacaaccaccgccaagctgtacacgtcgctcttgctcgtgagctggctcgtcaggaggtactctgggtcgaggtacccaagcgtcccctggaccagcgtggccaccgccaactcgccggtcggcgccagccgcgacgcgccgaagtcggacaccttggccgcgaggttgccgtcgaggaggatgttggcggacttgacgtcgcggtggaggatcggcggcgacgccgacgagtgcatgtacgcgagcgcgtcggcagaactcggaccgacgaactactagaaggacgacgacgacccggtaggacaagacttagactactacgaaccgaaccgtaacgaaccaa

SEQ ID NO: 41379 - DNA, 834 bp, Setaria italica
  Peptide Sequence Number=SeqID_107353
ttcaacctgctcagccatttccatggcaatagaaagtccagtatccttagccacgtccaaagggaactggacagcttggaaccaccgcatggatcgggaaaccttagccacagatggacagggttggtaacttccatgtttccattcagcagaaattctcccttccgaaacacaaaactgtcaaactgatcaccatctctagttacattctcaatctcaaccatggagactgaaaatggaggtgatgagagcgaactatcattctggaggaaagaactcctcaagagctcacttgcagaaagtctttcagctgctggagcttgagaaacgtcttgaatatatgacccatgccttgacattcactataaggatattcacaagtaaccagttcaagcatgcacatcccaaaagcatacacatccacgagctcattgtaattcccagtgtagagctctggtgccattaaattctaatgtgccttttacacttcttgttttttgttgttgcatgaatgttgccaaaccaaaatacaccaatcttcacttcccataatttccatttatgaatatattatcacactttaagtctctatgtatgatggccggattctggctgtgtaaatattctagcgctgttagtatctgtattgcccatcgtctcatagccttcatgtccaatttcttatgttttgtgcgatactgtctcaagctgccagatgtgaagtattcagtaataatgttaacaatccccttctcctcgtcaatccaagaggcaaacaacttcacaatgtttttgtgccttagtgtcctcaacagttggatctccgtgttcagt

SEQ ID NO: 41380 - DNA, 527 bp, Setaria italica
  Peptide Sequence Number=SeqID_107354
gctaagcataattgggaggatcaatcacatgaatcttgtgaggatatggggcttttgttcagaaggatcacataggttgttggtttctgaatatgttgagaacgggtcactggctaacattttgttcaatgacaaaaacaatatcttgttggactggaagggaaggtttgatatcgcgttaggtgttgcaaaagggttagcatatcttcaccatgagtgcttagaatgggtcatccattgcgatgtgaaacctgagaacatactgttagatgaaaattttgagcctaagatcactgactttgggttggcaaagttactaaacagaggtgggtccaaccagaatgtttcccatataagaggaacattaggttacattgctcctgaatgggtatcgggtctccccatcacagtaaaagttgatgtatacagctatggagttgtgctccttgagctttttatcaggcaccagaatttcagagttggttgaaggttcaggtgaggtgcatgatattgctttaggtaagtct

SEQ ID NO: 41381 - DNA, 370 bp, Setaria italica
  Peptide Sequence Number=SeqID_107355
acgaggaatccgatgtttacatactccggaggaggccacggcagtgagtgttttatatcattgctcgatggcccgtcgatattatcgccagttgtcatgtgtggtggtggctgaaagtcttgagactttcgtccgtcactgttatcggctggggtgctccgcgactaaagatcggagagctagtgatccatctatgctgctggatttcgatatgggtggatttgttgtgcatgtgcctacttcagggctcggtgttatgccgatggtggaaagtagtatcattaacatatatgatatgcgttttcaaaaacaattacgcacatgatatgttgccttgagaacccaaaatttcatctagatcgttgaaaaa

SEQ ID NO: 41382 - DNA, 575 bp, Setaria italica
  Peptide Sequence Number=SeqID_107356
cgcattcgcatacgtgtgatcctcgcatcgcatcggtccatctcgagtgatccggtggttgtcgcgctcgtcgtcggcgatggagaaggacgccggcgggaggaagcaggaggcggcgccggcgccggtggcgtccaaggcgcagagggaggccgcggcggccggcgtgtccgtgaccgagtggctgcagcacgtcaaggcctccttcctcggcctggttcggaaggtgacggcgaggagcgagcaggaggcggcggaggcggacatgcgggcggccaaggcgcaggtggaggccaccgacgaggcggaggccaggaagaagcagctcgccgatcactgatgacggatgaccgacctccgacacgtagattgaactgaaaagttttgctcgctatctgcttgctttatgctgtatcgttatcgggagtaactgtaaacagtgtcgtcgtgtagtgtaatggtgacagattctggacttgctggcagcctgttagatctttgtagcatggactatctgccactatcattgtaacagaagctgtgttattcagtgttcaacttggataagatgagcg

SEQ ID NO: 41383 - DNA, 673 bp, Setaria italica
  Peptide Sequence Number=SeqID_107357
gttaagagaggcttaccaatcctggttgccaacagttatccaacttacacactcaattggccaagatcgttcctggcacgacactgatgggaaaactctacttcatccattgactactattagaagattgggtgttgagcgtgggtttaaaggtaaatgccatccaagattagcaaagatagttttgtctgctacactgactcaagatcctagcaagctttctcaactcgagttgcaccaccccttgttgttgaatagtgggaacaagcgttatagaattcctacaaaacttgagtcctacaaactgatctgtaaatcaaacttaaagccactgtctctcattgttcttctccaagagctgcaagggaacaagtgcttagtttttacctcatctgtagaatcaagccacagactaagcacgttgctgggtttttttgaagacttgccctttaaatttagtgaatattcacgattgcagcgagaatctactcgaaggaagacactggaggccttcaaggaaggggaaatcgatgttctaattggtaccgatagaatggctcgtggaatacatattgatggtttaagatatgttatcaattatgatatgccaccatatgtgaaaacatatatacatcgagcgggtcggacttgcaagtagtctaggggtagttct

SEQ ID NO: 41384 - DNA, 263 bp, Setaria italica
  Peptide Sequence Number=SeqID_107358
ggactggcttcaagctcgagggaaccatgagcacttccatcgcatacctcgttggcattggcgtcgcgaggcgccagatcggcagcgtcataacccgttttcccgaggtgcttggcatgcgggtggggaagattataaagcctttcatcgaataccttgagggcattggggtccagaggttatctgctgcaaggataattgagaagaagccttatgtccttgggtttggattagaggataaggttaagcctaacattgaggcg

SEQ ID NO: 41385 - DNA, 367 bp, Setaria italica
  Peptide Sequence Number=SeqID_107359
tatagcatcgaaggacccttcgtctaataaatctgctttaaatagctgcagcctctcagcagatccttctagagcatgcaaatgttctgtcttcttaggatcagctgggtcgcggagggtgccgcggacggtgtagccgcgctcgagcaggagcttgacgatccacgacgcgatgaagccgccggcgcccgtcacgcacaccaccttcgcggccatcttcctccttgccggccttgtcgtaccaactccctccctcgcggacgcagctaagcagagagccggaggtgacaggaggagtcgaggagaagcgtgcgagagccgtgcgcgtgcggtgtgagtgagaggttggcgcttttaattttatcgc

SEQ ID NO: 41386 - DNA, 629 bp, Setaria italica
  Peptide Sequence Number=SeqID_107360
tctcaggttacatcttatgaaggtatgaatgtatagttattatatgatatccgtccatctttttttatcaaggttgaactttgtgattcatccatctttgtgcattgatcatacaattttctttttgaagaagtgctccctgagcagataaatgctttgttctagttagtttccttcttatattctgtttaacatttgctggtgccagttcacattgttttttttaaatactaaagttgagagttttttcactagattaaggggcaacaatactccactagtccaaacgaaggtaaaaaaaatcctccgaagttaggcaactatgttctaacatggtctgctttgtcttcctcactcaactttttggtctacagtgatgggtctataatttgtacaataatctgtacaagaatcagatgaacaagtggaaaattgctactatggcttcgaactgttatttagtactctattcccattgttctcaccatctccttctgatcctaagtaatagcaactcttgaatgtattacggttgcaactagtagtagtttcccaaaatcagctggctcttcttatttgagaggtcaaaatatacagataacatcctattaataattattttaagtgac

SEQ ID NO: 41387 - DNA, 362 bp, Setaria italica
  Peptide Sequence Number=SeqID_107361
ggaggaggccggtggttcaggtggaggatggtcaggaggaggccggtggttcaggtggcttaccagtggtgatttctgggatgcagcaaaacaaactgttctgacaatccttggcattattgcagcgtttttcctgattgccaacttcaatgtactggtagctgctattatcaactcattgctgcttgtgctgcgtctaatacggcgcacactctccttcatagctcactgtgttttccaggacatgttggttgaaaggcctcgaccaaaatcaagtaccctggacaacaacaatgtggctactgtgcctgtgaaagaaagagctggaatgtctgcgagagaacgagttgtaaggaaatggg

SEQ ID NO: 41388 - DNA, 568 bp, Setaria italica
  Peptide Sequence Number=SeqID_107362
ttcgtagtagtttattcagaacctttcagaagatcagaaacccttgttcacattacccttatccactcctccgccacctcctacccttcttttccttgtcgctcagctctcgttcgatccctcaccttgctgtcgccctctgctcgattccccgcttcgcctccttccaccatgctgccgatgccttccagccgcacctcctcccctgcgccgctttcacctcgctcctagtgctggccgcctccacctcgcgttgtagcgccggccgcatccaccccgcgccgcagcttccactgtcgccctgccccgcaccgcccgccgtcgactgcccatgttgtggcaagcatgcgggacctcacgctgcctgtgatgctgggcgggggccgcaccaatggccgcgacatccagccatccaagtgaggtagtggcaatttccctgtaattgcatccaacttttaggggtattttggtctactggggatgcgggttggggagggagctgtggggagccagttttttcggctcccctcccttaaatggctcgagagagcggattgtggggggcttc

SEQ ID NO: 41389 - DNA, 478 bp, Setaria italica
  Peptide Sequence Number=SeqID_107363
aactttctccttaggctggagttgaatggcagagcgagccatggcatgcttttgaagtgatccaagaagctggtctcgtcatgatcaagtgatatgaagataatttcgatattcttgccagtattgcggagcattgtgtagatttggactagctttggggtgaagttcctgcatggcctgcaccagtgagctgagaagaagaggcaggtcaccttcccttcaatggaggacagaggtacttcctgccctccattggatagaagagatttctttcagtcagacatatttggtaaaacaagaagtatttttcttttgagaacaagcgcagcaaaattgaacacaccgttttttttacatagtttagttttaaaatgaaacagtaagtgctattactttgaaagaatgatgtcaggtacgtatgtttgctatttgacctcaggcagataattccttttatgcatgggggaagtaaggacca

SEQ ID NO: 41390 - DNA, 671 bp, Setaria italica
  Peptide Sequence Number=SeqID_107364
gtctccgcagcgcccccaacctcaaaagagttcagaagtttccagacctccacaaggtgaagcggatatgagttcctccggcggccgcgggaaggcgaagccggcgaccaagtcggtgtcgcggtcctccaaggccgggctccagttccccgtcggtcgcatcgcgcggtacctcaaggccggcaagtacgcggagcgcgtcggcgccggggcccccgtgtacctctccgccgtcctcgagtacctcgccgccgaggtgttggagctggccgggaacgcggcgagggacaacaagaagaaccgcatcgtgccgcgccacatccagctggcggtgcggaacgacgaggagctgagcaagctgctgggcaccgtgacgatcgcggccggtggcgtgatgcccaacatccaccagacgctgctgcccaagaaggctggcggccacaagggggacatcggctccgcttcccaggagttctgagcgcgtctttgatgtttcttgcgggtttttggatgtttgggggttttttatggaactttgctggatgtaaacaaacgctgtgcgttggctcatgaatgaatgaatgaatgaatagaagagacatttaacaagattacctcttgtgaaatggatatgagttttgcattcgaatgaacaaaaaaaaaaaaaaaaa

SEQ ID NO: 41391 - DNA, 407 bp, Setaria italica
  Peptide Sequence Number=SeqID_107365
ttacttaaacttagggggtaattaaaggggataagatagttaggagactaaagggctcccctcttgcagcaaaaactgtcggcagattattgaaaaatcagcttgacttggttcattggactagagtgctagaaagtaaggaatgggagaaaagtgatggcaagaatgacattatgcccgcactgaagttgagctatgattacctaccttctcagctccaacgatgtttttcccactgtgctttgtttcctcaagattacaaatttggaagagaagagctaattaacttttggataggattagatgttttgcattcatcatgcggtgaaaataaaggattgaagatatagggctaagccatttgaagcaattggttaatcatggatttttgaaaggtgcaaaaaaag

SEQ ID NO: 41392 - DNA, 428 bp, Setaria italica
  Peptide Sequence Number=SeqID_107366
tagtttttactaaattaaagtttagttaacttaatgtactatggcttcaatgtcaggcggtttgcatggcacaacaacatattgtaatagttttttccctaaaaatattcctgtcacttgctggttgagtcctgggttctaatggaccgttgaggaagtattcctctggctactctttgggcaaaaaactggtttcaactcggggtgatggttatataccagcatttaaaatttttgagcaatccttgcgttctattttgcttggtcacagaaccttattatttacacatatgcctgtatacacgaatcatgtacaaatggatatggtcatcacaatatcttagtgtgcacttcttagttgtagatgtttggttctcccaatgcttctttaacctggaaaaatgtttgccatcatgattttttctgca

SEQ ID NO: 41393 - DNA, 376 bp, Setaria italica
  Peptide Sequence Number=SeqID_107367
aagttgtaaacccatagtttcaaaatgagccaccaaattctgttttcctggaatgccgacagaataaacaatgacaaaagaagtgataatggagaacgggatatcagtctacagagttttgcaaagtaacaagccaacaaggttatacatgctcagcagtagctcatctcccactctgtccagtaatagagtaactgcaacccgataccgcacatctttgattggtgcataatcctttccctttagcggttgcgctcgggcggcaggggccggttgaacccgccgcggcggttcatgtactggcgcggctggcgcttggtgacgacgcgcactccgctgacgtcggcgtcaggcacgtgcttaacgtagacttaca

SEQ ID NO: 41394 - DNA, 1029 bp, Setaria italica
  Peptide Sequence Number=SeqID_107368
ttttttacttcaagcacagctgcttcgtagttagactgtctaaaacaacgttagacagcaaccacggttaaaagtgtcaggttgacagcatcagcatacacactgtcatttccccaaatacaaacaataaaataaaacaatgtacctgaacttcaaccgttcacatcttccatctctactatctgtggttatttcgcacacctatgacatgaaatagccatggcagcataaagcaacagaataatctagcaccataaaccaatatcctatcacacaattaccataaactgataaatctgccaaggttgatcctggatctaatgcaacagtctgcgcttaagttgctaccacaggaacttatattggcacgtgcagcattcatggccagaaccaacaatttcattgcaaagcatacaactaaaagcaaaagctgttttacttggcaatccatgtggtgcatgtctgattaccaaattgcatgcagaaagccagaaacatcacgttaagttgtaaacccatagtttcaaatgagccaccaaattctgttttcatgctcagcagtagctcatctcccactctgtccagtaatagagtaactgctgttcagtaccgcacatctttgattggtgcataatcctttccctttagcggttgcgctcgggcggcaggggccggttgaacccgccgcggcggttcatgtactggcgcggctggcgcttggtgacgacgcgcactccgctgacgtcggcgtcaggcacgtgcttccccttggtggagtcgaacccgacggggatgcccatcatcttcatcatctcgagctcctccgcatccacgtccccgtcgcccgccgccgcggccgcggccgcggccgccgggtcccctccgcccttgggtgccgcgggaggatcggcggacttcttgtcctccctgtggtggtggtcggcggcggcgggggacgcgtcgcggcggcgcttgtgacggccagcgtcgggggaggtgacgagcggcctcggtgggagtgggagtggc

SEQ ID NO: 41395 - DNA, 265 bp, Setaria italica
  Peptide Sequence Number=SeqID_107369
catttcaagaagcttatgacatgactggccggattcttgttgtcactgtgtgctcgccaaggaagcatgagccgcctcgatgcttgaactatttaacatcgcctcatgttcttatctggagtgcagtaactgcttcgtgtgcttttcctggactttttgaggcccaagaattgatggcaaaggatagattcggtcaaacaatccctttccatgctccattcttattgggcgtggaggaacgtactggtgctacaacccggcccgt

SEQ ID NO: 41396 - DNA, 461 bp, Setaria italica
  Peptide Sequence Number=SeqID_107370
tattgtctagtctagtctagtcctagcggaccatttcagcttcgtgcctttcaggaagacctttgatcaggaggttggtataggtggtgatcaggtgccatctaatcagcttggacgatcagaacagcatcatgccggccaggagcagcagccacaccggccggtgctcgcgaccacggccgtccctgccacggctttccttatcagtaggccatcgaaccccgtctcgacaattgtgccacctgcaatgcagcacgcgtcagttgtctcgatcacgatcagttccatgtgccagcaatccttctacatcaccacgataaattcagcatcagcaccaacagcaacagccacagcaaaagcttgatcgcagatctgctggattggaagaattgataatgggctgcacatcgtccattatcaattcttccaatacagcaaaagcttgatcgcagatctgctgg

SEQ ID NO: 41397 - DNA, 937 bp, Setaria italica
  misc_feature (903)..(937): n is a, c, g, or t
  Peptide Sequence Number=SeqID_107371
aaaaaaggaaagaacaaacaaataataactactagagactaaaccaacgacaaccccgaagaagtacgtttcaggcgtgaacaaggacgggctcgtccggcacttcttccaccggccgtcaagggcctacacgacggggacgaggaagcggcggaaggtgcacagcggcgacggggacgacggcgccagcggcgccggcggcgagacgcggtggcacaagaccggcaagacgcggccggtgctgtctaacggcaggccccgcgggtacaagaagatcctggtgctctacaccaactacggcaagcagcgcaagcccgagaagaccaactgggtgatgcaccagtaccacctcggctccgacgaggaggagcgcgacggcgagctcgtcgtctccaaggtcttcttccagacgcagcccaggcagtgcggctccacggcggccaaggaggccgttgccgccaacgccgtcgccaacagcaatgcgcatgctcttggcggccatcaacagggtggcagcgttctcagggaagcaaacggtgtcgatcagttctacaacccaggaacaatgatggggtacggccagggggtcccgaataacagggtacctcctgctcctgctgcagctcacttcatgcctaacttcgcagtgcatgcagcaagggctacctttggcccttgaatcaagaattcaggacgtgagtaacaagaacatattcaattcggaatcggagactaaatagggatttaggagcaggtcatgtcatcagggtatttgtccatggcctgaaaaactacagcacaagtgaagatacattatgctgtgactgtagaaagatatcatgttctttgcagtctaacttgacgttgtttatgaactattaaaactgtttaacgttaaaaaannnnnnnnnnnnnnnnnnnnnnnnnnnnnnnnnnn

SEQ ID NO: 41398 - DNA, 1316 bp, Setaria italica
  Peptide Sequence Number=SeqID_107372
cttcaacgacgtggagagcagcctgtcccgccgctgccgtcgccgccgccaagaagcagcagcaggcgtcgtcgcacgtcaacctcatcaggacctgcccctcctgcggccaccgcgcgcagtatgagcagctgcaggagacggccacgatccaggacttgccggggctgccggccggcgtgaagttcgatccgacggaccaggagctgctggagcacttggagggcaaggcgaggccggactcgcggaggctccacccgctcgtcgacgagttcatccccaccatcgagggcgagaacggcatctgctacacgcaccccgagaggcttcctggtgtcggcaaggacggcctcatccgacacttcttccaccgcccgtcgaaggcatacacgaccggcacgcgaaagcggcggaaggttcacaccgacgagcagggcggcgagacgcggtggcacaagacgggcaagacccggccggtgttcacccacggcaagctcaagggctacaagaagatcctggtcctctacaccaactacgggaagcagcgcaagccggagaagaccaactgggtgatgcaccagtaccacctgggctccgacgaggaggagaaggacggcgagctcgtcgtgtccaaggtgttctaccagacgcagccgaggcagtgcggcagcgggtcggcgacggccaaggacgtcgtccccctcgcggccagcgcggccactgatcaccaccaccaccaccatgacggcggcaatggcggtagcaacagcatgctaaaggaagcaggcattgtagatttctacagcccggcggcgctaatcggctacaaccaggcggctcctaacaacagggcggctgcttctgctcacctgatgcctaactttgaggtgcacacggcaggggcggctggctttggtccctgaccaagaagtgcaagtgcaaccattcgactgatataggttagagggggagaggaaggcaggaagataaggcaccgtcatgaatgcaataatttacaagggatcgaagaccttactgaaacgtaatgctggacaataagaggggtgttgactgagtggctggacgtacagatgctgaaaaagagtagggaccgataccatacattgttcattaatcgttacacatatacgtaacttgacgttatcaattttttgttcaatgatatgttgtttcatattaagaatggtggagtttaatactgtatattagttcttaactaaaggatttctacatgtatacgaatcagtgtacatctgtcttttgaaagaaatatatctgctgtatattttttgttg

SEQ ID NO: 41399 - DNA, 2097 bp, Setaria italica
  Peptide Sequence Number=SeqID_107373
cgctcttcggtttgcttctctcttcttctatctcctctcactcgtttcgatcttgtgttcttgctgaattgtgcatccctagtactgctcctcctacttgcgctcttcgcgcagcaagacatagaagaagaatcacctgctactcatgcatgagcaccgcctcctcgcgccgcatatgaatcagacatgaataggggccacagcagcagctcctcgaagctcatcaacgagaagctcgaggaacaccggatctccactgcgaagcactgcccccactgcggcgagaaaatcgacagcaagccgaaggattgggtggggctgccagccggcgtcaagttcgatccaactgaccaggagctgattgagcacctcgagtcgaaagtgaaggatgaaggctcgagatcccaccctctcatcgacgagttcatacccacaatagatggggaggacggcatatgttacacccaccactagtgcgactgaggtgtgaccagggatggcctaagcaagcacttcttccaccggccatccaaggcctatacaactggcacgaggaagaggaggaagatacagacggagtgcgacgtccacaagggagagacgaggtggcacaagaccggcaagacgcggccggtgatggtgaacggccggcagaaggggtgcaagaagattctggtgctgtacaccaacttcggcaagcaccgcaagccggagaagaccaactgggtgatgcaccagtaccacctcggcgacctcgaagaggagaaagagggggagctggtggtgtgcaagatcttctaccagacgcagcccaggcagtgcagctggtcctccgagcggggcgccgccgctgctgctgcggtggcagcagctacagcgcaggagcagcgtaggaaggatagcggcagcggcagctgctcgtcgagggaccacgaggtgtcggcgacatcgttcccggctggatacacggtcaccaccgccgtcgagatgcagcagcagccagcggaccatttcagcttcgtgcctttcaggaagacctttgatcaggaggttggtataggtggtgatcaggtgccatctaatcagcttggacgatcagaacagcatcatgccggccaggagcagcagccacaccggccggtgctcgcgaccacggccgtccctgccacggctttccttatcagtaggccatcgaaccccgtctcgacaattgtgccacctgcaatgcagcacgcgtcagttgttctcgatcacgatcagttccatgtgccagcaatccttctacatcaccacgataaatttcagcatcagcaccaacagcaacagccacagcaaaagcttgatcgcagatctgctggattggaagaattgataatgggctgcacatcgtccacaagcacaaaaggggaaacttcacttcctcagtcccaagagacagaatggccttacccttactggccgcctgacaaccaagatcatcatggatagtagcaacaaggctgttaaatagtggcgatcaaaaccaaaactaaccacaccaccttcaatggaatggtctttgtctctccttgaatatactggacattgctttaatttcttggagaatgtactgctgttggaagataaagaaaacagatctacgtggatctccctcaaggaaaaaatggtgatgataaaattaattgtgagctcttcaaggaacagagacaaagcggtgaaaaatagagaaaaaaagaaagatcgatgggaggaaaggtattgttgtgctgacatcaaaacgaagcataactggcctagatgcaacccgtattagtgcaacttgatcaagtataactacaatcgatccatggtttatcacagttttttcatttgtattggctatttttcaattgtaaaaagtagtattgtttgcatgtacattaacctggccccttctttgctttttgaatcgatacttatttcccccttgttaatttgtgctccaaatatgcatcatggaggaataaactcagtaagttctttattccgtgtttctagagtcaccaacattctttatcttttgtatgttaatgtacctcttttcaaacaatgtagctt

SEQ ID NO: 41400 - DNA, 530 bp, Setaria italica
  Peptide Sequence Number=SeqID_107374
catcacacaaaaatagctaaaaggtgaagcataaatcgcaaataaataaataaacgcatcacatttcataagcatagactaggaataaagcagtgctcctagctcagcctggataataagatatcacatgcagtgccattggtcaggaaagagtggttaggaaatgtcaatataggatgtatcatcgactaccttttgagctctaaggtcagtagggagcagtggggcattagttttctggtggtttggagtaggccccagctaatcaagacttggaatggaggaagagacaaagtgggtgagtgatatggcaagcacaagaagaaagctttgaaaacacaaacaggaactagatatctttttggcagcttctgaaatctgcaagattattgaaaactggatgatgggagcaaccaaccacgagccgtttttaaaggatttaaagttgattaacaaaatagcgaagatgtgacaaacagatgaaaaaggaaagaatacatagctcagactagattctatggctcaatatt

SEQ ID NO: 41401 - DNA, 328 bp, Setaria italica
  Peptide Sequence Number=SeqID_107375
ctccccaccaaaaaacgaagccgccaggcgcacgccacgatcccacacgagcaaatcgcgcctcctccccgcccacccccttcctctcacgagcgcgaggcgagtgcgggccgccggagatggcgccggcgccggcggacagcggggcggagtcgcagcggcaggcggaccggctcaagcaggagggcaacgccttattcaggaaggaacgcctcagcgccgccatcgacgcctacacaggggccatcactctctgcccaaatgttgcagtatattggaccaaccgggcactttgctataagaagcggaagtctgtaaaattgctagt

SEQ ID NO: 41402 - DNA, 377 bp, Setaria italica
  Peptide Sequence Number=SeqID_107376
gcaattcctactcacaggaaaaaaaaccaaggtgatcttgagttagtggcttaagaggctatctcagaactcagagccaacccaggaatgcaataaacccagaaggtggtagggaggtgcaggggtggagtaaactatgtctgaatgctaagaaaggatgcatacagggaggggatcctagacctaaaggcagtatgttgattctaccctgtgcttgagtcaataaaaatattcctcctttttgaaggaggataaccttagaggaggagcccagccagggtaaacaggcctgaaaaatgcagtgtcagacacaccacacgctcacagcatgtgcacgcgcgcacacacacacacacacacacacacacacacacact

SEQ ID NO: 41403 - DNA, 2193 bp, Setaria italica
  Peptide Sequence Number=SeqID_107377
gctgccgccttctcctccgcttcctttgtcctatcctccagcttggtcgagtataggcatcaacgggtgaaaggggctgattgattgattgggcgtgatggttcacttgccgcaccttgggaagctgcggcgagaggtcaaggaggaggtcgcggacgcagccgacggccctgccgccgcggcggaggcgtcgccgttccacaagaggacgcgattcgggcatcagaagcagcaatggagcaccagatgtgctagtgtgtccaatcagcagtcctcgcagcaaggtttccttgatgagcctagtccacttggcctgcggctgaggaagagcccctcactattggatctggttcagatgaagcttgcgcaggccaataagggcacagaagctcggcaagccatcaacactggtgcctcggagaaactgaaggcttccaatttccctggttcagttctgcgtattggatcttgggagtgggtttcaagatatgaaggagatctggttgcaaaatgctattttgcaaaacacaaactggtttgggaagtattggatggtggtctcaagagcaaaatcgaaatacaatggtctgatatctgtggactgaagatgttctgtccagaaaatgaacctgggaccttggagattgtgttgtctagaccaccacttttcttcaaagaaaccaacccgcaaccaaggaagcatacattatggcaggcaacttcagattttactggtggacaggcaaggatgtacagggtgcaccttattcaatgcccgcaaggtatgatgaataagcatatggaaaagctttttcactgtgacccacgtctgcagtcgctaagccagcaaaatgattttactgtggataatccttattttgagacaaagtgttccatatttgaagaaccagaggatattaagtgtcaaaaatatgagcataaagatgatgacaaccagttagccccacagagctctaatgcattgttatcacctcagtcttcagccagtaggatggatgctgaagtaagacagcaagctggaaaatcagatgtcttgcctggacactaccctagttcagttgctagtgcccacttgattaaacaagatggtacttctgttgagtgcgaaccgcatacaagcattttgaattggaatggtttcagagtgccaggaatcagccgctcaatgtccaagagtgagattgcgaaccacatagggtaccacttgtacaaacagatgtattcaggcaacctacctgcaactgatgctgtaactgcttcattgggtaacggcgatggttcaaacagtgatgtatcatttgatgagctaaccaggcagctcctgaatgacacccagatttccaatgcagctgatgaaaggatgcttatgtcaagggtaaactctctctgctgcctgatccagagagattcaggttcaggtcacgcaacccctggagtcagtggtacaaatgagatttatgaaaggaagtcccagactagtgtgcctctggtgcgaggagacggcagcaataagccattgccaccggaagaatcatttggagatctcctgaccaagccattgccgccgaggcaagaatcatttggagatctcctgaccaatctgccacgcatctcatcgtttcctcacttcttgtgagtttggcatcaggtggcaaaaaagtatgccgtgggagtaagtggtggctgggtacggtgcaaccatattagctggtcatcgaaattgtgccgtgtagaaatttttgccggcaaacagtgattgacacctttgtcgtttccttctttggtgtacataatagattggtaggaggataagtataggtgacctttgtttgactccacagagcaatacaggtgttggctttttatgctatggctttctatgctgtatatggttttcttctttggtataccaagtgtgatgatggcatagattcacatgctcatttgaggctgttttgggctcaaagttgatacccaatgttgctaaaaggacgttcactgatatggtgtttgtcctgggagcattttaatcgactccacatgggcacggggagggttgggcatggctgcttaagattgggatattcttccctatccgagtggcttgtctttccaccttgagaggtagggtttgaagcttttgggagaattagaggtgtttcccctgtatat

SEQ ID NO: 41404 - DNA, 1380 bp, Setaria italica
  Peptide Sequence Number=SeqID_107378
gttcttcattttagatttcgaagtacgagcatgagttggcttatctgattcttcatggtacatttcaatatcctggttgatgaatagagcttgcaagagcttgaccatctcaatggatatgtacaaagaaattggtatgaagtaactatacagcatcaaggccgtcaacaaatgaaagaaagatgctagagcagctcgttttggatcatagaatatagtagtagcatctggacgaagataccaccgtttgatctcaccatctcttaggtcctctttggtccatatcccaaagaagacagaaccaagcaatgcaatcatgagtagagaagacatcagaaggtaaataattttatccattttcttctcaatcttacttcttttagatggtggatcagtagcattttgcatcactttagtatcgtgacctgtgaagatgacagccccatatatgtagtctgtgttccgtagttttgagtcccgaagaagaagctgttggggtgacaggggatgtcgctggcctttccattccattgaaccgacaaaagagtagaggtttgcatttgggtcttcacattttattgtttgtctgacttctctaaactttatgtcctcttgtaaatccgatgtgacctcgagagcttgtttaattttcaaatttgtttcaccatcgaggttcatagtctctacataacagattccatccggatagttagatgaaagcagaatcatatcagcgggaaagaaattatccttctccacctttattacatctccaactttgatgttcttccattttgtctcttcaaaattgccatttcccctgtgcactttgactatccgattattgagctcatgatcctgttgtttcctcctccagtcctcaaccccttctttcgccatggtggccacaatcacgacacacagcggcgcaagcgcgctcactgctgtgtaaggcgcgagtggggtcaaggcaaggatacccgagacgaggaagtagaagttggccaccctcctgaactgctcgaagagggacttaggcaggaaggtggccagattgtactttgtcgtcgacacctcattaagcgggtaactgaatccctcctcgagcctatccggctcgttgacgtacacgacccgagagaaccccaccatcccaatccgcgagtgatcatcactggggtccgtgtgacagcggatgaatgtcaacaatacactgagcttgagcttctccagcctcttgatccgatgccgcgccattcctctagaatcaatgaaatcgctgcaccaaagcttctccaaaaatccccaagaagtcgacagggccacggattcagggttcttggctgccaccacccgagcagccaacttgctccaatcttg

SEQ ID NO: 41405 - DNA, 212 bp, Setaria italica
  Peptide Sequence Number=SeqID_107379
ggagaaatcctggccgtccaaaaacagagcaggcaatttgttttcttttcaggtgtatagtacaaaatattcgcacacaaaatagttgccgacgagacaataggcaaggagagaagaaaagaaacggaacagagaggcttggctgcttcacctggtcgtcggcgtccaggggatcgaagagcccggcgtcgtacatggccttcttccccttg

SEQ ID NO: 41406 - DNA, 344 bp, Setaria italica
  Peptide Sequence Number=SeqID_107380
ggtcctccagcgtgtccggcttcttcgtttttcacgttatccatcatcaccagcatctcctgcatgaagtcggagaaatcctggtcgtcgtcgtccaggggatcgaagagcccggcgtcgtacatggccttcttccccttgtccgacaagactgcgccaaacgaacaattcgatcaaatcccgtgcagccaagccgcggcggggcagagcaaacgtgtgcggccttaccggaataggcctcctggatccgctggaaccgccgcttggcctcgccggccgcgccggggtcgctcgcccaccggtccgggtgccacttcatcgcgagcctccggtaggcggtgcgg

SEQ ID NO: 41407 - DNA, 661 bp, Setaria italica
  Peptide Sequence Number=SeqID_107381
cccgccgcgccccgtccggcggcacgcgcccgcccacgcctacgccgccgccgcggctcccctcgtcgcccttcacgatgtcctccagcatcttctgcaggtcctccagcgtgtccggcttctcgtttttcacgttatccatcatcaccagcatctcctgcatgaagtcggagaaatcctggtcgtcggcgtccaggggatcgaagagcccggcgtcgtacatggccttcttccccttgtccgacaagacggaataggcctcctggatccgctggaaccgccgcttggcctcgccggccgcgccggggtcgctcgcccaccggtccgggtgccacttcatcgcgagcctccggtaggcggtgcggatgtcggtggcggaggcgttcttgcggatgccgagcagggcgtagtagcagcacgcggacgcgccgccgccgccgccggaggcattgccggatccggccccggctccggcgtccatgggaaggcccagcagcaggcggacggcgcggggcgacgcggcagcgctacaaaggcatcgaattcgggagggagacgagcgatgggtggatggattcaaagggacgctggaaaagtttttattcgcggggagggcgtgagaaaaatatctctctctaaatagagagggagtgtggttttg

SEQ ID NO: 41408 - DNA, 828 bp, Setaria italica
  Peptide Sequence Number=SeqID_107382
gcttaagcccaaagcaatcagcaaataccactagcaagcagcaacctcttttctgacaaagtgtcctgtactcctgttacatggttctagctattgcatgctcagcagcatgcaagagagaaattggtcaagaaactagatagatcatgtagcagatcacaatgcaactttgaggtaaacatgagacctaaatttggacctttctaatacatgcatttttttgcaaaatatggacatttattatcccttcggcataaataaacataaacaggaaaaggaaacaaagattcacaagttgcaatccatcactagcaaggccaagaaaaaggaagtaaaggaagtaacaaaacaatcatcatcctgtataaacaaaaggtaggtatcaaagcaaatagtatgaaagttaaaaaatagcaacttagtttacatggatgctcaactgtcttgcagtattactctaaaaaaaaaactgtcttgcagtattactctaaaaaaactgtcttgcagtatttatcaggtcaaaagtatgagtacgaatacatacaagcaccagcaaatatatcacctaattagagtagtagccaagatgctaacttctccaaatggaattcttgtttaatgtcctgatgagtagttgaggaccccataagcaacacgttcaatacttattactcagtgctggtaactctgagaaatagggaacatatgaagcaaacccaaaggagtcactgacagtgtggagagcacacacttccccagtgtccatataataagatatcagtttatcattccatttaaagatgattacatcacgatcaggatgaatgg

SEQ ID NO: 41409 - DNA, 492 bp, Setaria italica
  Peptide Sequence Number=SeqID_107383
tctccaaagtgtacagctcagctacaaaatacaaacacaactcttccatgcagaaaaaatgttgtctcaccaaaagcctcccacagtgatgagactgtcgataaaaatgattgcttgctgggaaacaggtagtcaccacgagcttcactagccgatttccgcaataatatctctgattgccagacattgacaaaatctcaaaatgattaccttgctttatatgtatcataaaatagatgtgacccggacggagtggtctgcagacccggtgatgtacattggcagtgttggatgccaatccacacttgtgatagaagaactgtgaggtaatgtcctcaatccactttcatggccttgcacctgatatattggggcccgaaccaaaccagaggtaaccagcagcctcttgccattagaatccagtgcaatctcatgcattcgtttgttaaagctctctggattgcaaaatctgctgcaatctcttgaccaaag

SEQ ID NO: 41410 - DNA, 428 bp, Setaria italica
  misc_feature (362)..(362): n is a, c, g, or t
  Peptide Sequence Number=SeqID_107384
gtcaagcacacaagtctggaacttcagttcccagatctttcaatctccatcgaacagctctaaccgctagagaaagatgctgacaatgtgatgccgccttaagaacataagtaatggcagttacaagaggctcatcgttagagtcggacaataattcaagtgcatgaacagatgcttgtttccagatatcactttcgaattctaactcagaaagggcaccaaaaactggtaatctcaatgaaggctccgcatctgacttttgaagatgatctaacagtgcacaagctgcaagggagtgttctgaaccatccacaactttggtacaagggcaatcaagtcttgctggagctgtttggagcttntctaggacaagtgcaatcttctggcagcttgaggccgccttcgtggttcagggcatccatgtggta

SEQ ID NO: 41411 - DNA, 337 bp, Setaria italica
  misc_feature (197)..(197): n is a, c, g, or t
  Peptide Sequence Number=SeqID_107385
taaggaggtagcttgcattggctctcgatcaacgaccttgcagtgcctgtgctgaacatctatgtagtaaggcagcaggcaatgcaataacatgatcagagctgccgagcaggcgagaacaccgacgagaagatgaggaacatggtggacgtgcgcgacgtcgtggaggcgctcgtcctggcgctcgaaacccccgnggcgtccggccggcggctcatctgcagcgcgcacgtgatgatggtgtccgagacggtcggcctcgtccacagcttgcaccgggacctgaagctggactaccccaggaagtttgttcaggtggaagacgagaagggagcca

SEQ ID NO: 41412 - DNA, 833 bp, Setaria italica
  Peptide Sequence Number=SeqID_107386
taaggtaaggtaacctaaattaaggtggaggccatggacatcagcggcggctgcgcggggaagacgacgaagatgaagacggtgtgcgtgacgggcgccgggggcttcatcgcctcctggctcgtgcagctcctgctctccagaggcgactacgtcgtgcatggcactgttcgcgacccgagtgatcccaagaacgcgcacctgatggcgctgggcggcgccggggagcggctgcggctgttcaaggccgatctgctggactacgccagcgtggcggccgccgtcgccggctgcgacggcgtcttccacgtcgccagccccgtcccggccgtcaacccgacgaacccggatgtggaggtcctggctccggcggtgaccggcacgcagaacgtgctcaaggctagcgacgcggccaacgcccgccgcgtcgtggtggtgtcgtcggtcggcgcggtgatcatgaaccccaagatccccgacggcgccgtcgtcaacgaagactgctggtccgacgaggactactgcaggaccaccgagaattggtactgcctttccaagacgctggccgagcgcgaggcgctggcgtacggcgagaaggccggggcggcgatggacgtggtcaccgtctgcccgccgtgggtcctgggcccgcagctgcaaccgacggtgaacaccaccagcatgcgcctcgtggcctacctttgtactaggtcgtagtacctacctatgaggaacatggtggacgtgcgcgacgtcgtggaggcgctcgtcctggcgctcgaaacccccgaggcgtccggccggcggctcatctgcagcgcgcacgtgatgat

SEQ ID NO: 41413 - DNA, 709 bp, Setaria italica
  Peptide Sequence Number=SeqID_107387
ataatgacaatggaaggacgattatacattgcgacctgaagcctagtaatattctcctggatgatgatatgactgctcatttgggggatttcggcatttcaagtttccatattgattctgtgtccacatcagttgaggatctaaatatgactagttcaaaatgcattgcttccatcggcgtgaaggggaccatcggatatatagctccagaatatggtggaggtggccatgtatcaacatatggggatgtttatagttttgggattgtacttctagaaatgttaaccggaaaaaggcctacagatcctatgttcacgaatgggctcaacattgtcaacttcgtcgagagaagccttccagatcagatattcgatattgttgatgctccagtccagggagaatgtgagacctttgctcaaaaaggtccctagtagaaaacagagtctcacgttgcttgctgactctgctacagttagcactttcttgtacgttccaatcgccaagagaaagggccaacatgagagaagtagccagcaaacttcgttcgatcaagacgtcacatgctggcgcgaaaaaattctgaagatgctgaacagtgattactgaaatcaacacgtacgggcatgcccctcaatattttaatgagtaaaaccctgttttgctctgctacagttgtctcggagattaagaaggaataattatgttatga

SEQ ID NO: 41414 - DNA, 463 bp, Setaria italica
  Peptide Sequence Number=SeqID_107388
ggggagagaagggggagtggcctggtagtagtgtagtgggctagtgcttgtggaggcggagcagagagctgggctgggagagcgagcagagcaagcaaagcgagggcgagcgagcgagaggcgaagcgaattgattgcgcccaccaccgcaccacgtcttctccacctccgtccgacccgtcctcgccaagccaccatcattgccgccaccgcgccgcccgcgggagcccagctgcgcattcttaactgttcctcctccccttggcttctcggcgaagcgttgcggttgcgggtactggagtggagagcagagcaccggtacgtgtgctgtgctgccacaggggaggggggaaggaagcggcaccacccaccaccacctccattaaaggcgctcacgcgccgcctccacgagaaagcgaggcgagggagggcgagggcgtacgccacctgagctcactcgccg

SEQ ID NO: 41415 - DNA, 462 bp, Setaria italica
  Peptide Sequence Number=SeqID_107389
atttccgaggaatctcgatatatttagttgctcaacattgaactctagccagaaacattcggcagcttctcctccgctttttcaagtcatgctgcattctggcctagatgtgactaggaggctagaacaccattggcaatctctgcccctcatccaggtgaagcacattttcaggctaccatgacaactggaacccaagtattgtctgaaacttgcagcaaacgttcaaacatcatggaaaccacgcttattcttctagctcctcgagatctccactggacaaaaacatgtgcaatacaggcccttaaagaacctggattgacaaccatccacgctggcattcgtccatcacacatcagcgtatcagtcactgtcccaactttcgtcggtatttttcttcgttttaccaatactgtcaccgtgtttaaagtcgtcattgctgcctcgtcgctactgctgtgg

SEQ ID NO: 41416 - DNA, 254 bp, Setaria italica
  Peptide Sequence Number=SeqID_107390
gaagtgtaagctggcaggttgaggtggtagaagcaggtttgcgaggtggggagatggtcgcgggaactggaggccctaaatatgaacagcctgcaatcgagccccaagaaaccatctgacggcaaatgcttcaccgaggtccagaagaagagcagcctcctttgctgttcaaccgtcatgctttccacaaccttccagaaccagttgacctggccatcattttctttgtatccacggtggtgagtatgagctct

SEQ ID NO: 41417 - DNA, 611 bp, Setaria italica
  Peptide Sequence Number=SeqID_107391
taaactatctcagattttcccagctcgttcttgaagtcagcagatccagcaagaatgaggcccacgatgtttggctggttggtggctggattgatgaagtactgtgttgcaagctcagcaactttgcgcaggtaattgtgtcgcctctccatgcgcagacgggcaaagcggactgcagattgcccacctcgcccatgcttctttgggagatccacactaaacttgtaaagaacctccctgctgttgccactcagcgtgccatacagtgtcccattaccatccataactatgaaaccaaatttgtcatcagatgccagaagctcattcagtgcctcagtgtggaacttgttgtcgcagagatacagggaagcattaatgggcctaaatggctcgaagtcaaaggtgaccttcttctctttgccatcatcagtgacaatggtaccagtatagagcaccaaaccattggggggaactcgattgtaaagcttcaacctctgttgagctgaggttatggcagccaacacagactgacggttgacttcttgtcttcttttattgttttgtaggtccgtttcctattacttcttatttctaccctaactatctttagt

SEQ ID NO: 41418 - DNA, 471 bp, Setaria italica
  misc_feature (456)..(471): n is a, c, g, or t
  Peptide Sequence Number=SeqID_107392
cggccatcgtcgggaacgcggcgccctcggcggcatgctgcgcgaagctcagggcgcacccggcgagctgcttctgccagtacaagaaggatcccaacatgaagcgctacgtcaactcccccaacggcaagaaggtcttcgccgcctgcaaggtgccgctgcccaggtgctgagcgccccggccgatcgatcgagctcgtcctcggcttcgtgcaagtacaccgatagcatggtttgctgttgctctctgctactaataaaagagtgacctgcttacttgagaataaactgagacgtagtactgcttgggtactttacagtgtgagttctgctctgcagactgccagacttgatgtatcgtagtatctgaatacttgctatatatgcaataatgtatgagcttctatgaagcaaatgctgcatgaataaaagtgtgatacaagattaaaaatcctnnnnnnnnnnnnnnnn

SEQ ID NO: 41419 - DNA, 1569 bp, Setaria italica
  Peptide Sequence Number=SeqID_107393
gggcatctcgctcatcgtaagtggtgctcaaactacataaatgttttaagcatgacattcaatcactagtttgacgcttccgagtatcaagatgggggaacatccgaacaccactatgaaacatgcacgagaagtagaacatttatgtagtttgagattaagccagcgttacaattcacagattaagccggtgggtttctgtaactagcgagattaagccttgcactgcagtgttacaattcaaaggcaaggagttcctggaagaagctgttcaagtcaccgttttgtgtatcgaaggccatcaatttagtcacagcatcctggtactgcttgtcggttgcttctaatttctcgccgctcatgcgccttataggtctcttggaatggatgtcctccaaaatactgtcagctctctggacaacttcatttgggacaccagcaagccgtgcacaatgcagaccgaagcttaagtgcgcttgcccaggtacaagtcgataaaggaatgtgatatcgtcattacttgtctgtccatcaggattcagaacactcatggtatagcatttgatatgttcagactgtggtaggtagttcccggtgaagatctccgtcagatgtgttgacaaaaggacctttggagggaaatcacagtttgcaaaatgactgatagtccctccaagaagaccaatgccatcttcagttagagtgcccttaccgaattcatccaacaagcacagagatctcaatgttgcatgccttagcattgttccaacttgatgtaaatcaatcataaaagttgactgttcagttgtcatggatttgcttcccattgcacagaatatcctatctgtcaatccaacaatagcagaatcagcaggaacgaagcttccgatatgagcaagaaaaactatcaaggccacctgcttaatataaatgctttttcctgagtagttgggcccagttattatgtttattcttcctgcatcacggattttagtatcatttggaacaaaggtatcaacagtcatttcctgcaaagcatgtctgccattatgaatctcgagtattgaatcctcagttaagatgggcctcacataattgttttggcgagcaacaaccgctaatgataaaatacaatcaagttctgctgcaaagttcactgcttttgtcagttgaggtagaaactgaaggacgcgacacactaaatccctcatgattgctctctccatatcaagaattttatgataaatatctccaagaaggttgtccagttctcttgtcttttgggtatggtagtagaaccttctctcctcaccttcctctgaaaacgcaaatttgtaatctggcagtcctaccaacaaggcatcacggtaatcgttctcatcaaaaaagcacattaggtaccctatttggtgtacatagactattaatggaggtattctgaattcaaaaggtaaggatgcgttctcattagctgacacctgctccagaaagtcaggtaatccttcataaaccatcctcagctcatccaactcatcacataaccttcttcaccactgtctcatagccttt

SEQ ID NO: 41420 - DNA, 598 bp, Setaria italica
  Peptide Sequence Number=SeqID_107394
acattcatataggaggtgtgacttttttgagctatcatccacggatccatctgcactatttacaaatgaactcgacagttgatgtgatctatcatttgtctgtactcggtgcttggcataaaaccagaagaatctacatgaccagcattttcagcaggatacatttcacctcggctttcataaatatggctttcagtggacgttttctgatggggcagttcaagctcaaaagatgatatgttttgctcgttgttattcatattatgttggaaatcagaaatgttctgaaagctacagacagtggaggtatttgtgagagtggtctcagaatcaccagggtagggcaaaaaatttgaggtgatggatgggcttgtcagagaaccattgtcccaagcaacttgatgcttcatggtatttccacctgaaagttctgcatgattgaaagtcaagtcactgcactcttcattgagtccattatcactgttagatgctcccaaagcctctcgcatttgcataagagcatcccaagtcccatcccgtgtgtccgaaatgtgattattgctttgcaaaggagtattatatggacaacttgacaatt

SEQ ID NO: 41421 - DNA, 891 bp, Setaria italica
  Peptide Sequence Number=SeqID_107395
agaattagaaatttgatgcaacgatcaaattagaggaaagtggttctgctgcttgctttagcaatactgccgcatacatgcaaactggccccctggagtcagctatatctgacggaacatcttatcctgaacagtgtcaatctacttctcaaacgtgtggtttattttatgattcagcatcacagtggcaaaatttttcgagttctggattgcctttattgggtggtgacaaaagcattagtgagcccagttctataattaaccttgggggaaatggtaaaggtcatctgctgcccgcaagcgacaatgctttagtacagcaacaacagagtgttgctagtgatactagattgggaatgaccgacaatgttgttaattcctatctagagttcactacaagcttggatgaccaatcttgtccaataggggcttccatatgtcatgaagaaatggcagacaaagtcgtacaggcagcacaaccggaaatggttgtaaattgcccctttggggtacgtgcttcaaaccatgatggacattcagatatgcagctacccattacacagccttctcatgttcaagggactgccctgagtttgtccaaggaccccaacttatcatgtattgaaggaacagagtgtaagaatagtgagctaacagcaacatacaatactacccataatcacctggggcttaataaatttgaatgccatggcatcctccactccaagtcttttgaacaaaaagctcctgagaatataaaaataggatgattatagccagattgttggtcttcagcagagtaccattctctcagcaagcaaaccttctcactcagatgttttgcccgttggcaaatttgatgggaaggttgtttcacagcagaaaaagcgg

SEQ ID NO: 41422 - DNA, 847 bp, Setaria italica
  Peptide Sequence Number=SeqID_107396
tttttttttttttagtttttttttttacttttttttttaaacttttttttaacttttttaagttacgaagtttaactgatgctgcagcggcgccgtcatgtttcttgatagttgttgtgtaggggacgagccctgaattagaggtatcgcccccacgcctttgagtgtatccgtgcgaccttgcaagacgatggagaatatgccaccgctccaagtcctgtagctcagaagccagatcatgtaacgtggttgccttctcagcgcctgataagtaactttccagagcttgccaaaccgcgacttgaaggtttccagaactttcggtaggactttagagtcttccttcccagaagtgctggtctggttaagtagcgtgtcatcattcacaaaagatagaacggtgtcacatgcttcactgagtgctagttttgaaaggtggtatacagtgctttcaccagaattagtcacgtctgttgcaagcagcctagctggcacaacaggaagaatgtactgaatcaagctagtggtcagaataagtcttttccgagctcgagtcccaaagctgcttctttccattgttgctgcattcccattatctaccttctcaaccaatcttttagtagcacgagcccaatccaactccgatgttcttctatgacacatgctcccacacccaatgacttgtgcatgccatgctaaaagattttctgttgcccttttccgctttttctgctgtgaaacaaccttcccatcaaatttgccaacgggcaaaacatctgagtgagaaggtttgcttgctgagagaatggtactctgctgaagaccaacaatctggctataatcatcc

SEQ ID NO: 41423 - DNA, 383 bp, Setaria italica
  Peptide Sequence Number=SeqID_107397
tagttagtgtgtatatattaactcatctactaccatagttctttacatcctttcttttcatccatttttctgactactcttatgctgttcttaatataaggataatttgacattgacaccactagttaacctatcatagaggcatgcactgacatgctcaagtcgcaatagagacaggggaggtactgactcaagaaaaagtatttcaatggtcttgcagcaaatgaagtcccaaccaaaactcctatgaccactatgaatgatgactagtggaacctggttatgatgtggtctagccaacctcatagggtatgatagaacttcaacttgccactagcacatttgtatgtactgatatgttcctcttattcatatatcttaca

SEQ ID NO: 41424 - DNA, 570 bp, Setaria italica
  Peptide Sequence Number=SeqID_107398
gtgcctctgcgggtagtagccaccattgccagcgcgctcctgctggtattggccaacgttgccgccctgccgctgctgctggtagccgccattgctttggttcccaccttgcccccctgccatagccgtatccaccgttgcccctgccgtaatcgtatccaccgttgcccatgtacccattccggtggccggagtagtcgcccctcggagcgccgtcgcctcggccattgtaggcaccccgtggtgcaccattgccgttgtggccaccagcttcgttctgggctgctctgccattgacccggggctcagtgctgttgtcacggctgccaccctggaaaccaccattgaagcgagcacgagcagaagagccatcttcctgaacgtaaggtacacggcttggtggcctgaacccaaggtttggtgggggacaacaaccttcttaggtttgccatcctttgcagcagcatccttcccctcggcctgaaattcttccttattgctagcctccttaaccttgggctgagccttttctaccttgatgacagcttcctcatcatccagcttcttttt

SEQ ID NO: 41425 - DNA, 521 bp, Setaria italica
  Peptide Sequence Number=SeqID_107399
aaagaatcgctttccttcaatttttgcatatctgaagaagtcctgcacagagaaaagtttcttcttgtctgggtgtccatccggtgatgtcgatgatctgctgaccagctgcgggaccaactcgatgagctctgtcagcgaaactgcagatagtgttgagcgcagccgctccacattggacaatgggatgttaagcagccgtgcaggtaatttctgtgctgactgtggtgaaccactagcattgtccaccccctcactgtccccgattccagcactaccctcctcctggtcgctgaccggtgctggggcagggaccgcacccatgatgactgccgggggaggcggtgccccaacctttgcgaagcccaagttggaaaggaagccgtcgaaatctgccctctttccatcgattaccttcctgagaagctggaattgattcgactgtctggtagcgataccaaattcggcgcctttgtgcttgcaggcatcgaaggcgtcgaacgcaatgcagaggaggagct

SEQ ID NO: 41426 - DNA, 540 bp, Setaria italica
  misc_feature (458)..(540): n is a, c, g, or t
  Peptide Sequence Number=SeqID_107400
caactacacttcaaatgcaatcaaattcagcctctagtctgaaatggtaaaagtccttcacctgccaaaaagcactccaaccgtgcaacaaattctttgacaggtttaggaaggaaagacaggtagatgcaaaaactcatagtgatgctgggcagcaaggagcaacaactcagagggactcacgccctctgatcttcaaatacaatgagggtttcttgtctacagtgaaaagaccagtgagagttcgcgatcttctgctcagttaggcccgtttggtccttgcccttgtactgtaaagtcatcttttccccctttttaattatatccttctctgtatattgattgtaccatgtgtatcatgtaggatagtttgaactattgatggatcaaactaaaattacacttatatgtaatgtcacatgcacattttctttctataatttgggagacaagaaagnnnnnnnnnnnnnnnnnnnnnnnnnnnnnnnnnnnnnnnnnnnnnnnnnnnnnnnnnnnnnnnnnnnnnnnnnnnnnnnnnnn

SEQ ID NO: 41427 - DNA, 387 bp, Setaria italica
  Peptide Sequence Number=SeqID_107401
tactaacaataccaaccccagcaatggcgtccatcatcacaaagctcttgcgccatttagcactgttcctcttccttgtgcagctcaccgaccccgctctcgcctcaaagatcaagaaccacgcttctctcaagcctcagccatcgagcacctacatcgtccatgccaaccacctcgccaagccgccccacttcgccaccctcgagcactggtaccattccatggtggcagacaactcacctcacccctccaacaccagccgcatcctgtacacctatgacactgtgatgcagggcttcgccgtccagctcactggcgacgaggcccggcgccatgtcaggcgcccccggcgtcgacggcgtgtacgaggacgggctgttctccctc

SEQ ID NO: 41428 - DNA, 752 bp, Setaria italica
  Peptide Sequence Number=SeqID_107402
tacaaatttctaagtttcaatttggctgatttcttccgagctgatgcgctgcatattgattatagctgcaaaaggactgtaggcgattgataaaaacgatttgttacagctgcatcttaaaaggttgacaacacttgctgcatttctgcgaaacctgccagcacgtcgttgtttacttaattattaacgatgttctcgttgcgagacagttactacgttgtgtttgccgcttgggttagaacaaggtaactaaaccgatggaatcaaaggatcattctggagatagtctctttggtctgattcctttttctaacttatactgccagtgccagccgggaaatatttccggtgaacgctgatgcactgtggtctatggaagtcatgatttgtttctctgttgagatgattggtgtattgtggtatcatgccaaccgagaaatctcaacaccgccggattatgcagatgaatactgattggtcatacgctcaatttatatgcatttggattgttgtactacacagctctctttgtttttgttgtccacctaagcaagaaactagacattctttttgtcaattttgtagcagcaaaatgcctattactttatgactattgttgcaatttcctgatggaattctttgatctgtttcgacagcttggccgccctttgctgctgctgcctgttggaggcctgcttctgagttcttcgctatgcacaacttcctcgctgcgtgtgcttgatataatcaag

SEQ ID NO: 41429 - DNA, 790 bp, Setaria italica
  Peptide Sequence Number=SeqID_107403
ctatataataactaaccgccggtccgcgtccgcgcccgcccacacccagcgccgcgccgccctcaacaccactcaccacccaaaccctgcctccgcctcccgccgccgcgatgagctactacggccagcagcagccgcccgtcggcgtgcctccgccgcaagggtaccccgggaaggacgggtacccgccggcgggctacccgcccgcgggctacccaccgccggcgcagggctacccaccgcagggctacccgccgcagcaggggtatccaccgcagcaggggtacccgcagcagggctacccgccgccctacgcgcagccgccgccgccgcagcggccgcagggcagcggagggccctccttcatggagggatgcttggccgccctttgctgctgctgcctgttggaggcctgcttctgagttcttcgctatgcacaacttcctcgctgcgtgtgcttgatataatcaagattggctcgttaagctgcttcctatctaagaagattacagcagcgcctatgcaaatcgcatatctctggtcctcttatcgatctgtttctgtgttgagatgattggtgtacttagtggtatgatgaagtttatgtcaccagtggaatccttggtctagctagcattgtgagataatttaatctctggagtcatcgcattttgctccaaggcattgtcttgcatgtgggatgtgtctataatcttttatttttcatcactgaaaagtacgctcctctgtttttctcctttttttcccttctatttcttgtctttctaag

SEQ ID NO: 41430 - DNA, 724 bp, Setaria italica
  Peptide Sequence Number=SeqID_107404
cgggagcgagctccccaacggcggcgtggtggtggagctcccccggtgggtgcagtcggtggtgcgggaggagtggacctcggaggtgttcgacctggagctgatgaaggacaagggcatcgaggaggagatggtggcgatgctgcagctggcgctgagctgcgcggtggcggcgcccgagcagcggcccaagatcgggtacgtggtgaagatgatcgacgaggtccgcgcgtgcggggaggcgtcgccgtcgcaggacgagtccgtggacgagtcctcgggcgtctccgactcgcccgccgtgtcggagggcggcgcgctcagccagtgagcgagggggcgcgctcggggtggtccttcggatttgccttgtgatgcgtgcctttggtttactgcctgcatttgttttcttctgatggttttggggtgaggaggtggattggcatgggccgttggatctggtgatgggcttgtatatgtggctctgattctgatcgttttgctgttgtttttttaactagcagtagatccctagaggagctgcagcgccggcttgtgtgaaaaaaagagagaggagggtgtgattgtgtgagtggatcatgacactgtcttttggtgcatctttcgctgtgacttttggcactagttaccatatgtccttgaaggagtagctgcatgcctgcatcagtgcagtgattcatggaaaacaaaaaaaaaaaaaaaa

SEQ ID NO: 41431 - DNA, 350 bp, Setaria italica
  Peptide Sequence Number=SeqID_107405
tagctggcacttccagtaccctattatgttcagcttgtggtatttcaggtccataaacatgggttcctggtacctgcagaacagatgacatttcagctaggtgagcagatgaaagaaggttaaaatgtccctgaagttcacagcatctgggttatcatactgtgatcatacctgaggtaccactgtttgcctgccatctgggtgaatgaagtgattacttgcctctctgaggtgaacattttgcatctggttcgagacactcagtgaattcattggattcatagctggagatgagttcagagggatgtgatttggcaggggaaggttcatgtatggtactactcttggca

SEQ ID NO: 41432 - DNA, 504 bp, Setaria italica
  Peptide Sequence Number=SeqID_107406
gttcagtcttgttgtcagtgtggtagtcagctctgtcaacgcgcgcatcttttctattgatccggtctcttcttctcctctctgagagattatgaacttcagctgcgcgagtcctgcgcttcgtcccgcatcgccttgatgatttggtttcctcagttgcctcacactcggcatcctgcaatttcctcatcaattctattctattcaagcatccatacttcctagttcttacccaatacaggttacaaccaaggaacatgaacaaattagaccaagaaacacctcactctgactatccgagtcgtctctacacctccccatctttttctggacacggccgctgtcactcggcagcccggatcctccatagttgcttccggacccgccggatgacgatgtgccggcgccggcgccgtcgtgcgcgccggcaccgcgcggcacctccgactgcaatgccgcgtcctttcccctgttgatccctgccggcgtcatgggcacctggtt

SEQ ID NO: 41433 - DNA, 1880 bp, Setaria italica
  misc_feature (1)..(111): n is a, c, g, or t
  Peptide Sequence Number=SeqID_107407
nnnnnnnnnnnnnnnnnnnnnnnnnnnnnnnnnnnnnnnnnnnnnnnnnnnnnnnnnnnnnnnnnnnnnnnnnnnnnnnnnnnnnnnnnnnnnnnnnnnnnnnnnnnnnnntttttttaggtttcaatgaggacagcttcgtatatactcatccattcactcttgtgtacactgtaccgtgcaacggtatgcagccatgttccacagataaaatatggaagctagacagtttcctttgttacctatactagagtctagactcctaataactcttaacagtttcgatgtcaaagaatggctgcatacactgcttacacttctgtacatatatgcagtgatatacagctcgagttatctatgcatcatcagttttatcaacgcaacaccttacaagatttggtcattctaaactccaccataagtatgcggttgtcctgcactagaggttggcacgacagtactagctggcacttccagtaccctattatgttcagcttgtggtatttcaggtccataaacatgggttcctggtacctgaggtaccactgtttgcctgccatctgggtgaatgaagtgattacttgcctctctgaggtgaacattttgcatctggttcgagacactcagtgaattcattggattcatagctggagatgagttcagagggatgtgatttggcaggggaaggttcatgtatggtactactcttggcatctgatttagtccttgtgctgcagggatgcaagctgaagtcatgcctagagccattggtggcatgaattggtgagcaccaggaaacatcatcggtgccatcccagaagtcatccacatgatctgaacttgcatttggagggacttcagatactcaattgtctcatctaatatcgacgctttgtcagtcttgttgcagtgtggtatcagctcttgcaacgcgcgcatcttttcattgatccggtctcttcttctcctctctgagagattatgaacttcagctgcgcgagtcctgcgcttcgtcccgcatcgccttgatgatttggtttcctcagttgcctcacactcggcatcctcactctgactatccgagtcgtctctacacctccccatctttttctggacacggccgctgtcactcggcagcccggatcctccatagttgcttccggacccgccggatgacgatgtgccggcgccggcgccgtcgtgcgcgccggcaccgcgcggcacctccgactgcaatgccgcgtcctttcccctgttgatccctgccggcgtcatgggcacctggttgctgccgcagaaggtcgagcagatgtcgccggcccagctcgactcgacgccgctgctccccaccggcggccttgccgggtgcgccagctccggtggcggcggcggcggctgcgagctagggcccgggagcgtgcccccgtgatgcggggcggcgtcggcgatggtgctgtaccagagctgcgtgtacaggtccttctccagcgagtcgtcgagggtgtccgggaaccacgcggcggtctcctcgtcggtgagaccgctgctgtccaggcgttcggagggcgccggccgctggtgcgcctggggctgcgcgacgacgcccccgttgtgccacaggagctccacgaggtcgtcgtccgtgacgatgggcttcctctgattcgccgccggtctcgcattaccatccatgtcgtcacgattctagcccctgaggagaacgtttcctgaatactgctaggctcgagcagccgtgcgcgaactgcgaagtcgtcttcaggtcttctaccggcgtcttctactacctcccgcctccgcgcaaacaggagcagccgcaggaagctttatgaggtagctctgtactagcacacaagtaggca

SEQ ID NO: 41434 - DNA, 453 bp, Setaria italica
  Peptide Sequence Number=SeqID_107408
aggtaatagatgtatagaaatttctttttcctttttaattgcatttaccttaaatcttagggagacacaaatttaaaggggacatataaaatccagtcatatcttaatgggacactttgagtctcagaaacatgcaaaaatacaaacaagttgcatactaatcgcgttaggggtgaactcatggctgtgtgtgtataagtgacaaaatttttttgtgtgtggttctagttgtggacgtcaatataaagcttaccttatttttttattctagctcagccatagtgttatatatcatacggtaaggatgtgtaaatgacacttgtccctaaaagttacatgctggtatgggtagaaacaaaataggttaagaaagtaccaatacatgtattttatcatggctggcgatctagatacaactcctagatgagatatacatttacatatagtaaatct

SEQ ID NO: 41435 - DNA, 440 bp, Setaria italica
  Peptide Sequence Number=SeqID_107409
catgataatatattaacaaccatggtaacctcacttttgttaaagtttgttttcaaacctgacatttttttcatatatatatagcagtaatttcatgttttgagcactgttcatatcgtcttgcaagcatagtatcatatcatcagcatactgaagaatagttactccattgggaatatattctggaaaaagtcagtattgttagaaaaagatactctgaattttgaatactgattgatcctaataaagcacctttgatccaggaaggtctgggagcccttacccttgggtttggatttttcatctagtttttttcttgcttaacttcctggatctcttactctcaacaacttgaaaaccctcattatctgaggagtcagacttccactctactaattttggtccgccttcccaaagggggagcacctcagacccaatcc

SEQ ID NO: 41436 - DNA, 275 bp, Setaria italica
  Peptide Sequence Number=SeqID_107410
tgcgtaggcgcccagcggcggtgggtgcctggccggcggcagaaacggccgggagcaggcggctgggggaggaggagtaggcggtgggcggcagcgctcgcggggtcgggacgggaagctacagcggcgcttgtgtgcctgagacgggtggcggcggtagcgttcgcttggccgggaccgaaggcaatggcgacgcagcgcgccggccgggatgggaagccgtggtggtggagatactcgtgcgacgacgaatcgggacggcgaggccggagtgg

SEQ ID NO: 41437 - DNA, 386 bp, Setaria italica
  Peptide Sequence Number=SeqID_107411
tccctctcaatccactgcacccacgccaatcgcccctctcgatggcagagcttgcccgatcggccttgcacgaggtgaggcaggagcgcgccagtgcgaggcgaggcggggcgcggcaggaggcaggggcgcctagcgttggttcgctggcacgggtgaagatagggcgaggtcgctgggccctagtgcagccggaggcaggggcggtagacgcttggtcgccggtgcggggtggagccagggtgtcgtcgggtcctgggcgcaaccgaacgctgggtcacaggtgcggggtggagctggggtgccgcaacgctagggtggagcagcagcgcatggttggcggagcaacgatgccgagcgagaggagatgtccggcacaccaagag

SEQ ID NO: 41438 - DNA, 274 bp, Setaria italica
  misc_feature (231)..(274): n is a, c, g, or t
  Peptide Sequence Number=SeqID_107412
gctgcgctgctcgatggcatgacgaacgcactgcacgtagatacagatcgagttcactggggcccgcccttgacggccgggcgctttctttgggccagcacatactacgtagttacaccgtgtccggccagccggcgtcggagaagatgcatgctgagtgtttactgctgccatttgtttgttcggcctgatcaacttgcatgcacatatgctgctgttcttaaacttttnnnnnnnnnnnnnnnnnnnnnnnnnnnnnnnnnnnnnnnnnnnn

SEQ ID NO: 41439 - DNA, 636 bp, Setaria italica
  misc_feature (614)..(636): n is a, c, g, or t
  Peptide Sequence Number=SeqID_107413
tgttaggttcttcttcaagcccataaaccgaagccaatccacaagcaagtttgcttggtttttttgccaaaagaaatgggcaaaggaaagaagccggtggatccggtgctcagtgaggaagagaggaggatgctcgaggccatgcgtgaatttgagatcattactagagagtacttggctctgatggagaggatggccgagtggttggaggatcttgaaggggacgtgggctgtgcctcggccctgcaagctagggctacagagctttcagataccatgaggaggttcctgcgacagctagactgggacgacgacgaggatgccagcaccagcgggagtagtggcctgacggacctggagcccgaggatacccccgccgatcccaagcctgatgatgaatcttcttcatcctccccttgagagatcgcgcatgatgatgcgagaactgtaagcgtctggaacatgtggaataagcttgggagcgttctgtcgtcaagcgctgtcaaactctcttttcagcttcctgtgtagctgaaatcggcgatgttttcttttctctggaaattaaataaaatgggggatcgaaccgtggtcttccgcaaaaaaatcttacnnnnnnnnnnnnnnnnnnnnnnn

SEQ ID NO: 41440 - DNA, 404 bp, Setaria italica
  Peptide Sequence Number=SeqID_107414
ggtatagcaagtgagactctccgcatccagagcacagggctagccatggctcgtgtcgtcggcatggcggccgtgctgattctcgtagtgcagctggcctcctcgtaccccatcctggtccatgccgccgatgccgccggcgttcttggtcggaaggccggcgtcatcgacggcaaagctgccacggagaacacgccggctgggatggggaggtacgccgtcatcttcgacgccggcagcacggggagccgggtgtacgtcttcaggttcgacaggcagatggaccttgcccgcatcggcgacgatatcgagttcttcgccaaggtgaagcccgggctgagctcgtatgctggacaacccaaggagctgcaaactccatactacctcttcttgataaggccaag

SEQ ID NO: 41441 - DNA, 678 bp, Setaria italica
  Peptide Sequence Number=SeqID_107415
aagacggttggcggttcgtgaacacggacgagatcgtgcgcggcgcggagaaggtggggttcgaggtggtggtgtcggagggggagcacgaggtggcgccgttcgcggagatcgccaacagctgcgacgccatcatgggcgtgcacggcgccgggctgaccaacatggtgttcgtgccgggcggcggggtggtgatccaggtggtgccgctgggcgggctggagttcgtggcgggctacttccgggggccctccagggacatggggctccggtacctcgagtaccggatcacgccggaggagagcacgctgatcaaccagtacccgcgtgaccacgtcatcttcaccgacccggagggcgtcaagaaaaaggggtgggagtccctcaagggcgcctacctcgacaagcaggacgtgcggctggacatgaagaggttccggccgacgctgaagaaggccatcgcgcacctcaagaaggccaaggctgacggcggcagcaactaagctgccatcgccgatcgccgtgcatgtgttcatccatcctctttgttttctctctctctttttttggattattatgtcggtgtacgtagcgagcacaaatcgaccgaccaaatgtatgatatggcaggagaaaaaattagagcagcttataatcttatattttttcaaacaaaaa

SEQ ID NO: 41442 - DNA, 316 bp, Setaria italica
  Peptide Sequence Number=SeqID_107416
aacccacccaatggcgggcgcgacgacgatgagcagcagcaggccccggttgtcgtcgcgggggcagccgcggcggccgccgcgacgacgatgagcaggttcagcgccggctgcaggatgttgtagagcacccacccgatggcgggcgccaccacgaacagcagcagctggccccggttgtcgctgcccgcgtccgccgccgccacgtcggcgacccgctgcgccgccagcgcgctctgcttcttgggcgccaggctgcgtagagagacgccgccgctggtggacggcggcagcgccgaccgcgccacgatcttgg

SEQ ID NO: 41443 - DNA, 643 bp, Setaria italica
  Peptide Sequence Number=SeqID_107417
gcggcgaggtcctggacagcggccgaggcttcgggcgcgcacgccatccccgcggcggtggcggcggcgccgaggcccacgccggcgatgaccgcctggctgcgcatgcggttgagctggttcagcgccggctgcaggatgttgtagagcacccacccgatggcgggcgccaccacgaacagcagcagctggccccggttgtcgctgcccgcgtccgccgccgccacgtcggcgacccgctgcgccgccagcgccgcgtccgacgacgccagcgcgtggaagaaggcgcccgccatcgccgccgccgcgggtgacgacgacaccgccagcgcgctctgcttcttgggcgccaggctgcgtagagagacgccgccgctggtggacggcggcagcgccgaccgcgccacgatcttggcgggcttgagcaaggccatcgtggctatggtcgccatggaagcttctacctctgctttttgctgggcgagttgttgcgagggcagcaacggcaggcgaaggcacgacgatgcttggcgagctcggcgttatctgcgatggccagagcaagctccatctccggcaggaggctcgccgtcaggccggcgccccgcgccgcctgccgctccgcccgcaggcccccgcgccc

SEQ ID NO: 41444 - DNA, 382 bp, Setaria italica
  Peptide Sequence Number=SeqID_107418
cgtccgccgcgacggcgacgccacgtccgcagccggggaggagggcccgttcgactcggtggccggcgaggacgccgccagcagcagcgtgtacggcaacctcgaggagctcttcgtggccaaccccagggccatcctgccgtgcttcgtcgtcatctaccgtgtgcttgaatgaatcttaattgtgtgaaccacaccacattcacatatgcttcttaattactactagttcatatacattttgtactaaagaagaagaatgtagaccaagatcatgtctgttaatctttttttttgtcaaaaactacttcttttatatgccccatataattatgtttgtaagatttcattttgtagttgcatcaatatatgtatatgtata

SEQ ID NO: 41445 - DNA, 325 bp, Setaria italica
  Peptide Sequence Number=SeqID_107419
ttggaattgtaatgtgggaaattctcacgggtgaagatccatatgatggcatgcgctgatggtgatatgcagggggtattttgagcaacacactgcggccaccagtgccagcttcatgtaacccagaatggaggaaactgatggagcagtgctggtcaactgagcccgagagacgacctgccttcactgaagtagcatcccgtcttcgtgccatcctagaagcaagctagaacgaatctctataaatgaatttgcatgaataaccactccccatccatcagaacactttacctgtcaaagcatgatgtagccatgagctgaaaat

SEQ ID NO: 41446 - DNA, 440 bp, Setaria italica
  misc_feature (324)..(324): n is a, c, g, or t
  Peptide Sequence Number=SeqID_107420
tcgtccttcctacctaccaccaccatggtcatcgccgccgccaccaacaaggcgagctccggcgggttcgaggcggccgcggaggccggcggctgcgactgcaacacctgcaagtgcggcaccagctgcggctgctcctgctgcagctgcaactgaggcggcggcgccatggagcgcgaggaggaaggagaagcgccccccagcagcatactaatatagtagcagcgtctactaaataagatcttgccaactgcgccatccatcatcatctgcagcgtcgtgtcgtgtcattcatggtcgcctgccgtgtctcagctggggttnctgaactgaacgtgcctatggtgatcgacgatgccgtcgtcgatcttgtgtgtcctcctgtgcatgccacctttaatatatgtatgtgtttcagcactagctgtgtgttcggtgac

SEQ ID NO: 41447 - DNA, 378 bp, Setaria italica
  Peptide Sequence Number=SeqID_107421
agagaagaaatctgaaagtcaagccatcctcatgagaaagagagtttctgatggggtcagcgtgctgaagaaaatgctatatcctgtgtcaggctattctgttctgtggaaaaacttgtacatgtgttgaggccgacgtcattatagaaagagaagcttgtcaatgtaatctgggagaaggtcgagctgcaaggacttgagagcaccaatactgaagccaaaaacaccagtatctggatgtccagttgaacttatgagctcattctggcagcaggtccgactctgaatctgatcttgctgagttctcctgatggatgcatcaagacttacgttatcatgagaagctcagccatggcgactgactgcgactgactgcga

SEQ ID NO: 41448 - DNA, 429 bp, Setaria italica
  Peptide Sequence Number=SeqID_107422
gccgggaagccgcccaagggcgtcaagaccaactggatcatgcacgagtacaggctcgccgacgtcgaccgctccgccgccgcgcgcaagaagaccaacaacaacgcgctcaggcgtgctcgagctgtccctttcgcgacagcccgtggctactttgcagacggacgggcgggcggctctagagacatgtaaagcagtaaagcgcgggcgggcatggcgtcacggctcacgcacgcggcgatagggacagccggccggcaaccgcggcggccgtcagccatcctgatcttatcgccgcccgcgcacgcgacaaactctgaccacacgcgccgaatccgacgtcacgtcacgtcgagctccgcgcgcggctccgatccaacgcctggatgactgggtgctgtgccgcatctacaactaagaagggtgtga

SEQ ID NO: 41449 - DNA, 392 bp, Setaria italica
  Peptide Sequence Number=SeqID_107423
ggtcgcgccctaaccgggcggcgggggccgggtactggaaggccaccggcgccgacaagccggtggggtcgccgcgccccgtcgccatcaagaaggcgctcgtcttctacgccgggaagccgcccaagggcgtcaagaccaactggatcatgcacgagtacaggctcgccgacgtcgaccgctccgccgccgcgcgcaagaagaccaacaacaacgcgctcagggtaaatcactgtccttacttacgtcttgctggcagcttgtcccttgcgtttatcgatctcccccaaccaaaagtaacaacactgaaactttcagttataaaatcattaaacataaaaatgatcttctttttgagcaatgttgcaatggaaatgtgtggagcaaatact

SEQ ID NO: 41450 - DNA, 417 bp, Setaria italica
  Peptide Sequence Number=SeqID_107424
gccggtgggggtcgccgcgccccgtcgccatcaagaaggcgctcgtcttctacgccgggaagccgcccaagggcgtcaagaccaactggatcatgcacgagtacaggctcgccgacgtcgaccgctccgccgccgcgcgcaagaagaccaacaacaacgcgctcaggctggatgactgggtgctgtgccgcatctacaacaagaagggtgtgatcgagcggtacgacacggtggacgacgacgaggtcgccgccgcggccgccgacgacgtcaagccggccgcggccaagaacccgcgcggggcggcggcgccgatgaaggtggagatggccgactacggcgggtactacgacgactacgacctcgagacgccctccgcggggatgctctgcttcgatcgccccagcgaggccgcgg

SEQ ID NO: 41451 - DNA, 492 bp, Setaria italica
  misc_feature (28)..(28): n is a, c, g, or t
  Peptide Sequence Number=SeqID_107425
cggcacagccgcaggagctgcagctgcncccggatccggttcacccgacggacgaggagctggtgacgcactacctctgccggcgctgcgccggggctgcccatctctgtgcccatcatcgccgagatcgacctctacaaggatggcgctgtacggcgagaaggagtggtacttcttctccccgcgggaccgcaagtaccccaacgggtcgcgccctaaccgggcggcgggggccgggtactggaaggccaccggcgccgacaagccggtggggtcgccgcgccccgtcgccatcaagaaggcgctcgtcttctacgccgggaagccgcccaagggcgtcaagaccaactggatcatgcacgagtacaggctcgccgacgtcgaccgctccgccgccgcgcgcaagaagaccaacaacaacgcgctcagggtaaatcactgtccttacttacgtcttgctggcagcttgtcccttgcgtttatcgatctccc

SEQ ID NO: 41452 - DNA, 722 bp, Setaria italica
  misc_feature (28)..(28): n is a, c, g, or t
  Peptide Sequence Number=SeqID_107426
cggcggcggtcaggacctgcagctgccnccggggttccggttccacccaacggacgaggagctggtgacgcactacctctgccgccgctgcgccgggctgcccatcgccgtccccatcatcgccgagatcgacctctacaagttcgacccatggcagctcccgagtacgttcatcctcctcgatctcgcgcatactcatacacgagcagtgataatttccaccgatctggtcctcctctgatggatcgtgtgattggtgtgcagggatggcgctgtacggcgagaaggagtggtacttcttctcccctcgggaccgcaagtacccgaacgggtcgaggccgaaccgcgccgccgggacggggtactggaaggccaccggcgccgacaagccggtgggcacgcccaagcccctcgccatcaagaaggcgctcgtcttctcgcccttgggcgcccccaagggcgagaagaccaactggatcatgcacgagtaccgcctcgccgacgtcgaccgctccgcccgcaagaagaacagccaggaggctagatgattgggtgttgtgccgaatctacaacaagaagggcgcggcggagaagccgtcgtccggctccagcgacggggccagggcgagcggcagccacggtgtgcaggcgcccattgccatgggctcgccgccggagcagaagccatccgtgctgccgccccccgcgccggggccgggtac

SEQ ID NO: 41453 - DNA, 665 bp, Setaria italica
  Peptide Sequence Number=SeqID_107427
ccagcggccaaaacaccctccgagctctgcagcgacctgctcttgcgatcgacgactgcttcgttccgatcccctcaattaactcgaatccggcgaaactgatggacttcggtggcgcgctgcagctgccgccggggttccggttccaccccaccgacgacgagctggtgaactactacctcctccgcaagtgcggcggcctgcccctcgccgcccccgtcatcgccgaggtcgacctctacaagttcgacccatggaacctcccagagaaggcgatgggaggggagaaggagtggtacttcttctcgccgcgggaccgcaagtaccccaacgggtcgcgccctaaccgggcggcgggggccgggtactggaaggccaccggcgccgacaagccggtgggctcgccgaagcccgtggccatcaagaaggcgctcgtcttctacgccgggaagccgcccaagggcgtcaagaccaactggatcatgcacgagtacaggctcgccgacgtcgaccgctccgccgccgcgcgcaagaagaacaacaacctcaggctggatgactgggtgctgtgccgaatctacaacaagaagggcgcggcggagaagccgtcgtccggctccagcgacggggccagggcgagcggcagccacggtgtgcaggcgccc

SEQ ID NO: 41454 - DNA, 3557 bp, Setaria italica
  Peptide Sequence Number=SeqID_107428
gttccgatcccctcaattaactctcttcctaccattagcagaactgcagaagaagggaagaacagcagagagagcagcagtagcaggctagcagcagcgagcgaatcgatcgatcgagagggagacacgatgagcggcggcggtcaggacctgcagctgccgccggggttccggttccacccaacggacgaggagctggtgacgcactacctctgccgccgctgcgccgggctgcccatcgccgtccccatcatcgccgagatcgacctctacaagttcgacccatggcagctcccgaggatggcgctgtacggcgagaaggagtggtacttcttctcccctcgggaccgcaagtacccgaacgggtcgaggccgaaccgcgccgccgggacggggtactggaaggccaccggcgccgacaagccggtgggcacgcccaagcccctcgccatcaagaaggcgctcgtcttctacgccggcaagggcgcccaagggcgagaagaccaactggatcatgcacgagtaccgcctcgccgacgtcgaccgctccgcccgcaagaagaacagcctcaggttggatgactgggtcctgtgccgcatctacaacaagaagggcgggctggagaagccgccggtggccgccggcgaccgcaagccagcgctgttggcccccgcgtcggcgggttccccgccggagcagaagccgttcgtggctgcgccgggcggtctccccccggcgttcgcggacctggcggcgtactacgaccggccgtcggactcgatgccgcggctgcacgcggactcgagctgctcggagcaggtgctgtcgccggagcagcagttcgcggggtgcgaccgggaggtgcagagccagcccaagatcagcgagtgggagcgcaccttcgcctccgaccccgtgaacccggccggctcattgctcgaccccgtcggccacggcggcgacggcatcggcggcgacccgctgctgcaggacatcctcatgtactggggcaagccgttctagacgtgacgcgcgcgtaaagaccgaggaaacggcagagcattatgcaaccccatcctcggcggcggttggctagctgtcgtcggcactcggcagcgcaaccgcgcggtgtgggcttgactcaggcgagccgccatagttgactactaagagctctaaaggtggaatggattgataatgataaaattaaagaagaacaagaagaagatgggaggagtgcgatgaggacaacgacgattcgaggcggcaatgagacccgtgtggccccgccgggagctagggagatcgccgttgcattggtggtcgatcgtgcgtgtggcaatgtgtgtgtacttgtacatatacatacagttcatgattgattcggtgcggggttcctgttccttcattggttaattaataattaattatacataaaagggcttgtagtgtacgggagtaatgggactagtccagaggtagtgtgctagtgtaagccattcgtcagctgcaaggatcattgaagaaagaaaagaagggagcgttcggttcctttgcagtcacgttagtttaaatcactgtccttacttacgtcttgctggcagcttgtcccttgcgtttatcgatctcccccaacaaaaagtaacaacactgaaactttcagttataaaatcattaaacataaaaatgatcttctttttgagcaatgttgcaatggaaatgtgtggagcaaatactgcatttgttaggttaatttgcaggtaattaataattaagagtattattattaagaaaaggtaggggtccaaattgtccatttgcagcgtgctcgagctgtccctttcgcgacagcccgtggctactttgcagacggacgggcgggcggctctagagacatgtaaagcagtaaagcgcgggcgggcatggcgtcacggctcacgcacgcggcgatagggacagccggccggcaaccgcggcggccgtcagccatcctgatcttatcgccgcccgcgcacgcgcaccactctgaccacacgcgccgaatccgacgtcacgtcacgtcgagctccgcgcgcggctccgatccaacgcgtagtaaaagagatcaaccagcttcgtgcaagatttcgtctttagcaccacctggactatgccgctgacctttttgttcctttggattttgcagctggatgactgggtgctgtgccgcatctacaacaagaagggtgtgatcgagcggtacgacacggtggacgacgacgaggtcgccgccgcggccgccgacgacgtcaagccggccgcggccaagaacccgcgcggggcggcggcgccgatgaaggtggagatggccgactacggcgggtactacgacgactacgacctcgagacgccctccgcggggatgctctgcttcgatcgccccagcgaggccgcggccatggtgcccgcgcccgcgcccgcgccggcggcgctgtcgccgacggagcccgatccggaccgcgactccagctccgtgccgtggacgatgcacacggacaactccagcagcgggtccgagcacgtgctgtcgccgtcgccggacctccccgaccgcgaccacgccgagagccagcccggcggcggggccgggtggtggcccggcggcgactggggcggcgcggcggccgacgacgggttcgtggtcatggacgactgcggcagcgcgctcttcggtccgccgtcgccggcgctcttcgcacgcgtcgacgccgccgcgttcggggacatgttcgcgtacctgcagaggccgccgttctgaacttctgatcagggaacgtgaagcgtgcgccgccatgcgtgctccaggccactgaccatggtcgatgtccaggtcgtctagctcggtatctgcaggtgaaatcacgagccggtctaggtgtagcgcagcgaagccgagatcaccatggcactcccagaggcagttcaaaggagaattgggtggatcatctgcccgatcgatcagcggtcgggtgtccagttcaccattcagatgatcagatcgacagttgcacacgatctctgcacctgatcgcgccattgctcttgggaagctgccacatggaaatggtgccaaggatggtagatgactggtgatcatcgctgatagagagctatgctagccgtcggatcgggtctcgattaatctaacccgttggttttttgtcgtgttaattagtagtagctgacaacttgacatgcctagtgaattcagaaactaataagcaacaaaaatcataaagagagatagagaaaagaatttggaaatacaggttttggattcagaggctgttgatggtatcatgtatgtaatctagtgtagcctaactgtacttagaattgggttcaggttggtggcaaacaggcagcgctgtaggtttttgtctagcgtataattgcaagtgtcatgtgctagagtcgctttcagtgggtctctttctcgtgaccatgcacggaagccaaatttttgtaacgcaattatcggtaataaagtgtcgtaagctgtaaaaaaaaaaaaaaa

SEQ ID NO: 41455 - DNA, 712 bp, Setaria italica
  misc_feature (235)..(235): n is a, c, g, or t
  Peptide Sequence Number=SeqID_107429
ttggttaaactaaattgttgttaagttgacattgaacaaggcaattattttgttagactcagagtggctttaaaatggaattttattatgcaaattgtgctgcactgaccacgaaaggggtttagtaatgaaagaggtcaagtagttcatggtcgcatggattattatcaagcttaggttcttgtggcaggaaaatgcatgaattgtacaagcagaatagctgttgggaaaaagnttgtggactagacagaaatattgcccaaataaaaatcaaactgacgcaacatttctagcaattccgtgaacatataaaccttatgttccatgacggatcaacgatgataaccctggttgctgcagtcaggttcaggccttcaccacccactcttgcactgagcaaaaaaattttaggagcatcttcaacttgagaactaaatttcttaatcttttgatctctttctgtcctctccatggatccatcaattcgaatagtatcaccttcttttcctatagctttaagtgctatctctattctatcgagcatagaaatgaattgtgagaagataagtatcttcaggttcttgtttttcctcataccctgcaacaaaaggtaagagtctatgtttcgatgcaatgaaagaaagcaaactaattgtttagaggaaataccagatcctttttttctctagccttctcttcctcaaatagttca

SEQ ID NO: 41456 - DNA, 626 bp, Setaria italica
  Peptide Sequence Number=SeqID_107430
aatagtactagaaacaatccattcagtacatatccagatatcaaagtactccacgaaatgacgtccctctcaggcatgtcatcaaacagctgccgtgcttcatgcattaggccccttctcaatacaccagccagaagggcattccacgatgctaagtgtgacttgtctgacaatctgaattgcatctgggcaaggccaataagaccacagcacccatagaaattgatcagggtcgcttgcacaaacgcatgggcatcaaaaccgttcttcagaataacactgtgcagttgctggccttctgtgatagcagagtactgagcacatgccttcaccaaatcaacaagcagtgtctcgttgccatttgtgtctacctcacccaccactatgagcatatgctttcagtgcatccaatatgagatctgcacggatataaccatcaatcattgtatgccaagatacctcatcacgctcagggattctccagaacacatctgcagccatttccatcatccctaccttcacatatccattgagcattgcattccaagtgactgtgttcctatccagcatttcatcgaacacagcatgggcacgacggagttctgatacccctgcataggcattga

SEQ ID NO: 41457 - DNA, 452 bp, Setaria italica
  Peptide Sequence Number=SeqID_107431
taagacttgtcgtctgtgcaagaagagaacaataaaagagcttcctacaaggactttattggtatcatccctttttccattaatgcttattctcttcgcatttgatttatcatactttattgtcatattatagttatggggttataagaacttcaagaaagcacatgtaacaccatgatgtgccagcaaggacataaacagtgggtggcaagttaagtttgcaaaatataaaccatctggatattgaaagtaattcaatttgttaaagatctaatgtacttgaaaactgtataaatttgactgtgaaactgttatatcctgccttaactcaaggacactctttatatcaccttttttgtcagcagacaatacaaaaatacttgtacgttcattgtaggagtaggacagctcatattttaatcttgctggtttgagagaaagtatggggaaac

SEQ ID NO: 41458 - DNA, 520 bp, Setaria italica
  misc_feature (496)..(496): n is a, c, g, or t
  Peptide Sequence Number=SeqID_107432
aacccaaagctttggatcgtttgcattagggtgtctgagggggggtttgttggatgaaccatgtagctactgtcagctatggcaactacatacctatcctttgggtgctgttgtgtttgatgcttcggagaatgtgttaaatctaaagtaaattgcacatacaacaacttgtaaaatgctcaatctagtacagtaacttgtcaggtaggtgtatattagtctaaaaacttgtaaaacgctcaatctagtagagaacttaatagttgggtgcacattggtcaaaaaaacttgaaaattcttaatttagtgcaataaattggtaaattggtgctctacagtcaaagtgatataacaagcaacatatttgctaaggcaagatcagagtatatccgcgtcgtaacaagttattaaatattatttgaccattgacattcatgtcgaaatggtaatgtattcagccaggaccagaacctccaatgtttagaattaatgttangccttcgacaatgatttaatttaa

SEQ ID NO: 41459 - DNA, 281 bp, Setaria italica
  Peptide Sequence Number=SeqID_107433
tgaaccacacgggctccttgaagtccacgcgcacccacttctcgagcacctcgggcgtgatgcagcccagcgcgcccagcatcgcccaccgcccgtggatcacctccagcgccctgttgcgggcgaacgcctccgggtcggcggagagccccgccgtgtcccagccgtagtcgccggggaactcgccggtgaggtaggagggagtctgcgcggagaaggggcccaggtacttgacgcggtccgggccgtaccacaggtcgttgctcatggtgatccggccg

SEQ ID NO: 41460 - DNA, 421 bp, Setaria italica
  Peptide Sequence Number=SeqID_107434
taagttacgtttacttttagtttagacaatttacttactaggacaagaagacaagaatacatcaagttagaccgataccttcagcctcatttccgctactacatgcgggaagtgcgtactgttgtctactcacaattcctggagtcgtacaagagtgtgacaatggaagcaatggctgctgcttttggtgtgactgttgatttcatagaccaggaactctcacggttcattgcagctggaaagcttcactgcaaaattgataaggttgctggtgttctggagacaaaccgaccagatgagaggaatgctttctaccaggcaaccatcaagcaaggggacttcttgctgaaccgcatacagaagctttcacgagtcattgacctataagagttgctgtttctgttgcagctccttcagcgcc

SEQ ID NO: 41461 - DNA, 629 bp, Setaria italica
  Peptide Sequence Number=SeqID_107435
ttaggtactaagaagacaagatacaagttagaccgataccttcagcctcatttccgctactacatgcgggaagtgcgtactgttgtctactcacaattcctggagtcgtacaagagtgtgacaatggaagcaatggcctacgtgtctccgactcagtcgcactagtgtcgcactagtctctcacggttcattgcagctggaaagcttcactgcaaaattgataaggttgctggtgttctggagacaaaccgaccagatgagaggaatgctttctaccaggcaaccatcaagcaaggggacttcttgctgaaccgcatacagaagctttcacgagtcattgacctataagagttgctgtttctgttgcagctccttcagcgccctgccaatgtttcccgcactggacttcttgcgtcgtcttcacctaggcttccattaagacatgagcgttgctcttcttgcgccgggaacaagtttctaagagaacttgtgttttaagcgtgaattcggtacatgtatcccaagggtctgtagaatgaggaaggtgcagctccatcccatggacgttactttgtggccaaccttgttttcccatttcaagtctcatatatgtggttctgtgcaattcg

SEQ ID NO: 41462 - DNA, 408 bp, Setaria italica
  Peptide Sequence Number=SeqID_107436
gggtttcttcttaattgtgtttttcagctggcttgacggaacagatcaagttggaccgttacctgcagcctcatttccgctactacatgcgtgaagtgcgcactgttgtttactcacagtttctggaatcgtacaagagtgtgacaatggaagcaatggcttctgcgtttggcgtaaccgttgatttcattgaccagtaagtgcagtttatgcccggtgctcatattctggatgtagtgttactcataagctagtgcattaccatttgcgtcactttgatgcagggaattgtcgcgctttatcgctgctgggaagctccactgcaagatagacaaagttgctggcgtcttggagacgaaccgacctgatgccaggaatgccttctaccaggcaaccatcaagcaagga

SEQ ID NO: 41463 - DNA, 533 bp, Setaria italica
  Peptide Sequence Number=SeqID_107437
gatggatcttgtgtttcacactttgcagaatggttttttctacatggattttgatctcatctcaaagtccattgataaggcaaagaacttgtttgaggaaggaggtgactgggagaggaagaacagattgaaagtatatgaaggattgtactgcatggcaactagaaacttcaaaaaagctgccagcttatttttagattccatttcgactttcactacctatgagttattcccatatgatacattcatcttttatacagtcctcactagtatcatcacactggatcgtgtatctctgaaacaaaaggtggtagatgcaccagaaatcctggctgtgattgggaaagtacctcacctctctgagttcctcaattccctgtacaattgccagtacaagtcgttctttgttgcattctctggcttggcagagcagatcaagttagaccgataccttcagcctcatttccgctactacatgcgggaagtgcgtacttgtttgttcttacttcttacttaatttccttggttagttt

SEQ ID NO: 41464 - DNA, 1522 bp, Setaria italica
  misc_feature (1512)..(1512): n is a, c, g, or t
  misc_feature (1520)..(1522): n is a, c, g, or t
  Peptide Sequence Number=SeqID_107438
tactaaattacctctctctctcaatcttcttgcggcggaagcaaagcgagcgcggctcagcggcggcgagatggacatcgccggagaggacgggaagcagcagccacacctggtactagcgcacaagctgttcctgctgtcgcaccacgatgtggatgacctcgccaaggtcgacctccgcgccgacgttctcgcggcagtcaaatccgatgacatggcggcgctgtacgagtcgctggcgacggacggcgtgctggagatggacgcggcgctgctggccgagatgcgcgccaggatcgacgaggagatccggaagttcgatgagaaaatcgctgatgctgaggagaatttgggtgagagtgaagtgcgtgaggcccatcttgccaaatccttgtatttcataagggttggggagaaggaaaaggctctggagcagcttaaagttactgaaggaaaaactgtagctgttggccaaaagatggaccttgttttctacacgttgcaaattggatttttctatatggactttgatctcatctcaaaatccattgacaaggctaaaaacctgtttgaggagggtggtgactgggagaggaagaacagattgaaagtgtatgaaggattgtactgcatggcaactagaaacttcaagaaagctgctagcttgttcttggattcgatttcaacattcacaacctatgagctgttcacctatgatacattcatcttctacacggttcttacaagtgttacctcactggatcgtgtatctctaaaacagaaggttgtagatgcacctgaaatcctcgctgtaattggcaaagtacctcacctctccgagttcctcaattcactctataattgccagtacaagtcattttttattgcattctctggcttgacggaacagatcaagttggaccgttacctgcagcctcatttccgctactacatgcgtgaagtgcgcactgttgtttactcacagtttctggaatcgtacaagagtgtgacaatggaagcaatggcttctgcgtttggcgtaaccgttgatttcattgaccaggaattgtcgcgctttatcgctgctgggaagctccactgcaagatagacaaagttgctggcgtcttggagacgaaccgacctgatgccaggaatgccttctaccaggcaaccatcaagcaaggagacttcctgctgaaccgcatccagaagctatcacgagttattgacctgtaggcaagccgcttgagcccttttgccaggacttattgcttgagctcccggcgcacgacttgcagtgtattatttacgggcagcaattgacttgcattggccacggtcgaagaagctttagggatatttgtgttatgagaaattgtattttgtacttttgttgcctaactacatggatcaaaaccaaatacaggcattgcttgtagacgtttcatccgtgatgaattcattctttattttgtttcagtcttatcgtttaggaactaaaaaaaaaaaanaaaaaaannn

SEQ ID NO: 41465 - DNA, 1568 bp, Setaria italica
  Peptide Sequence Number=SeqID_107439
ccgaagcgagagcctgccgaaccgaacggaagcgagaccccggcggcgtgcgagatggacggcggcgccggcgaggatgggaagcaggagcggcacctggtgctggcgcacaagctcttccttctctcccaccccgccgtcgacgacctctccaaggtcgccctccgcgccgaagtcctcgacgccgtgaaatccgatgacatggcgccgctgctcgagtcgctggtctccgcgggtgtgctggagccggacgccgcgctgctggccgagatgcgtgggcggatcgacgaggagatccgcaagctcgatgagaaaattgctgacgctgaggagaatttgggtgagagcgaagtacgtgaagcccatcttgccaaatccttgtactttataagggttggtgagaaggagaaagccctggaacagcttaaagttactgaaggaaaaactgtagctgttggccaaaagatggatcttgtgtttcacactttgcagattggttttttctacatggattttgatctcatctcaaagtccattgataaggcaaagaacttgtttgaggaaggaggtgactgggagaggaagaacagattgaaagtatatgaaggattgtactgcatggcaactagaaacttcaaaaaagctgccagcttatttttagattccatttcgactttcactacctatgagttattcccatatgatacattcatcttttatacagtcctcactagtatcatcacactggatcgtgtatctctgaaacaaaaggtggtagatgcaccagaaatcctggctgtgattgggaaagtacctcacctctctgagttcctcaattccctgtacaattgccagtacaagtcgttctttgttgcattctctggcttggcagagcagatcaagttagaccgataccttcagcctcatttccgctactacatgcgggaagtgcgtactgttgtctactcacaattcctggagtcgtacaagagtgtgacaatggaagcaatggctgctgcttttggtgtgactgttgatttcatagaccaggaactctcacggttcattgcagctggaaagcttcactgcaaaattgataaggttgctggtgttctggagacaaaccgaccagatgagaggaatgctttctaccaggcaaccatcaagcaaggggacttcttgctgaaccgcatacagaagctttcacgagtcattgacctataagagttgctgtttctgttgcagctccttcagcgccctgccaatgtttcccgcactggacttcttgcgtcgtcttcacctaggcttccattaagacatgagcgttgctcttcttgcgccgggaacaagtttctaagagaacttgtgttttaagcgtgaattcggtacatgtatcccaagggtctgtagaatgaggaaggtgcagctccatcccatggacgttacttttgtggccaaccttgttttcccatttcaagtctcatatatgtggttctgtgcaaaaataaaaaagttactggtttgacatactcgacactggtgcccttttgtaacctacataaagtgct

SEQ ID NO: 41466 - DNA, 593 bp, Setaria italica
  Peptide Sequence Number=SeqID_107440
ctccggtatattatgcgtacgatgagttgaaactataggcatgcaggactcatatccagctcagccttagtaggggctctgtccggcgtagttgcccggcgggctgtagttgcaggtgatgaagatgccgccgttgttgcagacgacgcgagcgcattccgatggcggtggaggcgcgccacaccacctgcgtgtagtgcccgcacaccttcccggcggcgcagctgttgctgccgtggtcgtaccactgcttctccgccacccacaggccaacggcgtccgacgccgaccagtcggcgccggagccgccgaagaggttctccccgtacccgctgcctctcgagtgcacgagcctgcagtcgccggcgcgcttcgccgcccagctccgcgcgaaggccgccacgttgtcgttccacgacaccgggccgacgcccaccgccgcgcgcgccgcgttgtgcagcttcacgaagtcctgcggcgagttctgcgccgcgcacggcgtgaacacggcggcggcggccatggcgaacgccagagctaggcacgcgaccttctccattgctagatgagcggtttgcgcttgtatgtcgtcg

SEQ ID NO: 41467 - DNA, 1711 bp, Setaria italica
  Peptide Sequence Number=SeqID_107441
caccaagcacaccgccgcaccacacgatccaacgcgcacctggtgagggaggcaggcgaggatcaaaccggctggagcttggcttctccggtgggggtccctgcctgctgccgggcgagagcagatagtagatcggatttggcctgggttcttggtgcactagccaaaactcgttcagattgtgtgaaaatgcagtgcaacctgtagctagttaaactgacctctcatctgatactgccatttcataagttgtttggagctcagagagctttcttataggctggaaattcctaaatctgttctggaaaatttgctctgcttgcaaatggcagacgatcctaatatgaattttggggcgttttcccaatcactctgcaaccagcatgtagtttcatttcagccaagcccaaccactagtgggtcaggaagcatgccagcgtacctggattgttccactggaatggatgccagcgtggggatgttgagcagcacaccttcagtggttgtttctactggttcatctaatttgccagctgatcccggacccaacctcaaatacggagcgccgctggctgcggattggacacatcttgagcttcaaattctgagagatggcctggagaaatatgttcatgaacaaggcatcatgaagtatataaagatagcagcatcattaccaaacaagacagtaagagacgttgcaatgaggtgccaatgggtagggaagaaagtaaatacaaggcgaaggaagcccccaagaacaccatacaggcagaaatataaaagaaagaaaggataaatttgtagagcctgcactatggggagcaaatcgtcctcttcaaactggcatgagagccaattcatttgtgccgcataatgttcaaaacaatctgtttgtatctggagcctctgagatagaccgtccagtgcagcatctactggaggaaaataattggcttcttaatcaaatagaaacaaatattctgacatttcaggctcagaacaacattgatctcttccatcgggcaaagaggaacattaatgatcttcaacatatcactacccaactgcctggaatgagtaccaagatgcctccgcttcgcgtctcagtgaatgaaagtcttgctagcttcgtgcttcctggcatttcaatggaccaagttcttggaagcaaccatttgaaggaggagccaagaggatggtaggtcactgccagcaagtttcagtttaggcagacttttatcagtagatcgatggaccatatggagaagtactgcttcattttgctcaccaaatggcgatcgatagggccgccattcagccaggatccctgctttctctatctggaagcaaaaggagaggtcactgaaaccattctgctgccccggcctccaaactgccctctgcaacatgccttaaacattggtggctggacagacgtgggtttcaggaactgcagtttttctggcattgctgcacctgtaaataacttcgattcttttgtgttcctccttaagatggtagggtaaatagatgtagcagaggaagttcacaagaactagctaaacagttccttcagaagaactagctacatagcaattagcaagaatgaaagccctttttgctggtcgccatttgttgctctctgcgtgtgaatgtacttccagtacaggttccaagttttccttttttagaaaaaaaaatccattct

SEQ ID NO: 41468 - DNA, 549 bp, Setaria italica
  Peptide Sequence Number=SeqID_107442
cgaaggaagccccaagaacaccatacaggcagaaatataaaagaaagaaaggataaatttgtagagcctgcactatggggagcaaatcgtcctcttcaaactggcatgagagccaattcatttgtgccgcataatgttcaaaacaatctgtttgtatctggaggttggtaggtcacttgagtatcaagtctaattgattgcttccatttatctcgttgttatctgctgttaatggccacgtgccattatcagtattatactctggtgtttaaaattttcactttgagggtaaatactactcctaaatactagagtgactgaactatttgacttcttattgactccattgctaagtttatcgcaggtaggaactccattggagcttgatatttaatataatgttgaatgcatatcttttgcctgtaagtcttggatgcatattgtcgtatatattgtagcagtttcttgtgtcaagtgacagaaaggcttaaaaaacttagacacttcggatattactgtttcaagaacatgcatgagagtagattggat

SEQ ID NO: 41469 - DNA, 312 bp, Setaria italica
  Peptide Sequence Number=SeqID_107443
ccgccgcgggccaatccaacagagtgcgctcggccggcggcccgctccgcggtctccccctcctccagtcgcgacccgcacgtgcgccgcgcgcaggggctcccgcggaggaggcgctcgcagggccccgtcctcccgcccgtcctctcccatcctcgcaggggctctccgcgcaggggctgggtcgctgccgcccgccactctcgtcgcccggacccgccccctccgcccgtccctggaatcggcggcgctccctggaatcggtggctcaggacctgcttgcctgcagagctgcgccactccctagattag

SEQ ID NO: 41470 - DNA, 363 bp, Setaria italica
  Peptide Sequence Number=SeqID_107444
tagatgagtttaaaatcaggatcattttttagattgccttgtccagtattgtaggtccatgctctctcctcctattttcattggaaggttgaatatactggtgctagttgatccaaaacaatccccaagatatcacaagtagagatagaggatgatttttgagaaatgcattcagcaggccctcatgtaatctcggcagagactaggtggaaaggacagacaagtagtgcatttattccgtcaagtgatccttcacttcctaaacattcaatcttggtacaacatgagaagaatgtaagctcagcatttctgcatttaagacatgtaaaatacagagttgttgcactgcactaactataagtt

SEQ ID NO: 41471 - DNA, 357 bp, Setaria italica
  Peptide Sequence Number=SeqID_107445
tttcagtgtgagtagtgacaagaagattttcacacaagtggtttccggctttctgctgtcattaattctcatgccagcagttgaaggaccactgaaatcttatgcatgagcaacaagcacttgtctaatgcaaagtgcacaattgcatggtcaactgaagaagttgccccataagtaatactgataccaaagagtggaacctggtttactctacgagcagatcctggagatgatgtgatctttgaactactgataccaaagagtggaacctggtttactctacgagcagatcctggagatgatgtgatcttgaaactacaactcccaaggagcacgttgaccccaaagccagcatcc

SEQ ID NO: 41472 - DNA, 437 bp, Setaria italica
  Peptide Sequence Number=SeqID_107446
cgaaataagtgtggtgactactgttttatggtgatcacttaacattttatagatgtgcaatacaatgagataacatacagaatacatggacagattctcatgccagcagttgaaggaccactgaaatcttatgcatgagcaacaagcacttgtctaatgcaaagtgcacaattgcatggtcaactgaagaagttgccccataagtaatactgataccaaagagtggaacctggtttactctacgagcagatcctggagatgatgtgatctttgaactacaaactcccaaggagcacgttgaccccaaagccagcatccacacctttgatacattgatgattgttgatgtgatggccgaaggcttgggaatcaggcatatccggagcaccgtgggatatccccatgcatagagaaggttcctatttgatgtctcctga

SEQ ID NO: 41473 - DNA, 590 bp, Setaria italica
  Peptide Sequence Number=SeqID_107447
taacaaagtaagtaagaaagtaaagtagaacaaagaaagaattttcacacaagtggtttccggctttctgctgtcattaattctcatgccagcagttgaaggaccactgaaatcttatgcatgagcaacaagcacttgtctaatgcaaagtgcacaattgcatggtcaactgaagaagttgccccataagtaatactgataccaaagagtggaacctggtttactctacgagcagatcctggagatgatgtgatctttgaactacaaactcccaaggagcacgttgaccccaaagccagcatccacacctttgatacattgatgattgttgatgtgatggccgaaggcttgggaatcaggtaagcgtaatctatttttcaattgatgccgacgaaatgacatcttagttcatactacgaattgcgggtcacgtccagttatcccagctgctccgctaagtcgaagctgaatgttgtttatttctcctccatggacgtctggagctccaaggtctgaacaggaatacacaagaattcagtccatacacattcatatggaggctaccttagtctatttgcgttgaggtgaca

SEQ ID NO: 41474 - DNA, 438 bp, Setaria italica
  Peptide Sequence Number=SeqID_107448
gtctccacaaggatctaggggtttctgacatcgaggggctatctgaggaccaatctattggttcctcaacatattgaagtcagacagacttcatgtcctaccaatggggttgcagaaggaaggcagagatttaaaaatacatatatattaaaggatgcaagctgattcttgggccaagtataacagatcttagcagatattgtcctgaaatgtcctcagtcacatcttgtcagtttcccagacaagggcaaaatacggatggtagggagagagggagatgctctccttggaaattacgtgaggcaaagtgcactcacacactattggacagggacctttttatttccagatgttagtgggccatatttataacaattgaaattatttacttgacctgtgatcaggggtaattactgtatcttaatggtagataatagt

SEQ ID NO: 41475 - DNA, 474 bp, Setaria italica
  Peptide Sequence Number=SeqID_107449
atgagaacccattgctggcttataacgcagcaggcttcttatagctatgtcttggcacgagcatgatcaaccaaccatatcttaaagtcccatacccttctcgaacttctggatctgattcaagaatatccaagtcaacatgacatgtggagcaatcctgacacagtagacaggaaacccggtgtagaacttaaacgggcctccactcttcaaggtcttcatggcgcagtcaagagatccagtatacgggtacttcccgttggcatcaggctgcatcttctgaatctgcgtcttcacataatcaaagggcaaactacaggcagatgcaaagaatcctgacacagcgcttgccccaagcactgtagatatttctccagctccaaatttgtctctaaataattcaacactctgatcgtaggaggcaagcatgcccatgtttagggacatagctctgactacagttgggccttgtca

SEQ ID NO: 41476 - DNA, 421 bp, Setaria italica
  Peptide Sequence Number=SeqID_107450
gaattcttaggttagttaaactgccagttccagcaaagaagatactgacgtatgcaattgatttcaatctctgataattcccgtagagcttgcatatttccaattccttcaggcaactctaaactgttaaccaatgtcaaccgttgtaggagaacaatactctctggcaatctttgaatccttgtccatctcaaatctaaggtctgcaaattttgtagttgtcctatttgttcagggagtgcaattattcttcttgaattgagtcacaggtacctcaaatgagaaagcttatccatgtgtttaatataattgtattccatcaccaccctattttctagatctaatactctcaagagttgaaagtcggaaagacaaggcatattctcagaatatccctaggggttagttgttagttagttaa

SEQ ID NO: 41477 - DNA, 1039 bp, Setaria italica
  misc_feature (1)..(39): n is a, c, g, or t
  Peptide Sequence Number=SeqID_107451
nnnnnnnnnnnnnnnnnnnnnnnnnnnnnnnnnnnnnnncatatgtaggctgacatgcaggatccaggtcaagatcgccagacttcgatccttcatccttaatcaagggaaggaaaattcttattcgtccaactgccatgctcaatttcacaagttgacaaccagaaggggtacattattcccaaatctccaacgcactcggaactgaaatcaaacctgaaacctctcagagactcgccggcgatggagcccctccagcagcctcgaccacgaagtccagcacaaccacctcatcgagaagtggcctgaccgcagccttggcctcctcgaccttgccgtccccttccaccgcgtccagctcctccacgctgtcgaacactgccaccatcccgaactggtaccccttggcccgcgcgggggagaagttctccccgaagctcaccttggcgcccttcgcctccccggcggccttcgtcgccgcggccaccttctccacgagctgcgcgacctccaccccctccttcaccttggcgagcgtgagccgcacggcgctgccggggctcacgggggacgggagctccgcggcgttgacccagtcgacggcggtggtgtcgagggcgttggggagcacgtgcccctgcacggcggccacgtgcgccgggtgcgccgcgtaggacgccaggtcctgcttggtggcgtagcgggagtggaggaggtgggtggggcccagcgcctccgcggccggggagcggaggcggaggaccgggcccgcgtggatgtaggccaggcccgggacctgcgtggcgagcgcctgcagcgaggagaccatcgccgcggcggcgcccgaggcgaccgcctccgggcgggccttgaggagcacgatgtgctcgaccggggcggcgaccgcggaggaggaggaggacatggcggcgatgcgggtgcggagggcggaggagggaggggcgatgcggcggagggtggggaggtggagaggggatgagaaggctttgaggcaaatcatggttgggttggtgtgaca

SEQ ID NO: 41478 - DNA, 657 bp, Setaria italica
  Peptide Sequence Number=SeqID_107452
ttctagtaggtttacttgtaacctaggttgtaggtgatgaggaccatccagctgacatttctcccgaagataagcgtttcctgatattgcttggttggagagaagatgtgcaagtcgaacctttggaattcgatgagattgcggacactgtaaaaggctgtgaggaactcaagaagaagcttcagtctatgttgtccaatgataacatcaagagtattctccaccttattgatgggcagagctaaatgagaagctgcagcagcataaagagtacaggggctaaagacaatgggaacctagcaaaattcttcagaaagcaggtagcagagaccacaggataccacagaggagttgttcggaaaatgcaatgcctacagatcttcgagcagcattgaccatgtaaagacgttgagaacagatggcgatcatttttggcatgagtttttgtcttggattgttaacatggcgatatcgtttcttttcttttctttggatgaatgtccaacagttagggatttagtgttcacagatagttctgacagtttttttgcacactgaaaggagtttggggtttcgccgcatttccccaggagtagctcatgtaagtctgatcatgaactcacatggctgtgctgcctatgaaagataggctctgtt

SEQ ID NO: 41479 - DNA, 458 bp, Setaria italica
  Peptide Sequence Number=SeqID_107453
tgactgctcaagattcctcgaacggttgggaactgccccaacggcaaacatgttagcacaattgtcaggggacctatataacagttacggcggtggtgttacttcatcagcggcatgttggtgggcaccgagatgttctggcggcgttacgagcgcttggatggacggggtgagtctgtgatctggaaccaggatctctatttgttagtacaaactatgtcaaatgggctatcatgagctgcgttggccacggagctggtcgaccccgacgtccatcgacaacgaaggagttctcgagcatgaagaccatcagacaatgggtcggcggtgagtactacgagggatccccgctgggagtaattcccgttgagaaccccgcaaccggtgaggtaactgcagagctcttgcaggcgtccaaggaagatttggaccacaccgtagaggtggcccgtgatgcg

SEQ ID NO: 41480 - DNA, 257 bp, Setaria italica
  Peptide Sequence Number=SeqID_107454
ctttccgaagatttgaacatttaatctcaagtatttgcttataccagaattcttttttcctttaagacagcaacttgctgcaccaatgggttaaactgacaaatcatactagtcaacctggtttcatttcttttcatagtttctgctaatctgctttcaaaatcactgtatgcttttgacaacttctcgatactggcaagatcagattcccctgtctgttcactatgcctccaaatgctttgtgctggtgttttctt

SEQ ID NO: 41481 - DNA, 399 bp, Setaria italica
  Peptide Sequence Number=SeqID_107455
aaggactaggctgtactataagatggttctttgtttttaacatcaagtacatgttatctttatttgtttcgaaaattagtggtttatagtgacatgttctgaagtagtgtgattgtggggttgcagatggctcaaaatcagccctaccaccgaaagatgttgaaaggttggtctcttacattgcactagttagaatagcaataacgcataattggataaactaccatttttaatagtccatgggacatcatttggagccacaagtgctgtaatgtaatgcacaccaagttaaatatctcattttttaagcatccagctctttgttggacttggaaatgtcaccattcactttgtaatgaggtttccactgcccttattgtaaacaactttccaggctcg

SEQ ID NO: 41482 - DNA, 365 bp, Setaria italica
  Peptide Sequence Number=SeqID_107456
tgcgaaggatgataatgccgaatgagttcacgtcggaccacagcatgagctctcttgctgacttgaattcaccattgtccatacagcaaagtgtccccttatggttctttgtagggtgatgttgcaggttggtggttggtaagtcgggttgtctgagaaggtggcagatgcccaagtctcccaccttgctgacaaagttggcatcaaggagaatgttccccagatttagatcaccgtgaacaattggataaggcttatgtgagtggatgaaggctaaagctgagcatatctccccaatgatccgcgtgcgcaccttccatgtcagaggtggcatgtgtttcttgcatgagagccagtcctcgagg

SEQ ID NO: 41483 - DNA, 446 bp, Setaria italica
  Peptide Sequence Number=SeqID_107457
agaacaatagaaagaaacatgcaagtcactggcagccttctcgtagtagcggctttctccggtcatggcgctgtgtgagtagtgtattgttgatttggtctttctatggcgcgggggatgtgtggagcaatcaattggtatttttgtgctgattggttgctgaggcaatatgtcgaacatgtggtgtgtgacgctgcttgggaggagcgagtgtttatcctgattctgggtaaactaggttcatttcaactgtgactgaaaggagatggtggtaaagtaggttccctgaactgcttgtgctgcaacttagcgcggaaagcaagttttttctctcaccgtttggaattggagcaggttgctgttactctggcgtgctgggtgtataagcataaaggtgggttctgtagcttgtgctttcatgttcctgcatagtcattgcataaaca

SEQ ID NO: 41484 - DNA, 547 bp, Setaria italica
  Peptide Sequence Number=SeqID_107458
taagaaaagaagaccttttaggaccgctagtcgactacaagggattttcccagacctacgatgccgaggaccgcaccatccatgtcatcgtctcgcctaatgagccaaagcaccacaaccctgtctccctcgctgttggtgaagctctctatgtcatggataggaagccggtcccaggtagctgctgtggctttgaggccctcacatttgacatgccgaaggaagtgatgggcaagttgggctgggactggtactggcactgcctcaaggcaccacctttcggtgcttgagcctggctacaacaacacaagcatccagggttacacggtggttggtggcttcaacatctggatatccacaaggggcattggcacctactcatttgacacagataatggctcgtggagtaaggctggcgactgggagctgcccttccatggtcgtgctgacttcttcccagagcatggcatatggcttggcttctcatctcaggggaatctgctctactcgtcagacctcggagtctctatgcagtgtaaaccggagt

SEQ ID NO: 41485 - DNA, 807 bp, Setaria italica
  Peptide Sequence Number=SeqID_107459
ggtgtttggctcaccaatcgctgattcatagctctctagcatatcaagaagatacttgttctcctttgttttatcatcaccaagcgacatagttgagactcctttggaaagttttaaaggaacactctcctcctccataatacctgttgcatgttctatgcagctattggatctacaattgtcagataaagacttcagatcttggattaaagccttgtcaggactatttgcaagctgctgcagtgcggaatctgtgagagtacgggcgtggcagaataatgcatatgcttctgcccttttgccagctgaactatatgactttgccaaaaagaaacatctctcagctctgaaagccaagcctttcatctcatactcatggataaaagagttctcttcttcatttttgtttctgccagagctaactaaatctgtcaaatctgttgtattctgaacaagcagatcatatagccgaacaagttcctctggctttgttattctctcatttttctcatctcgatgctttgtaaatttacttttagcaatgctaaccagtaactggttacgttctatagtcttcaatcctaaaacagcactaacagccttgtcaagaccattcaagtcatcccttatattctcagcattgccagcagaagccaggtcattgcggatgcagctccgagcatcatggtatgcagaaaatattttatcaaaaatgccaagctttttatcagaagcaatcgattctgtcgctgaaccgttcaagtctttctcaagctgctgagctttcagaatggagacacgagtctt

SEQ ID NO: 41486 - DNA, 1356 bp, Setaria italica
  Peptide Sequence Number=SeqID_107460
tttttttacgactagaccaaacttaggaactagttacctcttattacttccccaaaaggtgagtaaatccaggctatttcagtcaatgctcaaaattgttaaacacatttaacttggtctaaaagtagtcatcaagataagaaaactcttgccgagaaaagattgtccgaatttccccggggggctaacatgggcctgacaaaaatcttcgacccatcaaaagacagtatttaaggagaggaccatctacatttgtatgagttcatgcacatggcaaacaaatcaaacgattaaagcacaatttaccaaaatccatgaggactaaatccccatcttcttttcacccccagaacctgctcagaagacccttcttttctttcttcattcggttctcaaggctaggaaattctatcgcattgtatgccatgtcgagcacgattggattgcatggcactgcttggaagggaggtgggaattgtgcgatgcgacatggaactttggtgtttggctcaccaatcgctgattcatagctctctagcatatcaagaagatacttgttctcctttgttttatcatcaccaagcgacatagttgagactcctttggaaagttttaaaggaacactctcctcctccataatacctgttgcatgttctatgcagctattggatctacaattgtcagataaagacttcagatcttggattaaagccttgtcaggactatttgcaagctgctgcagtgcggaatctgtgagagtacgggcgtggcagaataatgcatatgcttctgcccttttgccagctgaactatatgactttgccaaaaagaacatctgcacaattattcaaagtgaaacttgtaaggataatccaacgggcattagatgtaaattttgtagcatatcaactgaaaccttgctaacaggcagaaactatgcaagtgatttgcattaagctcttcgataacctgattatatatacataactggttgatagtacgcaacaaggcatatctcgaatacgcaggagagctgcgtatcattgcatgaagatagaagaaaaggctcagatagccatacaaccacacaccacccacacccttagggtcttaaattacatccacacccatttttagaatgagggaaccaccacctaaacaacagcaacaaggcgtataaactaacatatatatgggtagaaactgggagtcctaaaatagttcacggaaattttcttttttgttcaacagcaagtctgtgacctatgtgtgtgagtgtcgagtttgtaagggttcctatccctttttccttctttatacaacaacgtgcagttctctgcgtgtttgagaaaagag

SEQ ID NO: 41487 - DNA, 223 bp, Setaria italica
  misc_feature (186)..(223): n is a, c, g, or t
  Peptide Sequence Number=SeqID_107461
tggattggatataattggattggatataagtggtagttgtcacagtctagataccagagcttcttgagagtgcacgggtacagatgttgtgtatagtgcttgaggacaggttttacatgacatgtatttttctaaataccagttcacctgccgtttcactaacgcaagggaaaaaaaaaaaaaaannnnnnnnnnnnnnnnnnnnnnnnnnnnnnnnnnnnnn

SEQ ID NO: 41488 - DNA, 478 bp, Setaria italica
  Peptide Sequence Number=SeqID_107462
tttttaagacaaagttttaaacaacccctaccaatagtgtttataaaaatgaggtgttaaactttaacacaatccttttaacacacctgtttggcagccaatgtgttaaaaaggtgttaaaagcctgaacaggcctaatttttattaagcgatgcaaacaagcaaagaaactgcacgctcgcttatactattttcatatggaaaagcagctctctaaatactctaaaaggcaacatgtacaccacacgcttatgcgtaactaaaagcccgatccgccaccgccatgtaacaatcaaggccagatataccccgaggggcgatgctaaccagatcttagttctctgggagagagttccagtccccgagttagctcattgtccttggatgagagcgccatgagagcaaccaccacagatctcatcgtgggcctcatgctgggctcttcatgcgtgcatgacttacgaaggttcgccatctt

SEQ ID NO: 41489 - DNA, 709 bp, Setaria italica
  Peptide Sequence Number=SeqID_107463
tgcgtgccggcggtgcgggtgctcagcccgacgggcgagtgctgggacagcctcaaccagctcgccggcggcttcaacgaagccctccggccatggctcgccggcctcgcccggaggctaccgggcctcgcctactccctcgccgacctcttcgccttcacgcgggacaccttggccgacccgcaggcgtccgggtacaccgaggtcgccggcgcgtgctgcggcggcgggaggctgcgcggggaggcgcagtgctctcccaactccacgctctgcgccaaccgcgaccagcatgtcttctgggatcgcgcgcacttctcccagcggacagcgtttctcatcgctcaggcattctgcaacgggccggccaagtataccaatcccgtcaacttcatgcaactggccggatcagttagtgaaatcacggaagcattagagtcgagcagatgagatagcaggccacttgaaatggagaatcatgaaatcgaaattcggagaagcatagctcttgtttctaaggccgttcgtgaatttcaatcgtgcgtataattcacaatccctgatcggctacggctattcggttctataggtaccaataaggatataattgttgtaaaaaaagatcatgattcatgactagttaatgaacatgaataacttaaaataaaatcccctatttaacattaaagaaaaaaaaaaatgagactgc

SEQ ID NO: 41490 - DNA, 439 bp, Setaria italica
  Peptide Sequence Number=SeqID_107464
cgcctcgcccagcgccgggcggcggcggccgccgccttcctcgcctcctccaccgccaccgcggccatcgatggcgaggggggcggcgaagggagcatcccgcagctctcctccatcgctaactccgtcgtctcccgctgctcgaggattcttgctatttcaactgaaaacttacagcaaagctttgggactgatttccctcataactgtaatgagcccaatacatatgcaagagagctttttagagtattgctgccacaaagctcttcatgaagttactacacgtccagactatttggctgataagaatcttcgccgcttgatgtttgatatgatgcttgcatgggaaaccccaggctctgaggatgcatcagtagaaaatggttctattgtgcgtgattcccttgagattgaagatgaggatgagggtattctaatt

SEQ ID NO: 41491 - DNA, 406 bp, Setaria italica
  Peptide Sequence Number=SeqID_107465
accataaccgcttttacacagccggcgcaatctgaagtccgaactgtgaagtacactgccactaggcgatgaggaaaggaagcacggtcagcatgaatgcctcgtaagtaaaagtcgcagacccggagaatgcggcgtccttctccttgaacttctcagtcagtccctgcaaattagtccaatccaaacaaaatgagcacaggatatcggaataaaagacgcccagaaaaaaagggtttgctgagactgtttgcgcagcatggtggaggcataccttaacagtgaggcaacatctgcagaggttaaaaaaaaaaaaagaagcagttaggactgtggtactaggcaaactgaaagcatacacataggatatattcatttttttcagtattgagtgtcacaatcaact

SEQ ID NO: 41492 - DNA, 202 bp, Setaria italica
  Peptide Sequence Number=SeqID_107466
ttgtattgtgtgttacccacttttcaccttcaataatgtaaccagtactacaaatgttatctcctgtgacttggcaagtgttctcttgtcaagtcacagggcatgtagtttatgaaagtgctagtctttgcatctagacatgtcctgtgacttgacaagagaacacttgccacttatttatgaggaggggaggtaccatcat

SEQ ID NO: 41493 - DNA, 408 bp, Setaria italica
  Peptide Sequence Number=SeqID_107467
tgtgtctccgactcagtgtgagtagtgcacgctctaacccaagaggaaattagggtttatgtggacgctagcgcaggatcagctaaccggcggtatcgtgggtggccgcgaatgacgggagcgtcaccagcggggcgtggatgccgcagacgggagtgtccacggcagagcaatgggaggatcttgtcggagaagaagagatctagattggaaacgcagtcgccagcaccgtcgcagaaaaggtctagatccaacaatttctagtggaagttctgaaaataggaatccactttggataatgtttgcaagaaaaggtgttggtgactgcttctttccagggagcacacgtactacgtgcaagagaggctgttgatgcatcatgcatgtgtggtttcgttggttgtcagg

SEQ ID NO: 41494 - DNA, 362 bp, Setaria italica
  Peptide Sequence Number=SeqID_107468
ttctattttcatgatgtggtttgtattaagcacatatgacactacctcctcttcctttgtcagtgggatgatttggattcagaacaagttaggcacctggaatctgtaaattagttgacatgtcgataacccaaacatattcaagggtgcttatataaggcctgtttacttattatttattgctttttgttttttaaaccataggtgcattaactaatttattttctggtttgtacataggccatagggatgtaagatgaggtgggggagcaacatatattgtagtagacacattactacatgccataaatgttacccaaggttggattaattgttgttgggagatgatgagtagtgttgat

SEQ ID NO: 41495 - DNA, 871 bp, Setaria italica
  Peptide Sequence Number=SeqID_107469
ccaaatcaagacagaatattgtaggttggaccaacagcattcgcttcatgccatcccgtgatagcaccaaaggtacaatatctagtagaaacttgtacctttggtgctatcactgtctccaaaatcaagacagaatattgtaggttggaccaacagcattcgcttcatgccatcccgtgaaacatttaggtgatacagatacttcacaagaggcttccacctttcttcaatgctacaggccatgagttgtggcttgaaagccagtagcctcccaagttcttcagtgctcaaaccaaactctttcagatattgaaccttactgttcatctcttccaagcttaaaaatccaagagctcttggataatcatagaccatcgtgccaaagtccttatcatccatacccatatttgtataaaacctcactcgtgtctccaactcatccatggacagattcagcagctggggacatctactgaccacataaccaatccagtctctcctcacgccacagctttccagatagccaataatatcttccaactcttcaaagcttcggttcagaaaagatccaccgtttgcaaggacgcgccccaaaaaatctccttttacataaattgacctcagccactttatcatcatccttactttccccaaatcgccagaacacgcacaaacaactttggcaatttggggatatgtcatagaattgtgcttgaaccacttgactagctcgacaaggccggactcctggatgtacgccttcgcccgcgcgttgaaggacatgtgcgcgaggtcgggccggtcccgccgcattgcggcggcctcgacgacgacgcggtcgacgaacggccccatccgcgctgtgaggttc

SEQ ID NO: 41496 - DNA, 1213 bp, Setaria italica
  misc_feature (136)..(136): n is a, c, g, or t
  Peptide Sequence Number=SeqID_107470
ttgttacttggcctgctcggcgctggctgctgctgctgctcggcgctcgctgctggctgcggctgttgctgctgcagccagccccaagcagccagccgagcaatacattctggttacagttcaaaaaaatctaaanactttttttccttcagaacatgtacaaggcaaggaggctaagctatgtattgtttctttcttttctttctttttttttcagaagtactacacctatctaatttacctccacgctgtttcagcatgctgctgcttctgtagtttcttcctcctcagatgtctctcgagcatctggaattgtctctgcaacaccttttccagcttcgaatctcgctctcctctcgacggcctcccgcaccctctctgcaaattcttcatcagatccagtcaacatgtaccgcagcttcatgttgatcctgttggccaccagtgtttggtgccgaggctctatcctgtcctccagggagtaactgaagaaccgtggaaactcgatgagatctttcagtggccgcaccattacacgcctcaagtactggtattttggtcttaggatatccacgttgtatctaagaagtgctgggaagtcggcaaccatctgaccgagcacaaagtggtagatccccaatgaccggaaatacttgacactaacttctagcttgtgtgcaatactacagcccaagagctgtggatccagagcaataacctttccaatgtcatcctgttttactccacctttcgtcaacagaaaaataaccactgggcgtattttcttgtataggctataagttaacacaggagggaacttcacaagcacattgccaattgcatcactccgtacaccaatatctagtagaaattgtacctttggtgctatcactgtctccaaatcaagacagaatattgtaggttggaccaacagcattcgcttcatgccatcccgtgaaacatttaggtgatacagatacttcacaagaggcttccacctttcttcaatgctacaggccatgagttgtggcttgaaagccagtagcctcccaagttcttcagtgctcaaaccaaacactttcagatattgaacctgtgaaccagaatgatatttcattaccaactagaaaaatagaagtcaagaactgaatataatattcaactaactaattagtttatacaaaaaccttaccaaaggtacaagaaagttagt

SEQ ID NO: 41497 - DNA, 1005 bp, Setaria italica
  Peptide Sequence Number=SeqID_107471
ccggatcatcgccaagggccactacacggagcgcgccgccgcgtcgctgctccgcaccatcgtcgagatcgtgcacacctgccactccctcggcgtcatccaccgggacctcaagcccgagaacttcctcctcctcagcaaggacgagcacgcgccgctcaaggccaccgatttcgggctctccgtcttcttcaagcaaggggaggtgttcaaggacatcgtcggcagcgcatactacatcgcgccggaggtgctcaagcggagctacggcccggaggcggacatctggagcatcggcgtcatcctctacatcctcctctgcggagtgccgccattctgggccgagtccgagcacggcatcttcaacgccatcctgagggggcaggtcgacttctccagcgacccgtggccacgcatttcgccgggcgccaaggacctcgtcaagaagatgctcaccactgaccccaggaagaggatctccgcctacgacgtcctcaatcatccttggatcaaggaagacggtgaagcgcctgacacgccactggacaacgctgtcatgaaccggctcaagcagttcagggcaatgaaccagttcaagaaagccgcgctgagggtcattgctggatgcctgtccgaggaggagatcagagggctcaaggagatgttcaagagcatggactccgacaacagcggcacgataaccgtggacgagctgcggcgagggctggccaagcagggcaccaagctcagcgaggccgaagtggagcagctaatggaggccgccgacgcggatgggaatgggacgatcgactacgaggagttcatcaccgcgacgatgcacatgaaccggatggacagggaggagcacctctacaccgcgttccagtacttcgacaaggacggcagcgggtgcatttcgaaggaggagctggagcaggcgctcaaggagaagggcctcctggacggcagggacatcaaggagatcatctcagaggtcgacgccga

SEQ ID NO: 41498 - DNA, 1999 bp, Setaria italica
  Peptide Sequence Number=SeqID_107472
ttgaagagcgcagaatttgctgataaaaactgtaggccatcttcatcatcagctgctatacgaggggtttctcccagaagcagatctgcctctaatgccatatcaacaggagtggattttgctgaaaaagacagcaggccatccacctcatcaatttcattgtgtcagactccgaagaacagtaggcttcaatgtgatggcgttaataccatatcgaaagatgtagaaacctcatcaactgtatctggctgcacttcagacagtagacttgatgacactggtgctctagtaaaaggtgtagataacagtgagaaaatcaccgtggcaatgcaagatggtggtgatggcgatggtccaggaagaatggattctactgacataggtacaggtgcagtcttgttatccattgcatctcaggagagatcatcgagcagacctgttgttgatgatgtcaagaatacatcagagaatgttgatgcaactcaaaagggtaacagagcaatctcggtgaagattccatctcgaggagcttctccaagaaggcgacttgcatccgattgcattgacactatatctaaaaccattgattttactgagaaagataagaaacctatgacagtgtcagttccatcacgtggagtgtcaccaagaagaacagcaagatctgacagtgctaatataatgtcaaaaagtatggattttgctgacaaatgtaatggaccaatatcttcgatgattccttcacgagtggtttctacaagaagagtactaggaccagatggtgctaatgcaatgtcaagaagcatggatctaactgataaaatcagacagcaaatctcttcaactgtgcaatcatccagagcttcaccaaggaaaacgcctcttgcttataacagagtaaaaggccctgaagttttgtcaggtgatgttgagagccctgcttctgctgatggaaatgaaagtcaagaggagaatgccagttcaagtccagatgctccaaataattcagaaaaatttacacctccaaagcggttagctaggacatcgtcttcaccatgccgtgttctaatacgcccttcatcaccatccaatgcttcatcaacatcatcatttgcctctaggagattaccaagcccatcaaagactagacccacaacacctgtctcaccatgtagttctgtcagatctgattcggcctcttctattcttagctacattggtgatgctacaagagggaagaagagcccagcacacatggaagaggcccatcagttgcgcctcctgcataataggaacttacaatggcgttttactaatgcttatgttgatgaaatgcaatcaattcagaaaatgagtgctgagactatgctgtacagtgtatgggatgctaactcaaggatgtgtgactctatggttatgaaaagaagccacgtacaaagactacggcaagaggtcaaattggggatagtgttgaaggagcaaatggattaccttgatcactgggcagcactgcaaacagagcattcttcttctttatccagcgcaactgaagctcttaaagcaagcacattgcgtcttccagtttcaggaggagctaaggctgatgtacttactgttaagaatgctgtcagttcagcagttgacattatgcaagcaatggggtcatccatttgccatttgctatcaaagttacagggtacacactctctggttacagaactttcagctgttgctgctaaagaaagtaccttacttaatgagtacagagaactcttggcaacagcagcagcactacaggtccaagagtccagcctaaggacacaactcatacaacaaacagagtgaacaggttaaggtcctgtatgtctaactaggaagatagaggtaaacaccattcattagtttcagtaactgtacggtgcatatgtgtatctttgatgtcattgccattttcttttccccttccttttttttctactttatttagtcttagtcccct

SEQ ID NO: 41499 - DNA, 1237 bp, Setaria italica
  Peptide Sequence Number=SeqID_107473
gtttctctcttctacagaacaacaatagagttgctccttctcattcagatcacagcggagctggttgatctgattctcaagtgtgtcaacctgctggtcacgctttgttatctctccttggagagattcggcattgttagatttctcttccataattgactgcactcggccttgaagctcctgattatctgattctagcttcacaatcttttcaagcaactcttgcttgtgattttcaagggtagaatcttccagtaacttttgaactctcccttgaagttcagaagctaacttttctaaccgattgatgttggaggcagaaatttctagcttcagactctaatcttctgattttgttttcagccacttggcattcttcaacatgttgaaccataacaatttcttgagttttctgcaactctaagattctggacttcagttcttcaatttcaaccttgagagcattgttttctgatgacaaatctacatgttgcttttggagatgatcaaatttgtccttggaagatctttctattagcattttctcctcttgggccatttcatagaacctttcatatgaacaaagcagcctagacacatgacttgacatagaggcatgctctttatctagctcagttactttagccatgaagctgctaagcaattcgttaaaatccttgttgtccttgcatagtttttcaatttcaagaatacaaccttgattttttaagctccaagttgttcttttcactttcactgcttgctaggtttctttcaggctgatgcaaacatcatctttttagcttcagctcttgctccatgcattgcaagcgggagtcaagacatatcaagcgggatttattttcatcaactgaaccctccaactgcttgatgagggaatctttttccttaattgtagtatcatttgaatacagttgttccttgtaactccgatccatttcttctttttcttgtttgatctgcaacatctcctgcttccctgaaatgatcttttgttctgcacactccagttttgttgataaatcatgcaacatgcagttgaattcatccagagctttggaattcttcccgagcatctcctcaaagacttcttatcttcctcagcttgttctgtctgactagctagctgctgcagagtttcagtcagttgatcacacaaggtctttgttgaggagattttcgaatctaatccctgccagagcttcgaatcttcatt

SEQ ID NO: 41500 - DNA, 290 bp, Setaria italica
  Peptide Sequence Number=SeqID_107474
gctctccattgcttgtgtgtataaggcctatgttatatagtatataacttcgatcatagggatcaatttctagtcgcatagcttcataataattctgcaaagcttccgcataatttccttcggattgagccaacatcccatctctataataagtaaatgcccttttttccccggaggttgtcggaattatttgcaataaaatattggctacaatcgagaaggtcttatcaatgaaatttccatttatacgggatctaggcataattcccaacccattctatatagaattt

SEQ ID NO: 41501 - DNA, 339 bp, Setaria italica
  Peptide Sequence Number=SeqID_107475
cctcaccttccccaagcgtgggtttcctttactaattttgttctctctatgcgaaccccctctctctttctcgtaagaatgagatgtaggtagggctaaaaaaaaacgagtcaaatcgcaccatctctataataagtaaatgcccttttttccccggaggttgtcggaattatttgcaataaaatattggctacaatcgagaaggtcttatcaatgaaatttccatttatacgggatctaggcataattcccaacccattctatatagaattcttttcattctatcacaaaataacataaaaacaaacattcgattcttataaatcgatccatatgcta

SEQ ID NO: 41502 - DNA, 458 bp, Setaria italica
  Peptide Sequence Number=SeqID_107476
ctcgtgaagtgtctttccttcctacagctgatagggtaaaatcgttgttttgacgatccctatgtagaaagcccttttttctagtatttactagaaaattttctcctttttttttcttctttctatagtggagatagtcgcacgtaatgacagatcacggccatattattaaaagcttgcggtaagaaggggtttcgttctagcgcccggaaataatattccaaagcctttgtatgctctccattgcttgtgtgtataaggcctatgttatatagtatataacttcgatcatagggatcaatttctagtcgcgtagcttcataataattctgcaaagcttccgcataatttccttcggattgagccaacatccgttacggtcgttcattctattcaattcaaaaaatctccgttccaaaaccgtacatgaggttttcatctcatacggcttctccctt

SEQ ID NO: 41503 - DNA, 2389 bp, Setaria italica
  Peptide Sequence Number=SeqID_107477
gtcctattctggtggagaggcacatgcaatgtttgtccaaagtgactggacttttagtggattcaagcaagagatatcatcgacacttaacaacctgaaactcgatcagtttgcattcaagtatttccttccaaagaatgataaaaccttgatatctatttccaatgacaaggacctacgccgcatggttgaattccatgcggagtcagagacaacatacatttatgttatgaagaaagctgacaacaggtcaaagaacgctgttgctgactctggcactcctacagatgcctttgctattgtcccaacaactcaggatgggtctaagagacaaaaggtttgtgcaagctggaagaatgttataactggagtgggccaagtgtttgaaggtcctaaggatttccgtgatgccttacataagtatgccatcgcacatagattccattacagatttatcaagaatgattcatcccgtgtgactgctgaatgtactggtgaagattgcccatggagaatacatgcttctaagtcccctgcaaagaaagaattcatgatcaagaaaatatctgaaagtcacacctgtgaatcagaaacagtaaaaagccatcggttggcttctcaaagatgggttgctagtgtcataaaaagaaaaattgcgtgatagtccaaactacaggccaagagatattgcaaatgatctccaacgggagtatggactatgcctgaactattcacaggcttggcgtggaagatcaattgctcagaaagaactttatagctcacatgaagaagcgtgcagtcagctaccttggttttgtgaaaggattgtagagacaaacccaggaagtgtggcaactgtagtggctttggaagattcaaagttccgtttctttgttgcattccacgcgtcgctccatggttttcagcatgggtgcaggccgctcctgtttcttgacgcgataactgcaaagccaaataagcactggaagctactggctgctacttcggttgatggtgaaggtgacgtgttcccagttgcatttggtgttgtggatgatgagagtcgtgaaaattggcattggtttctgcagcaattaaaatcttcacttagtacatctcgagctatcacattcatatccaatggagaacatggactttgggatgaagtatcttcagtttttcctgatagtcatcatggctactgtgtggagtctcttattgaagaatttaagaaacaattggacgatgcatggactgaggaactaaaagatgctatggttgagcatcttaagaaggccatatatgcatgcactactgacgagctcaatcaatatattgagctcataaaaaatgcatctgataagcttgcggattggcttttggagatcaaccctgagcggtggtcagatgcccgttttaagggggtacgtcatggacagtattcgtgcaatatctttggcactgtttctgagtggattcccacgagatatgagctttcagttgtgcaattggttgatacgataagatgcaagctgatggagatgatgtacacacgcagggagtcttctaatgcatggactgaggtattaactccatcagccaatcagaaactgcaggaagaggtgagcaaagctcatacgctaaacgtcctcccagcagaaaatgatgaaaatggtagtaacatatttaaggtctgtgatgactcggttaatgttgtcaaccttgccatatgggaatgcacctgccaaaggtggcgtatttctgggttgccgtgcatgcatgcaatcgcagtgattgagcgcactggacaatatgcatatgactactgtgccaaatacttcacgacgggatggtaccgcttgacctactccctgtcaataaaccccatacctgatgtcattgtgcctgttacattaattgatcctgctcagagcccagcaacacacccatgtccagttcgaacccgtcgccgggttggccggcccaaagagaagccagctgatcctcgcattgcaatcaagagggcagtgcgctgcagcaggtgcaagggttatggccacaacaaggcaacttgcaaggttcctatcagcacatagtcttgggtcagctctgcaatgtacattaaggtggaaagttgatcgtgttattctctgcaatgctagtgcttccgttacttttgatagactgatatatgctctagtgttcattttagctccaaactgctctgtattttgtccattgcttagactaactgtactcagtttgtgaagtaaacattgcggctgacattgtggaaagcgttggagggtctgttgtattgcaatccagtttgctcctttttactacccgttgtggctgctgtgtggctttctaccatctcaacaaggcc

SEQ ID NO: 41504 - DNA, 498 bp, Setaria italica
  misc_feature (1)..(49): n is a, c, g, or t
  Peptide Sequence Number=SeqID_107478
nnnnnnnnnnnnnnnnnnnnnnnnnnnnnnnnnnnnnnnnnnnnnnnnnttttttttttttaaattctgaaagggaactcacaacaatagtcaatttataccgagtatttaacaatcttgtacttatttgcaaagggtcatagcaaagggtcataggataagatgtatttattggccaacaagatggtaccatacaacagtagtcatgcaaagcaccgtatcgaaagaaggtaacatcatgatgacccctttggaactagaaggaaataaacacaaaacagatggcacactggccggaatatgatacccagttattgaacaaaacacaaagggtaggtagcatggagtagtatctggagatgaacacacgtctgagtgtgtggcatcaagatcaccgaccttatggaatataaagagagacacaaaacaaagacgtactacacaaggcagctttaagtggatacgatatccaattattcagcacaaggacgatccaag

SEQ ID NO: 41505 - DNA, 436 bp, Setaria italica
  Peptide Sequence Number=SeqID_107479
aaaggtcaaatgatgtagccttacaagatatgatgagaatcgataactggtaggtaaactaaatgaaattacaatgatgcgccaataattaaatccaagagcacctgataatggcgatgcttgcaagtgaaccggaggtcgaggtgatgctgccctattcacccaagaagtcatcgataaggacgaatcttacaagcttgccggatgtcgaagttgatgcaacactacttgctagaagaaattgttgggatacgaggtaggctacgctagcgcaaaacaaaatttttctaccgcgtaaagcaaggaaactaccatatattgatcacgggattaccactcaacgtactggtgcggaagatgcagaatcgtgttggggcagcaaagtcgatcagcatagttgaacatgtcaacattgagcagctcctcagcagctgtc

SEQ ID NO: 41506 - DNA, 2115 bp, Setaria italica
  Peptide Sequence Number=SeqID_107480
tcgcaattcacagctcgcaaagggaaaggccacaagcagcacacggcggcgtgccagcagcgctcgccggagatatggccaaggacgacagcccggcggagacggtggaggagaagccggcggcgccggttctgcggtcgttcgcgtcggtgttcatgcacgcggacgcggcggacgtggcgcttatggtgctgggcctggtgggcgccatgggcgacggcctgtccacacccgtgatgctcctcatcaccagccgcgtcttcgacgacaccggcagcgggcctgacctcctccaggagttcagctccaagatcgacgagaacgcgcggaacctcctcttcctggcgctcgccaactgggtcatggcgttcctagagggctactgctgggcgcgcacggcggagcggcaggcgtcgcggatgcgggagcggtacctccgggcggtgctccggcaggacgtggagtacttcgacctcaacgccggctcgacgtcggaggtgatcaccggcgtctccagcgacagcctcgccgtgcaggacgcgctgagcgagaaggtgcccaacttcgtgatgaacgtcaccatgttcgtggccagctacgtcgtcgggttcgcgctgctgccgcggctcatgctggtggcgctgccgtcggtgctcctcctcatcatcccgggcttcatgtacggccgcatcctcatcgacctcgcgcgccggatcagggagcagtacacgcgcccgggcgccatcgccgagcaggccatgtcgtcggtgcggaccgtgtactcgttcgtggcagaggggagcaccatcgcgcggttctccgccgcgctcgaggagtcggcgcggctcgggatcaagcaggggttcgccaagggcgtcgccatcggcagcagcgacgtccgccttgccatcttcgccttcaatctctggtacggcagccgcctcgtcatgtaccacggctacaagggcggcacggtgttcgccgtctccgccgccattgtcgtcggcggcctagctctggggtcggggctgtcgaacgtgaagtacttctcggaggcgagctcggcggcggagcgggtccaggaggtgatccggcgagtgcccaagatcgactcggagagcaacgctggcgaggagctggccaacgtcgccggcgaggtggaattcaagaacgtcgagttctgctacccatcgcggccggagacccccatcttcgtgagcttcaacctgcgcgtgccggcggggcgcacggtggcgctcgttggcagcagcggatcagggaagtctacggtgatcgcgctgctggagcggttctatgacccgtcggccggcgaggtgtccctcgacggcgtcgacatccggcggctgcggctcaagtggctgcgcgcgcagatggggctcgtcagccaggagccggcgctgttcgcgacgtcgatcagggagaacatcctgttcggcaaggaggacgccacggaggaggaggtcgtcgccgcggccaaggcggccaacgcccacaacttcatctcccagctgccgcagggctacgacactcaggtaggtgagcgtggtatccagatgtctggaggacagaagcagaggattgctattgccagagctatccttaagtcacctaagatcctcctccttgatgaagccacaagcgcattggacacagagtcagagcgtgttgtgcaagaggcactagacctggcctccgtgggtcggacaactattgtcattgcacatcggctctccacaatccggaatgctgacatgattgctgtgatgcaatatggtgaggtcaaggagctgggctcccatgacgagctcattgccaatgagaatggcctctacacatctcttgtccaccttcagcagaccagggattcaagggaggctaacgaggttggtggaactggaagtacatctgctgcggggcaatctagcagccacagcatgagcaggaggttctctgcagctagtaggtcaagctcaggacggtcgatgggtgatgaagaaaatgataatagtaccgacaagccaaagcttcccctcccatcattcagaaggttactgatgcttaatgcaccagagtggaagcaggctctgatgggaa

SEQ ID NO: 41507 - DNA, 536 bp, Setaria italica
  Peptide Sequence Number=SeqID_107481
ggaataagggaaaacaatttgttacacgttatttacatggatctcataagaaaaatcacaccttccacaactccggcctccaggctcagagcgtactctacatgcaggtatgccacgaactttccttcacctgaactgaagcacctgcacggtagatctgatgtttagagctataggggacaaataaggttggaataagggaaaacaatttgttacacgttatttacatggatctcataagaaaaatcacaccacatgtcttaacgtctctttgggattgacaatttgatatattgtgatgagtttgtttggtggaagaaatttaactgtttggttttctgcttttcctttattctagttaagcgctcgtatgggcaaacaaaaattaagaagatgctaattatcaagcgcatgatatttttcaggtgatcaatcttgtttgcccattagccatcccgtgatcaacatcttagccactttttatcatcttccttccgctgtttcacctctgttactctcttgcgtcttcacccccc

SEQ ID NO: 41508 - DNA, 479 bp, Setaria italica
  Peptide Sequence Number=SeqID_107482
gctgatgctgaacagttgttgatgctgctttagatcagactgggaaatggagtcaaggagatctattgcgaaccaaagccagaattcaggctgcacaggggcaattcagagatgcagttgagacctatacccaacttcttgctatcatccagcttagacaaaaagtgtaactgctgggatttgcttggccaaggtaccttgaaactctctttttttggaaacatggcagctgtaatcacactttcttgctaatatgccacataaactcaaattacaacaaaaggtgaaatttccttattgctgttctatcaaatgtctggtagcatcttctggtcgaagcagtatgcattatatagtgatgtgaagacatacagattcaattattgaatactaattcagtttcaatattcatgaacagagcgtagttctttttatgttttgtttgttgcacacttactctaatatcctttcttttctgg

SEQ ID NO: 41509 - DNA, 2237 bp, Setaria italica
  Peptide Sequence Number=SeqID_107483
aagcaagggcattgctaggaaggctagaatatcagcggggccatgtagaagctgcactccgtgtctttgatgggatagacatatctgcattagtccctaagatgaaaatctcaattgctagaaaagcagatcgtcgaaagactcattcacagtgggattctccaccaatgcccttgcatgctgtcagccttctcatggaggccatatatctcaaagcaagagcgcttcacgatcttggaaaatacaaagaagctgcacaagaatgtagaatgatattggatattgtggaagcagcaatacctgagggcttgccagcaggctttggaaaaggttgtaaattgaatgaaataatatgcaaggctgtagagttgctccctgagctgtggaaatcaggggggttttcacttgaagccatttcttcatataggaggtcgcttctcaataattggaatcttgatggagagactgtagcaaggatacagaagaaatttgctgtttttctcttatatagtggctgtgaagcacgccctccaaatcttcattctcagttggatggttcatttgtacctcgcaataatatggaagaggctattcttctcttgatgattctattgaggaagttcaatctgaagaggattgagcgggatccctctgtgatgcatcaccttacttttgcactgtccatgtcagggcagctaattccattggctggacaatttgaagaactgttacctgatgtgttagacaaaagagaatggttatataatgttgcattgtgttacttagcagaagaagatgatctcagtgccctgaatctactcaaacaaatactgaaatctggagatgattctgattgtctcaaagaacttctcctagcttcaaaggcttgtgttgagatgagtgcttatactgaaggtgcttcctatgcacggagagccattgccaatatgcagggagggtgtgaacaaatgtcgggagtcgcagacctattgcttggtgttacgctttctaatcaagctagaagtgccatatctgctacagatagagcttcttggcagtgtgaagcgctggaaatgcttgggaacgctgaaaagaagattcacgggaaagattctagggtattgtacagtctcagccttgaaaatgctgagcagaggaaattagaatctgcttctttttatgcaaaggagctggtgaaacttgaggctggatcggagttgaggagttgggttcttttagctcgaattttgagtgctcagaagcagtttgctgatgctgaaacagttgttgatgctgctttagatcagactgggaaatggagtcaaggagatctattgcgaaccaaagccagaattcaggctgcacaggggcaattcagagatgcagttgagacctatacccaacttcttgctatcatccagcttagaacaaaaagtgtaactgctgggatttgcttggccaagggcaagaaggatgataatggcctggaaatagagatctggtatgatatagctctcttgtacctaggtatggcacagtggagggatgcagagatttgtgtattgaagatgagatccatcagtccttattctgcattggcttggcatgctacagggaaaatatatgaagcaaaaggtcttacaaaagaaactttgggagcttttttcagagcattagaccttgatcctaaacatgtcccaagtttgatatcgattgccaccgtcctacgacaacttggtgacaggccattgccttctgttcggtgcttcctgactgatgcattgcaactggatagaactaatcatgttgcatggttcaatcttggcctgctttacaaagaggaaggtggcaggtcagcagttgaagctgctgaatgctttcaagctgctgcttttcttgaagaaacagcacctgtagagcctttcagatgacagatacatgtacaggggctatagatgtaagctgctgtatgtattttttttatatatttctcttatactgatgaaatatgggattacagagtcccagaaacgatcttcaggaaatcatagcattaaaaactgttggaaaaaattttgtttaacaattcaatctatagttccaatttgtgtctatgtagcaacaagaaagacgatgctcttcaaccttgtgatatacagattgacgaccagtacagagtgtcggtgtatcttaagcaaaatgctttcacatatgaagtattcagactacactgttcg

SEQ ID NO: 41510 - DNA, 424 bp, Setaria italica
  Peptide Sequence Number=SeqID_107484
aaagacaagcaactgccagttaatttttacttttgttgactgatgatcatatgagcctagtggataagtggatgtaaaatatctttgtatgaatatcttcaaattgttttctcaaacattgtacttagacattaaataattatataggaaggttagctcttgatttactaatattttgcttttgtatttcaatgctgcaccggtaatgttgatcaatgtctgctgaccgctaatcatgtgccattctccaaagataattgctcttccatagttcctatcatatattttgatgctctgtcctcataatatatgacagtggaatctagttatgcacttcctagcagttatggttaattgcatggctatatgacatgtttacttttggttcatagatttgtattttccgttttgagtatttttcgga

SEQ ID NO: 41511 - DNA, 380 bp, Setaria italica
  misc_feature (271)..(271): n is a, c, g, or t
  Peptide Sequence Number=SeqID_107485
tgtagtagtaggagtagtagagagccagagacagcgagggacagaaacagaataaacgagcataaaatcaatttagggactagccaggagggctcacttggacaagtgaaaagatctccagagaaaagagctaacagtgaacccaaggggacagctagagactaagaaaacagtgcaaaggtgaaacaggagagagtccatcaatcaagggcaagacatctggaagtgagaggtccccaatatttggtgtggaaaagggtctccgaaaacntcacaactgcatccatgaggaagagtcagaattgtatgccaaccaggccaactaaatggatggtgttcataagcattccagttacaacatgtcttttcttctctgtatt

SEQ ID NO: 41512 - DNA, 1290 bp, Setaria italica
  Peptide Sequence Number=SeqID_107486
ggactacgctactgccaagagagagggaaatcgaccacgacacgttgcgcgttcaaagcagggcgagccacgcaaactcgttccggcgcgcacggagcggagcaccatcaccaatcgcgcgccatggctgccgctggtgacgccggccgacgacaagggaggacgaccgcggccatcgtggtgccagcggtgccgctgagttccggcaagccgatgccgcgggtgggcttcggcacggcgacgccaacgttgggccagaccgagggcgacgccgccgccgtgacggatgccgtcctccgcgccatcggcgccgggttccgccacttcgacaccgccgcggtgtacaacgccgaggccgcgctcggcgacgcggtggccaaggccgtgcgggcgggcacgatcgcctcccgggacgaggtctacgtcacctccaagctctggatcgccgacgcgcaccccggccgcgtcttgctggcgctcgagaagacactacagaatctgcggatggagtacgtggacctgtacctgattcacttcccggtgagccagcggccgtcggaggttgaaggaggcccggtgctggtgaagaaggacctggtggcgatggacatgaagggggtgtgggaggagatggaggagtgccaccggctagggctggccagggccatcggcgtcagcaacttcgcgtgcaagaagctcgagcacctgctctccttcgcgaagatcccgccggctgctaaccaggtggaggtgaacccgtgttgccggcagaacaagctgcgggagttctgcagggccagaggcatccagctatgcggctacgctgcattgggcgggaacggcacgccgtgggccaacaattctgtcatgaagtgccctgttctgaagcagatcgcccaggacaggggcaaaaccgtcgcccaggtgtgcattaggtgggtttacgagcagggcgactgcgtgatcaccaagagcttctccgagagtaggatgcgagagaacctcgacatcttcgactgggagctcacagaggacgaccaccggaagattagtgagctcccagagtctaggggcaactacgattcccttgtccatgaatccgggccattcaaaacagtggaggacttgtgggacggtgagatcactgccggccaatgtaaccaaacggcgcttgtttcgtctgactgatgaatatgatgttctaatggtttctgtccgtacaaatatgcaaccaatatattatatattgtgctagtgttttgtgtgtctcttggttatggaggcacgaaa

SEQ ID NO: 41513 - DNA, 462 bp, Setaria italica
  Peptide Sequence Number=SeqID_107487
tactgaccttactttcaatcttttgatggggaatggcacatcgtagtctcaaatgtggtagctagtttaggaaatgtgggttactgtcaaatcatatagttttctagcgatccaggagcaaattttaaatattgtacaacatcgataagaattgtagtgtggacgatacggtacgtgcagctgcagtggtgtttgttacctgacaggtacgggtcacagatcgtgctgagaggcgcgacgatggcgggcggcgtgttggggaaccaggtgagcacgagcctgacgacgagcacggtgttgtagaggctgaggaagttgttgatgccattggccaccaccacgccggccaccgagtcccccagcaccgccgcgcacccgctcctgaagccgctcttcgccgtccactcccacctctcttccttctcccagagcaggaggctgctggtggcggcacggcgggac

SEQ ID NO: 41514 - DNA, 943 bp, Setaria italica
  Peptide Sequence Number=SeqID_107488
ttttttttttttagctgaaagttcgattcaggtgttatggctgaaaatttgcattcgtttgcatcgggtgtctgaaagataaactgtaatacgaacagtcaagcaggttcctctacatacatgcagaaagcacagccctcaaggaaggagttcctcaacgcattacaacaccaaaaaaaaaacatttgaagcgacgtgatctaccaaaataattctgcatgctacattgccagaagtttgtgattcgatggttacagggcctgcatgcagaactgctttttcatgctcaagttggagtgcagattatgcgagcgtccgatccgagctatgttctgtccagccggtaacaaggcactgacgaacacaacgcctagtgatcaccatctccctgcgatttccgggactgcattctctgcatccatttcctctggttggccgtcaggtcaaggggcgcggagcagctggacgtagcagcgctgctatggcgatgatgctctggagctgccgcagagtcggggagctctgccggaagcgcggcggcggtgctggtgaaggcgttgaggaccaggaaggcgaggatgggcgacaggtccagcgttccccccagcggcgggatgatgccccggaagatgttcaggtacgggtcacagatcgtgctgagaggcgcgacgatggcgggcggcgtgttggggaaccaggtgagcacgagcctgacgacgagcacggtgttgtagaggctgaggaagttgttgatgccattggccaccaccacgccggccaccgagtcccccagcaccgccgcgaagcagtgctccccggacagcagcgcgtcccgccgtgccgccaccagcagcctcctgctctgggagaaggaagagaggtgggagtggacggcgaagagcggcttcaggagcgggtgcgcggcggccgcggacgcgagctc

SEQ ID NO: 41515 - DNA, 678 bp, Setaria italica
  misc_feature (660)..(660): n is a, c, g, or t
  misc_feature (663)..(663): n is a, c, g, or t
  misc_feature (666)..(666): n is a, c, g, or t
  Peptide Sequence Number=SeqID_107489
agcggctgcttcggccgcaacgcgccggcgaccggccgccggcacgccaccgtcgtcaggctgtcgatcgtcgcgtgggtgctggtggcggtggcggcggcgatgttcctctacggcgcggcgctgaacaggggcgggacgcggggcctctcgacaagcaggcggggccgctacggccgcggctactactactacggctgcgtcgtgctcaagagcggcatcttctccacggcgtccatcttgtccggcgccgctgcggcgtgcgcgatcgcggcctacgtctacctccagcggatggacgactacccggccgtaccgggccagttcgccgcgccgggcgtggcgatggggcagccgcagtggtcgcagccgtacccaccgccagcctaccccccgcctccggcctacccgccgccgcctatggcttaccctgctcctccgccgtacggcggctacggcgccaagcaacctgcggggacagcttgacgtcagttccaagtttccaacccacaccgtgtacggtgtaccggtgtacgtgtcatgaaatctattacgaatttgtaagtgcaatttatcaaatgtggaatctattgctccctccattttatgagagtacaagatatatttttatttttcaatgaaaggcttattaaaaaatanganacncacagggagtag

SEQ ID NO: 41516 - DNA, 253 bp, Setaria italica
  Peptide Sequence Number=SeqID_107490
aacttcccagcacacaagtaacagaagtactaccacaggcaggtaaactgggatatacaacatatcatacgtacacgaaggcacaacctgaagtattgacacaaggacacaaactcaactgaagacgcagttcttaattcaatggcagcaaaacaaaaataacaaataccaggatatgtatgacaaacaggtggactgataattacatggctagtacgcatacacaagcagaagctcaagtatagaaacaatg

SEQ ID NO: 41517 - DNA, 652 bp, Setaria italica
  Peptide Sequence Number=SeqID_107491
tgtcctggaggggaagctggaaggtccgagtcatggtctgtgaggtcgaagtcatcatcatcactgtcagatagccccgtggtggcagcggtctttgagggtttgggattgtggcggaacgagccagttgatggaggagcccgcgattggggccggtgctgcggacccttcaggacgcgttgggtcttccctttgcggcgcaggcgtgacgtcctcgacggcgaggcaggaaggccgaagtcatcgtcgttgaggtcgaagtagtcgtcctcgctgtcagagatccccaaggcagcggcggccttggagggttcaggattgtggccgaatgagccagtcgacggaggagcccgcgaaggggggccgtgatgcgggcgcttgaggccgcgttggctcttcgcggcgcgcgaccgcccgtccgcatctaggtcgaagtcgtcgtcgtcggagaggacgacggttgcggtgctggtgccggcggcggaggaagccttgcggtcgtagcggaatgaatcgatcggcggcggaggcttcgaggtcggctgaccggcgcgcttgaagacgcgcgaggacttgaaactgtggtgcgaccactcctcgtcggagatctcctcgaaggctcgcggcatcggagcgagacggcgaccgctag

SEQ ID NO: 41518 - DNA, 380 bp, Setaria italica
  Peptide Sequence Number=SeqID_107492
cgggttcttccatgtatccacaatgagttggcagcgagtttcaacgatatatacagaccgtggatcacaccactggcatgttgtggtctctatgcctggtaaatagttggatcagactggagagtcggttcccagaatcccacgcatgatgaacccttcatctgaggaacaaccgtgtcattcagcatctcatatatttcagcacattgtggatgctcttgatccctagagtagaacacatgattcctcatgttcgcctcaatctgactaaaaccaggcgccttcttcgacttactgcccttcatgatcttccacacatttgctgtctcatcccacattccatgttgacgcaatacattgccagaagcgtgtagcgtcct

SEQ ID NO: 41519 - DNA, 231 bp, Setaria italica
  Peptide Sequence Number=SeqID_107493
gcgcacagtccagcagcagcggtatgccgccgcatttgtcagcaatcttggtgccagcttctctaacaagctcagcaggccagtcacagtggcatgtggccatccatctagccacgaacgaggaggagaattctcgaccgagaggctgcaggtagaagggcttggaaacgttggtggttcctgtgaatgtggcaagcttgggtgcgatgtcaggggtccgggtggtgagga

SEQ ID NO: 41520 - DNA, 597 bp, Setaria italica
  Peptide Sequence Number=SeqID_107494
gatcactagtccaagccatgtggctcccatccccctccactgacggagctacaaaagaaccattagcttccatctgttgctgatgaccggtagccaaggtggcagcctggctgctgcttgcttggctagtgatgtgtggaagtggcaacctaactttgggaagattgttcatagcagtaggctggccaccagagccatagtgatttggcttgtaggcacctcttgcaaaggtgagcctctcctggccagaagtattgttctgcaccctaggctcagcttcgtagaggccgacatcattaatgctgtagcgctgcttcttggtgggattttgtagcctttgaaaatacttctgggcatggctggagatctgcaccggggtcttgctgggaacatagtgcctggagatgatcttccaattgccacggccgtatgcacgcaaaccatagaggaattgcctgtgctcctcttcagtccaaaaccttgcggcatgttgcttccgaagagtgggctgcttctgcagtgcctcttcccccttcctcatggctcccatctcctccataagagaactgcatagcacttcttccatgtttcccatgc

SEQ ID NO: 41521 - DNA, 876 bp, Setaria italica
  Peptide Sequence Number=SeqID_107495
ggtagccacgttcgggctgacggccaacatgatcctgtacctcaccgagcggtacctccatgtcgaacgccttcgccaccgtcgtcctctacaactggaacgccttctccaacttcctccccatcttcggcgccgtgctcgccgacgcctgcctcggccgcttccgggtcatcgcactcggctccttcgtcagcctctctgggatgtgtctgctgtgcctgacggcgatcctgccggtgtacaagaagacgccagagtgcgcggcgcgggtggcggactgcgaggtggtgccgtggcagctgccgctgctgttcacgtcgttcgcgctcatgtccgtcgggtcgggcggcatccggccgtgcacgctggcttcggggcggaccagctggacaggcgggacaacagctccagcaacgtgaggacgctgcagaccttcttcaactggtactacacggtgctgggcctcgccatcgtgttcgcggccaccgtcatcgtctacatccagcagaccaggggctgggtcgtcggcttcgcggtgcccgtcgtgctcatggtcaccgcgctcacgctcttcctcctcggcccgcccttctacctcaaggcggcggcagacaggagcgccatcgtcggcctggtgcaggtgctcgtcgccagctacaagaaccgccacgagcccttgccgccggagaccgccgacgcctcgaccttctacaacaaagccggctccaagcccaggacgcccaccaacaagctaaggtacttgaatcgggcctgcgtgcttaggaacccgagcaaggagctgagcgccgacggggcgcgtgcgaccctggagctgtgcacggtgcagcaggtggaggacaccaaggccgtcatccg

SEQ ID NO: 41522 - DNA, 490 bp, Setaria italica
  Peptide Sequence Number=SeqID_107496
tcccagctgtcgcacctcacagagtccatcttcattgccgcggcatcggcttcaccaaccatcgtttgtcaacctcagccaggggttcacagagctcaccaacaacgtcatctcgagagcggtgttcggcggcaagtgccagcagcagcaggagtacctccaggagctcagcatcgtaacgatgttggtaggagggttcagcctggtggacctgttcccatcgtcatggctggcacggtgctgagcagagccacgtgcaatctgaggaggagccacgatcaagtccagcacataatcagcggcatcatccaggaacccaaagagaaacagagtgcatctgcctttcctggtcatcaagacgaggacctgcttgacgtgcttctccggctgcaggaggaagactccctcaccttccctctcacgatggagatcatcggtgccatcatcatttctccgcatttgtatgctttctctgtttgcacatgtataa

SEQ ID NO: 41523 - DNA, 449 bp, Setaria italica
  misc_feature (436)..(436): n is a, c, g, or t
  Peptide Sequence Number=SeqID_107497
agtgtctcaaattcttattaaatggtctggcatgccgcgttcccttgctacttgggaggatcagacagcattgttccaacgctttccacatgcgcctgcttggggacaagcaggtttgcttcaaggggggaatgttagtgcagctatcggaccaactacagaagtggcgcagcacactacagagactgaacctgctgtttcagatgctacaactgaagcttattcgggtgttgggctgagaagggctagcaggcccaggaaggttaatccgcatgtgatatgtctagattgggttaagctgttgcgtgagtgagttgtgtgccgggtgttaaataggagagcaggtgagctgagaggggtatgaagaatcttgtaacaaacttctgaactctgaaggaaacgtctccaagcggaaaacaaaaaaaaaaaaaaaaanaaaaaaaaaaaaa

SEQ ID NO: 41524 - DNA, 508 bp, Setaria italica
  misc_feature (444)..(444): n is a, c, g, or t
  misc_feature (446)..(446): n is a, c, g, or t
  misc_feature (456)..(456): n is a, c, g, or t
  misc_feature (458)..(458): n is a, c, g, or t
  misc_feature (461)..(461): n is a, c, g, or t
  misc_feature (467)..(467): n is a, c, g, or t
  misc_feature (473)..(473): n is a, c, g, or t
  misc_feature (482)..(482): n is a, c, g, or t
  misc_feature (484)..(484): n is a, c, g, or t
  misc_feature (490)..(490): n is a, c, g, or t
  misc_feature (500)..(500): n is a, c, g, or t
  misc_feature (502)..(502): n is a, c, g, or t
  misc_feature (505)..(505): n is a, c, g, or t
  misc_feature (507)..(507): n is a, c, g, or t
  Peptide Sequence Number=SeqID_107498
tgttcttagtatttctagtaactattctaaccctagttactaactactaaatttattcttgtcctagttggtctacctattggacattgctcttcttcgaaatgaaacctcaaatgcagccaaagttattaaatagtagattcagataacctgctaaaaataacacaaaatgccttcaactgtttgattgttgatcatccctgcagttttagtagcccatgatgtcgatatcactgtcaaaggggtcaggcagagcattcacatcctctatactgaaccccttgcgatgtacgactttcaggccctcgagcacgactttggcttccacggaggccctgtgacattgactgagcagattttgcttttctgtaatccatgcagggttgttgaacatggaagattgaatcttcatgatctagagcagacaaccattacgaaggttananaagaagaaananaanaaatanaagaanattaggtananaattanatattagtananaanana

SEQ ID NO: 41525 - DNA, 985 bp, Setaria italica
  Peptide Sequence Number=SeqID_107499
tggaaaacgacaagtgaaattgataacaagattatagtctagattcagaatctcagatgatttactgacatgaataaaatgcctgctaatcatcggtagcaaatcttaaaggtttaaatatagaggccacctaaatcattgtctagattcagaacatcaacccagtacaacacaaattatctgccagtggcaccatggacattgctcttcttcgaaatgaaacctcaaatgcagccaaagttattaaatagtagattcagataacctgctaaaaataacacaaaatgccttcaactgtttgattgttgatcatccctgcagttttagtagcccatgatgtcgatatcactgtcaaaggggtcaggcagagcattcacatcctctatactgaaccccttgcgatgtacgactttcaggccctcgagcacgactttggcttccacggaggccctgtgacattgactgagcagattttgcttttctgtaatccatgcagggttgttgaacatggaagattgaatcttcatgatctgcagcacctgcgcatttgcaaggaggaaacacacaaattcaaggatgtttgggttctcaactttgcttctttggttctcaatgttgatttccagcctcacgctcttgagatggttcaccatacatccaacgggatcgagcttctggtagtagtttgagtcaattgtgtgaaactccccttcggcgcgcttgttgccctggatatgcaatgtctccaggaaggggaagcacttgagcaagttcatcactgactccaagttcttcttgctcgataacatcacactgatagccagaaccttcacgctgttgaaaggagcacgcaatcccttggcaaccttcttctgagcagtaggcatttcaatgccgtggaagaaatcccggtagcccaccacgagatagcctaaagcagtaagctttggcgcgccgacgatggtgatctctgttcccagatgcg

SEQ ID NO: 41526 - DNA, 336 bp, Setaria italica
  Peptide Sequence Number=SeqID_107500
tctgatgaatttgcgaagagggcaggtgtccttgccgtcaacaatagacagcaagactaaggctgatctcgaggaagtcgcgactgctgaatctgatattatgaacttgaagcaaaaggcttctgatcttcgtgggcaagtcagtggccagcagctgtgctgtgaatcatgcaacaaacggctcctaaatacagacaggactggcggacctgaaagctcctcagtggaagcatcatcgattgtcaggagtgattctgcatctggcacgggtgatgttgagcaatcaaggaagcagaccacgcagggttcaccttcttcagcagacaagccaggtca

SEQ ID NO: 41527 - DNA, 418 bp, Setaria italica
  Peptide Sequence Number=SeqID_107501
tgcgagaaataaagttggagggttaccattggaagggtactgcagaacaaactcctcaggaactttacttaaagcttcagctcctaagatttgctccctaggaatccatccatctgaattaagcagatctaaccaatgtccaatgatatccatagatatatgcacatcccaacgccaaatgactaattgatggaagccctcatcccacagaaatccccttggaaagaatgagcggctgggaacagctgtatataacgcagctggccaatatggaatgtatttatccgcattcttttgtgtaaaaccttttggaagcgcaattttggactgcccatagaagtagccaacaccaccaagaagatttgacaaggcagctctaccaacagataattctttggagtcaatcttattatttaca

SEQ ID NO: 41528 - DNA, 1682 bp, Setaria italica
  misc_feature (1)..(24): n is a, c, g, or t
  Peptide Sequence Number=SeqID_107502
nnnnnnnnnnnnnnnnnnnnnnnnaagtactaagttactagctccacgcagtttcaacttttttttttagttatgtaatagtgaacagacttcaattgtttgcagtctctataagctcatagttcccagggtggtttcgaagaaaactcccaaaaaagagtttctcaaggaactaaaaatttacagcgtcagaagaatggggcgatcataattgctgtgtatccgattctaaacagatcgaccaggggtaactgccagaaatttcatgattaaagcagcaatgctagtatgctacgaatcaagtttccctactgttttcattgaaattgagctaaataaaaggccagctgccagcctctccattccaactgccatgtgtcttctgtggttgttagcgatgtatagctcacctatgcaatgttgggtaggactctgccatgatcagaacaagaagtgaagtccatccagtaaacgaccgtgcaccctttccctttcctttgttgttctggtcatagttttcccagaagaatccagtttcatggtaattctgcacgatgttccggataagatttgatcttagcttgtcgtacaattctcctgcccttcccttgtacgggccatcctcatttgcatagtgatgcagtgctgaaagaatcatgtagttcatgtttatccaaatggcacctctccaatatgggggatcatgctctgtattacgcttcatatatattgaacttgttctagaaagtgaccgaaggccgtaatctgtccacaatatagaggtattagatattagatcgagctgcttgtcaagaacccatgattcatgtggaatagcccccatcatgaatgggaagagactgacataaccaacatggggtactaattgcagctgagggggttgtaatgtttctcgcaagagctctcgtctcatagtatccttatcttggacatcataccatctcagtcggaccttttcagtatggttaccatagtcgaaataagcgccaattttgtcatccaagtgcaacttgttaagcgttctaaaatctgaaagttgatttgacatcttatagtaatccttctcaagagcgctgtccattttaagaaactctgcaattgaacgaatgcagtttgtagctagaagcatccaacaacgaaggtcaacatggcgttcttcatcattagggtgagatgcacgaggatagtcatccaatccagatgtcaacgtctttgggttcaactcccttgttgtcatgttgtctcttccatgccaatagaaggtgccttcgtatttacctgattgtgtactgttgaaccactggaaccaagaattcagccgtatataagccctttcaaggaaagaagaaatcttttcagcttcatcgcctgaaaactgttttgcatgtattccacttgccaaatcacgtatcgcgagaaataaagttggagggttaccattggaagggtactgcagaacaaactcctcaggaactttactgcatgattgcagaacttggatgatataagacgtcacactaaatttatcactggttttgaccagagtccatagttcatagcagaaaatccttaaagcttcagctcctaagatttgctccctaggaatccatccatctgaattaagcagatctaaccaatgtccaatgatatccatagatata

SEQ ID NO: 41529 - DNA, 1408 bp, Setaria italica
  misc_feature (1)..(8): n is a, c, g, or t
  Peptide Sequence Number=SeqID_107503
nnnnnnnncttgttttttgttttttgttttttttttttttttagccaacaaagcaacccccgttttattaactttttcggaaacatcttattttatccagggtatacaaaactactgacaatttcggccacgcgtgcacttcgctactcatagtacaaacagcaggcacccaaaaagctcaagttacactggtttcacaccggaagcaaaaccgccatctttgcatgaggaacgactcactctgaagtatgaggaatttgattcccatgccatagatggcctctcacatcgcagcaatgtccgagcacttggccgccacgatgccatggcacctcctcccgcggcagcaagcgttcgaggcagcgacatccagcccgcgggagctctctgtcacgttgtcgctcagcacggcgccgtccagcgtgtcgatggcccgctcgtaccgcccggcgtcgtcgctgtaccggtaagcctgcgtcgtggccgcggacccgttgagcacgctgtgatccctcacgagcatccaccccacggcggcctgctcgtcggcgagcttcgtctcgcgctcgaacagcccttgtgcctcggcctccgtctcgaccctcagggagtgcgtcaggttcgtcctcatcacgtacgtgccgttctcgccgtcctcggtcaccatctccagccacagcgggaacttggcctccgtctccaccttgcccacctcccgccgcgtctcggacgaccggacggtgacctccgtgtcctgctccgcctgcagacggacggtcttgttccggccctggtcgctgaactccaccaggctcgtcgccttcagctctgcctccacctccgtcgtgaagttgccgaacgacgacttcacccacccgctgaagcggtacttcctcttggcgccgatctcgaagctcccgtccaggagccgcgtgatgtaccggcgggtgatggacagccgcggcgtgctgtgcgagccgagcgcggccgacacgctcgacgaagccgggtccagccacaggtgcaggttggcgtcgacgagccactcggcgatgccgtccaccacgctgagggcgatctcgtggggcttgccgtcgaccaggaggccccaggaacggggtcagctcgacgtcgtaggtcgggaggtcgaacgcgcccagcgccgccacgggctgccagaacagcgggttgatgccgcccgtgtagatgaccgggaacggcacgaacgagccggcgaagtggcggtccacgctcacgacgacctcgcggtacgcggcgttgccccgcccagtggtgaggttgttctcgcggatgtagatgtccggcgggttggagtaccagaactcgtcgttggagtgcggggacacgaagacttccaggaccgcgcggtaggtgctcgacggaatgg

SEQ ID NO: 41530 - DNA, 508 bp, Setaria italica
  Peptide Sequence Number=SeqID_107504
gcggagaggaaacgaaacgtgaagaaagcaatccaggtttcctggaggtagaagaaactcatcgtgtcgcgcgcggtacggttctcgtgaaggtacatgtaacatgtatgatgggattgctttctttgtttgggctaaccacctcattaggcgctaaaagtttggccttggcagttccatttattcgagacagtaacgctagctagctatagctacctactgtggcttgacgaggacacgcatatgttttgcgctgctaattaggaggtggccacatgaaaggctgatggaaactaaataactgaaactttagctcaaggaaagggtgattgttgctttggttaggttctcatcaacctggggaaggacttgggaacggtacggtgctctctgctagtaagaagatggttggcatgtctgcatgcgtttcaagggatatgggagaaacaatgcggaggtgatgcaggaagaagaacacaggatgaatgcagcatgcggttgatggatg

SEQ ID NO: 41531 - DNA, 594 bp, Setaria italica
  Peptide Sequence Number=SeqID_107505
cgaatacataactctagcacatccccgtaatattatattgcagagctaaagattggacatgaaccaggagccagcacaatcattgaataattaagataaacatgacatctgaagctcaacagcatggcagctacaaggctccaaaacatgtagcttcactgtggaggggaccataggctcgatataccttctgatagccatgacccctctgtgaccttccatgacgaggtacctatccagtgaggaacatttgccagatttgttgtaaggatgagaacacctgaaaccactctgaggggcctccaatgtcaagcactcaagtgacatcacactcctgagaacatggcatgtcaactcaatcaagctctttgcagagctgaatcctgtgatcttcacactcctaaggttgtgatgctgcagtccttgcatgtgcctcagatccgcaggatcttcgaaaaccgaaacattcttcatgtatagctgcaatacattcaagtcaaaagtctccagagaaggagcagcatcaaaaaaggaaccaaggacaaataatcatagttgccgcagtaagagcaatgctcaagtgtctgaggcgaa

SEQ ID NO: 41532 - DNA, 558 bp, Setaria italica
  Peptide Sequence Number=SeqID_107506
aacaaaaactagtggagtttaagataaaagaaaagggttataattggagaagttgatattgtactagcttgtaaaaatttcaagatcaaacatgactttgtcaacaatatatgaaattgacaaactaaaaagatcaaacacgggtagttatttcttcttattctttaagaaacaaagaaaaaggactaaatttagtgttttcatgttattttcacacattacgtcatattgaatgaaagggatattgatcttgtttcaggggtgaaaaacacaagaaagccatgaaactcattcttcgcttaacatgacattgaatgcattatattaacaaggacattctggagcgataatgtagacatcttgccttgggaagttaataatgatcatgcaatcataacataaggacaccacggtccgtaacatatatttttttttgcaaacgtggtgagcacatattttattaacaggaagagaattacagcgtagcttcgagagaaccctcaaaacgcaaagtacaaaattacggtagtaaatgaccttggaacatgaggtactagc

SEQ ID NO: 41533 - DNA, 655 bp, Setaria italica
  Peptide Sequence Number=SeqID_107507
tttttttttttttttttcatgaacatattgtttctcttccccattccacattgctcactcaaaaggattcaactataccggcatcgggcaagaagggaaatcaacaaactcagtgcaccggtaagcatacaaccaccaaaacgggcattttacctatacgaacctgctgctatgttataccgacgataagactcttacccaaactacatggacgagcctcggttctgttagtgaactcagaagtcaggatttcaccaccaaaaaaaatctccgtgaagcaaacattcgcccagcatattctgcatcaatgccactcgatgagggcattcactgtcagatgcaacatcaggctgctaagctatgaaactttggcattctctctggacaatctttcctcttcagcatgtcttagggtctgctcgaatgcttgcagtgagctggaggcgaagctttctagggcttggacaacacgctgcaagctagtctgcaaactgcttgcgtcaagaagatggtcatggtatgtttgtgcgcttggaagccggctgtgccggcctggtaccagggccagcttcttgttcagcacatctgcctccttgttgatctccacagtcttcctttccaatatcttgttccatctttctcttttcccgggtag

SEQ ID NO: 41534 - DNA, 470 bp, Setaria italica
  Peptide Sequence Number=SeqID_107508
tcatcaacacaggacaccattgcaggactgtcattgctgatagatgcaattataccggtatgtggatcttcaccatcgacatcatgtacggtaaactcgggtccaaaatcacaaaaggcgctaccgaaaaggccacaaacttcagctttgatgaaggagattggaggctggtggctgtgacagtagtcgtcaaattcataagccttgtctagacttatatcagtgaaaacaacagcctggaacttagacaagtgctcttttgtcaattcctctgttagagcagagaccaggacagcattgttcagctcttgcaacttggatacacaagcaactgccctgttctttccaatatcttgctctgacaaaaagaaattggcagacaggtcccacatgtccacattcttggcatcatgtatagtgacagatctaactccagcaagagctagattctttgcaatctcagcacccag

SEQ ID NO: 41535 - DNA, 276 bp, Setaria italica
  Peptide Sequence Number=SeqID_107509
tctgccgggcggtgattaaagaaccccttacaactccatgtgctcacaacttttgcaagacttgtttgctcggggcatatgatagccaggcctccatgagggaaagaagccgtggtggtcggactctaagggctcagaagattgtgaagaagtgcccttcctgcccaactgacatctgtgacttcctagagaatccccagatcaaccgagaaatgatggacctgattcagtctttgcaacgcaaggctgttgaagaaggtgacaccaaggtggctt

SEQ ID NO: 41536 - DNA, 326 bp, Setaria italica
  misc_feature (1)..(65): n is a, c, g, or t
  Peptide Sequence Number=SeqID_107510
nnnnnnnnnnnnnnnnnnnnnnnnnnnnnnnnnnnnnnnnnnnnnnnnnnnnnnnnnnnnnnnnnttttttgtacaccgaagagtaatttatagctggatatattaatatctctcaccacagtccagtccacaggtccagacatgctaattactcaaataattacaagggtcttgataaatcaatcactaggtgatccacgaccgaattaacagtacgcacagtaactagatgcacacgatacatcacaccgtgccaccgtaccatatgctactcacaagtactagctagattcagtaccttaattatgagctgatccgtggagct

SEQ ID NO: 41537 - DNA, 626 bp, Setaria italica
  Peptide Sequence Number=SeqID_107511
ttagtactaatttgttgcattgctggaatctcttaagaacccatcagaagtggattgataggtcatctcagaaatcgtctcatataccgtctcagaaaaaacagaagacagctcccagttcgagtccgagttcgtctgctccatgtgctcttgaggacggtgaggctgcagctcaagaatgtgaggtaccgacagagacagagacagagccagagccaataggagcgatggacgaggatgttggcttgtcgcccgagggaaacaattcggtagattggggtggcggcgagctgatggttagcgcacctgaggagcaacattggccgattggagtggctactcgctccatgagtcggaacaagcgaagcacaagaatttcagtaacagggaagacgagatgctggtgttggcgtggctgaatgtcagcgtggatcaggtccaaggcagtgaacgcctctacgtactggcagagaatttatgactactaccactcaaaaaaaggactgtgaatcaaatcgcaatcaaaattccatcatgcaccggtggtctattattcaagatagcgtaagcaagttcgagagatgtctagcccggattgagggtacaagccagaatggggtgataac

SEQ ID NO: 41538 - DNA, 366 bp, Setaria italica
  Peptide Sequence Number=SeqID_107512
tcatatatatagagccatacggcttggtgtacaagaaacatacggacatcacatgcataggctatacatactctaatagtggcaagtccatgcccatttgcttcatttctatattctttttgccagatgttttcctaatgttagcaagcaaaaccttggccaaaattttggttagtgaaatttttgttagccacagttgggcacgaaccaaacaagccctaggatttaatttcaagcatgttattaatgttctttcttttattgccaggcctacctgtgaatttccacatcctttctcacgtgtaaagcaatctgcaggatatcgactttcataccagattgttgattcttttgtctggcttggca

SEQ ID NO: 41539 - DNA, 1568 bp, Setaria italica
  Peptide Sequence Number=SeqID_107513
ttacaagaatacttagcagcacaggccaccaatgcaaattgttatgctgattgttggtacgcgaggagatgtgcagccattcatagctataggaaaacggttgcaggactatggtcatcgcgttagactagcaacccatgccaacttcaaggattttgtgatgactactggattggagttttacccccttggtggagatccaaaagttcttgtggtggagatccaaaagttcttgctggatacatggttaagaataaaggattcttgcccgcaactccatcagaaattcctatccagcgcaagcagattagggacatcatattctccttgcttcctgcttgcaaggatccagacattgatactggcgtttcattcagtgcggatgctataatagctaatccagcagcatatggacatgtacatgtggcagaggctctcaatataccaattcatataattttcacaatgccttggacgcctacctgtgaatttccacatcctttctcacgtgtaaagcaatctgcaggatatcgactttcataccagattgttgattcttttgtctggcttggcataagggatatgataaatgatctccggaaaaggaagttgaaattaagaccagttacttacctaagtggtacacatgcttattcaaatgatattgacaatgcatatatctggagtccttaccttgtccccaaaccaaaagactggggacctaaaattgatgtcgttggattttgcttccttgatcttgcttcaaattatgagcctcctgagccacttttgaggtggcttgagagtggtgacaagcctatttacatcggttttggcagccttccgattccagaaccagataagttgacaaaaatcattgtggaagcactggaaattacagggcagagaggaatcattaataagggctggggtgggcttggaaatttggaagaatcaaaggaatttgtatatgtacttgacaatgttccacatgattggctctttttgcaatgcaaggctgtggtacaccatggtggtgccggaaccactgctgctggtctgaaagctgcgtgcccaactaccatcataccattctttggtgatcaattcttttggggcagcatggtgcatgccaggggattgggagcaccacctgtacctgtggagcaattacaattgcattcactggttgatgcaatcaaatttatgattgatccaaaggtaaaggaacgagctgttgagctagcaaaggcaattgaatcagaagacggtgttgatggggctgttaaatcctttctgaaacatcttccgcgacaaaggaattctgagacggtgccaaccgcgccaccatcaaccttcatgcaccccttccttctccctgtaaagagatgttttggcattgcttcctaactctgcaattgttttgatcctgtgacatcacggcaacagttgttgcgccacatgctgaaggggcaatcagcaacattggctgcccttttcagtctttacaattgttgtggtggcttagaaagaatatagtataaggtttttcgttactaaaaaaaaaa

SEQ ID NO: 41540 - DNA, 486 bp, Setaria italica
  Peptide Sequence Number=SeqID_107514
tggcggcttgcaccgccggcgaaggccaaggacctcaaggccgtcaagttcgacgttcccgagggcgaagagcccgcggacgacgacagcgactcggatgatgagttcgacgacgacaacgacttcgaggatgacggcctcgacgacaagatgatgatgatgcagcccatggccatgccgccagccgccggtgggggcgacaagaagggcggcaatggtggcagggacaacaagatcccggtgcagatcaagggaaacgccaacatcggcgacaagattgcagaactcatccgagcgaagcagaaccagggtggcgcaggcggcagcggtctccatggtggcggtgcgcaggcgccgcagaacggcaagggcagcgccccaggcggccggaaccagctgccagtgcaggccaagaagggcgtcgctgccggtggcccgcccgccggcgtggtcggcggcccgatgatgggcggcattagtaactaa

SEQ ID NO: 41541 - DNA, 451 bp, Setaria italica
  Peptide Sequence Number=SeqID_107515
tccggtgagaggttgtcagcgaagcagacggtcccggagacggagatgacggcgatgttgatcaggagtgccacgaacaacgcgaacccgctctcgtagaggaagaacctgcaggcgtccttgattcctctcaccgatgagggagtcttcctcgacagcaccagtgcagagtgcaagaacaggttgtgcggcatgataagagctccaaggagggcaatggcgtctccagtggcgccagggcccttgagcctgggaatgaagagccctttgatgacctccacggccggaggcttcacaaagctcatctccccgaagaagcacgccgccatgacgaacacaagcattgagatcagaaactccaacttccggaccccatatctttgtaggcccagaagcaggagagtgctggagccggtgatgagaaccccaatccacacggggatgtagaaac

SEQ ID NO: 41542 - DNA, 1425 bp, Setaria italica
  Peptide Sequence Number=SeqID_107516
gcaggaaactcaaactacgtgcagagccatatttcccaccttagcattacaatagtcacacaaaggctcattgtatagtgtacaatgtttctgttttcaatgttttccgtggtcagacaacacaatctaaggccctacctttccttttcgtgaaaagaatatgaatcaaatgaatttccatcagtgttcgtgttgtgcaacagagttagcatattaaatggctgcatacaactgttaccaacaacagaaccagggacctgtgccagtagaatctccatccggaggagatatcatgtgaattgacggtatatgttgcgcccgtcttgtcgtccttaactttaatgctcgatgaacagttgtagtcagtccacccgatgacttgattttccaagtcatagacaaccaacttgtttgaaagaacaagatctcccataagcacaatgtcctttccatcctttgattgtaatgcaccattttggaatcccacgcagtacaggtcattcccgtttgggaaaaagtactcatgtggatacacatgcagtgcaagatcatcctcaaaatggaaggtgatagttgggaaaccatcatcaacacttccagagtattggaaacacataaaatcttgaacattttggaatttgatatcctgatgctttttaaatacctcaaacactacttctttgaaaaccaattctggaaggtatgtcaaggttgtaccactgtcgattatggtacccttttctctcctgtttcgaaaacatgagctgggagctgtaatgtagtaccaccaacatcgattgacttaaggttcacattgtagtgcggcatgtcggctaccaacggtgttgtttttacttttggctgcaccacgttcccaatagcaaaaattccacctccttttatggtatccaagcaatgagcaaatatcttcttaactttaccagcagcagatagctgtgatagcattgatgtatttgcctggccaaaaccaagaattccatcaagggcttggtttgaacttcccaaatccccaccttgctgagcaccacacccaaatgtgacgctggcgtttccaggctgcgtctgcccattcccggtcacctgatcaaactgcagtgcatcggtgacgaagaaccctgtcgtcgagctaccatcaccgtacatgacgctgtactcgcagggcacgttagcggtgcaccccggcagcttgccaccgtaggtggccgcgcagaatccctggtcgcacgacaccgtgctcccgctcgaggacaccttggggtcgtagagcgtcaagtctagcccgagcccgctcttgcgggggcaccggtcgcaggagatgcagttaacccagaggatgtcgctgccggtgtcgacctgcacgaagtagcgcttgggcggcgtcccgagcttgatctccgtgaagta

SEQ ID NO: 41543 - DNA, 381 bp, Setaria italica
  Peptide Sequence Number=SeqID_107517
tttttttaagtcttgtcctgaaaatattgttcaggtccatacacatttggttaatcggattagatgatacacctctaacgaggaacgatacgaatgaatagtggcgttgctctctggtgccaatctgcacggagcacgcatgccatgatatagctggcctgattgatcatagctagcagttgttaatagcacaaccgtaagtagttaattaaattgctacgaaactactcacactgccgggtcggtggagggggccgagcgagccagcgatcgagctcttctcttccaactcacggcggcgagccggtgatcaacgcccgagcatgccgcccagccccagcgcgagccaagaagaagaaagggaagcctcctcgcgcgtcg

SEQ ID NO: 41544 - DNA, 595 bp, Setaria italica
  Peptide Sequence Number=SeqID_107518
agaatgactgcaggcgttgccctgaggctgcgcagcccacgacatgttcgttggaacgcctgaccagtgcttccatctctgcaatggctgtcaaaggagtacaagtaatggtaggattcaaggaactaatccttattttggataaaacaacatctgaaaaaactgtgatgaacccagagaaaatagagcgatcctcatcagtctctaattttttaccaatacatggagaatcaagtcaactagcaaaagctggaggtgctgaaagtaaatcatgggaggctagtggaccactcaggaaatccttcatggcaggttggttcctcctcaattcctcatcagttcccttttggatgcagtttcagatgatgcagataatctgaatggagctaagattcttcggaggatcacaagacctaatcatgtgaactaatttgcatgacaagcggcaatccatgtggacagtttctgataaagaggattcagaaaccatttgctgcagttctggaagaccactacaagggcatgattctgttctaatccgatgcattcctttgctgctgcttccagttggatcatgtcattggagggatagtcc

SEQ ID NO: 41545 - DNA, 467 bp, Setaria italica
  Peptide Sequence Number=SeqID_107519
cggccgttcttgacaccagggtgatcagctagcgggcgcccttggaattcagcaattggaatagagttgatgaggaagttcgtagttaccaaacttcttggggaatgatgacatgttcatttcatcctcatcaaagtctgccatacgcagtgcccgggtttcttccggtgcagcagctgaagtcttgaccttgcgtctctgggggaagcaacagctgcagcagccaccatgttccttgtcgcgtggagggtcaaatccatatagcgcaacacggcggaagagacagccagtgcccacatagactggtcccatgagaccatccagtgcacgcatgttgacatcaaagaagacagtgttgtggttagcataccgatctgatggatcaatgccctcgaaccgctgtgggaactggacatagccaatacggtcaccgccacgatccatcatgaagcacatgccttcaacgg

SEQ ID NO: 41546 - DNA, 399 bp, Setaria italica
  Peptide Sequence Number=SeqID_107520
gtctcttccgccgtgttgcgctatatggatttgaccctccacgcgacaaggaacatggtggctgctgcagctgttgcttcccccagagacgcaaggtcaagacttcagctgctgcaccggaagaaacagccagtgcccacatagactggtcccatgagaccatccagtgcacgcatgttgacatcaaagaagacagtgttgtggttagcataccgatctgatggatcaatgccctcgaaccgctgtgggaactggacatagccaatacggtcaccgccacgatccatcatgaagcacatgccttcacggaaagcttgggagttgtaaacatagtggtcacagtcgaggttgaggatgaaggggccatttgacatcacagcagatgaacggactagggca

SEQ ID NO: 41547 - DNA, 2817 bp, Setaria italica
  Peptide Sequence Number=SeqID_107521
acatggaaatttgtactcgtttcatggtccaacagaaccaattctcatattggtacagggcaaaaattaaagaacaaaagaactatggtaactcatgatatatatagtactatcaattccaacaaaagcacctaatcatttcaacagtcagaacttcccttcccaccagcgcaagaaattcatgcaagagtgatcgctcacgggaacgtgaatgatccaccgatctgggagttctgcgacggcgggttgatggccacccacagcagcgagatggtgatggacaggaggcctgcccagacgaagacgatggtcggcgtccggcccctcctccccatcagccccttggcgaacgggtacaggtgggccagcacccagaagctgaagaacacaccacccaggagcttgctccactgtgggatctcgctgtagatggtccggctgaaccccaccgcgatggcgatcaggttcaccatcatgatcacgattggcgggatcatcagcgaggtccacttcacgatgtacaggtccgcaaactcgtcgttctcgtcgtcgccgcccgacttggatgtcagcgtgaaggagatctcaatgcccgcaatcaccttcaaaagcccctggagcaccgcagcaaggtgggcgcttgtacctccgatcagccagaactgctcgttacgccaccactcttccaggctgatccctgaccacttgatctccaacactgccagaaggcacagcgtcagggtgatcaccagcaggtaggtcaggaaggccacgttgagtgtcttcacgatgaactgccccgagaagagggagagcgccggcaggaagcagtagacaatgaggaagattgatgtgaacgggtagatgccaacgttcaggtatgcaatcctctgaaggaacttcatcttgcggcttgcgagcagcgcattgttgcgggagaagaagatttccactgaaccagtagcccatcggagcacctggtggagacggtcagtgagattgatgggtgcagtgccacggaaggcatcgcgcttggttacacagtacactgacttccatccacggttgtgcatccggtatccagtgaccacatcctctgtgactgaaccatagatccaaccgacacggtggccccactcagtcttgtcttcataccagcatgagatgacactgatggcctcagcaactgtggaggcatcaagaaggtcccgggggacagtgagagcacccggagggcggccgttcttgacaccagggtgatcagctagcgggcgcccttggaattcagcaattggaatagagttgatgaggaagttcgagttaccaaacttcttggggaatgatgacatgttcatttcatcctcatcaaagtctgccatacgcagtgcccgggtttcttccggtgcagcagctgaagtcttgaccttgcgtctctgggggaagcaacagctgcagcagccaccatgttccttgtcgcgttgtgggaactggacatagccaatacggtcaccgccacgatccatcatgaagcacatgccttcacggaaagcttgggagttgtaaacatagtggtcacagtcgaggttgaggatgaaggggccatttgacatcacagcagatgaacggactagggcattcatcgcaccagccttcttgttgtggtcataaccagggcgcttctctcgggacacgtagaccaacattggcaaacggatgtcaacctcagtgaaatcaagaggtctgccttcttcaccagtgctgccatacaagggatcatcactaggaggtttcagcatcacctgaattattccagcatggtcaccacgtgtgtgctcagcagaaggctggatccaggtaccaggccagtgcgtgccatcagccatccaggtagctttagggatcttaacaggctccacagcatcatcaagagcagtctctcgctgcctcttcatcgccttaatttcctccctggcatggtaagcatcggagcgacggcggattgactcaggcagcccattgatcctgaccttgaactcatcatactccctcttaaccctcctcctatccttgacaaaatcctgacgaaccttattcttgtatggatccctcttcagattgaagtagctctcaggattgcgaggctcaatgttgtgcttgcgacagaaaggaacccacatgttggcaaaactagcagcttcagccatggcttcaaatgtcaggagagcccctccatcatcagaaacatagcaagaaagcttctccacagggtagtcagcagcaaggatggaaaggatagtgtttgctgtgaccaatggcggttctttctctggatcagcagtggacacgaatatatcaagccctggtagatctgatcgtccagtagggttcgacggtgttggggtctcaaacttgtctttgaggacagcaaggtcggttgctcggttcacagggcacagctttggcaactgatcaagcagccatgaaaagccaaaccagagttcacaaacaacagacatgccccacagccaaattgcatcctcattcttgtgcctaattctccatgtaaggaacagaccgagcacggccatacggattagaatgagaagcctgtatgggctaaggatgccagcagggatggaaagcttccgggtgagcggcctccatggcttggtggtgaactcagctggctggccgtcggctccacctaggccgcctccaccaccaccaccgctctccacctcattctccttgggccatatggcattgccatacccatatgtccctttggtctcaaagagccaccggttgtgatcccag

SEQ ID NO: 41548 - DNA, 1548 bp, Setaria italica
  Peptide Sequence Number=SeqID_107522
ttggtagcctgtcaaggcggagctttgaggtgaccattgctggcctttctggactcaccgggcatcacagggggaaatctcagagcacggtgcatgagctccgtgatacagatctcataatccaggagagccgttgggctaatctccctcctgagctcctccgggatgtgatccggaggctggaggccagcgagagcacctggccaaatcgcaagaatgttgtttcctgcgctgctgtttgtcggacgtggagggagatgtgccgggagattgtgctgagtccggagttctgtgggaagcttaccttcccagtctctttaaagcagcctgggcatcgagatggaatgattcaatgttttataaagcgagataaatcaaagtctacatatcatctctacttgtgcctgagcactgctgtacttacggagaacggcaagttcctcttatcagctaaaaggaaccgcaagacaacatgcacggagtatgttatctcgatggatgccgacaacatctcaaggtcaagcagcacatatattggaaagctgaggtccaacttcctaggcacaaaatttatgatctatgacacacagcccccttataatggggctgttgtccctcacgctgggcgaaccagccggagattcaactccaagaaagtctcccctaaggtgccaactggtagctacaacatagctcaggtgacatacgagctaaatgttctcggtacgaggggccctaggcggatgcactgtgtcatgcactccatacctgcctccgcggttgagcctggcggcatagtccctggacagcctgagcagattctgcctcgagcattagaggagtcctttcgcagcactacctccttctccaagtcatccatcatggaccggtccatggatttcagtagctcccgcgacttcggcagtgtccgtgacttcagcagcgcccgcttttctgacattgccagaggcgccatggttggcgacgaagaggaacaaaataaggagaggcctcttgtgcttcgcaacaaggcccccagatggcatgaacagctgcaatgctggtgcctcaacttccgcggccgagtaaccatcgcgtcggtgaagaatttccagctgattgctacatcaagccagcccccagccactggggctccaaccgtgtcgcagcctgctccatcggaccaggacaaggtcatcctgcagtttggcaaggtggcgaaagatatgttcacggtggactaccgctacccgctttccgccttccaggcttttgcgatctgtttgagtagcttcgacaccaaattagcctgtgagtagatagacacccaggatttgatggaagtggagctggaaatgcacaaaagaagaggtgcatttggccctaggattctagcttttgatgcttttgcattttgttgtattctctcatggttgtattgtgttctgcttcatgttgtagcctggaaccagacttcttagtatgcgtgtttcagctgccggcaccatggttggtgccattcgtctgatgtgcatgagattccaaaaa

SEQ ID NO: 41549 - DNA, 392 bp, Setaria italica
  Peptide Sequence Number=SeqID_107523
cggcaaggtgctcaaacgggcggacgctctccgcctccatcgcctccgacaacggccgcgccgcggagtattcccgccgccgcgtgtaccgcgacaagtcgcggtgctacgagtgcggcgaggaggggcacctctcctacgagtgcccccgcaaccagctcgggccccgcgagaggcccgcgccgtctaagaaatcgcgccgcggcggcggcggtggtcgagggggaggaggggtggcctggcactcggacgacgacgaggaggccgccgccacggcgttcgaggacgaccggtgggcgtcggtggtggatacgaggggcgaggaggagaaggctgctgagaaggaggatggggaaggcgaaggcggcgaggagggagaagagggaaaaggc

SEQ ID NO: 41550 - DNA, 2102 bp, Setaria italica
  Peptide Sequence Number=SeqID_107524
gctcaggtgctttacagattgcagcttgcaaacttgattaaagctggtgaatcagatgccaggagaaccaacctcgctatcaacaaagccagggttatagcagcacagcaagaagcacctggtgggcctgatctggacctctccttgcgaattcttcttctgggaaagactggtgtgggaaagagtgccacaatcaattcgattttcgatgagagaaaggttgccactgatgctctagttcctgctactcataggataaagaagattgaaggaacaatcaaaggaataagagtcacggttatcgacacacctggcctgataccccattaccatggccaaaggaggaacaggaagattctgaattctgtcaagcgcttcattaagcgatccccacctgatatcgtcttatattttgagcgactggaccacattaacagcagatacagtgattacccactgctgaagcttatgactgacatcttgggttcttcaatgtggttcaatactgtccttgttatgactcactgttcctcatctcctcctgaagggccagatggttatcctttggaatatgatgcctatactcgttactgcaagaatgtggtacagcggcatatccaggcagcagtttccaacacgcagctagataatcctgttgttctggtagacaatcatcctatgtgcagacgaaacaccaaaggtgaaagagtcttaccaaatgggcaggtatgggtatcagaactgctgctgctgtgtggggcaactaagttactggcagaagcaaattccttgcttaagtttcaagatagcttcctactgtcaccggcaaataacaggctaccttcactgcctcatcttctttctacactccttaagcctaattcttcatcaagttcagatcgtattgatggtgaactgacagaaacgtcagacgaggaggatgaatatgatcaactaccacccttccgcatactaaagaaatctgaatatgaaaaattgacaaatgaacaaaagtctgcatatcttgatgaactggactaccgcgagactttgacctaaagaacagtggaaagagggaatcagaaggcaaaggcttactgaagctcagaacgatgaagttgcagatgattatgaagagagtgcgtccccagaggttgtgcacatgtcagatatggaaattccactaacttttgactctgattatcctgtgcatcgctaccgccacatcataacagatgatcagttgtttagaccagttttagacccccaaggatgggaccatgatatcgggtttgatgcaatcaattttgaagcatctcaagagttgaaaaagaatgtctctgcgacaattgcaggtcagatgagaaaggacaaagaggacatgtatatccattcagaatgttcagtaagttattctgatcagaaaggctgctccttgatggggggtatggatatgcaaacggcaagcagagatttggtttgtactgttcatggggatgccaaattccgcaatctgcgttggaacactactggaggtggcatttctgtaacaaagtttggcaacaagtactttgctggggccaagttagaagactctgttaccattgggaaacgagttcagctgatagccaatgctggtagaatggctggctgtggacaagtggcacatggaggtggagtggagataacagcacggggaaaagattaccctgtgagggaagagagcatcactgtctcggtcactgcattgtccttcgataaagaaactgtgattggggccaaccttcattcagactttcgactgggtcgcggatcaaaaatgtcagtcggtgctaaactaaacagtagtaatctaggcaagctcagcatcaggactagcacatcagaccatgctgagatagctctgatagcagttgtctcattgatccagttctttaggagaagatcaggagcagctgataaaggcgagcaacagtttgacacctacctggatgactaaataacagatacaaggagaagacagccgtactttggttttagatgttcagcagcatcaagattcactgctactctgaagctatggcttatcttcatctagggtt

SEQ ID NO: 41551 - DNA, 1077 bp, Setaria italica
  Peptide Sequence Number=SeqID_107525
gggtccgggcctccctggcccgcgcgtcgctcgaccgcgccgcggtcctgctcgacgccgcggcggtggtggcgggcggcgggaccgggtactcgcaggcgagctactacacgtcgctggggctcttcgtgctctccgtgccggggctgtggtcgctcatcaagcgctccgtcaagtccaagattgtgcaaaagacatttgtcaaagagggagcgcagtcgatggcgccaaatcaggtggctggagagatcctgtcgttcttcacccgcaacaatttcactgtctcagaccgcggtgaggttatcacctttgagggcacgatggtaccaagcagaggacaagcggcgttgctgaccttctgcacctgcattagcctcgggagcgttgggcttgttctatcaatcgctgtcccagaaggtggcaacaactggttctggcttatgaccctaagccccttggcgggagtgtactactggacaaaagcgtcaaggaaagaagagatcaaggtcaagatgatcctgtccgatgatgggaatgtatctgagatccttgtgcaaggtgacgatgtccaagttgaacagatgaggaaggaactcaaatttagcgaaaaggggatgatatatgtgaagggcatctttgaaacatgataaccaggagtatgatttctggaaccataaattggtgactaatctttgccgtggtgtgaacagcgaaaaccaggtgaggggatgcatattcgacgggcaaatctgtaccttggcttatagaaaagaactgatcttcgtacaggatttgattgttatgagtgttgcaaatgtgaggatggttaatgtataaacttaacattgtaaaaaagttgtggagaaacacgtttttgagaatgaaaataatagtccttttaggggagaaagaattaactggaaatgtggctgcaacttaaaagtcacacgatctccagtttcgagcttgctcttcatgttgtagtggggagggtggtatgtcatccaattgctacctgatacttgggtgttgacttcaactatccacattgatttttgtgtcttaccttgaatcttc

SEQ ID NO: 41552 - DNA, 603 bp, Setaria italica
  Peptide Sequence Number=SeqID_107526
tataacatatattaaaggataaaagtgagcacagtacatcccattcttacagaaaagaccctgagtaaccctgaaattacaacaaggtccctactatttatcttctttctcagaacgagctgcaggctccttccaactgttcgccggattgcacactcaagcatcgatccaccaatcttcccgatccaaatcgaaggacggactccaaacgttggataactgcaagagattctcggtaaaagagcatcagtcgtcggtcccctcgatccagcatcatctccgctttcctcgacgatggatgaggtccatcgaagccaagatgctccagcgcacaactccgacatcagcagaaccagatccagcaacccatgaatccactccaccaggccaccagtgatagcagccagcagatggaaaaagagccggtctagattcaccatgtcctccttcagtcgaccgaaatcgaacggaagcagcgacgggaacctttcggcaaaccaaaagagaggcaaactaacatcccacaaacttcaccgatgaagacgactggctcatcttcgaggtcggagaagaagattattcgccctcggagcagctccgccg

SEQ ID NO: 41553 - DNA, 701 bp, Setaria italica
  Peptide Sequence Number=SeqID_107527
gccgcaggcgcagactcccggcgccgcgggggtcagcgccgtgctcagcctatcgtcccgcgaggcgccgccggtcacggtcgccgccgtgggaggcgccgacgaggggaagtaccatctggtgggcgcgtcggccacgtcgcagggccagatggtgatgagctccaagtacctcaaggcagcgcaggagctgctcgacgaggtggtgagcgtcagcaagggcgtggaggaggccaaggccgcgaccaagagcctgtcggcggtgaagaagaaggaggactcggagggcgtctccggtggcggcaccgaggacggcggcggggcgaagagcggcagcgcggcgccggagttgtccacggcggagcggcaggagctgcagatgaagaagagcaagcttatcaacatgcttgacgaggtggagcagcggtagcataattcagcaggattaattgttcattttcccatttgatatttttctcctttttctaagatattttagaaaaaagaaaacttgtttcaattgctgttgaatcattgtgagttcttgatttcgatgaactttttttgttattatctgcgagaatttaatattgcgtctaaatttggttggcagagatattttgtggttgtttgctgtttggttgcctctacagtttttagacagcgttatatttaaaggctacgagccatttgcttttcgg

SEQ ID NO: 41554 - DNA, 566 bp, Setaria italica
  Peptide Sequence Number=SeqID_107528
gctaagtagttacatattcaacctccatgacggtgatcccagatcgaggtgaggactgtcgaaccctttactcactggtttagcgttgaagttgttagatctattgactaaacttttggttctgtagcatagcataagctaggaccatcagctaaaattttatttctgtaaaagcatcacaacttagatagtttcacaggtgctatgcaagcttttcaatataactatgcgaaacagagtcttcaaactccatttaaagctatcttaattccttccagtagattgctgggcaggcctcactatgctccttgtgactatgcttaaaggagcaatatgctaggaccttcagcaggaatagctttgtctttccattgaaaaatgataagtgaatctcggacaaactatatgctctttaaactttatgcatcagactagcactgctggtcattatcactgtatgcctgtcactctgctgattgtttaggtagtatttttttctgattattatcgaggtagatctaattcctaaagttttcagcatgtttgttttttctgcaagtatttac

SEQ ID NO: 41555 - DNA, 252 bp, Setaria italica
  Peptide Sequence Number=SeqID_107529
agctcctatactgatcgaataacaagcttgatgcatccggccctggtacctcttcccgctggccgcctccttgctcctcctccaagaccatgcaagcgccgactgcgagccggcgacatgcgggaacctcactctcagatacccattctggttgggcagcggcaaccagacctcatcaccctgcggccaccgttccagatctggtgcagcgacgaccaccgccggagcgtagcctcactgaaggctcctcca

SEQ ID NO: 41556 - DNA, 506 bp, Setaria italica
  misc_feature (48)..(48): n is a, c, g, or t
  Peptide Sequence Number=SeqID_107530
aaaagtgactaaaatgggggtgctaaatttagcacccctctcccaaanaccccccatagttggtacagacacagccatattagtatctcttgtgatttgcctatcctgtcattattcaaggaattgcagtttaagttgtcaactccagttcgtattctcttctcagttatcaattctttgctgcatatcttaattttaaaattaattgtagcaagctaaatggtcttgaatttctgtaatttgcagatcatgtatgatctaaacccatgcttgatattttctttccccgcagaaacttggggaaggtgtaaagggagtgtatgtctcagttgatgtggactgccttgacccggcgtttgctcccggtgtctctcacattgagccaggaggcctctcgttccgcgatgtgctcaacatcctccaaaatctgcagggcgatgttgttgccgccgatgtggtggagttcaacccacagcgtgacacggtggatggatgacagtcttatt

SEQ ID NO: 41557 - DNA, 431 bp, Setaria italica
  Peptide Sequence Number=SeqID_107531
ctcgctacattatttgcttcagaaaggatctaagattgatagtttaaaagtgttccatttgaaaaggcaagcctcatatgtaactttgccatatctgaatggagtgtgtgctaaaagcttcttttttctagatttttgttgttgttgttttctgcttactctgttccagtttgtgattaacccccaccccactctcattaataagtacatgcaatcagaataatgaaagctttatacaaccccaatgaacaataagttagcttttcttcacaaaaagcttcctgcaatttttctgtaacgtgtacttgtgcaggcagagttgctgcgtgctctgggtggtgtgaaagcttctgcctcacttttaggggtccctcttggtcacaactcatcctttctacaagggcctgcatttgctcctccacgcataaggg

SEQ ID NO: 41558 - DNA, 1562 bp, Setaria italica
  misc_feature (1482)..(1562): n is a, c, g, or t
  Peptide Sequence Number=SeqID_107532
cttcctcgcgtcgcgtcctttttccttactcgcggactcgctgctgcggatcgatcgagagtcggagaggaaaggcccggccgcattcggagagggagggcggggatgggcggcgcggcggcggggaccaagtggatccaccacatccagcgcctcagcgcggccaaggtgtcggcggaggcggtggagcggggccagagccgtgtcatcgacgcctccctcaccctcatccgcgagcgggcaaagctcaaggcagagttgctgcgtgctctgggtggtgtgaaagcttctgcctcacttttaggggtccctcttggtcacaactcatcctttctacaagggcctgcatttgctcctccacgcataagggaggccatttggtgtggaagcacaaactctagcacagaagaaggcaaagaattgaatgatccccgggtgctaactgatgttggtgacgtccccattcaagagatccgtgactgtggcgtcgaagatgacagattgatgcatgtaattagtgagtctgtcaaaacagtgatggaggaggagcctcttcgaccattggtgttaggaggcgatcactcaatatcttatccagtggttagagctgtgtctgaaaagcttggaggacctgttgacattcttcatcttgatgcacatccagatatctatgattgctttgaaggaaacaattattcacatgcctcttcatttgccagaataatggaaggtggttatgccagaagacttctacaggttggattaagatcaattacgaaggaaggacgcgaccaagggaagagatttggtgtggaacagtatgagatgcggaccttctcaaaggaccgggagaagcttgagaatctgaaacttggggaaggtgtaaagggagtgtatgtctcagttgatgtggactgccttgacccggcgtttgctcccggtgtctctcacattgagccaggaggcctctcgttccgcgatgtgctcaacatcctccaaaatctgcagggcgatgttgttgccgccgatgtggtggagttcaacccacagcgtgacacggtggatgggatgacagctatggttgccgcgaagctggtccgggagctcaccgctaagatctccaagtgaaccatggagggtcacaccatctttgctgactcagaaagtgggattttcccaggcacatgctggcaatcagtcttcgctcctgtgtatgaggcatgaccatttgacatgtgacaagaatatgttaattaggttgcagtagtgttggaattgaaaccttcctccatctaaaaaatattgcaaaatttctctccatgtggcatttgctcgattcttggtggtgtgccatatactaaaccagatgctctgattgttaataattttcttaatattaggaagtgggggagtactagatcatgtcaatgttacatacagtacttttgttaaagtttgatataatttttttctttcaaaagnnnnnnnnnnnnnnnnnnnnnnnnnnnnnnnnnnnnnnnnnnnnnnnnnnnnnnnnnnnnnnnnnnnnnnnnnnnnnnnnn

SEQ ID NO: 41559 - DNA, 645 bp, Setaria italica
  Peptide Sequence Number=SeqID_107533
tttagtagccggtacacttgaagagcaacttttggcttgctagcaacctcacaagcacctatcacgtgattgtaagataccactgatactttcagtccacttttttccatcatccacaacaactgcaaaccatgttcccattgaccaagcctttcgcacgacatcaaagcaatgttgtagagatgatcatttaagagcgtcggatgcttggccttaattccttggaaaagctctaggacatcccaacatcgcccagacttatataatgctgacagcaatgcactccatgtatattgatcaggcttaaagccggaagatgttagtagatggtacatcctgaatgcaagttcatcttgaccagccttcccgagtgcgttgatcgttgaattgaacaaaatgatatttggcgtcattccagcactaagcattctgctaaacgtggccagtgcaaagtcccacttcccctctttggtgcaagatgcaatgatagccttcattatgtcttcgctcggatcaagtccattctggagcatttcctgataagcggcaattgctaactcacactgtccacattgcacgaatatgctgactaacaaatcatatgtcagcaaagttccactcaaagaattttcctccagccttctc

SEQ ID NO: 41560 - DNA, 1283 bp, Setaria italica
  misc_feature (1248)..(1283): n is a, c, g, or t
  Peptide Sequence Number=SeqID_107534
aagcgtgtcagtgtctgtcgagagctccgcgcgcggatccaggcgaccgtaccgacgctgcgatgccgatctgcgcgccgtcatcggactcctcggcctcatcggcgtcgggtggccgcgcgtggatagtccacgggctggcgctcggcgcggcggctgcggctgcggctgccgcggcgtacctgtaccgccggccgagcggattccgcagccgcgcggtggggatcatacccgcgcgcttcgcctcctcgcgcttcgagggcaagccgctcgcgcacatcctcggcaagcccatgatccagagaacatgggaaagagttatgttagcttcttccttggaccatgttgttgtggcaaccgatgatgagagaattgcagattgttgtcgaggatttggagctgatgttataatgacatcagaatcatgcagaaatggatctgaacgctgctgtgaggcacttcaaaagcttgggaaacgttatgatattgttgtcaatattcaaggcgatgagcctcttattgaaccagagataatagatggtgtcgttatggcactgcagcgagctcctgatgcagtcttcagtacagctgttacttcactgaaacctgaagatgcatctgacacaaatcgagtaaagtgtgttgtggataatcagggctatgcaatctacttttcaagagggctgataccatccaacaaatcagggaaagtcaatcctaattatccatatcttcttcaccttggaatctcgggctttgattcaaagttcttgatgatctatccggaactttcaccaacacctttacaactggaagaggacctagagcaacttaaagttcttgaaaacggctataggatgaaggtgatcaaagtggaccatgatgcccatggtgtggatgcacctgaggatgttgagaaaatcgaagaactgatgcgagccagaaacattcagtagaaaatgaagagagtatctgctttgcgttgccatcggctaggctcactgggagactttgggctgtgctgcacccttgtctgcagatagcatggtagtagcatgcaaacctgctgagttgatcagtttggagctgttcggttagctgttcttattcgtgcccctttttcgagacccacaggcccctgtatttaatacttgcatgacttgtttcgttgtagactggtgtagtggtgtagcacggcctcttaaggcataatatcagatatttcaattcactcaaaaaaaaaaaaannnnnnnnnnnnnnnnnnnnnnnnnnnnnnnnnnnn

SEQ ID NO: 41561 - DNA, 634 bp, Setaria italica
  Peptide Sequence Number=SeqID_107535
ccattaaataccgatgcatgtcacagttaagaaaggtaagaatgaccgaacaacagacatttttgtccacccattggccatgaaaccaacaagggtcgccacattcaaaacattccactccacagagccattgtaggcaagatggttcaggcagtttgccacgaatgaatggcaattgcaggtgaacagattgtaatacttgtgttgaaagcgcctcatgcccgattgcagagcatcatcccatgatatcgcagctccaacttctgagtgattgtatgaacgctcacatacatgagccgcaagattagcaggaaagcagcacttctttctgtcaagctgaaggtatctggcaactgaaccataagcaaaattatccatgctcaccaaatttgaaccggcaaaatccaatacagccccatcctcctgacagattccaacatgccctatgtaaggagcaagccatgaaactacaggaagaggagtccagacaatgcagcatgggaaccttgctctctttggatctatctcgccaagtggccacaactcttgtaatccattatttgaacagacaccttcattatcaaaatcagcttcaagctccattgaggaaagtacttttggtgacattaacgtt

SEQ ID NO: 41562 - DNA, 235 bp, Setaria italica
  Peptide Sequence Number=SeqID_107536
ctccccactcccaatagcatcaaccaacttttgccccgcagcaattacaccaaaaatttcagcacaacattccttgagccaatctgtacaggcacatgctatgacatctggttcaagcagcaccattgtagcctcaagctggttcatgtgctccttccaaaattgtgattcctcgtcagggtctgggaggccgccaaacagctgctcaggcggtgtcttctcaagcaccgtcttg

SEQ ID NO: 41563 - DNA, 384 bp, Setaria italica
  Peptide Sequence Number=SeqID_107537
ggaatgcaattctcggatagccccaggagacaaactattgctgctgccatatctttgtttggagctgaggatagatccaacccaagactcgatgaactcaacaagaccctgcagtcactttgcatcatggctcatagtgtatggatagcatgggtgtccactgaattatctcatattctttcatatgatctcaataaagatgactcactatcctcttcaaggcacttgatggttggaggtcacagtcatctccaagggaccctcagttgtttcctcttgtttgatgactgtgacctcaacccctcaagggagttgaagaggagttcgatatgattcatagtcatggtaccatgactatgaatcatatcgaactccagatgtgaa

SEQ ID NO: 41564 - DNA, 2981 bp, Setaria italica
  Peptide Sequence Number=SeqID_107538
gtgcaacagcagttttaccatatagaaatgagcgcaggttctaaggggacaatacagactttattgctatactttccattgtacacatcagcaactttgcctacatggaaaaaccacaaaccttgcagtttcagcaccgttccgaaaaattcctcagacttgtcatcgagacaaagaaaaggaaaagaaagaaagaatgggccccaaaaattcttttcacgactgcatgtgtcgagtatccacaacatggtctgcgtccggaaaaaatgtcaaccgatagcagcacttgctttgccctatgtactgtgtcaagtcgcaagcaggaaacacactggaatctcattcgatttccttaaccaccctctaaacctgtgtccagtcaccagactgaatacatcttgtcttctgccgtcatgtttacgcgagcttctccatgaaactgcccaatcacaacaaggaatctgaagaggcacggcaaggataaaccaagcaatgccgagccaactatgtggcatcattctgtaaccaacagatttccaatggcagaagcaacctgccaacagttgtgacgatctctcgatgacatatgtggatttccatttaacgtatacgaagtataggctgaagatcaaggctcatggtaccatgactatgaatcatatcgaactccagatgtgaaagaagagaaaaacccagctgctggtccaggaagaatgtcacttagcttaccgacctgaccatcagaaagcatggacccccatctcgatgtgttctccccaaatttgctcccgacctgggtaacaaatgacttaaacaatggagcagcaccaacaagacttgcattatcgtcaaattctggtgcagtagatctatcaccatttgaatatgatttccaaggacctttagatgcgttgtcaccagagggtgactgtagtgatgttttgtgtggtcttgatgatatagctggggcactgatcggtaggtacttgaatcttggaacctgagagcacctcatgatattcgaatctgtatttgactttgttggtaatttttgtacagtaccagtgtacatgtgattcaattggaccaaaaaaccaaaaagaacaacatagcgcttgtaagattgcttctcgttctcccacaggtaaggttcatacgtggcccagtctatcggatccagtctctgtgagagcttattaattaacttgtttataggctctatggcagctgaatctgcctgtgattgtgactgttttctcctgaaggaagacttggagatggtgcttggtaaagaatcctgttttgtctgtgtttcagtagtgatggtggaagaatttttgcctccagataggacatcaccgacgaaacggaggtctagcagtatttgcagaactcctttctctgaaacctgagaattcccagattcaatagacacaaggaaattttcataaatattgatgaccttctgcagtagctcccatgcaaaattatgcaaaataattcggtccaggatgtgccctccaactttatgaatctccaaacatgcttgataaagaaatgatatgatgtaaaatgaaggcattgatggaagagctattttcatctccaagggaccctcagttgtttcctcttgtttgatgactgtgacctcccaacccctcaagggagttgaagaggatagtgagtcatctttattgagatcatatgaaagaatatgagataattcagtggacacccatgctatccatacactatgagccatgatgcaaagtgactgcagggtcttgttgagttcatcgagtcttgggttggatctatcctcagctccaaacaaagatatggcagcagcaatagtttgtctcctggggctatccgagaattgcattccagggctcctgggactatcaaatgtgcgccttctgggggtaaaagatgaagaatcaaaagatgcccttgaatgtcttggtgtaggtgatgataacctggcaaatgctgcaccaccagcctccttcacccactcccttggggaacctagtattagaggtacatgacttgagtggtatctcaatgcaaacaagagacgaccaatgaatagagccctctccgctataatagatgctgcaggtatgtcattatcctcctttttggtccccaacaaagccgagagttttctgagctcagtttctaattctttcagcactccggagatggtcctgtagcatttctcttggaggtatggcactaattcctttagtcttggggctgaattatgtgactccacaaagcataacagatcatccagaatactcttgcatttgctgtcaattgcattcctgatccgactaacttctggtccaaaatatgaggttaagcagctgtggaaatcattctcatcagcaattggtttcaagtgtgccaaaactcctcctttcttgatcttggactctgagaaccagaaaccaccaccatttgaagattttcgcaggtatgaaaggaaatctccagcatcctttggatcagcgttggcaccaatagcatcaatcgattccttcacattaacactagcacacaaactatcaaggtctgaatgcaaaatgtccttcatccgccgcacaaatgcttcctccatccagtcctcaaaaatatccttgccgcccttcaaaatcaacccacggatctgatcccatggcgattcaatctccgacccaaagacgctcttaagccactgttccaaactcccctccaatccatccctcccatctagcgcatcacgtacaagcctttgcactgatccaagtagctccccactcccaatagcatcaaccaacttttgccccgcagcaattacaactacctaacagcaccacattccttgagccaatctgtacaggcacatgaaccagcttgaggctacaatggtgctgcttgaaccagatgtcatagcatgtgcctgtacagattggcacaacattccttgagcc

SEQ ID NO: 41565 - DNA, 729 bp, Setaria italica
  Peptide Sequence Number=SeqID_107539
cgtagaattcgagatcgacaaggcactcggcatcaccaaccggcagcaggtgttcgacctcggcatcggcaagtacaacgagacgtgccgcagcatcgtcaccaagtacgtctccgagtgggaggccgtcgtcacgcgcacggggaggtggattgacttcaagaacgactacaagaccatggatctcagcttcatggagagcgtatggtgggtgtttgcgcagctctgggagaaggacctcgtctacaggggcttcaaggtgatgccttacagcacaggctgcaaaactgcactgtctaactttgaggcagcactggactacaggactgtacctgacccagcagtaatggtatccttccctattgtcggtgatgcggacaatgcggctcttgttgcatggactacaacaccctggacacttccgagtaaccttgcattatgtgtcaatgccaatctcacatatgtaaaggttaaggacaagtcaaatggagccgtatatgttattgcggaatctaggcttgggcagttgccagttaaggccaaagcttcaggaaagaagcaagcaccttcaaagggaagcaatgctgaagctgttcaggatggtttagataaggaatcatatgagctattggcaaagattccagggtcatccttggttggcttaaaatatactcctctatttgattttttcttggaacttcgagagactgcctttagagtgattgcgga

SEQ ID NO: 41566 - DNA, 401 bp, Setaria italica
  Peptide Sequence Number=SeqID_107540
caataataaaagcttgaaaactgagaacatagtatgaactctcttgagtatatatagaatagaaggtaccaattaaaactaacacaatttctcatatagaattatgaaattgcagcagcataacttccttttcgcttgaaatatatatagtacaactcttcaatcgttagaactgttcactagtatgaaccagcaatactacacttctgtcatatttaatcgtacagtcattctccatattaataatacttatgcctcaaactgtacatattgtgtacttctatatatatagtaggaaatttactggaatatatgatacacactgtatgttcttactttccctgaacaatgttatgatgtcagattttttatatatagtagcagaatgaaactatatcggg

SEQ ID NO: 41567 - DNA, 322 bp, Setaria italica
  Peptide Sequence Number=SeqID_107541
taattaccttacctaacgtacccctaacctttttaacccttaaaaagaacaaaatggcaagtctctgagcttatgatgcagcatttctggaatgtggcaacagcagtatactgacacagttaatgtattttacctgcaggcaatgagggtggatcgttacgatgctggattgttctcaaacaggagtctttgctggctccgcataggtgatgggagaagggctctgcgagatgcaacttggtgcaacatactgcggccaaagtgggtgaaggcctacttccagaaagcacaagctctgatgcttctgaaggtgcgactaaaa

SEQ ID NO: 41568 - DNA, 363 bp, Setaria italica
  Peptide Sequence Number=SeqID_107542
tgggtttgggttggaaaatcttaaacgtattacgtttaagaaggctgcgaaagtaagtaactgggccatccagtacaaattaagcccgtcatcgaatcgacagacccataaaaattgggctccgtgcgagcccaggtagcagtacaaatgggcctcactcggtccaccaagtggtgagtttccactttcgaatgactcgttatttcaccaaaagcattttaaaaaaaaccctcaacaagaaaacgaatgaccaaacgtaagcaaataccacacgataaaataatattccaatacgtattcctactaattaacctcctcgcgagggtgttaagcatgtggcatgtcctttttgagtggagggtg

SEQ ID NO: 41569 - DNA, 232 bp, Setaria italica
  misc_feature (166)..(232): n is a, c, g, or t
  Peptide Sequence Number=SeqID_107543
gggggacaatatataatctgaaataagctagcctttggtagcttatttcagattataacgtggtacccaaagtgatattttactatagtacccaagacccataatccaacttatataatttaggtggattaataatcccaaacaaacaggaccttattcgtgtgtnnnnnnnnnnnnnnnnnnnnnnnnnnnnnnnnnnnnnnnnnnnnnnnnnnnnnnnnnnnnnnnnnnn

SEQ ID NO: 41570 - DNA, 376 bp, Setaria italica
  Peptide Sequence Number=SeqID_107544
ttttctttatttttgtttcacaatttgttcttgtgatggggacaatgagataagattctggaatatcaagcatggaaacaacgtccgaattttcaagggaggttcgacccagctgagattccaaccacgttatgtaggatatcttgcaacagcttcagataatatggtctctattctggatgtggagacacaagcttgtgtgaggagatttgagagccacactaaccacgttgattccttgtgctgggatcccactggaggatatatcgtgtctgtcagtgaagacatggtgaagatgtggtcattgaacgaggagagctgtgtgaatgagcttaactgcagcgggactagactgccaaggcacacaggggatagg

SEQ ID NO: 41571 - DNA, 420 bp, Setaria italica
  Peptide Sequence Number=SeqID_107545
ttagtttaaaattttacttaaaagttacttaagttacttgtaaattaaaagcaagcaatattacctcctatctcctgaatgacatgtaccaggtgcacaaaggtagcttctaatagcttctagtactcttgcacctgtcagtttatcttttggaatgtacaggctacagagtccctcatatttgtcttgtcaagagcatttttatctgccattgggagtttactgcgcacagcatatatctctatatctttaaaaagcatgatgtgtttttttcttcttctgtgcggtcctacagagtacagacaattgcatctcaccctgttttttttgtagtgttgactttattagccagttgatttgtgaagaattacatatttgtgaaccaaagtttggtaatactgattccagttgagtgttgca

SEQ ID NO: 41572 - DNA, 549 bp, Setaria italica
  Peptide Sequence Number=SeqID_107546
attgtaaacccttcatcagcggagcaattttgtgtggacataaacagatgacagaggaaattacaagagttcttgttgccgatggtttgtcaaaagataaaatcctaactaacttctgaccgccagtaggacacagttccagccattttggatgttgtaccatttttgtactacgatctagcagttattctttacagtaagtgcgactggaaattgcaacaggaagacagttgcgtccttacaaataatactctcaacagccactgggcatccgaaccagtccctagttgagagaatgttttgtagcatgagactacttccttgtaaggcgttgatgtactcagaaagccccctccttggagaaatgataggggatatagatagtagcattattttcagtttataccttaaaatattagcgctgcacatgcctttttcagcactgagattttggtgtatattgtcaaattttgaaatgagtgatgtgtttaattttggtgctcactctgccttttgcatgctgtttaattgagatgtgttctggtgtcg

SEQ ID NO: 41573 - DNA, 362 bp, Setaria italica
  Peptide Sequence Number=SeqID_107547
gagaacttcggcttcgtagacattgccctagtgcccttcacctgccggttcctcgcctatgagaagctcggcagcttcagcattgaggagcattgccccaagatcgtcgcatgggccaagctctgcaaggagcgtgagagcgtggccaaggtgctgcctgaccccgacaaggtgttcgagttcatccagttcatccggatcagcaagttcggggccaagtagggtaggtgatagggctaggcatggcatgaccgttgtgttttttggttgcgttgtgttgtcaatgtttctgtcaagagtgtggattttggttttagcttttggttgcctcttgctgagccaataaaattattgctactaaa

SEQ ID NO: 41574 - DNA, 256 bp, Setaria italica
  Peptide Sequence Number=SeqID_107548
tttctttttccttccagcgccacagattagactattagaggattttgagcgcgcctgcaaagttttagtggtctgaatacttgtggataaggcactgcaacacgcaattaggattttcctttgccctctggcagtggtttttgaagcctgtaagattggcacggtcacaagtattatcagcgtgtcagaacatgtgtgcaccagttcccttaatgcgctccagttttgataatgtgacaatgttcagtggacgtta

SEQ ID NO: 41575 - DNA, 2783 bp, Setaria italica
  Peptide Sequence Number=SeqID_107549
agagggagagcaaatgcgtgctatctgtctagagagtcaaccaagatcaattgcccagcaaggatctcgttaaagttaaggcaagataggtggcttcacattgatgatgctaagcttgagcacaaccatccacttaaccagtcctctgtggcactcactaattgttacaagaagctaacagatgccaagaatggggaacctgcttcacggttgaagggtcgcaggaacgttccagctgaaaaagagcaagggaactttactgagataggaagacttaaatttggggaaggagatgacgagtatatccagaagttttttgggaacatgcagaacaagaatccttatttcttctacttagtagatttggattatcaagggcgtttgaggaacttgttctggagtgacgctaggtcaagggcagcaaatgattacttcggtcatgatgttgtttactttgacacctcgtacttgacagaaaaatacgatttgccacttgttttcttctctgggatgaataatcatggtcagcctgttctgtttggtactggtttactcttcctacttaactagttaacgtaagtttcttactattggtaagtagtctagtcttggtcctaaagtccttactactaattaaactattgtttctagtaaaattttcaggtattgagtattaattctattaccagatctaaatgctgacagttatgcttggttatttagggcatttttagcatgcatgaagggtcgctgtccaatggcaatcattactgagcattacaatgctattctagatgctgttcgagaagttctacctgaagttagacatcgcctttgcctgtatcgtattatgaaagatgtagctgagaatttgaaagaacatgcagagtttaaaacaatcaagaaagcactgaataaagtaacatatgggtctttgaagatcccagagtttgaagcggattggaagaagattatagatgagcatggacttggagaaaatgagtgcctcagttccctatatgagcatcgccaactctgggcacctgcatatctcagagacaaattctgggcagggatgtctatttcacagcatggggagtctatttcctcgtactatgatggttttgtgtacccaaaaacttctttgaaacaatttttcagtaaatatgagatgatattagagaacaaatacaagaaggagtggcaagcagatgaagaatcctcccataggactccactaacagtaacgaagttctacatggaagagcagctggccaaagcctacacaataaacatgttcagaaaatttcaggatgagttgaaagccacaatgtattgtgatggtatgccaattaaagttgatggtcggcttgtcacttttgaagtaaaagaatgctcgtacatggaagatggaaaggacacagagagcaggacctatgaagtttacttttgtaaagaagggaaggttgaaattgagtgtgaatgtggtttcgttcagttcactggcgtcctatgtagacatgcattatctgtgttgaagttgcaggagatatttgagatcccatcagattatgttcttgatcgctggagaagggactataaaaaattgtattctaaagcaaacaaacccaatgaaatgccccttagtggaattgttgagcgctctgattatttgttcagtcaatgtagtcagttgctcaatctagggtttgtatctgagagtaggtaccttgttgctctgaagttactgagagatgcggaaagatctcttctggatgatggactacctgctagagacaggcagtcaacgcttctttcatttgaggctgatgcaccagaaaatggtcaaggcctttttaatccccagttttcagagagtgtaaagaattctcagtcagcccatgcaaaacgtcgcggccggccaccgaagaaagtgacagaatctaatggtgaaactgtaacacagccaaacaaagaacaggattttctgcggtcatcatttgtcacagacgatacaaatatggtccaagggccgccctctgcctcccatcttgaaggtcctcacatgggagtgcaaggaggcattgatttaatggaaggaataccaaatctctcatttggtaatcattttggaatggatattaatcaccaacatcaagtacccagccaccaaaggatgcagcagaacaatttcatgcaggtgcaggcagaaccccatgggtttgcgagtcagtgggtttaccacccaatgttgcaggataatccagtgctaagaactcctacgcgaagaacagggtagcgcgtgttctttgctttaatatttcagtagaattttaggtacaatgacttctctgactcctgtaatgactgcctgaaatcctgaactaacctgaggatatggatgccgtggcacactactaaaggcaagaacttggcggagggtccactggatgctaactttttggttatctgatactgttagctgctgtcgccaggctgaaattttcaagctgtacataaccattagcccatgtgtacatcttccagcgccacagattagactattagaggattttgagcgcgcctgcaaagttttagtggtctgaatacttgtggataaggcactgcaacacgcaattaggattttcctttgccctctggcagtggttttgaagcctgtaagattggcacggtcacaagtattatcagcgtgtcagaacatgtgtgcaccagttcccttaatgcgctgataatacttgtgaccgtgccaatcttacaggctt

SEQ ID NO: 41576 - DNA, 437 bp, Setaria italica
  Peptide Sequence Number=SeqID_107550
caacaaaaagcttggtcaaattctcatgttatccccctgagtttattcgcaatgaaatttatggattttttgaaaacactcttaagagacatggaaagggagaaagaccagatattggcagcagttcattccaatccttgcttggtcctgaaaatgcacttagtgaagatgggtcgaggttgaaaacttcttgcatgaatgagggtgaaaacagaagctcgctgcctgacaaggacttgagtgtgacagatgtgcataagaattcaggtagatgtcaaccatgtgttgtgcaggatcttccttggaacaaaatctggttcatggaatatgcgtctgatttctgtgcaaattcaacatatttgagccatccatccttttcttgcgagaatggtaatggcaacagtaaagaatgcttcgagaattatgcaacggaagga

SEQ ID NO: 41577 - DNA, 1347 bp, Setaria italica
  Peptide Sequence Number=SeqID_107551
gtcttctctttggagacctgagtctccagctcctgaatatgctgaatagctgcctgctcaatgcaagatcgacgcttgtattcttcgtcaagcatgcctgttatctggtatcttagttcagccatttcttgggtgagatcttctgcatcctcttttgcctttaacttttgttctcgaagttcttccttgagctgctcaattagaagttcagattcttcattttgttttgccatcctttcaagaattaaattatcactttcatattctgcatgaccaccattctccaattgtttgtcaaggtgatccccggatgtagaaggggattgtttatgagcttttataggcaacaactccttcaattgcttattctctagaacaagttgatcgatattgttttgtgcctcatgcagctggagctcatgctctcccaatagtttgtcaattcgagctttgtgctcagcagcatgttgggcaaagctctcagcatcaaatagtctctgctcaagattagttaaatcaagtttcaagctctcaatttcgcattgtgaatctaaaactgtactttcaagcttctctatctgtgaagatgccttttgcaactcctcttctttacatctgacttcttccatcaggagccagcactgagaatcagatcgcatcagctcattgtccataactctcactctttccgggaacttttcaagttcagtcagcttcagttcaaggctgtgaatatgctctcccatgatgtttgcttcaacattccttatatttaactgatcctgcaaatagtcaatttcctgatagcagttcatcagctccatttccaatttctcaatatattgcctgtccttcggacaggccctagaggctgcatttctgtcgagctgcagtttcctatctcttgtatgaagaacttttgcaccattagcaggatggtggccgctggagctactagacatctgctacgatgccggcggcagccggcgcacgagcgccgcctgtggtggctccggccgtatccctctccggcgatcgccggagagaggcagctccgaggacgagctctggcggcggcgcggctccggggaaaggcactggcggcggcgcgggacactaggtggcatccagcagcaggacaactcagggacgaagccccggccgtgatttgcagcggttaaacgcgatttggagccctaatcgtagttagcacggctgcacggggataagtgaagggcagatagagagcgacggaggaacatagagcttgctgatagaaatgcaaggaggaggagggtgggcatagaaaactgacagttgcgagtgcaaaagcggataggaatcaga

SEQ ID NO: 41578 - DNA, 353 bp, Setaria italica
  misc_feature (346)..(346): n is a, c, g, or t
  Peptide Sequence Number=SeqID_107552
gcctcccctgccatctgccgacgactccaaaatccaaatccatggccctcgtccgtgcgcccccgcccttccggcagcctctctcgccctcctcccgctccaggcgctgccccacatgccacgcagtcgccgccacggccaggccatgccccggcccctcctggaccggcgtccatggaggaggcggcggcgccaagaagaggcttcttgcgagcaggaggtggccgggaggggtgggggtgccttctctcctggccacaacggatgagggggtcgctgctgcaggcgttgcgagggaggaggaggacgacgacgagtacctggcgcgggaggccgggtgggggtncggcaga

SEQ ID NO: 41579 - DNA, 956 bp, Setaria italica
  Peptide Sequence Number=SeqID_107553
ttttaatttttgggttttgtttcttttttgtttcttagtaaattatcgacatcattcacgttccgtaggcgctgccgtttgattggctcattatttgcaatgacctcttgatcttcaggtttcctcttttcagctggacttggtggcttctcttcaactacaacttcctttgtgtgtgcagaggaatcctcagcagcagtatcaaggagagacacctctttcaacccatgctctgaggtaaactctgtcttctctccaagatcatcagatttgatattggaatcaatgtgcttactttccaacacatcctcatccattgattcatcacctgaacaactatcaaaattcagtttctcaatagaactaccatcaggactctcctcatctctgtccaagtctatattacttgtggagcctaactcttgcaaagtggcaccaatcttatgcacctctttgtcgacatccaacacttccaaaagatcacctggggagggaatggtggatgatggtttgaccatctcctgctttgcgtctagttctaaatcacaatcatcagcattcaggttaccctttagatcattatttttgtcagcagatatattatcatcgaaaattgatacacacttagtttgagaatctagatctgggttgacctcagatacctggtctttttctctgcacaggaagggcttggtgtccccattagagcacttaaagtctccgtggccattgccatgcatcaaagtattcacactgaaattatctttaggaatcatgttctctgctgccacaacaacatcagcacccttaggatcagcattcaattcaatagcatcaggcagtgctggtactttttcctgttcaattttgcagtctacattgacacctagcttgacagtagtatggttagcatcagacaatacaccatcaatggtcattttcttggtcgttgttgt

SEQ ID NO: 41580 - DNA, 403 bp, Setaria italica
  misc_feature (222)..(222): n is a, c, g, or t
  Peptide Sequence Number=SeqID_107554
taacgtggagcagttctgcgatgtctgtgtgttgacaaagcagaggcgtctcccctttccccagcaggcgagcttccgagccaaggagcggctcgagctcgtgcacggggacttgtgtggcccggtgacaccggccacacccggaggacgacgctacttcttgctgctcgtcgacgacctctcccgctacatgtgggtgatggtcctcggcagcaagggggngctgcgaacgccatcaggcgcacgcaggctgctgcagaggcggagtgtggccgcaagctgcgcgtgctgcgcaccgacaacggcggcgaattcacggcggctgagttcgcgtcgaactgcgctgatgcgggcattcagcgccactactccgcgccgtacagcccgcagcagaacgacgttg

SEQ ID NO: 41581 - DNA, 518 bp, Setaria italica
  Peptide Sequence Number=SeqID_107555
tggggcaatgatcaaataattaccgctatctcagaatagatatggatatgagtttagatctatatgaaaatagacttcataagcattccatgaagtacttgaactccccaatccgaatccgtatgcgattgtggtgaccgtcacaagttggtgttgttctgcagtccaaatctagcctgtgtgaatccttttctcttacggtcttctccctggttcctaagcaaaacaagagtgcacgtgtctccatggtataaatatgatggacatgaactcaagagtgtattcacctgatggttgagttgacgagcacgagcacgagtaatgggatcaaaaaattggtccttgtgttggcgtggatgtatcgttggtgttgatgtcctcattacccgcgcgcgctcatcacaggagtactccaccgcaatcacctagggccctgtacccctccttcgaggccctaggactgccactgccgtaggccatctcgcccgcgtgcagctgccgctgcactgccgccgcgt

SEQ ID NO: 41582 - DNA, 401 bp, Setaria italica
  Peptide Sequence Number=SeqID_107556
aactacctcaactccgggctctaccgctgggatggcgatgccaatacctttgatggcgacacctgcatcgagctcgtctgctcaccgaacaaccctgatggcggcatccgaaaacccaccgtcaaggccaagtacgggaagacaatccatgacttcgcctactattggccgcagcacacccccatcaccgaggcagctagccacgacatcatgctgttcaccgtttctaagtgcactggacatgctggcacaaggctagggtgggcgttggtgaaggacacggaggttgcccagaaaatgatcaagttcttggagctaaacaccattggtgtgtccaaggactcgcaacttcgtgctgcaaagatcctgaaggctgtttgtgatggctatgagctatcgcc

SEQ ID NO: 41583 - DNA, 579 bp, Setaria italica
  misc_feature (530)..(530): n is a, c, g, or t
  Peptide Sequence Number=SeqID_107557
atttatatagagttgggttggatatagccctctaccatatctatacaaatagaatagtccatttatatagagttgggttggatatagccctctaccatatctatacaaatagaatagtccatttatacggactgctaagtgcggagacgggaatcgaacccgtgacctcaaggttatgagcctcgtgagctaccaaactgctctactccgctctgtagggccgaaaacaggtggacgaaaaaggttgaatacaagtctctaccatgtctagacaaacaaatggaatagtctttttctacaaaatggagcgggtagcgggaatcgaacccgcatcgttagcttggaaggctaggggttatagtcgacgttggttgattttttttaacgtctctaattcaaaaccgaacatgaaattttgatttcattcggctcctttatggatattctcaccacttaacatctatgtcagcttttctgtctgaatggaaccaaagctctctgctttctagatgatccctatagagtagganatagaaattctcctaaatatctatctaatctacttacttcgttccctaa

SEQ ID NO: 41584 - DNA, 326 bp, Setaria italica
  Peptide Sequence Number=SeqID_107558
tcggcgtttgtaggcggtctatctcaccgacgatccctgggtgggagtcctccacgaaaatggatacgctggtgcacctcttgagcttgacgtttgaatgcgtcctcctcttcacgagtcttggccagcttggcgcgatcggccatgtgacgaagggctctgaagaccgggatcctcatagactcgatgaatgcagccggtgccaaggcttcctccgcctcttctggtacttgtccgctgacgtcaccgaaaagctaccgaatcggtgaggcatcttctactaatcggcctatgtccccttgaagaagggatcggatactagtaag

SEQ ID NO: 41585 - DNA, 483 bp, Setaria italica
  Peptide Sequence Number=SeqID_107559
ttacgaccgacccgccgccgtctcttctcccaaatcaccgacccacatcccagccacagcaaccccgagcgcagccgcgtcgatggcccccaaggcggagaagaagccggcggcgaagaagcccgcggaggaggagcccgcgacggagaaggcggagaaggccccggcggggaagaagcccaaggcggagaagcgtctccccgcgggcaagtccgccggcaaggagggcggcgagggcaagaaggggaagaagaaggcgaagaagtcggtggagacctacaagatctacatcttcaaggtgctgaagcaggtgcaccccgacatcggcatctcctccaaggccatgtccatcatgaactccttcatcaacgacatcttcgagaagctcgccggtgaggcagccaagctcgcgcgctacaacaagaagcccaccatcacctcccgggagatccagacctccgtccgcctcgtcctccccggcga

SEQ ID NO: 41586 - DNA, 436 bp, Setaria italica
  Peptide Sequence Number=SeqID_107560
tactagtctggtttctgatgataaactggttgatttgctggatctggcactatctgcggacaccgtaaacacagtgaagacactaagagacatcacagaaaccggtgttgagcctttagcactgatgtctcaacttgccacaataattactgacattcttgctggttcctatgcatttacacgagaaaggcccaggagaaagttcttcaaacgtcctagtttgtcaaaagaagatatggaaaaactacgccaggccttgaaaacactatctgaagctgaaaagcagttgagggtctctagtgacaaaacaacctggcttacagctgctctgcttcagcttgctcctgataaacagtacctgttgccaagttcatcaactagtacaagtttgaaccatggtgggttggttggttcttctgatagggatatggcaaag

SEQ ID NO: 41587 - DNA, 359 bp, Setaria italica
  Peptide Sequence Number=SeqID_107561
acaactgcgaagaggcaacaggtgacagaagagtcaccacaagggcgagcctgagaaaggcgcagagagatgcatcggctgcaggcgagctgaaaagccctagccaccggttcacttcgccagcgccgaccgcgaagaagcgtactttctgggacattggaggcaacagcccttcagttcttgctgccaatggaagaaagactcgaagccatgtggctacagagacaccaaagaaaggcccttccatgctgcttcagcccggatttgcaaggcaaagagcaatccattgaggcatttaagatgcacaggaggagactgcctacagcggatagaagtgttcattactgtttaattttagc

SEQ ID NO: 41588 - DNA, 446 bp, Setaria italica
  Peptide Sequence Number=SeqID_107562
ctccagctccacctcgtctcccaccaccgccgcgcgcgagccctagcccgatctcgccggcaccacgcctcagatcccgccgcccgtgccgcccagggacgcgcgccgccggattcgccgctcctcgcgccgcagcgcgccctgaccggaccaggcaaagaaggcaactctggaggcatagcacaattcatcctggctggaggttcctgcgtggcatgcagtattgcagtactggtggaggctgtcatcacaaggcatatattgttgtgatttggcgatggcaaggagatgaaacaggtgtggcagcggagcagcaaggacatgacagccatgccccctccgcgccaccgaggcgctgctaagaagcccatgtggatcatcgtgctattgtcgttggtttgcgttgcacttatgggggcctacgtctacccaccacggcgctactt

SEQ ID NO: 41589 - DNA, 527 bp, Setaria italica
  Peptide Sequence Number=SeqID_107563
tcgtccgtagtctagtctaccttgtaacgtcgtttcgtagtcttcgttcagggtcatgggcgtcgccgtccagctgaagaatatggaggtgagtgaggtggagccctttgtggaggcggcggagctggagcaggcggtgcggggcctgatgggcgagacggaagaggggaggaaggcgagggagaaggcagcggacatgaaagccgcgtgccggaaagccgtgacagaaggcgggtcctcgtacattgcgcttcggaagctcatgagcgagatctcatctggcggagggggcaccgcctccgtgacggggtgacgggctgacggctggggagaggctcgccgtgttatggtcggaaatagcacgtcggcgtgcactcatgaggacataaagcggtatctctgagccgttgccgtcggaaagcctgcacgaggggcgacaataaggtttttggacagagcaactgcgcggcgctcgaatcgatcgactacgttctgcactgtcttcatcgacgatctgcactgcgccg

SEQ ID NO: 41590 - DNA, 3714 bp, Setaria italica
  Peptide Sequence Number=SeqID_107564
tttgaagtctctagtctatcatcaccaggactttgaacagcatcttcatcagtcatgttctcacttccctgagttggcaaaacagtttcgcccaaatcacatgcaccatcctttagttccacgaacgtctgtatttcatctttgacatcatcagtttcattccctgtaatttcttcattcaactctgcagaatgcccttctggtgttgtttcattatctgttggagatgggtcctctgaagtagcattctctgtttgctctccatcattgacggcttcgatgccgttaatttcttttgttgcctccaattcgttctcttgcttaatatcggaagttggctcttgcttaatatcggaagttggctctattgatgccatattaccttctgaagctgatttttctattgcatcaacttggcttgtatgaaattcttcttcagcttcattggcatcagtagccttgatttcttccactggttctagttcatgctcttgtttaatatcaacaggtgggtcaatttcacacgcaatactatcttctgtaggtgtttcttcaatggcgacagtgcctgcggtttcttctgccttttcaagctgactgttctcactgtccacatgctgtgctggttggacataagaatctggttcacttgtcagttcactcctttctccagttgcatcatctggaatgtcaatattactttgctggatgacttcttcagcctccattgcttgattgtcttttacttctggtactttgtcctcgtgcacctgttgatcatcaacattgggctcactgtctactgctggctcctcaaaggtagaaactccgtgttgttgatgattttcagttccctcggattcaatgtctctggtttcttgcacttgttggacatcagtagctggctcagtccttggtaaattactttcttgatctgcctctttagtaggaaagctactgagatctgagaattcatctgttttggcatcttcactgtccttgatttcttgagatgtcagattctgcacttgctgtgtgtcaaaagcacgctcggttactgttgtattttcttctgttggagtagtctcatcagaagtagaaccatggggctctcctggatgttccattgtgtcagtgcacttcgtgttctcaaacgattctagctccagaactggctcagtaccatcttcagtgagttcctttatactttcaacatgactctcatgagggactgcttcagtccccatggtttccatgtccatatttcctgctggcaggtcaattgatgtcataatatcctctgttccagctggttcagcgcccttggtctcttctagctctggctcctgcactgatggcatatcagcagttgcacctgtttctacattttcttctggagctgctgcctcaccaagagcagtgttgcttttcacattttcagtgccctcagttacttctgccagctgtaaactctctgcttgagtgtcagaatttggttccattgctgttgcattgtcttctgctattgccgttgcattgtcttctgaagtggactgctcagaagtagaaagaatgcaagatgacgcaattccttgaggtttatcggcttcagtttccatgaaatcacttgattcttgatcctggacttgttgatgatcaacatctggttcagtgcttgtgttatcttctgttgcaatttcttctgggacagattccccagaggaagatgttagcttagcattggagatatttgtagtctcagtggctgtagtgtcattcatttcttcgactgattctggttccagtacttgtggctcacttgctattccttctggtgcttgctcctctgattgagcagcatcactttggtggggtgttcctgcttctgtggcttcaatgttgctcagttctcttgctgattcatgcagatcaattgtggctagattatcttctttggttggcgtctgaaagacagtagtattcatttcataggatgtttccttcacttctgtaagttcagtgttctttatttcttctggttccggttcctgcacaggctgaatatcagcagttgacttgctttcagggacatagttttcttgagccgactccccagcagataccatgttgctttggccagagattcctccagttatgatgtctttgtcaccatcaattacttctaaagattctgtgatgcttactccctgagtgtcacaatctttttcactttctatcttatgatcttctgcagaaggctcatctgaaacacagtctttgctttcctggggagctgcttcagtttcagtggtttctgttgctgactctgcctgctgcatatcaatctcctgtgtatcttcttgagctaaatcatcgaatagaacagcattcatctgatcagaagcttcttctgattcaacaggttctgtgttctttgtttcttctggttctagctcctgcatatgcgtttcagcaatatcctcagtctgtagcacatcctgttctttaactgcctcatcagcaatcaccacatcagagacttcttctatattctcagctgtgtttcccttagtttcttcggttgattctgcattatctacttcttgactatcacaggttggctcttctgctgttacattatctagtacagtgtcctctgaagtaaaaacagtttccttaacttcaaccgaatcttgtccaagggtgtgctgaatatcatcattatgtgtctcatctgctgtcgaatcatcttctgctgaaagttccttggaaggagtaacatggccgtgttcggtgatttcttgagcttcagtggcttcaatgtccttcggttcttcttctgtttcagtcatttgtggttcgcttattgctgtagtaccttctgctttagctgattcatctgtttctgtgtttctacctgcagtatctggaatggcatcagagttgtccagattgatctccacaggagtttggactccagaaggtgcttcagatacaacctcaacatcaggaatgtttgtcatggttgcaggttgtgtgttctcatttgctttttctggttctagatcctggccttgcggatcttctgtttgctcaatagcttccagtgtgtcttgctgcacggtgtcaccatccattgtaatacctaaattatgttgatcttctggaactgcctcgtcaaaagcaacactgctttgttgcatagctgctccagtatcaacttcttcagcatcttttattttttctactgattcctggttctgcacttgaatatttacaggtggctcccctgttattgtgtcattttctggtgttgtctcctcaggaactgccatgttactctggtgcgcagtttcttcagtcttttcattcactgggccatcagtttcttcagtagattcttgattcagcacttcatgagcattggttgctggctcatcagcatgttcaaatttaggcacctcttcctgcaccacatctgcatccactgcatcagcttgctggctctgtggatcttccattttggccacctcttctgtaggtcctgcaatagatgtttcttctggaaagctctctttgtggtcaggatgaacaacatcatctgccttagctggttcctccatttctatcttttcatcaattgttactggaacagcaccagaatcatccatatgtggctccacaggagtttggaatccagtaggtgcctcagct

SEQ ID NO: 41591 - DNA, 1039 bp, Setaria italica
  Peptide Sequence Number=SeqID_107565
aactccccactagtgccgtgtgctgaccgctgaagcggccgtggcagtccgtctccacataaacccgtgcacttcctcatttcccaacgccacattccgcgaaccggaccgaatcccgctagtgccagtactactacaagtagcgctatcgaccgctagtctcgcatctacacagcacaagcacgacgccggcagaatcggacaatggcggccgtggctaggacgacgacggctatgtccatcctcgcgctcgcggcgctattagccaccaccaccgtccgcgtcgatggcgccacggcggccgcgccggcgccggcgccggccgcggactgcacggacgcgctgctgagcctggcggggtgcctgagctacgtgcaggaggggagcacggtggcgacgcccgacccgacctgctgctcggggctcaaggacgtggtgcgcaacgaggtggcctgcctctgccaggtgttccagggcggccagaacctcggcatctccctcaacatgaccaaggccctgcagctgcccgccgcgtgcaaggtcaagacgccgcccgtcagcaagtgccacgttgctgttcctggtgtgcccagcgcgtctccagttccggctccatctgccggagctgccccattcttcgggcagtcgccgccgtcagcaaccccttcggaatcaccggcaccggcaggaaccgggagcgactccaacactccagctgcagctccctccccagcgcgttctggcgcggccagcctctcggcatcaacggcacagaccaccttggctgcagcagctgttgccgcgactctgcttgtgtaccgtgttttgtgagctgggcttacctgtcatgttcattagtccgtgcactcgtcttacccctctgtctgaccacagatgagaagcgtatagcccattagcccctgtaccgagatgtatcttgtgagaattcccgttccgttttgcgccacttttgaacgtgcattgttcgtggatttcattgctacgcacaataaatcaataacgttacaagtagaaaaaa

SEQ ID NO: 41592 - DNA, 349 bp, Setaria italica
  Peptide Sequence Number=SeqID_107566
agaaaaggtataggaagcctgaattcccattatatttgaaaaaggtccatggatcctcttcttatgtgcttaacaagcttaaagtggattttggcatgtgcttttttttcctcggattccagaactgccatatcacattctaaaaataattgcatgcatctcaagaatgtgagcatgttctgttgacaaatagttatgtgtcaaagtacaaccagccctgcagttatcactaataaaaatatgatgcataaacaacagaagtgcctttatacaagagaaaaggttgtcatcatgcactgcaaacactatattttgaacaagctgctcgtataatggaagatggttcttt

SEQ ID NO: 41593 - DNA, 518 bp, Setaria italica
  Peptide Sequence Number=SeqID_107567
ttccatcatcactctcacccctttcatcctcattgatcaggttgttgaccttattgatttcttgcactgcagctacttcagcttgttccagatcatccccttgcttcaccacaatgagagcagtgccagcaatagcatgtcgcagtcctcgcactgcaattcttgccccttgggcagctttaagctcctcgtggtgcttatatactcccttagctttcagttctttcatgggataaggagtcaacaaatatcttatgttggttgtgacaagcccctgtttggtgcaaacaactattcgatcacctttccgaagtacaccattaatcagcactacatcaatagtagttccaaagtctttatcttcattgacttccagcacagtacactccacattatcgacgtatgtcagtctctccatcattatttctggaacccatcgcacaagcagcagaagaaggtctggaatgccttcagcacttgcagagctggttgggacaatattgactactttcttttaa

SEQ ID NO: 41594 - DNA, 2441 bp, Setaria italica
  misc_feature (1)..(84): n is a, c, g, or t
  Peptide Sequence Number=SeqID_107568
nnnnnnnnnnnnnnnnnnnnnnnnnnnnnnnnnnnnnnnnnnnnnnnnnnnnnnnnnnnnnnnnnnnnnnnnnnnnnnnnnnnnaaagtccaacgctaagttcattctaacgagattgcaacattaactttagcaatttcaacatatcaagcatcaattcattgtagcatgcacagaatataacaaaggaatatgataatattccagtctccgctgccaatataataaaacataaaaaagaaggaatcttcttccaaagcttgctacgggagaagatgccaagttggtagagggatcttccaagcattcagggtattccgaattgtttctttagcctgcggataagctgccaattttcatcactcatctcatcccggtagtactctttcagcacatcaatagatttcctagagatttggcttagcagttcgttgtcggtgttaaaatgccatccatacaatcgggacctctcctgaggattctccccaataatctttatcgacacgactcctctcttggtagaatcaatctgcatgccattggatgtctccatcgagatgatcctcccaaggctatgaatcacgtctgcacctctgtccttgcttggaacagagacacaaattggggttcccaccttgacaatgccttccagaacttcaacatcacaaacaattggatcctttttatggtagacacggtttggcagaatcttaagggtgcatgggaacactgcctcagctgcatattgcttcttcttgtcttccttcagtttcttaatgtgatcagtaaatctgccaacaagcttgtacacggtatcagccataaaaatctttacccctgactcagcagcaaggtcaaaagcctcaggcatcactttgacatcaaaggccaagatggctgcatactcttctttcctcttcagcatagcagttgctttcatgacatcctgcttgtggactgggcctaagttgcaaccactaacagggatgtccaaagaaagggtcttcaaatgctcaataatggcttccaaagttccaagactggatgcttgcacatagacaccctcagtgcatgttttgaccctacttattgcctgtattgctcttccatcatcactctcacccctttcatcctcattgatcaggttgttgaccttattgatttcttgcactgcagctacttcagcttgttccagatcatccccttgcttcaccacaatgagagcagtgccagcaatagcatgtcgcagtcctcgcactgcaattcttgccccttgggcagctttaagctcctcgtggtgcttatatactcccttagctttcagttctttcatgggataaggagtcaacaaatatcttatgttggttgtgacaagcccctgtagatgaaaatgagctactgtttggtgcaaacaactattcgatcacctttccgaagtacaccattaatcagcactacatcaatagtagttccaaagtctttatcttcattgacttccagcacagtacactccacattatcgacgtatgtcagtctctccatcattatttctggaacccatcgcacaagcagcagaagaaggtctggaatgccttcagcacttgcagagctggttgggacaatattgactacttctttaaccttcttgttctcataatacagggaagcgttgaagccacttcccttcagttgtgttacaacctcagttaatctccatttgaattccctttggacatcttcagattggttcttgagcgcttttgctattggtgcattgggacaagtcttccacccatatagccgatcaaccttgttcagggcaacaataaacctcacatggcgttgtttcaaaagatcaagggactcgatggtctgcttctcaagcccacgtgtaatatcgacaaccactacagcaacgtcacacaaacttgatcccctcaagcgcatgttactgaatgactggtggccaggggtgtcaattacaagcaatccaggaactttgatggtggcctcagctttccagggaggtcctctccctgatattctcaactggtaagtaggtcgcaccaatctgctgcgtgatgcccccagcctccccaccctgcacattgcttcgccggatgcaatcaaggagctgtgtctttccagcatccacatgaccgaggatgcaacatatcggtgctcgaagctccctgtcaaacctattgcctgcaccttcatccttaaggatagagaccacatcttccccaattacttcagataaactcactgagttagcaattggagcagcagacgccacatgcttctcctctgtttggtcaaattcatcaaagctcttgttctcccaagcatcatcatcgtcgattccattgctctcttccgatgatggcttggaaatttgttcctcccccaattccagagcatcaaccatcacaccatca

SEQ ID NO: 41595 - DNA, 350 bp, Setaria italica
  Peptide Sequence Number=SeqID_107569
aagctcgtcgatgaagaagcagcaagagagatggacgacgagttcgaggaagggaccgggccaaagcagttccgctacagcgagctcgccatggccaccgactacttctcggacaagcgcaagctcggagaaggtgggttcgggtcagtgtacagaggctacattaaggagatggaccttcacgtcgccatcaagagggtgtccaagggttcgaagcagggcaggaaggagtacgcctcggaggtcaggatcatcagcctgctgcggcaccgtaaccttgtgcagctcatcggttggtgccatggcggcggcgagctcctcctcgtgtacgagctgatgcccaacggcag

SEQ ID NO: 41596 - DNA, 257 bp, Setaria italica
  Peptide Sequence Number=SeqID_107570
cacaccacacccccgcccgccctctgttttcctctctcgccgccatggcagccgagcagaggcttctcgctctcctcctggtcacggctgtcctcgcgctctccttctcgcaagggatggtggaggcgcggaaggtgcgggtgatgcgagcggtgcggcacgacgggcggcgcgcgccgggcctccgcgggaggctgctgccggaggagatggtgtacacgctgatggactacgggccccccagggccaaacaccaa

SEQ ID NO: 41597 - DNA, 938 bp, Setaria italica
  Peptide Sequence Number=SeqID_107571
ttaaacttgcaatggtaacaacattttttgtacatcgatgattgttgacaagcagagaagaacataggcgaatatctaagattacaatgggcaatacccaaatacctttgcgctccattcaatcagagttgcacgaacctaacaaactaacctggtctattcccatgagtattggcagagaaggttttccgagtatcggtgtgagaagattgatattgccacgatctggtagaatcctttatccccttctaaaacctcttcactccatgtccatgttaacccatctctgagatgtcctggaactcttgcacgcccaggagttcaaacttttctgtccatcattttgctgctctaagagaatttacagttcattgcttattacactccaggaactcgtcaatagtcttgttgattatgctgtctccggcctttactccaatggcgagtgctgttctgagattcaccacatgacctaacctcaccgagcctcctttgttgtccttgaggcacaatactggaacctgccttgtagatgccagggttggtatatgttttgttaaccacttgggattgcaatcggcagctacaaggacagcctgcagtggcaccaaaggagctctacgccgacctgagacagtttgtgcttcactagaactgtgagcagaatcaggggcagcagcgggaggcattctctcgagaacccttgtcacatcattgaccccgatagcaaattgtttcttcatccatatcttttctggtaaacctccccttgaagcctttgcaacctctacactcctgacaagtttcgacaataggtcgtcaagagcgtctcctacaatgtaatctggagttagtctgcataacgcatgtacaccagtgaaatagcagcgtgaggaatcgaaagagagcatcagaaatcattaaccaggaaaataata

SEQ ID NO: 41598 - DNA, 811 bp, Setaria italica
  Peptide Sequence Number=SeqID_107572
cctctttgttggtttctgcaatcaccccaggtatgatactaacttgcatttcttgcctttattttttgcaagctaatacatgttataatagtgttccataaaagactcttatcttttgttccatataaaccttgtactctagtgtttttatgattggatggaagtagtagtgctttctgaaagcatcaaataaacgactgaggttgcacttggtaccttatgaatgcaaaaactttataaatggcgtgttctgttccatactcagaaataacgcccagaatggtttctcacaagtgagatataaatttagtgttttgtcacttccttactggcgatgtgtaattcatatgattcaaaattataacgtgttaacaaattggtgaatgatctctaacgttttctgtggtcatgtaactcgtgctttactagtaagatttcacaatgtgtcacattgatattggggtgttcaccctaacttttgaaatctgaattcctggatatttcattccttatgaagtgatacataactcatatttacttggatggtcaccgttgtgactggttcagttttatggttgagcgttgaagtaaagattttacaggtctcacctgttggctcttttttccagaacaaatggaagaatatgcagtgtaatcgttttcatatctcaaactgccatttcccttgttatttgaatacctgtttcagacctattaactgaccactgtttgtcatatcaaaatctgcatttaaagtttaggttgtgtctgaatcagtctgttttaccaccacatttatgagggcaatcac

SEQ ID NO: 41599 - DNA, 629 bp, Setaria italica
  Peptide Sequence Number=SeqID_107573
aattaaatttaagtaggtgttgtgccacttactggtgatgtgtaattcatatgattcaaaattataatgttaacaaattggtgaatgatctctaacattttctgtggtcatgtaactcttgtgctttactggtaagatttcacaatgtgtcacattgatattggggtgttcacctgtttatatgtttatattatgccccttaaaagaaatgttcatgttgcagtccttagcaaatgactgggtctgtgagtaaacatgttatgtcattcacattggaatgcatttttttgcttatcctttccatatttttaaataattccattagtaatgttcttgtatagcacaatgttcaagatttcaatgtgtcagaatgaattttatagggaagtgcctactaatgcgcaaccgccccattctagatgtaatgttttctattggcctgattttgtgtcctttcctgcagggtatagcgaagtaaaaaaaaacctcaattactgtgtgttagtatttgcattgcatttaaggatttgaatgaaatttctgatgatcacattatacccaggggtgcttacagtctaacagcaacttttcggtacagaggctctagtcccgatgttttggatgcagtg

SEQ ID NO: 41600 - DNA, 829 bp, Setaria italica
  Peptide Sequence Number=SeqID_107574
agttttttttttttttttttttttggtacacggtacatgttcagcaaattggcaagccttacccttacgcacataacaaattttcctgatgtcagttaaaaggtgaacatttcttaggactaagctttgtctcctaaagtgaagaacagcctaagaacatattgcaactatgctctcggtcacagtatcaactatcaaacattagcatataagatagagcacgactgcggaggacaatcctctgtatgtacaacactacattgaaccaggaagcagcagaagctatgacgcaccaaagccgctgctcacatgttcctgaacgatcacacgcagccggctttgcatcatgctggatgaagtgtaagctggcagatggaggtggtagaagcaggtttgcgaagtggggagatggtcgcgggagctggaggccctgtatatgaacagcctgcaccccagtccccagaaaccatctgacggcaaacatttcactgaggtccagaagaaaagtagcctcccctgctgttcgaccgtcatgttttccacggccttccagaaccatttgatttggcgatctttttcttttatccacggtagtcagtatgagctctccactggttcacatctatagtgcccttgctaccacccaacatctgatcaaaatcttcattatccaaactcgcaaagaactctgtccagggtttccatttgtcgaacatagtacgaaatcctgcagcaaaataagctagttgacgtctggtgcagttcacgaacctatcttgaatcagcagatcgatgtacttgcatctaattctcactagtaacagcaata

SEQ ID NO: 41601 - DNA, 460 bp, Setaria italica
  Peptide Sequence Number=SeqID_107575
acgaagacaatcgagcatttacatcgaataggaataatgttggcatcacaactgtgtcgcttaatgtgcctcgcatgttatatattgtgttgatcatgcttggttagatttcacttttctacaaggttaatattgtcaaagcaacaacaatttcttagattgtgattgttctgttacccttcttgactccgttttcgtggaccttctgaacattttttttcacggaccttccaaacattgtcagatgttagaaaaatatcagcacctctttgatgttgagtaccacaaaatttgttagaatttgttgaattattcagtcttgccttatttttgactgctagcagtttggacctgacagtcacatagaagtttagttatacataaatttcttctatcaaaccacagaatgtgtttgatgggcatgctctgactttttatgcaaaaggtctagaatacttac

SEQ ID NO: 41602 - DNA, 651 bp, Setaria italica
  misc_feature (485)..(485): n is a, c, g, or t
  misc_feature (607)..(607): n is a, c, g, or t
  Peptide Sequence Number=SeqID_107576
attactacactatacatcagaatagaatagcatcaacaatctctctattttttagcacatccatgcactgtaaaaatttataactacactatacatccatgcctcttgagttgagtcctcattgcaatgctgaatatatgcccagcggcctcctctttaaagatcagtgcttcatttatatgagacttgtattttagcaaacttgatcttcccacagctagtgttcagaacatcaatatttatttcagaacaatttcatttttttcaacacatccatacatcgaccaatttgattactacactatacataagaatagaatagcatcaacaatctctctatttttagcacatccatgcactgtaaaaatttataactacactatagagccatgcctcttgagttgagtcctcattgcatgctgaatatatgcccagcggcctcctctttaaagatcagtgcttgatattactacaaaaaaaaaagntcagtgcttgatttatatgagtcttgtattttagcaaacttgatcttccgacagctagtgttcagcaaacttgatgttcccgcacccagccttgagagcaactcacacatcaaatagaactnttgtttgacatcactgcagatcagtgcagattgtagttatggta

SEQ ID NO: 41603 - DNA, 378 bp, Setaria italica
  Peptide Sequence Number=SeqID_107577
gaacatcaatatttatttcagaacaatttcatttttttcaacacatccatacatcgaccaatttgattactacactatacatcagaatagaatagcatcaacaatctctctatttttagcacatccatgcactgtaaaaatttataactacactatacatccatgcctcttgagttgagtcctcattgcaatgctgaatatatgcccagcggcctcctctttaaagatcagtgcttcatttatatgagacttgtattttagcaaacttgatcttcccacagctagtgttcagcaaacttgatcttcccgcacccagccttgagagcaaactcacacatcaaatagaacattgtttgacatcactgcagatcagtgcag

SEQ ID NO: 41604 - DNA, 343 bp, Setaria italica
  Peptide Sequence Number=SeqID_107578
aggactctgcccaggagggcttcaatgttgggtttaggcaatctgtagacgttggctacaagtggggtcttgttcgtggggttaccagtgcactagctagccttcctgacagcttgaaggaaaaacttgtgcctgatgcccagtgtagaaggaaacttctggatgtgcagagctctgtgcaagaaatatcagcagatgatgcacttcagatgttccatgaaagcatttgtcagagtagtcatccttcagaggaatcacatgtaacatcaactgcagatggaactacagaatctaataggatcaaaagcctatcaaatgatctggtgttgttgttgcatgaatg

SEQ ID NO: 41605 - DNA, 733 bp, Setaria italica
  Peptide Sequence Number=SeqID_107579
ttgttccttagttagggtttctttttcttaatttgttttgggtttttaggttcttaatttctttgtttagttacgttttggttctttacttaagttggggttctttgtttcgttggggtttacctagttgtctacttagctagccttcctgacagcttgaaggaaaaacttgtgcctgatgcccagtgtagaaggaaacttctggatgtgcagagctctgtgcaagaaatatcagcagatgatgcacttcagatgttccatgaaagcatttgtcagagtagtcatccttcagaggaatcacatgtaacatcaactgcagatggaactacagaatctaataggatcaaaagcctatcaaatgatctggtgttgttgttgcatgaatgcccggatattaaggtaagtgaagagttggcaggagattcatgaacaagttggcctgaaattgcgaccactacaagccaactaagtctagcagaatcgccactacagaattctcagattacacaatgcctgccagggctatatgtgaatgttattcagggacctaatttgggatggagctgtactcagaaagcttgaacctcagtatctagaactctagaagttttgaaaagatatgtagctgtaaatcttgagatttcatatcgctcttttgctgcatactataacaagtattgtaaatgtaactccaacaagttatcgattttaatacagtagcaatgttttttct

SEQ ID NO: 41606 - DNA, 745 bp, Setaria italica
  Peptide Sequence Number=SeqID_107580
aaacgaaaccggaaaccagtcgccggccatggcgccggggaccggcggcggcggcggcggcgacggcggcggcagtcacagacttcaagaaagggttggttccttcagtgtcgtcttcgatgcagagaaaagggtctgaggccctcacaggaactgagcttaacgctgcagtgtacagatacctccaggattcaggatttgtgcatactgcattcaatttcttctatgaggcggatattgaaagaggcaacatccagggaatgattccacaaggtaccttgatcaggatcgtgcataaaggtcttgagtacatcgagttggaagcaaattctgagattggtagcgatgacgagcaccacttttttgatactctggacctaatgaccaatgatttagacgagctgagaaagaaagttaccagcagttcgcagtggaattctgtcaagaatgacaaagagcagaagatcaattctggtgagactgacaaagcgcagtgttctgctgagactaccacaatgtataggaagaaacctacgcggaaaacagaggctgtgcagaacaccaatcctgatgaaactgctgcaataggtggaactcagccaatgaagcattttaaggcacaagggaaagactccacagaacagaacatcagttctgctgagattgggcagaagaccggttctgctgaggctagcgcaatgtataggaggaagcctacacggaaaacggaggctgagcagaacag

SEQ ID NO: 41607 - DNA, 286 bp, Setaria italica
  Peptide Sequence Number=SeqID_107581
agctcaggtgctcaccaaggatcaggtccgggagttctgggagcagctctctgacccaggatttgatgcaaagcttcggaccttctttgacatggttgacaagaatgctgatggtcagattacagaagaggagctgaaagaggtcctcactttgaccgcctcggcgaacaagctgtccaagatcctggagcgcgttgatgagtacaccgcactgatcatggaggagctcgatcccgacaacctcggctacattgagattgcaaacctggaatcactgcttctgcag

SEQ ID NO: 41608 - DNA, 550 bp, Setaria italica
  Peptide Sequence Number=SeqID_107582
gaggggttctccggctgcccctcggcggccgagctcgccgcgtcgtgggggctcgacctccgcggcggcggatgcggcggcgatggcgaggaagaggcggaggacgacgccttcttctcggtgctcgactactccatgctgggggctgacccggagctgcgcgacctctacgtgccgtgcgacccgccggagggggccgcccacgcgggtggcgccaggcggcttaagggggaggcgctgtgcgaccagctcgcggagatggcgcgccgcgaggccgacacctcgcacccgcaccagccgcactcggatctgagcccccgcacgccgcgccggaactccgcggcctcaagcggacgcctgccaggcaagatggcaccccccgccgccgccgcctcatcatccgcctgcggcggttcaggaggtgccgttgccgtacacgtcattgctcatgatggcatcggcgaactgcaccgagctcattggcggacacgaccggatggctgatgacgacgagcaactgctatgggattgcgcaccgccctcagtgccg

SEQ ID NO: 41609 - DNA, 484 bp, Setaria italica
  Peptide Sequence Number=SeqID_107583
gtaccgtaggtctacttgtaacgtccggtctaattggtcggtattgtattccctattgggccttgttgaagatcgagctcgctgcgttgcgtgtggtaaggtagtgctatccgaaggtggtacggcgcgctacacctatgcacgatgctatcgttgaatcgctgcgcagtgttgggccaaatttttgcgttgaagcaatcgttgtcattggtcagtcaacgccagaggttgcatcgcacggtgtgctcgtaagttgtaaggaacgacaacccctttttgctgttgccatcagaacagaaataggtagcttacggtacttgtttaccatgtggtttcactgcgagcgcagtggagtgttttatatccgtttattttttttaccatcttgatgaatccttcattgtgtgttgaccatatgttagtaggacacatgtccatgctgtttggaggagaatagatgtacaattctagttctgacaaaaaa

SEQ ID NO: 41610 - DNA, 998 bp, Setaria italica
  Peptide Sequence Number=SeqID_107584
tgaccaggtattaatctgtggttctgaacttgtcatggctcttcctctagtttcctaggttttgtcagccaggaaaacagaatgatcacagtagctttcagtagagaactagagataagtttgatcttttgggatgctctcagcctctcaccatttatgattcggttttttaacagtgagcttttagttgggataaaggttcacggacaagttgttttagtgacattgaatgcacaaattgagccggtgaagaaagatgcacttcctctagcaaaggatgcaaattagacatacctttctcaagaggcgttgctatcatgatgtggaaaagtgcgctatatgtgattttgcacgctactgactattattcagaatttcagactatatttgacttttcggatatggaatggagcatatgtttcatgtaaatctgctcaacaatcatgccccaatggcaataataattatttgaacttctgattgcatgttttattgtcaatgagtcacatccttcacactacggatgctccagagtcctcaaattttgttccaactacatgtttgagtgtgtttattgccaagttatgcaaaacagttcattgcttgttatttgcatgctagatatgggacttcaatttaggaaggtcaagggatcacgatgagaagtcttctattgaagttggatttggttcgaaccatggaggctttatgattaagagttatagtgacatgcttaaggaaatttcttcggggacaacgaaggatctggaagatatttatgactcaagatactgctcaactgctgaagatatcatgtcctctaatatctgtcaggtgtcatcgaaaaatgtgagtactgggagcaacaaaaggaaggtgagccccagcacctcgacgatggatggaccgacaacctctgggaaccatgtgcccacttcaggaccagctctcacaagggaaatctcctttggggatcaaccgtctctcccgtctaggta

SEQ ID NO: 41611 - DNA, 1259 bp, Setaria italica
  Peptide Sequence Number=SeqID_107585
taaaaactaaaagggaaaagaacaaaacaaaaaaaggaaaaggtagaagaccccaagacacctcgaacgaataggaataggaaccgatacccaacaacacccccgccgccgccgcctcatcatccgcctgcggcggttcaggaggtgccgttgccgtacacgtcattgctcatgatggcatcggcgaactgcaccgagctcattggcggacacgaccggatggctgatgacgacgagcaactgctatgggattgcgcaccgccctcagtgccgcccacacagatatgggacttcaatttaggaaggtcaagggatcacgatgagaagtcttctattgaagttggatttggttcgaaccatggaggctttatgattaagagttatagtgacatgcttaaggaaatttcttcggggacaacgaaggatctggaagatatttatgactcaagatactgctcaactgctgaagatatcatgtcctctaatatctgtcaggtgtcatcgaaaaatgtgagtactgggagcaacaaaaggaaggtgagccccagcacctcgacgatggatggaccgacaacctctgggaaccatgtgcccacttcaggaccagctctcacaagggaaatctcctttggggatcaaaccgtctctcccgcaggagctgagaggcctgctgccatgaggatcgacagcgagacgcttgctcaaaacagggacagcgcgatgcagcggtacagggagaagaggaagaatcgcaggtatgagaagcacatccggtacgagtcgaggaagctgagggcggacacgcggaagcgggtgaaagggcggttcgtcaagtcgaccgaggcactgaacgccggcaatggcggatgatccatgggcctgtgaagatcgagctcgctgcgttgcgtgtggtaaggtagtgctatccgaaggtggtacggcgcgctacacctatgcacgatgctatcgttgaatcgctgcgcagtgttgggccaaatttttgcgttgaagcaatcgttgtcattggtcagtcaacgccagaggttgcatcgcacggtgtgctcgtaagttgtaaggaacgacaacccctttttgctgttgccatcagaacagaaataggtagcttacggtacttgtttaccatgtggtttcactgcgagcgcagtggagtgttttatatccgtttattttttaccatctttatgaattcctttactaattttagtttagtttagttttagttaaccttaaaaaaaaaa

SEQ ID NO: 41612 - DNA, 224 bp, Setaria italica
  Peptide Sequence Number=SeqID_107586
gctaaacgagccagctcgagctggtaaacgagccgagctgagctgagctccattctagctcgttaagataacgagtcgagccgagccagctcgttaccctaacgagccagctcgagctgagccgagcagagctggctcgatatccacccctagccgcgctcaggcatatgcaaagcaagagcgagacaatcggagcggctgtcttttattggaagcgaatgtgg

SEQ ID NO: 41613 - DNA, 371 bp, Setaria italica
  Peptide Sequence Number=SeqID_107587
caaatggcaacatcatgtatgctgtaatccagaactgacagatggtataactgctgtagtaaagagtcttcagcagcatgatttgcaatgatcggttgctcaagcccactacttgtagtgtctcgaggaagtatttttcatctcagcacttcaaaacatctgacatccatgattcaataggacgtcacacaggcatcttgatgttgaaccccagaagcatttgatctcaaactcatcacaatgcagttcatattgcaagactcaatagattgatgtatcaaaccttggctcgtaaaagcagacctggctattgcagagctggctagcacaaccagcaatccatgaccaagacttcttatcaacatcataca

SEQ ID NO: 41614 - DNA, 688 bp, Setaria italica
  Peptide Sequence Number=SeqID_107588
tgctttaagatttactatctgctacattactagattgtttttagaaggtatctcatgagtcatctcaggctctcaggatagaatcctgcattctgctgaaatgtgaaataccagtgaataactgaaagtaaaaaaacttgagataaacttaaaagattacagtagtgcttgtcttaaaatcccacacttcttgaaacaaactatcagatacatggatcctagaaattccattataacaagctgaatatgcacttttttaagaccctttcagttcgatgccaattgatactagagcagtactactgtgggttcttctttctttgcagcttgcagtcagctgacagtctttgacatgcttgactcaaagcatatgacagtggaaattgtgggatgaaattgtataagttcaagcagcatcgacatcagaattcagaatgactggatgtcctgaggtaggaaaaaggtggttattagcaatttagttgacttgtgatacacaactcaactggataccacaacatacatgtcataattagttatttacgttcactggtcagcaattactcaactatatgcaggcagtgaaatgccaatgatgctctagtgtcctctgcgtgatattctctatatctttattttcaacatagccattctgcatgagaatttctagttcactgaagcacacttc

SEQ ID NO: 41615 - DNA, 1138 bp, Setaria italica
  Peptide Sequence Number=SeqID_107589
ggtggtcgccgggtggtgcgtggtcgctccgcgacgtccgcggaaatcccacgacctccattgaggtcgagctcgcggcggcggcgccggggaacgcggcggcggcgaggtgcgtggtgacgctgcacccggaggcgctgtcgacggagctcgctgtgacgaacggcgcgtcgtcggcgccgatggcgctgtcgtgcggcgtgtcgaaccacctgcgcgtgagcaccccggatgccacctacgcgctggggctgcagggctccgactaccgcaccgtcgagccggcgctgtcggagttcagcatcatccctccggactaccaagccgccgcgcggcagcccgcggcccggcaccaccggtgggcgaacaggggcttcgacatgatcctctccggcggccgggaccgcggcggcgcggcggacgacgaccagcccgacggcgaggaggacgacgactacaagcacttgacggacgcggtgtgccgcgtctacagccacgcgcccagggagttcaccatcatggacaggggtaggaggaactccgttcgcttgcacaggagtgggttcgaggagctgtacgtgttcagcccaggatcccagtaccagtggtacggcaagtacgcctacgtggtcgtggggcctgccatgctggagcccgtggtgctgggggccggtgaaacgtggcagggggctcaatacctgcgcaaccccaatctctaggctcaccggcactgctgcacctacagttgtatatgtagcaacaaccgtggtgaatggtgatgtccatattgaaatgctgataacaatattattgaaatgtaggcggacgatgtccatattgttcgatgttgcaacgcaacacagcttctgagcttcacatcacaattcacagctacaaagcatttctaaatctgacagcaagaagttccgaacaaagatcattccctgttcatgccaagaccaagtacgtgcatgaccaagagaccaaggaacaagctgccattgttacactcactttaagctacacatcgtctccatattcgaggatatttgtatacaagaagagcaggcgggatcttatccagagaagagaacttacttccagggtcttgtctaacttacttcgttgggtcggttct

SEQ ID NO: 41616 - DNA, 921 bp, Setaria italica
  Peptide Sequence Number=SeqID_107590
tggaaattggaattcattcccactcgggcagggtggtgaccttgcagccaggagagatttctgcaaaggtacagcgagtcacatgcgttggatttcggggggaagaggcgagagaggaaaggggaaaagaagccagagaaaggagagaggtcgtcctcgtcttgtccgcttgctctccttgctgttcttgccgttacctccgcctcgccttcaatgctaccgcgttactgccggatctgagagacccaccgcgtccgcctccgtcttgaagctaatcttggtgcctgcttcttcaggattctgttttttttctctctcggaatttcagtcttccgtcgctgcgtcttcttctttgctgcatccgtgagaaagtgttgcgcctgctgatttgagcgagaagctgtttcttgtggcggtcgaggtgagatttcaccacctccgcgttcttgcagcgtcaggagagagaaggaagggatcagaggaggaaggaaaggagagcaatttcgactcgttcctgcgcgaatccgcgagattttctcgcgtgggaggctcgattgtcccttgaattgcggcgtgtcccatgattggcgcgtccatttccaccaagaaggcagcagctcagcagtgacggcgctgtagtgctccagccttctgggctccaatggcgtcctcgccttcgccctccccgggcaccatcagggccaccttgccgccgtccacagcaaccccgtcgccggtaaccaccacacccacgccggcctccccggctccggtgacgcagcccaatgctaccccggccgatcctccctcctcgccggcggcgccccctccccttccctccgcatccacgccacccccgcagctcactcctccaccgccctcctcggctccgcctcctcctgccgctgtgccgccgccgcc

SEQ ID NO: 41617 - DNA, 1298 bp, Setaria italica
  misc_feature (32)..(32): n is a, c, g, or t
  Peptide Sequence Number=SeqID_107591
ttggtctagttcttctttagtttttttttttnttttttttttttttgtttagtcccgtagcaatgggcacgatcctagtttttataaaatacaaagcaaatgcaactgtctgctaagtgaacttaagcacaagcaggcgttccttacacaacggatttctaatgatgtttacagataactagcaacagatgttacagtttcgtttctaactccttgcggagatcagcctaaaacatgcattaacttcagagcacaaaaacaagcaaactaaggcccagagtacaaacagaaagaacagggcacatttttcatctttttcatctgcggcgaactaaaacagctccttgcgaatgatatggaccgccatagtaagcagcttctcctccttcttcagttcgaatagacagatatcgccgacacgcaggccattgccacgagcaaaattgggccaacctccattaataaaccacctcctaccattatgaaacatcattttggcctcccatgtcttccccccacactggagccaacgctgagcgacaccgacattgttgtttttcattactgctacacaaaggggaacttcagatcggatagctctcactcgctcttcaacaatcctcttttgggatttagatagaaggttcttgcatggtacaaagtatgggggcagaaatagacttattcagagtcttcgctctccaaagattcatgaggaatttcaagcgtaccactttcctgggaagcatgttctcctgttgttggttcctcaatatggacttctgaagccatactagaatgagttgctgtttcatgcagtagatagaccgtaaaaatagatctattcccaccctttgtaggtaagaggaggacaatatctccctcctgcacatgattgtcacggacaaagtctaaccactgccccataagaaagttctttctactttcgtctcttttgtagaatttgggatgccacttcttgttcttaccaggcatctcaagtgtgacagttgtgcttctatctgggcaatgtgccaatgcgtattccttggtaattcccagataaggacccggaggttgaacactggtcttccgcatggttgcaatataaacagtgaattcaggttgaatttcctggataagcgtcattactctcaccttttgtgctttagatagataagttctatatgataaaacataatcagcccctaagggtgattgaagatcatccgatgccaaagatacattttctgagggaatgtcttctcctgactcctcagatgatgaggatgctgcag

SEQ ID NO: 41618 - DNA, 709 bp, Setaria italica
  Peptide Sequence Number=SeqID_107592
tgcatatgctaccctgccagtctgaaggttgttgatgtaacaaaaaagaagcttagctttaacaggcagcgcatacagagtggttacgatgcaagcacgttttggagaatcatggcgaggaatgagcattacctggcatgcatgatggtgctggtggccttgcaactcttcctgcagctaaccagagtgaatgttaccactctgttcttgccgatgctgtcccgagccacaagttccaggagcagccgagcggtgattggtaacattgtgctggttttggtgaactcctgtggcgttcttggatctgcccttgcaacaaaacattatggcagggaggtgacgttcaccatgggtgctgttctgatggtattttgccaggtggcaatcccattgatcctggaggttcagatcggagttggcggtggaatacgcatgccgatgggttgcacgactgccatgttcgcactgacttgtgttgtctcctgcggcctcagctggtcgtggggttcattcttctggaccatccctggtaggaagtttcactcggctggacaggttttgaccatgattctgaacttcggcgtctgctttgcccagatgcagtacttcctgctgatgctgtgcaggcagaagaacgccatccttgtgtactatgcaatgtggatctggtcgtgcgttgtaaattaattgtatttgtaagtttaagtct

SEQ ID NO: 41619 - DNA, 335 bp, Setaria italica
  Peptide Sequence Number=SeqID_107593
cgggatgaccagcttctcgtgcagcgtctcgtccgggtacaggatctgcgtgccgatgtcgtactcgtgcctcgcccagccgccgccgccggctccgacgacgtggcagtaccacaggatagggtccatcttgtcgagcagcagcacgacgcagccgctgccgccggagatgtcggtaggcttgtcggagagcaggtaagtgcaatcggcaggcacatcgtcctgcacaggcggcagctggatcttgtcgccgttgctagctagggttccagaggaaggtggccggggtagggcggcgaaccaagaaccatccgtgcggggtcgcccaggtggtt

SEQ ID NO: 41620 - DNA, 634 bp, Setaria italica
  misc_feature (600)..(634): n is a, c, g, or t
  Peptide Sequence Number=SeqID_107594
tttcctgtatgtaccatatgaagcagttggcatgtatggcaaaaatttgaagccatcaaatttcttagtggatgtcttcattaacatccaggtttttccttgtttcaatgaacatatgtgtaagggcatatagtggagtcttcctatgcaattttactgacagtttattatgtacactcttgatcatttcctgaagtacaggtaacttcgaacttccaagcatcctgaattatgcttcttggtgtgttgctccagcgagctcaatcatttctatatcgtgtatgcttctggtatcccaggttatttggtcagcgtgcacaattgtactaaaagatacttcacctgtgtgattgcttggaggtaggaggtagggctagataataatattgctaaagaactaagattgcaagctaccttgcaactttcctttggattatggtatccaaaggtttcttaattttgtggttaattcgactgtttcttgcttatcaatttgggcaaatggttgtcatagtgtacctgttatcctagtactaaagacccgctagaagatcatgtatgaaaaactagattgtcttgtgttgattgtttagataagtnnnnnnnnnnnnnnnnnnnnnnnnnnnnnnnnnnn

SEQ ID NO: 41621 - DNA, 726 bp, Setaria italica
  misc_feature (624)..(624): n is a, c, g, or t
  Peptide Sequence Number=SeqID_107595
ggccgcacggtactactgaatcctggaggagcatgtcatggtctgcaagtgtgggtactacggtcagcgcctcgccgacgtccaggctctgattccgacctcagtctcggtggaaggtgcttcagatcgagggtattcggcccctcaaatcagtctggcagtggcagctgaggtttgctgtcagtaaattgtccaaggaatcccacaaattcaaggttggctaatctcctcttccattcatgtatgttgatttattttggttgagatcacagcagcatggtggaaggtcttcactcttgctggtacttgtaaactatcctccttggacgggcactggaaacatgagcctaatggagctgtgatactccaacggctgcaagcggtgccggtaagctctgcttctcacctgttatgtgccaaaggctccatcagtagtagaagatagcccacattgcgatcacctgttccaacattctgcaatctgcctctaccagtctacatctcctacctaacaaggtagcaatttctgacctattatgttatgaagccgggtaaactgacaaaagctttttagcttttgcatctacatggattgaacctgctgcagtatgctcaagttgggtncatcatcattctgccaaatcattagctatcaattatacatgcattattctgaactatttccatcttcctgcagctccaaaatcacattagagcagattggta

SEQ ID NO: 41622 - DNA, 493 bp, Setaria italica
  Peptide Sequence Number=SeqID_107596
gtaatggactgaaaaaagaactacctgaaggaacgaatgaacaaactatgtcgaattaactcagccgacgacaaatggaccaatctcgccgttgcgcatggcgcgggcgagctcgttggctaccaccaggcaggtggacacccagccggcgagcaccgcccacaccatgtccacgatgcagaccgcgaccccccacggcatcgtcatacttgttccctctcctcagccgcccccaaggaggcaattccacaaacaccttccctgcagtctcttatcttgccgatgcagtcagcacgcatgaaacgaaagaaactccgattagcgccagtcctagtttcgatcaagaatcttaagcaccagcaatcggcgaaaaatatttgcgtcgacaagacggtgtctgacaagagatggggatcgatttcactaccgcttttgccacctaaccctctcgcaccaagaaccaacacaactccgccacttagtgatcaactgc

SEQ ID NO: 41623 - DNA, 394 bp, Setaria italica
  Peptide Sequence Number=SeqID_107597
tttttgaacacacaaatttttattcatttaattattaattgtgaaaatccattcacaagttcacccaaagctgttacaatatttgaactaatagtaattcaatctttgtggcagtttgtgttacactcaccctcgctcacatagcaagcgctgtttccaacgctacaacaataacaatgatctccacgcggtcctgcgcagtcaatggttttgtagcagaatgcaccaattctcgtaacatccatagttgatcggctttcaccatgaatggcaatgcatccgagaagcagcaacgaaatcaacactagtgccccaatgttccttgactgcctctccatactgtagacaacgaaatgctttttgttcttgggagaatatatatgttctgctcgag

SEQ ID NO: 41624 - DNA, 335 bp, Setaria italica
  Peptide Sequence Number=SeqID_107598
tccaagactgaatgcagaaaagcaggaagatagatctggtggtaatctcctgcttccagaagaagagcctgtgttgcaaccaaaaataaaacgcaaacggagtattcgtattcgtccaagactgaatgcagaaaagcaggaagatagatctggtggagaagcggtcttccctcagcgtgctgccaggcagcaagacgcggttcatcctatagtcaaacagaagcgcaacatgccatctaggaaggtttcgcctgctgctaagggacaagggaaaattaggacttaacttagacctaaggaaataactaaggtaagaaaaggaaataactaagaac

SEQ ID NO: 41625 - DNA, 519 bp, Setaria italica
  Peptide Sequence Number=SeqID_107599
catttcaaagggatgcacatccatctcatcagtcaatgcattccactggatgggttgcgcattcggatcaaggggggagttcctcggcacccggcattggagatatccagtgggccaagccagccaagcgactaaggacagacagcggcaagaggcggccgagccatttgtgaggattcttgcatgttggtgtacattctctggcgtcctctattggcctacctgtgaagcgtggactccattggtgggggcttattcgcgtcatttcggcaccctgttgagttcatccttttcatatatgaccgccatgctgggcttttgttgttgacatgttgtgggcatgaagaaatgtgggagggctattattcttgtatgttaagttcatcattctgtaaagggtaaactcttatggtggtgcaactagaaaatgcattcgcgtagcattgaaaatagaggcccagctggccttggtaataaaattagctatttattcccttaaaaaaaaaaactaaaaagaag

SEQ ID NO: 41626 - DNA, 3693 bp, Setaria italica
  Peptide Sequence Number=SeqID_107600
gcaaccagggcaaacaggtttcacaaaaaatcaacttcatgtactcaaagctcagatattagcttttcggcgtttaaagcgtggtgatcgtactctcccgccagaagttcttgaattaattgtgtctgggcggtctcctcctgattcacaagggcagcagatttctggacctcaggcaatacataactgtgaaaggcctggtgtaagcaatgctgatgaacatggaaggcacattgagagtggtgataaagttcctgaaaaacctgcattgttgaagggaccatgtttatcaaaggtggaggcttcagcttcagaagataaagctagtcctgccagtgttcctggtcccatgcaagtgatgaaagcttcaccgaaagagtctcttaaaattggaccagtttcagtaccagagcatagtaacactactatgattaaatctgagcacgaaatagaacagtgtgtccagagaacacctagaagcgattacagttctgagaggggtaaatctttaccggcagaaagtggttcagcagatgctgagcaagcaaaaagggctggctccacaagcagtgccccagctccaagggatgttccaagaaaataccatggtccgctattcgattccccgtccttcactaggaggcatgattccttaggatctgcaaactacaacagtaatctctcactaggttatgatgttaaagatttattagctcaagaagggttgatcattcttgataagaaacgtgaggataacttgaaaaagataagcagtttgcttgcaatcaatctagagaggaaaagaatccgtcctgatcttgtcttgaggctacagattgaagagaagaaactcaaactcctagaacatcaggctcgcctaagggatgaagttgagcatgagcaacaagaaataatggcaatgccagataggatatacagaaaatttgtcagacaatgtgaacgtcaacgagttgagcttgttagacaggttcagcagatgcagaaagcctcaagagagaagcagctgaaatccattttccagtggcgcaagaagcttttggaggcacattgggccattcgcgatgctcgaataactcgtaatagaggggtggccaagtaccatgaaaggatgttgcgcgaattctcgaagaggaaagatgatgataggacaaaaaggatggaggcgttgaaaaacaatgacgtggagagataccgtcaaatactgttggaacaacagactagtgttcctggtgatgcggctcaaaggtataatgttctatcttctttcctgacccagactgaagagtacctttataagcttggaggaaaaataactgctgccaagagtcagcagcaagtagaagaagcagcaaatgctgctgctgcagctgcacgggcacagggtctatctgaggaagaagtgaaggctgctgcacaatgtgctggtcaggaggttatgataaggaacacattctctgagatgaatgcaccaagggataatgcatctgttaacaagtactatactttggctcatgctgtgagtgagagagttacaaagcagccatcgctgttgcgagcaggaactttaagggactaccaactggtgggcctacagtggatgctttctttgtacaataataagttgaatggtattttggctgatgagatgggtcttggcaagactgtgcaggttatggcattgatcgcatacctgatggagtttaaagggaattatggcccacatctcataatagtgccaaatgctgtcttggtcaattggaagagtgaactgctaaattggctgccatctgcatcttgcatcttttatgttggtgcaaaggaccaaaggcagaagctgttctctcaagaggttttggccatgaagtttaatgttcttgtgacaacatatgaatttgttatgtttgaccgttccaagctttcgaggattgattggaagtacattataattgacgaggcacaacgtatgaaggacagggactcagtcttggctcgtgatcttgatcgctatcgttgccaacgacgcctccttctcactggtactcctctacagaatgatctcaaggagctctggtccctcttgaatctgttgcttccagaagtatttgacagtagtaaggcattccaagattggttctctaagccatttcagagggatggtccgacacacagtgcagaagaagatgattggcttgagacggagaagaaagtaataatcattcacagattgcatcagattttggaacctttcatgctacgtaggcgtctggaagatgttgaaggctcacttccacgaaaggattccattgtcttgaggtgcagaatgtctgcggttcaaggagctatatatgattggatcaaatctaccggtactattagagttgatcctgaagatgagaaaatgcgtgcacaaaggaatcccatgtaccagttcaagacatacaagaatctcaacaacaagtgcatggagctaagaaaagtttgtaaccatcctcttctgtcatatccattcttgaatcatgggaaagattttatgatcagatcttgtgggaagttatggaatcttgatagaattttaattaagcttcataaggcaggccatcgtgttctcctttttagcacaatgacgaaacttcttgacatcatggaagactatttgcaatggagacgacttgtttacaggcgcattgatggaacaacaagcttggaagatcgagagtcagcgatcgttgacttcaacaggcctggttctgattgttttatattcttgcttagtattcgtgctgccggtaggggtctcaatcttcagagcgcagacactgttgtaatatatgaccctgatccaaatccacaaaatgaagagcaagcagttgctagggcccatcgtatagggcagactagggaggtaaaggttatttacatggaggctgttgtcgataacatatcaagttatcagaaagaggatgagttgagaaatggtgggagtggagatttggaggatgatcttgctgggaaagacaggtacatgggatcaattgaaagtctcatccgcaacaatatccaacaatacaaaattgatatggcggatgaggtcattaatgctggtcgttttgatcaaagaacaacccatgaggaaaggcggatgactttggagacactcctgcatgatgatgagagataccaagaaactgtccatgatgtgccttcattacaggaagtgaaccgaatgattgctaggactgaacgtgaagttgaactttttgaccagatggatgaagactttgattggacgggggatatgatgaaacatcatcaggttccaaagtggctccgtgcaagctccactgaagtagatgctgttgtggcaagtctatccaaaaaaccattgaggaatatgtcgtctggtggcattgctttagacactaatgatacacctgagaagagaagggggcggccaaagggtactggcaagtactccatctacagggagattgacgacgaagatcttgaagaatctgatgaagattctgaggagaggaataccacacccctgcctgaagatggggaaatagaggaattcgaaagggaacctagacaaaattaacaaacggtaaacctagtacaactaaggttaatagaatagtagaaaagaatttaattaagactacaaggaaa

SEQ ID NO: 41627 - DNA, 2367 bp, Setaria italica
  Peptide Sequence Number=SeqID_107601
ttatcatccatgcttcgaccagttctgaacttttggctggtgttgtagcctaatagaagatttatttgctagagtagatgttgtggcaagtctatccaaaaagccgttgaggaatatgtcgtctggtggcattgctttagacactaatgatacacctgagaagagaagggggcggccaaagggtactggcaagtactccatctacagggagattgacgacgaagatcttgaagaatctgatgaagattctgaggagaggaataccacacccctgcctgaagatggggaaatagaggaattcgaagatgaagaggacaatgatgattcggtacctgataacaaggatgaatcagaggaagaagagccaatcaatgatgatgggtacaattttaccgatggattaaaaagcagaagaactaataggattgaagaagctggttccacgggctcttcttctggaagcaggagattaccaccacctgcgccttcctcatcttcaaaaaaattgcggtctctatctgcgttagatgcccgccctggttctttgtcaaggagaactccggatgaccttgaagaaggtgagattgcaatgtcaggggactcacatatggatctccagcagtcagggagctggaatcatgaacgtgatgacggtgaggatgaacaggtcttgcaaccaaaaataaaacgcaaacgtagtattcgtattcgtccgaggcctaatgcagaaaagcaggaagataaatctggtggagaaggggtcttccctcaacgtgccgccaggcagcaagacgcggttcatcctatagtcaaacagaagcgcaacatgccatctaggaaggtttcgcctgctgctagggcagggaaattggcttacttgcctggatctggtgaaggatctgctgagcgctccaaggaaaatcggagcagtaaggccattgactctgctactccagagttccgtggcacaaagatgtcggacagtatgcaaagaaagtgcaaaaatgtgataagcaagctttggaggaggattgacaaagagggtcatcaaatcatacctaatatatcttcttggtggcggaggaatgaaaattcctcattcagaggtccagctggtagcacccttgacctacagaaagttgaacagcgagttgatggatttgagtatagcgctgtaactgagttcatagtggacatgcagcagatgttgaagagtgtggttcagcatttcagctataggcatgaggtccggatagaagctgagaccctccataacttatttttcaacataatgaagatcgcgttcccagactcagacttcagcgaagctaagaatgcgatgtcattttcgaatcctggaggagcttcaagcggtgctgctggaccgtcgacaaagcacgctgctttgggtcataaacgtcgtgccagcaccagtgaagcagagcaacttggttcgggacatagcaggcataatcagcctagtgaggttcctagtcgacctcacagttccagatcagagagagactcgaggcattctggatccggcagcagagatcagctcccagatggtgctgggttgttgcacccgagcgacatgttcattgttaagaagaaaaggcaagaacgggcaaggagcagcattgggtctccgtctagctcagggcgagctggaccgctctcgccaaccaaccctgggcggccaggcccggtgccctcacccagaggtgccaggacgccatttcaaagggatgcacatccatctcatcagtcaatgcattccactggatgggttgcgcattcggatcatgggggaagttcctcagcacctggcattggagacatccaatgggccaagccatccaagcgacaaaggactgacgctggcaagaggcggccgagccatttgtgagaaatttttgcatcacggtggcatccttgattggtatatctgtgaagggtggactccattggtgggggcttattcatgtcattttgacaccctgttgagttcatatatgaccaccgtgctggacttttgttgtcgtgggcatgaagaaatgaggatagagttatttttcttgtatgttaggttcatttcatcgttctgtaaaggggaactcttatggagttatggtggcgtgaggcaaactagaagatacattcacatgggcattaaagatagaggctcagctggctgagataataaattactccatgtatacgttccaaattgtaggtcgttttagcttttctagttttgtaggtattattatgcatcttagatatagtgtatgtctagatgcataataatatttatgaatttaaaaaattcaaaacgatctacaatttggaacataaatattattt

SEQ ID NO: 41628 - DNA, 1000 bp, Setaria italica
  Peptide Sequence Number=SeqID_107602
ggggggagaccagttgcacagagaactatccttgccttcttgcagggcagatgcacggtcgagttcgacctgtacttctcaagtattggggtgacaaggatccagatatgagaatatatagtaagctgccacaccgaatcactaggaggaggaattatgttcagcatatgaagtcgagcaagtattgtatctgtcccatgggatacgaggtgaatagcccaaggatagttgaggcaatatactatgagtgtgttccagtaataattgctgacaactttgtgcttccattcgatgatgcactcaactggagttcgttctctgtggtggtagcagagagagatgtaccgaagctgaaggatatcctgctgggcataccagagagtcgatacatcaccctgcaatcaaatgtgaaaagggtgcagaagcattttctatggcatccaaatcccgtcaagtatgacattttccacatgatactacattcagtttggtttagcagggtgaatcagatgcgaatagagtagcactgtcctccacattcctgaatttcatgtgatggttgttggctctcggctgacccattttgctgaaggcgctgaatggagatagcaatctgacaagagaacctgacatgatctgtggataatagacagtggcatataggggtggcttagatttgtaagtcttgcactactggtaatttccctgatggacagtttgatgcaagcgctgaggaagctgaagcgaagatcggtgtcttattggtaaacatgtgaagacgaagatcggtgtcctattggtaaacatgtgaagacgttccttttctgaaatgtagtaaaatcagttcatctttttactcggcttactgggacgggataggatgctgagatctggaaacattgtaactggcggaaaacacaaagaaggcaagtttactttgtgaggatgtaaatgtgtcacaacttataacccggtactcacctttttgtgaggaaacttg

SEQ ID NO: 41629 - DNA, 614 bp, Setaria italica
  Peptide Sequence Number=SeqID_107603
ctgcgaattcgtctctttcctctcggcgtttgtcaactcctgacaccggccgtgccgcacacgcctggcctccctcccgccgcgtcgatggcgtcgtctggaggagatagatgaacagggaatcacaggctaacccggcagcggtttggagaggtcttctgcgagccgatgagcgcgactgggattgtcccctggaacaatgtgcaatgagttgtagattagtagggcacgtgcagtgtgccaagtaagtagcaagtaaaggccatctgtgcagatcgcacgcacgacgagagagaaggatacaaaggaaaaaaagaagaggagaacagaatttaggcgctttctccttgctgcagttctcccctccggttggacatccttccctctttttcattttccccaaatgatagcttcttcttgcacttcatggttgtgcatcgtgatgggctccagcgaggttggacgctgggggaaagagcaaaactggaagggggatttccctgctgttttcaaaggggaaaaaaacccctaactctatgtgaggcaagcccatgctgtaatataagttttcacactggttttagatgtttcagaagtgtggttagcagtgattg

SEQ ID NO: 41630 - DNA, 385 bp, Setaria italica
  Peptide Sequence Number=SeqID_107604
attgctttgcttgcttccacataacaattcggagccgtagaagtacgagattaagccctgcgcgctttaggattttagcctatagattatggattgtcaataggcaagatggggaggggctgtagcattctgatttctggcccatgaactgttacaatctaagggcttaaaggaaaagcgttcctttgttttgctgacatcatacaccgtttggaatggaggaaatcacctttgccgttccagaggaaaggaatggcttccttcagaaaacaaaggaaaaaaagcatccagtgcgagccgtggttttcgcggaagattgaggcgaggcgagatgagataaaaagaagcttgttcttcttgccaaaaaatcagttaggagtaataa

SEQ ID NO: 41631 - DNA, 2169 bp, Setaria italica
  Peptide Sequence Number=SeqID_107605
ccgttggtttcctctgacaagttgctgcctcctctgcgtccctgagaagatccccccctgcctgcgccgctttcctctcgcctcggtctccttcctcctcttcttcgctttgcttgctgctgctgctgcagcttcgccctcgccccacccagcagccatgccaggggaccatggctccaaggtcgacatctccttcgccggccgcttcaccgccagcgccatagcagcatgcttcgccgaggtatgcaccatccccctcgacacggccaaggtcaggctccagctgcagaagaacgtcgacgcagcggcgctccccaagtaccgcgggctgctcggcaccgccgccaccatcgccagggaggaaggggccgccgcgctctggaagggaatcgtcccggggctacaccgacagtgcatctacggaggactccgcattggactctacgagcctgtcaaatccttgtacgtcggccaagaccatgttggggatgtgcccctctccaagaagattgccgctggcttcaccactggcgccatcgctattaccatcgccaaccccactgaccttgtcaaggtcaggctccaggccgagggcaagcttgcgcctggcatgccacgccgctacgctggcgccatggacgcttacgcaaagattgctaggcaggagggggttgccgctctgtggaccggcctgggaccaaacgtagcacgcaatggtatcatcaacgctgctgagttggccagctatgatcaagtcaagcagacgattttgaaactccctggattcaaagatgatgtggtcacccacctctttgctggtctcggtgcgggcttctttgctgtctgtgttggttctccggttgacgtggttaagtcaagaatgatgggtgactcagcctataaaagcactcttgactgttttgtgaagacactaaagaatgatgggcctctggcattttacaaagggttcctcccaaactttgctagactgggatcatggaatgtgattatgttcttgacattggagcaggttcagaagatgtttgtgaggaaaccggcaagctgaagataaggcttttgcagtcgggtggcaaacaaaggtgcacacctatggcgcacacattttttcttctacagacaagaaaaaaatgactctatccccctgaagattgattggggaacaaggagaaatctgacacctaaattgtgagaataaatagcatgggggtatttgcatgatccccggacgaataaaattcagaaatagcaaacagctgttatcaatgttttattgtcatctctgtggctttgcttttacttttatcggaattgctgggaatggtgatcaaattgcttggtactgttggggatgaaacttggtgtgctctctgtagtggtggattgttatgtgatggattgatcatgtgtaagtagatgctgctagtctttgcctgttacaaatttactgaagtagtagtaacaaagttggattggagcaaaagcatacggaggagaggactctgaccatcatagaacagaatattatggtggaccattcagatgttgctcctgatcttcatctttccgaagagcgagtgcctcccctcggcgacgacctggcccgtggcggcgttggcgacgaggacgtgcgtgccggagtaggcgcccctgtggcccagcgccctggcggcgatgcggagggtgtcgccgggcgcggcggcggcgaggtcgacgaaggagacggacatgtcgacggagaccttgaggtggtggccgtcggcaacggcggcggcggagccgatttcgtcgaccagggaaaccacggcgcccggggcgaggtggtcgccggcggcggtgaggcgcgggggcacggtgaaggagcagagtatgcgacccgggtggatgctgtcgacgcggatcccctgcagcgcgaacccctcgaagaagctggggctgggctccgcccccgctcggggcgcccgccgcgcggctcgtcggtccagcgcgtccacccgcgcgccatcctcgtcgctcacccgcagcaaatcagaggctcccttcttccccgccatggcggtgttgcctgtggtgggtggacttcttagacaccgtgagcagccagagccaaccacaggatgacgaagaagaggggagggcacgcaatgacgc

SEQ ID NO: 41632 - DNA, 1089 bp, Setaria italica
  Peptide Sequence Number=SeqID_107606
gcacccggacgtcgttaaccgccacaagcagacggcgctgatgcttgcggcgatgcacgggaagacggactgcgtccggcggctgctcgacgccggcgccaatgtgagcctcacggacaccgtattggtggttgcaacttgcggttgctggtcatggagtcggaatactaaatggcgcttcccttccctgcttgggtgtgcagatcgtgatgttcgattcgtcgcacgggcggacgtgcctgcactacgcggcgtactacggccacgccgactgcctccggaccatcctctcggcggccaagtcggcgccggtgtcggaatcctgctgtggggatgcagggggttcgcgcgcttcgtgaacgtgcgggacgacaccggggcgacgccgctgcacctcgcggcgaggcagggctggcggcgctgcgtccacgtcctgctcgagaacggcgccatcgtgtccgcctccagtggcgccttcggattccccgggagcacgccgctgcatttggccgcgcgcggcggcaacctcgactgcgtccggcaactcctctcctggggcgccgaccgcctccagcgagactccgtcgggagaattccgtacgaggttgccgtgaagcgagggcacgtcgcgtgcgcggcgctgctgaacccgtcgtccgcggagcccctggtgtggccgtccgcgctcaagttcatcagcgagctcgaacccaacgccaagtccctgctcgaagcggcgctgatggaggccaatagggagagggagaggaggatcctgaaggggaccaagaacgcattgccgtcgccgtcgcgttccgatgacgccgccatagctgaggctagcgacgcggaggtgtgcagcatctgcttcgagcaggcgtgcagcatcgaggtccgggagtgcgggcaccagatgtgcgcggcgtgcacgctggcgctgtgctgccacgccaagcccaacccggcgacgcagtcccagctgctgccgacctgccccttctgccgcggcggcatcgcggcgctggtggtggcaacgcgggcgccggccggcggcgacgacgaggaggggagcagactggagtcgcccag

SEQ ID NO: 41633 - DNA, 526 bp, Setaria italica
  Peptide Sequence Number=SeqID_107607
agctccaagggctcaaacgcaaactctgaagcaggctgtccaatccttgatgaaagcgaaggcgatgctgaggatgaggatgaggatgactggcaggttggggagtgcattgggatgtggtggagatctgaatttgaggccatcccgtttccatacatgccaccaaacttccgcatgccaaaggaatgcatcaagctgttcctgatcaggctgccgatgtcccggcagttcatcgtgcccaggaacatgaagctgctggccgtgcctctgtcccagattcataacaacgctcaggtttatggtccggtcatatctgggattccaaatctactgtccaagttcgcgttgaacgttatcagtgactgagctgcgtgtgcagactgcagacccgagttctgaattttgagaagcggttttcatgttaggctagccatacaacaatgtgatgttcagtcttcagaccacataggaatatacactagcagctcgtcttgtgtgttttgtaacgtttttcgttattggtgtg

SEQ ID NO: 41634 - DNA, 338 bp, Setaria italica
  Peptide Sequence Number=SeqID_107608
ctcgatattcgcatactttggatgacattatgatacaacttgatatgtatccttttccaccactttgttctcatgagtatcagacaggatagtgtcacataaacattgttgcatcccatatgtgcttcctaataagtttttcagtcgggcgatcattgtcacccacctgaagctgatccgcacatgacgatcacagcaccacgaggtgaaagaccccctgatcaaaccacctctgagcgagcaggccgccatctccaccgccgccgtctcggcgcgcccacgtgcactttgttctcctgctggatctcccctgcaactgcaagcgcctcgcaccatcc

SEQ ID NO: 41635 - DNA, 379 bp, Setaria italica
  Peptide Sequence Number=SeqID_107609
tagacccgccaaagacgcataaacaagaaaattaaacaggaacgaaaaatatccaatccacagtgctcaaatcacaacaaaattcatcacgattagttattagtacaaaccacatatagaaggagctatacaaactgctagtattaaaaatacaaccatcacagctaaaaccactaatcaaacagcagtaattacaaacagcactggcaaggagaaaattatgccatggcagggaagacaaacttggaatgagcagatttcacgttagccagcatgcgaatgatgataatcaacgaccaacggaaacttggaatagctcagtaaactcatagtgcaattcggcacgaggacattacaattttattaacagaagacacaa

SEQ ID NO: 41636 - DNA, 537 bp, Setaria italica
  Peptide Sequence Number=SeqID_107610
tttttttggtggttccaaaagaaatggttattcaactcatcagagattcagagctgcatgctcaaatttgcattgcccactttcccctctacaagagtgagaagtgccagcgcatcacagcgccacgtgcacggcgagttggctcaccttgggcgtgaagtcgtcggccccggccttgatgaacgcgtcgacgtcggcggcgaggctgtcgctcgacagcccgacgatcggcgtcgtcacgcccagggcccggatctgcctagtcgcctgcacgcacgccggtgccagccggcgcggggccatagccagtcagctcgacgtaccagtcaaacgccatagcgcacgcacgcacctcgtgtccgtccatgacgggcatctgcctgtcggcgaggatgaggtcgtaggcgccgccctcccgcacgcgccgcaccgcctcggcgccgttccccgcctcgtccagctccacgccgccgacggccttcataagcgccctcgccagaacctgcgcgctcagggcgttgtttgtctaccggtcgt

SEQ ID NO: 41637 - DNA, 680 bp, Setaria italica
  Peptide Sequence Number=SeqID_107611
gtgacgctgccatcaaagtccatgctcctggagctcatctgtgggctccctatcggttgcagctccgacagtggtatgctccacccattatgcagtggagggctgttgtgaatctgcctgccgaaagccggtagatcccactggtaaaccacactacccatctgtgtgtaaacctgacgccattgaccgtagcttcttgtagtcatgcttgcaccgtatgcgtcactgaaccatggtatatcatgtctgtatcgcaagtactggcccattggaacttcctgccgccactggctgtaccttcttgcagctgttctcataccgtacgtgtgaatgaaccctggtaaatcatgtcggtattgcaaatactgatccatcaaagcttcctgatgcaactggttgtatctacttgcactgtatatgtcactgaatcctagtatatcatctctgcattgcaagtactgatccacagaaacttcctgagatggttgggcagatggaaattggagcggatccgtcgcaaacgggttacaggcaaatgatgaaccctggtcctggagatgttggccagtatactgttgaccgcctggcagatgactgggattcaagaaaatgcttctgggctttctaaggtcagtggttgttctgtcagtaccaactgctgagtcaatggctgcagagga

SEQ ID NO: 41638 - DNA, 493 bp, Setaria italica
  Peptide Sequence Number=SeqID_107612
ttggtttgttcttctttcttatattccttaatcaagtgcatcatgcttattaggtaataagcagccaacaattttgtagcaacaaaagacaatgtttcaattgccaatgtgtaagaatcaaaatcagtccaactagccaagggcatgaatatagtgataggaacaagataattgaggtaaggacagaagattggaccaatgccacaaggccgaaaaaggagggaaaacactataaactgaaatagaaagatgggcacagaaacctattctggcaaaacatgcagagtacgcaactggcagtccaagattcctagctgaatgtacgatgaaaaaaaacagtgtcttgcatgaacttaaaaaggtgtaagaggaaagtaatggtttctcaggatgagcataaagatctgactaaattccttcaactgaaaatgagtgatgttaaccccaaccacagaaatatcaaatggtagatgtttaagcattatagttccat

SEQ ID NO: 41639 - DNA, 861 bp, Setaria italica
  Peptide Sequence Number=SeqID_107613
gctgatcgccgttgccgatagagacaggtgcctcttctctttcgtggacttcaattttggcattttccttttaaatgcacatccatcattatccggaataaattcctgcattaggagccagcataaggttctgaacacacctgattgctttcaatgccataccacagtgaattaaatgttctcgaaattttggcaaagccaatacccttgtgccatttttatttactaggcatatcgtgtttgatacacagttactgctactatacaggctaatcacaataaaatttgacaaaaaaatactgctggaagtatctctcacagagaaagaaggtttaacctgcatgacatctctttgctgttgattcatggtattggcaaaagactcttgaaattttgaagaaggaaaaagagggactgggcaggaagcaaatgtgatggtttctgaaccaactgtagttgattgcattttctttacatataattgataaaaacatgtagccttgactgatagaagggaaaggaggtgagcccctgtgtgcccatcagcacaaaatgccagctatatgatcaaataggtgaacggtggtcacatgtagccagattttaggagcaccaggtccagctggttgtggggcgcatcagtgagaggagcgtgacacacatatacccacagcaggcaaagttgccacattagtcccggcagatgcattcgccattggaacatattctgttcacgccttgcctttttaaggagttcttgattctacaagatatttacaaattgattgaattctcatttatacccgcattaacctgtttctgatacttgatgttttcgcattgtagtccattcaccacccc

SEQ ID NO: 41640 - DNA, 653 bp, Setaria italica
  Peptide Sequence Number=SeqID_107614
aaaaatcatccatatcattagggtatctgtatccagctcaaagtggcttttgaaatgcgaatggattgtatttggaaaatcatttatttgatttgggtatctgctccatgccctcacactttccttgacagttatggtctttgaagttcttcaatgcgttgatgatcacctgccactggcaataaagtttagcataaaaatgttccttgtgtgtgtgttttacgccactggaagactttctaatgtcaatgattttgctatgtatgcagattgagatttagtgggaatcattagtggagctgacagctagaatctggttctataatacaagtgaagtagagttctgagttcaaaaagatagagcaaaaaggtaaattagatcagacatgatctggtaatatgcaggcacgataatagaagaatcaggaagaaagttcatctgctagcaggttttccgataatctgatacattcttttgaggccatactgagttgagctgtttcggctcagtgttacatattgtatacaaatgtcatgtgtattcttccccaacactaagcatacaatacatgctctaatattctttttgtacaagttgtgttattctttgcacattctatacatgtgaatgcataatatttaattgataacac

SEQ ID NO: 41641 - DNA, 423 bp, Setaria italica
  misc_feature (377)..(377): n is a, c, g, or t
  Peptide Sequence Number=SeqID_107615
ttaccttaatttaagccataagtgtactaacgggcatatatgctgtcaatgttgatcatgaacacatatatggccggaagaactaacgggcctgaagtgcttgaatgggactataagagaagacgtacacgccttgacgaagaaagactagtagcaatggtggagtagagagaccatgtgccggcaccccagagaatccacattttagacgaatcaaatgcagtcggaaccaggggagagctacggtggtgtgagatggcttatacggtacgtctgacatccagttggaggaaatcgatggaacatggtcaacttgcaatcagaatgataatctttattgggaacgaagtttagaaggctctagttgcacaaaactnttgcaatgagatcggcagactgagtaaacaactttagcagcttacc

SEQ ID NO: 41642 - DNA, 494 bp, Setaria italica
  Peptide Sequence Number=SeqID_107616
tgaccaccacctaacgtgatctgcgtgtacatcatttatagtgagggtagcactagagagggatacaaaattctcgtcaagtattttttgaaagttggagccacatagtctgtaattgcatagccccaagggcactgccacttcttatctaaaactcctattggattgcccaaatctttgatggaagaatcttcagattgtgatcctgaaatagcatccaccggaagaagcattgagtaggttcgcctgttgagtcaaaccttgaaagcaacatccaagacaaggaaaataggaagggtcgagaacaaatttcgcaatgacattcgcataatcacctccaagcatactaacacagacaactggtacatctggcagttttggaagaattcagttatgtgtttctcgatatattctgagacttttggtggctacctgattcctttcacttctgaaatctgcaagggtactcttctgaaccttttccctgggaaatg

SEQ ID NO: 41643 - DNA, 598 bp, Setaria italica
  Peptide Sequence Number=SeqID_107617
ctccccacacacaacactctagatagcaccaaggcaccaacctttgttgatcaggacgcgacgatcatatatacaaagtaagaagaagatgaggctcgcaagaatcgccatggcgatggaggacggcggcggcgcgtcgtcgtcggtggcgcagccggccgccatgggcatgggctacgagcgccacttccagccgccgccgttctggtcaacgccgacgccgtacctcttcatcgggttcgccgtggtgatggcgctcatcgccgtggcgctggccgtgctcctctgcacccgccgcaaggaggacgaggggggccgcggcgccgagggcggccaggtcatggccgtgcgcgtgctggcgccgctggacagggaggacgcggcggtgcccagggtgctcgtcgtcatggccggccacagcgcgccgtcgttcctcgccagcgccgcgccgttcgccagcttcgccgccgcagcagccggggacgacgccaagccgcagcagcacgttggcggcaaggacggcgccgacgccgtgtaggctttccctgccccggcccgcgcgcgctccccttgctaaccggcggcacgagaacatgat

SEQ ID NO: 41644 - DNA, 486 bp, Setaria italica
  Peptide Sequence Number=SeqID_107618
cccacgttgtctctgacgacgccccgccgttgcgcgcgcacgccccgccgtcggcccggtcattgccagcgtcccgcacgtcttcgggctccctgacaccgacgacatcggagacctcgtcaccggcgcctgtctggcgacccctggcttggcctgtgccgaagaagcggcggcgcccaccggtcaagtgccgcaagcggccatggtcgctggatttcccgctgcacgccgtgccggtggctcctccggacaatcccggcgacagcaatgggaatggtgacgccaggaacagcttcgacaatgctggtggcggtggtatccgccgccgccgcccagtgccacgtcagaggaacaggcaggcgcagagggtgtgcagccattgccactccccggacacgccgcaatggcgcgcaggcccggacgggccaggcacgctctgcaacgcatgtggcatccgctacgcggcgaacaattgctaccggagta

SEQ ID NO: 41645 - DNA, 460 bp, Setaria italica
  Peptide Sequence Number=SeqID_107619
gttccattcagaaaacaaaagagaagatattttacaaaaatgcaaacaagaacaaggaagccagctggcatgggatgcttctcctcaatatctcttcaaggagcaaagaggcatgtttatcttcttttacagcttagtgacctctagtttggaacctactcctacatggctacatccctttcacttgccaatttcctcgtcatcacctgctcataagagtatctctgtttttcctcctagaggttccttgtaatattcttcattctgtctttcgaaaaaaaaaaaaaatattcttcattctagatccttgagatcaacataacttttaggtatataccctataattattcaggtgaagccaccagaatgaatttatcgggtgatcaatcaatatttttttaggacggttgatcaatcaaattagaaagccttttgcccaattatcgtgttcctgggcatg

SEQ ID NO: 41646 - DNA, 427 bp, Setaria italica
  Peptide Sequence Number=SeqID_107620
taaaacctaaactaaccgtaaaaccaacaccgcaggcgctcgacaccccagcatacatctcctcaacagaatcgcaagctagagcctgacaatggcgggaggcggcgacctgaaggtgctgggcgtgtggacgagcccgttcgtgatccgggtccgcattgtgctcaacctgaagggcctggcgtacgagtacgtcgaggaggacctcggcaacaagagcgcgctcctcctgggctccaacccggtgaacaagagcgtccccgtcctcctccacggcggccgccccgtaaacgagtcccaggtcatcatccagtacatcgacgaggtctgggccggggccggcccggccgtgctcccgtccgacccctacgagcgcgcggtggcgcggttctgggcggcctacgtcgacgacaaggtggggtccggc

SEQ ID NO: 41647 - DNA, 396 bp, Setaria italica
  Peptide Sequence Number=SeqID_107621
tacgggtaaagcatttacccacatgttagcatacccacctatctctattatacccgtacccgccaaaggtaacgggtaaaaatccttacccatgcctgtgcaagccaggtatcggggtacccgccaggtattgaacacaaacgtgtcaatgagttcatatccaaagagtacaacaataatttgatagctaaataagtctcaaacttcacaatcacacacatactgacatatataagtctcaaattttcaactctcaaactgtcacacatgcataagtcccaaattgccacacaagccaaataagaaattacaacataagatcaaatactgtccagcaaagcagcaacacaagcgaatactgtccatcttgcgacttgcgagtcatggaccaatgat

SEQ ID NO: 41648 - DNA, 420 bp, Setaria italica
  Peptide Sequence Number=SeqID_107622
tgcatggcgagagtcacggcgatgatccccaggaacatcctgttcctgagcacgccggcgaagacgttcttcttctcgatctcccgcgcgttgaactcgttgaacacctggcagagcacgaaggcgttgaagatcatggtgccgttggccttctcgccgacgccgaagacgtcgcggccgcggtactggagcgccagcagcacggccacctggaacgcggcctgcgcggcgaggttgcgccacatggcgttgctgatgagcggcgccgtgcggccgatgggtgggtggcgcatgagcgccttggtgggcttgtccgtcgccagtgccagcgctcccatggtgtccatgatcaggttcacccacagcagctgcacggtcgtcagcggcatcttgccggaggtcagcgccgacaccaagttg

SEQ ID NO: 41649 - DNA, 629 bp, Setaria italica
  Peptide Sequence Number=SeqID_107623
acgaaggaagatttaagtgaaactgttgggcttctacgatttcaagagcaagcaacctgaaggtatgtgcagagctgctgtctttgcactgcacgtgaaggaagagctggcctcctggcctgaacagagtacccggcagaggagctggctcacggtacctgaggcggcagagcggagtcgtcacccatggatgcaagaagcccttgtgacaggcttctctgcctggcttgagaactggagcaacggtggtggctgtgtggaccgaagcgaaagatgacgacacctgaagcatcaggaggcatctgctatttccttttccctttttacctttgcttgggttaaacttccataacctgacgtaactgagggctccctgatgctcggtagtttgttggttcacccacaatttcaggacacattatagtgtgtgtgtcgtcagccgacccgaggattgttggaattgtaagttgctgattctcgcggtcaccagctatttaagtcttacaccaaatgttgtgttgcaccttatatggaagcgtgtttgtaattgcaacattgaaagtcaggaattgtcttgttgatcaatctgtcgctttgatctggggcgattgctcttctgtactctccca

SEQ ID NO: 41650 - DNA, 455 bp, Setaria italica
  Peptide Sequence Number=SeqID_107624
ttttttagtaagtttttgaggacataacaaagccacaaaatgagattaagcagggcaccctgatgagtatttttacagataacacaaatacatttgtttgtcgaaaaacaaacaaatcaaaagtactacaaataagacagtatatctttgtatttattttgacaccaaacatcagtattgaagaccatcaaagccagtgtacttctttgctgcacaaagaacagctcggattacctaacctgaggcacggtttgctgcacacattcagtcatcataatcactttggttgggcttctcaaatggcttcgcagacaacatctcaagtgcagtctctatgtctggagcatttcttctattctagacctgatgtcgattgtgctgtggcatcagaatctccagattactggaagctggtggtcaaaattgaagtctcccctgcatttgccagcctcata

SEQ ID NO: 41651 - DNA, 347 bp, Setaria italica
  Peptide Sequence Number=SeqID_107625
tttaccgttaactttacttaagtttactttaatttaactttaatttgtctaaaccttaaactacttgtaaaagtctatttagtcaaacttcttcagcaaagatggcagctaagatatttgccttctttgctctccttgctctctcggcaagcgttgcttctgcgtacatttcaccagtgagtgctcttgccgcaaccgctagccccctatacttgccccaagctactactactctgttgccaaatgtgttcaaccaactggctttggcaaaccccattcaccgctgcctacctgcggcaacaacaattcctacctaacatcttcaaccaaatggctctggcaaaccc

SEQ ID NO: 41652 - DNA, 843 bp, Setaria italica
  Peptide Sequence Number=SeqID_107626
tccgggttgtatttagcgagtgtcggtgaagactgcattgcgcgcatttggatgatacaagaagttgaatcctctcctgatttgtacggcagagaggcgcctgtcgaatacatggacagaaacaagggcctaaaaatgaaggtggcaaaaggccagagacgtacccttgccataatacccaagaaagttttcaacattgcagagacaccgctgcatgagtttcatggtcacacaagtgatatcttggatatggcatggtcaaaatcagattttctcttgacttcatctaaagacaagacagtgcgcatgtggaaagctggctgtgatggctgtctagcagtattcaaacacagagactatgtaacatgcgttcaattcaatccagttgacgaaagatacttcgtcagtggttcaatagacggcaaagtccgtgtttgggatgtttctgagaaacgagtagttgactgggctgatacaaggcgcatcataactgctgtgagttaccagccagatgcaagggtctttgtgcaggctccagggagatgccgcttctatgatcaatcaggtgaaaacatggaagttgagaaagaactgaaggtgacgaagaagaaatctgctagaagacagatcaccagtctgcagttttcaagaggtgatcctgctcggatcatgatcgcatctgcgggttctaaaatccgagtctctgaaggcgccggcatcagccgaaagtttgaagggcggcgaggctccaaggtcctggtaccgccgtctctgacatccgacggccggtacctcgtgtcggccggcgcggattccaacgtctacatttggaattcgacaagt

SEQ ID NO: 41653 - DNA, 707 bp, Setaria italica
  Peptide Sequence Number=SeqID_107627
agtagtggttcatgtgcatgcggttgagcctgcaaagtcgatctttgctgtcaaagctcgtataaggcgtgccattgaggctgaggggatcccgtacacatatgtatcatcaaacttctttgctggtcgtttcttgccatgtcttggtcaggttggggtttctgtccttccaacagataaggttctcatcttaggtgatggaaatgtgaaagcaatatttgcggcagaggaggatgttggcacctacgcgatcaaagcagtagatgatctgagaaccctgaataaggtcctgtatctgagaccatcaagcaatattttgtctcacgatgagcttgtctcactctgggagaagaaaaccggaaagacatttgagagggtatacattccagaagatgaggtcctgaagaagattcaagagtctccagttccactgaacataaagatgtcaatcagccattctgtatgggttaagggggaccacaccaactttgagattgatccttcatttggagttgaagccaccgagctttactctgatgtcaagtacactactgtggatgaatacctaaacaagctcctttgaactcctagatcctatttctactattcaaatacatttaattataaaagcatctactgtaattagaacatgactttcttgatagaaagtatgtgttttccgtagttgacgcccacgtgttattgtt

SEQ ID NO: 41654 - DNA, 276 bp, Setaria italica
  Peptide Sequence Number=SeqID_107628
ccgagctcttacagtgccatcgccgctaggcgctagctcgattcccgcatccatggtgctcgggctctaccccttcgctgatgtcgccgccgacggtgctccccgcctcgacgcgaccgccgaagaggagctcgtccgcgtcgagcgcgccgctgcgctcgccctcggcccccgcgcgccggagccccccgggaccctcttcctcacaaccaggagagtgatctggatcggtgagggcggcaagggctacgccgtggacttcatcgccgtctccct

SEQ ID NO: 41655 - DNA, 572 bp, Setaria italica
  Peptide Sequence Number=SeqID_107629
cccaaactttttacctaggttaaaccaaggaaggccaccaattaccgtccctttaaacgggttatgcaacaccctcagaaatgggagctgtccgagtggaggaagtagtttccaccttctgcagtttgtcagacgcaaggactttagctggggcagaattttcacctccgaaatgttcacatccaaccagcttggtgatgattccccattgtaccttttgatatgaagctcttccaggttttcgttaggtcctaagcattgtaatactttggcatccatgctggtcctgggaccaaaagttgaacctgcggagctccactcaagtttcagaattttaagaaatcgcttatcgcacagttgcgcgttgcaagcttcttccttgcatgtaacattttccagattcttaatgtgaagtagaccatgaaggtctttcatatccttcaactcctccaaggtatgcccaatttctgtttttgacatggaattcaacagacccttgaagcttaacaagactaccaatacctcttatcattgcaatgtacttcaaatctacgccaagatgccgcaagctg

SEQ ID NO: 41656 - DNA, 284 bp, Setaria italica
  Peptide Sequence Number=SeqID_107630
gggcagcggcctcctggaggaggtcaccgaggctgccgccgggcatgtactcgtacaccagcagccggcagtcgtcgccgccacggaagcagcaccacagcctcacgatattcttgtgccggatcctgcccagcgtcgccacctccgcgtcgaagctgtccttcgcggcgccgtcggccgccttgccacctccgccgccccacagcttcttgacggcgacgacctcgccgccgcgaccgaggacggccttgtacaccttgcccgacgcgcccatgccgaccacg

SEQ ID NO: 41657 - DNA, 531 bp, Setaria italica
  Peptide Sequence Number=SeqID_107631
agcaattgaggcatcaaatgagcgcattgagcagcagatggaatttgagaaagagatggaatggaaaatggacagagcaaatgcaatggttatggagcaggaacaaactgaggaagatgaggaggagcaggagaccacaaggagcagaagtgcagaggatggaagtcagagtgatgcaaacacaggacttttcctaagggccgctgtccggccattcacttacaggaatcttgtgaaggaaattgtcctgttgagacaccatattattgatggtgagatagtttagtttcaatatgatacgatgctgtattcaattttccagagtagctatttcaccagacaaatgcaagattgtaggaaggaggtataagaaaccctttgtgatctgttggttctgtacaatattagggatattgagctgtcgttgacaatttctgaagttgtattcttaggcaatagtagtaatcatgtaatacttatcaaaaagtttaatgagcctccatccaagatagtaactaaaaaaaaaaaaaa

SEQ ID NO: 41658 - DNA, 1429 bp, Setaria italica
  Peptide Sequence Number=SeqID_107632
ctctcgtggccttcctttcctggcggcgcgtcggcgccgacggtgcgagcggtgacgcccttcagcacgtcctcgccgggctcttcgccgccgacgagcaccaaccaggtggattgtggatctgatacttagaaaattgggttggactctacatgtcaagaaggtatggcaccaggaagcaaggcggagagaaaagcagcattagatgccggagcatggatgttcaatgttgtaacatcagttggtatcatcatggtcaacaaagccttaatggcaacacatggttttagtttcgctacaacattgactggacttcattttgcaaccacaacattgatgacattagtgatgaaatggctgggatatattcaaccatcctatttgccattaccagaactagtaaaatttgtcttttttgcaaacctatccattgttgggatgaatgttagtttgatgtggaactctgtcggattctatcagattgcgaagttgtgtatcattccagtcttatgctttctggaaatcctattggataaagtccgttactcaagagatacgaaactaagtatagtacttgtcctggttggcgttgctgtatgtactgtcactgatgttagtgtgaactctcaagggttattagctgcagcaatagctgtttggagcacagcactacaacagcattatgttcatcaccttcagcgaaagtactcgcttggctcattcaacctcttaggtcatactgctccaggtcaggcagcatcattgttagtattggggccttttgtggacttctggctgaccaacaaaagagttgatacttttaattacacatcaatagttacgttcttcatcgtgttgtcatgcataattgctgttgggaccaacctaagtcaattcatatgcatcggaagattcacagccgtctcattccaagttctaggccacatgaaaacgattcttgtgttgaccttgggcttccttttcttcgggaaagagggcctcaatttccacgtcgccctaggcatgcttctggctgtgatcggcatgatttggtatgggaatgcatcatcgaaacctggagggaaagagcgccaggtttactcgacaccaagcgagaaaactcagaagcacgggatactgtcctcgcagtccgagctcgatcagaaggtctgaaatgagaacagcaaagccatcgagtgcatcttgagcatcgatagaccttatttattctttctatacgtttgtaggaatatgtttctatagaattgtaggccatagcagaaagagggtacctgggcaaaaaagcccaaggctatacttttgcagcgaatatgtcaacatctaagctggcagatacttgttttgtaatagtcattcggtgattgcgtactttcactctccatctggcaaattcagtatattttgtggt

SEQ ID NO: 41659 - DNA, 364 bp, Setaria italica
  Peptide Sequence Number=SeqID_107633
ttatttacctactgattattgctcttctgccacttctgtagactgattgttaattgtgtactatttgattttgatacatcatatatgttgatggatactcaagagctctatgttgatggatacttaagagctctatgttgatggatacttaaagagctctagcattgttgagttccttcactctgcattaaccattgttttcttgatgtcatcggtaattgtaagctccttatagttcagtttaagagtcaataaacaatttcctaacccttcggaacactggcattattgcatgaggtccattatttatttctgtcattctatgtgataagcgagcaatgttggtcatagattgagtaaaaag

SEQ ID NO: 41660 - DNA, 451 bp, Setaria italica
  Peptide Sequence Number=SeqID_107634
gaataagagcacacaacagcgctgaaccaacaaacacagaattttcacatgaacaatgttggtaatttagtctgtgtatcaatagcaatcataattttaaaaagataggaaacctacagtcgttaacatcccacaatgcagttgcaaaatataaagaaagaaagtgaggtgccatttccagtgactgttttaatctatctgattgtgtgctgttaactgctgcttgtagtgtcgaagatattgtaggggatatccaatgttttgcagcaatgccatcattctcatcttttagaaggtctaggaacatcgggtcagcgaggtctagagggttactatcatcagaacctgaaataccactagaatcttctattgcagaaccagtgtatgcctcatccatcagtgcaagaagcatctcaggagcagcgctcttcttattggtagtagtatagct

SEQ ID NO: 41661 - DNA, 892 bp, Setaria italica
  Peptide Sequence Number=SeqID_107635
ctgatacaatacaatccttttcttgaaaatgagcttggatcttcagcatgctatgataacgaaataagttctctatagacatggtattctgctagcgaaatcagtgcctgaaccatggccctcatgatatattcctgaaggtaatttctcttcattctgtcctgggaggaggtccgcaaatgaaaaatcatgaaatggtggacctttttgctccgctaaaaggtaaaaggggacatgagctagcatctttgttcccccttcgctccagtcaacaataccaggaccatttccttgggcagtggacggtcccagtacagataaacagatggccggttcattcatgagccccaaatagtcacaggcacgttgccagactctacctagtactagaaggttactaggtagacgaagacaaacaattccaaatttgcaaatagttcacgagtactacttagcgatttatccctcccagctccatgctcaccaatggcccagcacaagtgcaatgctaattctgtctgcataggtcagtccataagaaaatgcagatgcagtgaaaggacataacagctatttgagcaagtgatgatgtagcgatttcagtggtaccatgaactcgaacatagatgtaagaactcgaaagatatacttgcctttccaggatcatcataagcctcaccaagtctgtcagtaataggcttctttagtatcgcaatgatgtcaggagaccgctggaaagcagccaatatgaaatccgacagtcttttcctaacctacaagaatgtaatatcagggaacctagaatatacaattggaagttggaacttatagaagtcatgttaggcaaataacaaagtccagagccagacaagacgtactaaactaaaactaa

SEQ ID NO: 41662 - DNA, 467 bp, Setaria italica
  Peptide Sequence Number=SeqID_107636
ttctaattacagcgttaaactcatacagtaacaattccaaattttcaaatagttcacgagctacatctgtgcgatttatccctccagctccatgctcaccgatggcccagcacaagtgcaatgctaattctgtctttgcaggatcatcataagcctcaccaagcctgtcagtaataggcttctgcagaatggttgaaagttatcatgcgaaattgttaacaaaattcttagcatcgcaatgatgtcagaagatcgctgaaaggcagccaatatgaaatccgacagtcttttcctaacctcgaatgagaaaaccttgtctgggaacattgcagcatatcttgacataactactggaataagagcacacaacagcgagtcgttaacatcccacaatgcagttgcaaaaatataaaagaaaagaaagtgaaggtgccatttccagtgactgttttaatctatctgattgt

SEQ ID NO: 41663 - DNA, 403 bp, Setaria italica
  Peptide Sequence Number=SeqID_107637
ctgcaatagaagattctagtggtatttcaggttctgatgatagtaaccctcagtgcaagaagcatctcaggagcagcgctcttctgaattgtagctatactactaccaataagagttccagaacttctttccaccttctccagtgccaccaccaacactggatgccgcagcagtgagagaggaacaaaggagttgaaatcaaccgttattacagaacaaagaccaacaatgcatggttgaaagttaaaaacactcgaaaaagagataaatatcaaaagcaaaccaccaatttttgcaatatctaattaagatcagtcagagctgcttgataatgtgtgcagcatattaaaacttaaagataaaaaatagttcttttatttaaaagtaaattcttattagttgt

SEQ ID NO: 41664 - DNA, 440 bp, Setaria italica
  Peptide Sequence Number=SeqID_107638
tttccagtcatttgatgcaatttacttcaacagcaacggataaaactgcatataaacaacagtacacaagcattgtcaaatgctaacatgcttagatcaatttggaaaatagaaagagaagagatacatatgcttaaaaacaaacaaggaggcttaattgacacattgatatatttaaaagcaatgctttgcaacaacatgagctgcattatttactatttcgaagtaagtaatcatttcgcgtgtatgcaccagtggaatcaaggtgggaaaagaaccaaggatctttgtcttgtttgctataaggaattcaagtgtgcgctctgcaacaataggatctgcgaactccctacttaagcaagagcggaagaaggttttcaaactaccatcagcatcatgcaagactgcctccccaaagttcaggaagaattgcagaatgg

SEQ ID NO: 41665 - DNA, 886 bp, Setaria italica
  Peptide Sequence Number=SeqID_107639
gggacatgagctagcatctttgttccccttcgctccagtcaacaataccaggaccatttccttgggcagtggacggtcccagtacagataaacagatggccggttcattcatgagccccaaatagtcacaggcacgttgccagactctcctgtctgaggttcgggtacgagcaaccttagccaatgatacgcgtgctctcggaagcaactcactgtggcatgttgctagttttgcaattgccgtcaccacgaagcagaggagcctagcttgggatgattttctagaagatgcacccatcgaatcaaatcccggttcctggcttaatcccaaacgacttgacaagatataaaagaagtcaaatcatgtgtcatgccatgcaagtatagaaaacaaaaacagtagactggcctcacctagttgccaggttttcatacagtaacaattccaaattttcaaatagttcacgagctacatctttgcgatttatccctccagctccatgctcaccgatggcccagcacaagtgcaatgctaattctgtctttgcaggatcatcataagcctcaccaagcctgtcagtaataggcttctgcagaatggttgaaagttatcatgcgaaattgttaacaaaattctttagcatcgcaatgatgtcagaagatcgctgaaaggcagccaatatgaaatccgacagtcttttcctaacctacaagaatgtaatatcagggaacctagaatatacaattggaagttggaacttatagaagtcatgttaggcaaataaccaagtccaaagccagacaagacataagaacatagcatcattgtggattatgggtgaaggtgggtatgtcagaattttaacttttaagttttgtacttctt

SEQ ID NO: 41666 - DNA, 373 bp, Setaria italica
  misc_feature (358)..(358): n is a, c, g, or t
  Peptide Sequence Number=SeqID_107640
cagaagcaagctagggttccgccgcctttggctccaaggttgtttaatttggtgagcctcccgacacaaagttggatcaaccaagatctagagtcccgccgctctctcgctctaaggtcgcatgagctggagaacattgcactgacaatggaacatcaccgacacaaaaggtacgatcgcagctctcttctcagtaggcctggtggcactttcatagcacagggttatgcttattcagtaatcatgagctgtagcataggtattcagtagtcagtacaacgtatacatgtatggcggccaactgataggaccaataaccaagctgtagcatgtatgcttattcaaagtaaaaaaaaanaaaaactaaaaaagg

SEQ ID NO: 41667 - DNA, 821 bp, Setaria italica
  Peptide Sequence Number=SeqID_107641
tcatgaatggtcaaatagaggatatcgcacgggagcttggttttcaaggaaacccattcctccaaggtcttgtggtcagcatattcattgttggtgcctttttcgggagcctaggctcatctgcactagttgataaatttggttgtaaaaggacccttcaaattgatagtattccattgattattggggctcttctaagtgcgcaggcagattcgttggatgagatgctcttgggaagatttcttgttggcattggcattggtgtaaatactgttcttgttccgctatatatctctgaggttgctccaacaaaatataggggttttttggggactctctgtcaaattggaacgtgtttaggaattattgctgcactttccttggggataccttctgaaagtgatccacattggtggcgaacgatgctttatgctgcatgtgtacctggttttcttattggtgctgggatgcaatttgctgttgagagtccacgctggcttgccaaggttggaaggtttgatgatgccagaaaagttgtagagagcctttgggaaccttctgaagttgataagtccatggaagagatcaaagctgttgttgcaaatgatgattcacagtccagctggtcagaacttctggtggagcctcacaatagagttgcattgattggagggtcccttttctttctgcaacagtttgctggaataaatggtgttctttacttttcatcattaacattccgtgatgttggtattacaagtggtgctttagcaagcttatatgttggaataaccaactttggattaaggaaaggggaacaa

SEQ ID NO: 41668 - DNA, 405 bp, Setaria italica
  misc_feature (390)..(390): n is a, c, g, or t
  Peptide Sequence Number=SeqID_107642
aaggtaactggtcaaatccctaattggcttcgaatggcaaaaaaagcatttcagaccttaacatttcagacacaggtctcattggtgtgatcccggattggttttggactacattttctaatgccacatctttggacctctcttacaaccaactttctgatcttagatctttcaaacaatctgcttacaaggggactaccagattgtgacagagaagggttgaaacaacagaatcaatctaggagcaactcgtcaagggtcggcttcggctctgcacattcttacagtttgaaaatcagtgctctccttctaaacacaattgtctttcaggtggatttccttatcttgaaacatgccaaattcggagatacctcgatctaagtcaaaacngattcagtgaagtta

SEQ ID NO: 41669 - DNA, 263 bp, Setaria italica
  Peptide Sequence Number=SeqID_107643
cctccctgcagctagctcgtcggttgcacctccgcttcccccccttcccttccccatgtcctcgctaggggtacgtaggatcgatctcctcccacgctacctgcgtatatcctgtccggtggattggtttggtattttctgcgactgcgagcgattggttcagaaaaattagacctgcctttcggatatctgctttcttcttgtgctacctgttcacttcttgtggaatatccattattgcctttgctcctagtcttgccttt

SEQ ID NO: 41670 - DNA, 524 bp, Setaria italica
  Peptide Sequence Number=SeqID_107644
tctctcttggaagtgtgctaaaattgcagcatatcccggcccatctgctcagtatatccattaattccacgaaagagaatggagagaattgagcactactgttcatatatccttcatctggatgttcttgagattagttgtgagattgagagatgacttcagtttcacaatgctatgcgtgcgcctgaagtcgccgaacgttacggtgcggtaggatggagggttgtcctcgctaaggaactcgtccgcagggccgacgagacagtcctccttaggctgtatgaacaccgccctcgacgtccgtgccagcatcgagttggtcatcacacggtgctctacgctcttcaagatcccattggtcacaacctcgagttggaggccgaagttgacgacgaaggcgttgggcatgggctcgaccttgatccagtcgccattgtagagaacctcaaggccatgtacgggaccagtgtggactagggtgatgaggttccgatcacagtgcggaggcagaccaagagtcatgc

SEQ ID NO: 41671 - DNA, 604 bp, Setaria italica
  Peptide Sequence Number=SeqID_107645
aagtaccttacttggggtctttgtccggccaggccatggggctgtcggcgacggggaaggagcaagcaaggcggaggcagtctcgccagtacctctcgccgccggtctcgaacatggtgctggagtagatccgggtggccttctgggtgtcttccgagtagagctccgccttctccgccgccggcagctggaagaactcctggcacacggcctccatgtcctgcatcgcctgctcagagacgccatggttgaccacctgcagcatgcagtcgccacgacagtcgacaagcttaatcaccgtgatgcaaatttgggttggcatcggcttaacttaatttgagggaaaggacggcgagtttgatcgatggacgagcctggaagaagccgatctccttgccggcgtcgaggatagcacggcggacctcgtcgcggctgcgggacaggtcgatgatgggcagggagacgacggcggcggtcgccggtgggcgcttgtcggctgggaagacgaagcagttccgggtaggtttggtgtggatcggggctgagtggagcatcttgtccatggttgaaccggagaagcccgccggagagcagaggtgcagcc

SEQ ID NO: 41672 - DNA, 506 bp, Setaria italica
  Peptide Sequence Number=SeqID_107646
ttacattggaaagtgagacccaaaaccaatagacttcgttatcagtaaatagtgtcgacacccaaaggactgaatgattgaagagcttgaaagcgactagtagaagtgatggtgaatgaatcacctcaagttggcagccgaagttgacgacgaaggcgttgggcacgggctggaccttgatccagtcgccatagtaggcgacctcgaggccagggaccatgcttgggaggagcaaggtgaggaggttcctgtcgcagtgcggcggcaggccgagcgtcgtgctcgggtccgggcacggcgggtagtggttgacgtggaggaccacgtcgccgccgctgatgtcaccctccaggtagtcgtgccggagccccaggccctcgcacagcagccgcagtatctccatccccatgcccctcgtctgcacggtgaacttctcaacaacctccctatacagtgcaggacaggagcgaaacagaagctcattactaccattattctttatcccc

SEQ ID NO: 41673 - DNA, 1357 bp, Setaria italica
  Peptide Sequence Number=SeqID_107647
ttttttttttagtactaattttagaccaaccaagtttgttgtgatttgtcttttttttgttttttttttgcaagaacaagccatgcacatatatctccctctcatgtatacagtcacttatttgtcatttttattgtcataacaggacaagtgctgaagtgcacattacgctcccagcagcagcatgtaactgagatccatgtcctctgcagacacatgggaattgggaacggataaaagatcgacaacatcctgaatcacttgtgctcttgcttcatgtctccttctgaacgttcttgaggttcgtggtgagattgagcgacgaccctagtttgacaacactatagatgcgcttgaactcgccgaacgtgagggtgcggtagcacggcgggttgtcctcgctgaggaactcctccgcggggccgataaggcagtctgtggtgggcatgatgaacgtcgccacggtcgtcctcgccacccccaagttggtcaccacacggtgttctatactcttcaaaagcccattggtcacaacctcaagttggcagccgaagttgacgacgaaggcgttgggcacgggctggaccttgatccagtcgccatagtaggcgacctcgaggccagggaccatgcttgggaggagcaaggtgaggaggttcctgtcgcagtgcggcggcaggccgagcgtcgtgctcgggtccgggcacggcgggtagtggttgacgtggaggaccacgtcgccgccgctgatgtcaccctccaggtagtcgtgccggagccccaggccctcgcacagcagccgcagtatctccatccccatgcccctcgtctgcacggtgaacttctcaacaacctcccggagcctctggggcttgtccggccaggccatggggctgtcggcgacggggaaggagcaagcaaggcggaggcagtctcgccagtacctctcgccgccggtctcgaacatggtgctggagtagatccgggtggccttctgggtgtcttccgagtagagctccgccttctccgccgccggcagctggaagaactcctggcacacggcctccatgtcctgcatcgcctgctcagagacgccatggttgaccacctggaagaagccgatctccttgccggcgtcgaggatagcacggcggacctcgtcgcggctgcgggacaggtcgatgatgggcagggagacgacggcggcggtcgccggtgggcgcttgtcggctgggaagacgaagcagtccgggaggttggtgtggatcggggctgagtggagcatcttgtccatggttgaaccggagaagcccgccggagagcagaggtgcagcctactttcagcaagatacgcaac

SEQ ID NO: 41674 - DNA, 716 bp, Setaria italica
  Peptide Sequence Number=SeqID_107648
actcccctttgccgcggccgccgccagggaggccttcatggtctccgtggggaccatgctctacttctccgtcatagccctcatcgcccagatcctcaagataaaccaccagcgcgagatccgagaggcactgatcgcgcgtgcgcagcgacctcttgctgggaatatcaggcgggcacgccgccgtcaggatccgctcatcggtcccgtcactggaagtatctacttcgtctcgtgcgtgttcatggtcgttggtttcctgatgctgatgctcgcgccggccaagtcctgtcagaagagggctggttacctggttgctgaaattggatggttcactcactcagtcgcgttctgcttcatcatctgcgcagcaatttccggtcagtggaggtctatctgtgccaagttaaagaacgattgaaagttctggaacgcatggcatttccctggagtagaagaagtttgaataatcttccctgtgaatgaaatgtcgattactgtagcaagtaattggagtgacaggatgttatatgcgacagacgctatagcagttccgaagcattgtggaagtgccgtgatgttggatattaataatggtttccattcattacatttgagtagcttgtgatgaacacttttttgaaactttggatggagaggattgctgtatagcccttctagattgcagactttgaaactgtttgccatgtcttccg

SEQ ID NO: 41675 - DNA, 251 bp, Setaria italica
  Peptide Sequence Number=SeqID_107649
gacgtcccaatcgagctgcttgctaaccagtaatcacacaatctcacgcaccgccattgccagcagcagctgcagcgaatcagtgtgtcagggcgatgggagtggggtcggagtgcgacaggataaagggcccctggagccccgaggaggacgaggcgctgcggcggctggtggagcgtcacggcgcgcggaactggacggcgatcgggcggggcatcccgggccggtcgggcaagtcgtgccggctgcgg

SEQ ID NO: 41676 - DNA, 402 bp, Setaria italica
  Peptide Sequence Number=SeqID_107650
caaaaggagagtgatgcaaaggacaaggaacagcagcaagctgcccgagcccttcagcagatcgaagcaaaagctaaaaagagctatcaaaaggatttggagaatagccagagaaatgtggatggagacacttctgcagctcctggagatggttgtgtacggttttcctgtttctatgtatcaacaatgcagtatattctttagtactctagttcaatgcgtcgtttgtattctagcatcatcttccttattcttgtagctcacatcaccagacttacagtgttgaactgagaagtagcctgattagtggccatgttactgttagtttataaaagccgcttgtttgatgtagagcttacacaattgaatcgaccattcaaacacttatttcttctagccctg

SEQ ID NO: 41677 - DNA, 1517 bp, Setaria italica
  Peptide Sequence Number=SeqID_107651
tggggaaggatcggtttctcgtgtatatgcgaggcgacggaggtgtttttcgcttccacgtatttttacaggaaggatgaggaagccgttagagtgagtttttttcctttaaataagattttggtgagttttttcccctcaaatttttgggtaattttaaaggagtgtcttggagttgctcttgcccccttttgcccgtccccacgtccgcagaaataacctcctcggacgcacctctcctgacggctgccgcgccgccccccacgagccgcgccaatccgcgccctgctcggctgagccggtgatctcccgctgccagtggcggagcttcgtatccccttcgcgcggatcccctgcccgccgccatgacggagtattgggtgagccaaggaaacaaatggtgcgacttctgcaagatttttatagctaacaatcccttcagcatcagaacacatgaacttggtaagcgtcacaaggacaatgtcaccaaaagattatcgacgatgcaaaaggagagtgatgcaaaggacaaggaacagcagcaagctgcccgagcccttcagcagatcgaagcaaaagctaaaaagagctatcaaaaggatttggagaatagccagagaaatgtggatggagacacttctgcagctcctggagatggatgggtatttgattcaacatcaggatattactacgacaaatctactggactttactatgattcaaactccggcttctattattctgatggtttagggaaatgggttactcaagaagaggcctacaaatctgtgcaaacttccaaaacagacgttggtcaatcctcaacttcacgaacaaaagctcctcctgctgcggaaacagctgttccagctattaaaggaggtccagctccaggtagggttgtcacaaagccattgaacccgatgagacctaccaagggcactcctgctccatctgctgttgctgttaacaagaggaagagagaggatggcaagcccaaggtgatctccaaggaggaggaagcagccctcaaagcccgagaggctgcgagaaagagagtagaggatagagagaagccgctgatgggattatacagaacttactaaggtgatcatccttgccaggctactcttcccgttcgggccaaacgattgcactgcctgatgttgtaagaaatattgacaaatggtgttctgagaaagaacgggcagggtcttacagaaacaacccgtttgcattttgtgccaaccatgtgttcctgaccgtttgcagatgtaaaagaatatgaacgcatattatttttcgcggatgaactgctcgtactcccccttccctgcttcccacgatgttcgaggccgcgtcaaattccccgtgatctccgatccgattcgagcgaaatcgcggcgttgtttggggtcattaggcgatctgcgccgccgccacagggaggcaaacttttgcggggctgggtggtactagcttggacctcgcgtggttgcttcgtgtccctgggttct

SEQ ID NO: 41678 - DNA, 417 bp, Setaria italica
  Peptide Sequence Number=SeqID_107652
gttcaatcacacatgacaagaagggaccgatcatagtcaggggccagggtatccgccatcttctcgagctcatccaatccaatctggtatgtgtctctgtcagcaatcttgttaacagcttggaccagcctgtgcttcagcttcaaatgcggccttgcccttcgaagtaaccgcactggacttcgtcatggtagtgtaatgctctcacaagatacagctccgtgaacaaattagcagggatctcacaggaaaacgtacagggagagggacagtgccttctccaccggggcaacggagaccgtgtttcctgtagtttcccctcccattccttacctgtagcggaagcggcgggggatgctcggagatctctccgcgaccgcgagtgcgagagcccgcccggaggaccgccgcgcaggc

SEQ ID NO: 41679 - DNA, 613 bp, Setaria italica
  Peptide Sequence Number=SeqID_107653
tctttgggttcctttttgtcttttctaagtttgtaagttacccagcaggattcaggccaaaccggaagtaccttgaggaagttgtcaggtggcagaagatggcatttccttcaccgtatttgaacgctaggcgagtcgagtcagcaacgccacaggctcgaaagcgagccgttgctgttctgcatgagattttgagcctgacaatggtgaagcgattgacatctgataagctagatgtatttcacaatgagtacaggcttccatgcaggttacttctttgtttggtgaaaaatcatggcatcttctatatcactaacaagggagcaagaagcactgtcttcctcaaggaggcttatgagaacagtgatctcattgataagtgtcctttattgaaattccatgatcagtttgcgtctttgattggccgaccatgctccaactcagataatccactgccaatataattggagtgtagatttactggtcagcatacaaactacggttggtgcgtttgtttagttgaaactcaggtcagctcatcgaagcacatttgcacatgccactacagttttagtcctatgtacaatgggtgtttctctcagctcagtagcta

SEQ ID NO: 41680 - DNA, 255 bp, Setaria italica
  Peptide Sequence Number=SeqID_107654
ttggataagtgttccctatccctttcagtggggtgctccaacatttgatgctggagaagcttttgcaatgatgatgacttcattcatcgttcttgtagaggtttgtttacgatactgactgaaaatggaagaaaaattgtactagcgtattatcgtttttatccatttatttatttgaagtatcaatttgatacattcttttctcctgtagtcaactggcgctttcattggtgcttcaagatatgcaagtgcaac

SEQ ID NO: 41681 - DNA, 294 bp, Setaria italica
  Peptide Sequence Number=SeqID_107655
accttaccttacctacgtagaaggagagagttccggttcttgcttcgattccttctgctcggcaagaagattcgctcccgcagtttccatcggatcggcagcagcagcacaagggacaggatggccaccgcgccgccgcccaaggccgacgagctgcagccgcacccgcccaaggagcagctggccggcgtctccttctgcatcaccagcccgccgccatggcccgaagccattatactaggattccagcacttcatcgttatgctgggcaccactgtcatcatacccagcgcg

SEQ ID NO: 41682 - DNA, 2392 bp, Setaria italica
  Peptide Sequence Number=SeqID_107656
agctttctcacctcccttcttgccgctacccgtttcacaatcgaatcaatcatagagcagcaagggtgtgcccgtgggcgtgtgagaaagggagaagaaaagctggcctttttggggcagccagattccattccttgcgcaggaggacgggctactattatactagctaggctgctgtggaattagctagagcagcagccaaaggaaaaaggagccaactagaaggagcttcccaccatttctctctccctgctgctttgttcccaacgatcgattcttccttccttcctcgtgaaggagagagttccggttcttgcttcgattccttctgctcggcaagaagattcgctcccgcagtttccatcggatcggtttgcacccgagaaactgattctctcccatccgggagtttcctggagcttgttgcttgctttgtgtcactgacgacggtgccagcagagtgaggagttttggtttctcggcagccaaggcagcagcagcacaagggacaggatggccaccgcgccgccgcccaaggccgacgagctgcagccgcacccgcccaaggagcagctggccggcgtctccttctgcatcaccagcccgccgccatggcccgaagccattatactaggattccagcacttcatcgttatgctgggcaccactgtcatcatacccagcgcgcttgttcctcagatgggaggcggaaatgaagagaaagctcgggtggttcagacgatattgttcgtagctggcataaacaccctgttccagacattcttcgggactcgtcttccggttgtaatgggtggctcatatacctttgtggcacctaccatatccatcatcttggccgggcggtacagcaacgaagcagaccctcgcgagaaattcttgcggacaatgaggggaacgcagggggctcttattatcgcatcgacgattcagatcatacttggtttcagtgggctctggcgcaatgttcttaaattatcaagtccattatcagctgttcctttggtctcacttgttggatttggactttatgagcttggctttccaggggtagcgaaatgtgtcgaagtcggccttccagaactactcctgttggttgtattttctcagtatttgcctcaagttctgcatttcgggaaggatgtctttggacggtttggtgttcttttcactgtccctatcgtgtggctctatgcttacattctcaccattggtggtgcttacaagaattctccaccgaagacacaggtgcattgccgtgttgatcgttcaggtcttgttggaggagctccttggataagtgttccctatccctttcagtggggtgctccaacatttgatgctggagaagcttttgcaatgatgatgacttcattcatcgttcttgtagagtcaactggcgctttcattggtgcttcaagatatgcaagtgcaactatgattcctccatcaattattagtcggggcattggatggcagggcattggtatcttgcttgactcattttttgggacagccaacggaacatcagtttcagtggagaatattggattgcttggattgacacgggttggcagccggagagtagtgcaaatatctgctggcttcatgattttcttctctgtccttggaaaatttggagctctgttcgcatcgattccactgcccatatttgctggcatgtactgtctcttcttcgcatatgttggtggcgttggtctgagcttccttcagttctgcaacctaaacagcttcaggaccaagttcatcatggggttcgctttcttcatgggattatcagttcctcagtacttcaatgagtacacagcagttgcaggctatggtccagtgcacactggcgccagatggttcaacgacatgataaacgtgccgttctcgtcgaagcctttcgtcgctggtctggtggcctacgtccttgacaacaccctacaagtgaaagacgcgaggaaggacaggggctaccactggtgggacaagttcaggagctacaagaaagacgggaggagcacagagttctactcgttgccgttcaatctgaacaagttcttcccatctgtctgatcctgatccccgagcggtttccaggaacccttccttgttcataaggtggaacataattctgctggcctggcctgtggaagctttctgtgtcgctgatgttcgtcaattttgtgtattttcggatggaatggagtaattggacagtagagatgggactagaattgaagtatatcgtgttctttttatttggacctacacgtatcaatgtctgattacctggtactggtagtttcttttgttctaagctggcattgtacatcggtattaaggtatatgtggttttcattagccc

SEQ ID NO: 41683 - DNA, 500 bp, Setaria italica
  Peptide Sequence Number=SeqID_107657
aagttactaactagaggacagcaaactcctccatattagatcatttggcaagactggcatttcatcaataaatttctctgcatctgcaaatcgccctaaacgaccaaggagatccactatgcaaacacaatgttttattccaggagaaacaccaaatgtagaatgccatagagttatagtaattgatgcccttgtctaccagaccagcatgactgcaagcagagagaagagcaacaaatgtcacatagtctggcttttgccccattgagaccatttgctcgaacgtatcctcagcttccttaaaatagccatattttgcatagcctgatatcaatgtattccagcattgcgtaggccgactagcaggatcaggcagcattttcaacatatcatccatctttccacatttcccatacatgtccattgcagcattaacaacatgactatcagaatccaacccacatttcacactaagaccgtgtagctgcatgccttcttct

SEQ ID NO: 41684 - DNA, 513 bp, Setaria italica
  Peptide Sequence Number=SeqID_107658
ttgtctatttactttcgtctttctaattaagtaattggcagtagtttaggccaggttgctgcaaaaggccttgcaacaccagatagttgcgtatctgatgcagcaaaggtgcagagtgcaaggaggaagagaagcaggctggttaataagctatgtgaggcgaccacctggaacaccttctgtgatgtgctcctgaaacatgctgatggcagcatgcccgtggtggactttgaagaattgtatttcagcaggtatggcgccacatcgaaaaaattgcggtttttgaaatgttggatgaagcaagtgaaacagtcatatcttaatactctaccgagcctacatacagaaagagagaagtgtcttccctcaaaaggatgaatcagaagctagacttctggtttcagaagaagatgcttcagctggccgtgttaatttctcagtggatgatgcagatagcaacaaagtggagacaccattgaatgaggcagattgcaataaagtggacataccagt

SEQ ID NO: 41685 - DNA, 1162 bp, Setaria italica
  misc_feature (1)..(73): n is a, c, g, or t
  Peptide Sequence Number=SeqID_107659
nnnnnnnnnnnnnnnnnnnnnnnnnnnnnnnnnnnnnnnnnnnnnnnnnnnnnnnnnnnnnnnnnnnnnnnnnaattccgattttcctttcaactaatttggaactggttaggtacaacactggaacttgaaagttttctcagagtacaatccaatacaaggatcttcctatttgctctaaaacaagatatattccgatttcctttccactaatttggacctggttatggtacaacacaggaacttgaaagttttctgagagtacaattcaatacgactaaaacaagtaaaacaacaaggttcttaatcttttagtgctcctggttcgatatcacttgcccagcaaccggcgtccccgttgattcgctcctttcagtctgaaattcagttcatcaacgtcctcactgaaaggaaccagagctttgttttgtctgtcaatttctgtgcccatatcaactgccatttccttgagctgtcccaatgtgttactcaggtcagaaagtgcatcatcctgcttttctttctcagcctggatttttcccattgcagttgcaggtgcagtttgtacagaactgggagaattttgttgtgttggggcaattcctagcctccacctctgttccatgtggtttgccgttctcacagaaaagctattttctgagactggcccttttatctgttgatttctcttaggcctccatgccttggaaaatagcccacccagacttcccaggagcttctcactcacagtaaggtcctgctcaatgtcagctgctaggtgatgagaccgcatgatctgctcaccttgacggtgcaaagtttgcagagtttgtgtagcatcttccctgatggcttcagcagctctgacacaatcatttactttgtgtgtggtttctcgtgctttggttatagcataatcttccaactcttgcacagattgatcggtgcacttcactgggacagactgtgcccttgatggctttgagggcacttcagaatcagaatcggaatcaaagggatttgtcctgtggacaggagtgcccattgagttttgcttcttatacattgacacagacatctcaacttattcacttcaagcacagtactgatgagcagatattgggcaaatacgaaacacgcgctagaagaggacgacccgctg

SEQ ID NO: 41686 - DNA, 899 bp, Setaria italica
  misc_feature (868)..(899): n is a, c, g, or t
  Peptide Sequence Number=SeqID_107660
aactctatctgtatcaccctggtggttttcatgtgattctacagctgtatgaattgggttttcttgatttgcatctgcagcagcactgatttgtcatgatcggaaaaaagttgcagtgatatctaaatattagaaacattatagtaataatttctattccatggtgccttagacattcatggatctaatcatctttcttcacacttttgttcactggcctgatacaccccccatccccaccaatgggtctagtttggcacagatccatcttatgatcttatacccctctaaaatcagatttgcacttttctcagtgatttcttcttgatttatttgccttctaaaagttcatgaattacttaattcaattaatcatgcattggatggaatctgtgggctttatgaaaggaaaattagggatatcaacccaatggtcccaaacataacctatgatatcagcgacctttataacttcattgatggcctagctgacataagtgcactagtttttgatcactcgatccaggcatttctgccatatgatcgacagtggataaagcaaaagttgttccaacacctgaagaagctgtctcagcggtagcgcgactgttgtttggtccggtaccttgccaccaacaatcaagcatgcgtggtaatgggtgtccagtgagtgtattgggcggtgttccttgtaaaattgtgaaacgttacactgcagattgcacccttgtattctggatgttgtactcggccgttgacggcttgcctggggcaccctatatatctgatagacttgtctggttgttttgagtgttgtgaatcagaagaccctcaggctatagatgaaaaatttatctgtttctagttnnnnnnnnnnnnnnnnnnnnnnnnnnnnnnnn

SEQ ID NO: 41687 - DNA, 555 bp, Setaria italica
  Peptide Sequence Number=SeqID_107661
tttgttctactaattgttggtcgttgtctagttcaccgaggaagaaaaatgaaacaatcaacaacacttgcatcatctagtcatttgtgcccccacagctaaatatctaatagaagggttaaaaaagtatgcgcgtgcgattggagaaaggagggccaacttgtccacccaacccagtccaagattcaggactaccaaaaccctttgtagaatccaggcacagccaaatcccttataatctttttgttgcactgcctagttctttatctttcttttcttcgatgcttttttgtttttgcatggtgcactgttatcccaacgagagaatctactctttgagaaaaacacaaacatctacaagttgcagtttagcgacagatctgaaagttacatccagtgatacgcaccacttctacagctgaaacaaatttaattaccattgttggattatacaagaatagaaagcacgcagcgagcaaaactgaatttgttggccaagcaggagcaagaacaaccgagcaccaatttctcttcgaaatttctgcctgcggaccc

SEQ ID NO: 41688 - DNA, 333 bp, Setaria italica
  Peptide Sequence Number=SeqID_107662
ccatgtagtgaactgcggggtgaagaagtttgtggaatatctttggttcatgctcgacaaaattttcagggtatctcccaactgtttggcatcttttatcactacgtatatgagacatttgggcaccaagacaggagtcaaagcggcaggcatttaccagatcatcaatcatgtaagaatttagaggtctccaacaaaaaattctcatggacttttgtaattgtccttattaatgcttgttctgtattcagctcggcttaaagctgctttatcaaaaataacacaagactctgatcagtggacaaaaccacataatgtttcatattcaccttt

SEQ ID NO: 41689 - DNA, 466 bp, Setaria italica
  Peptide Sequence Number=SeqID_107663
gatctatcacatattcgtgatgaagtcaatgccacgaaagaatccatagtgagctttgatgtgctttcaggtactaattaatgggttgcagcacattgtatcagcaaatgtaaggccgaagctgcaaactgtggacactttcataaaggtaagaagagcgaattagtagtagatagtttgtactgtaccagttacttaatggtggtgctcgctaattgcctcgagcatttcaccaatctgcagttctactgtcctccgcaataagcagcttccttttatgttcattttgttcttacattattgaaatcctggcaaagggaatcaccgttaacaattcttgtgcggatcaaacaggcctactatttgccggagaccgagtacgttcactgggcacggtctcatccagtaagaaccctgcgaaacttcatctcccattgattgattgctttacttgagacaacagtta

SEQ ID NO: 41690 - DNA, 2369 bp, Setaria italica
  Peptide Sequence Number=SeqID_107664
cctcgtcttcctgccccttctcctgatccagggcggcggcatggacctctcccgcgtcggcgagaagctcctcagctccgtccgctccgctcgctccctcggcctcatccccccgatccccgccgcgccccctccccgcccggaggttccagaacgagctgcggccgcggcagctgctgcacgtgcgatcgcggggttgccaccgcatgagaggatcaacctgccggccaattcggaggacttggtctccatctacgggagtaacccacagggggagcccgtggaggagctcgaggaggtgttttatgaggaggagttcgatccaataaattacattctgcaaagtattccagaagaaggcggtgatgccacctattttgataagcagtctacattgagattagcgcagcttgacaagattgcagaacgattgtcacatcatgttatgggccaccatgaagaaatggtgaaggggatgcagttagtgatggaactagaacaagacttaaaggttgcaaatgtaatatgcatgaatggacgaaggcatataacctcttcgaagaatgagttgtcgagggatctggttgtcaatgtaaaatcaaagaagaaacaagctttgctggatgttcttcctattcttacagagcttcgtcatgcactagacatgcagatggaacttgaaacttttgttgagaaagacaattactttcaggcgttccaattattgccagaatatttgcaaattttggagaattattcaggcctttctgctgtacaagaaatgggacgtgggatcgaggcatggttagctcggacaatccaaaagttggacacccatttacttggtgtttgtcagattttcaatgaagaaagctacataactgttgttgatgcatatgcactgatgggtgatgttagtggcatggctgaaaagatgcagagtttcttcttgcaggaagtactctctcggacacattatgtcctgaaagaaatgttggaagaggaggttggaaataatacacagaaaaataggtttacatatagtgatctttgtgttcaagttcctgagcccaaacttcgcccctgcttgttgaaaacccttgagagcttattttcattgatgtgctcatattatgctattatgagcttttccccaggagataagaatattgagtccaagggcccgcatctagcagacaagaatgagacatctcagaataacgatgaagctttagttgattcaggagggggtcagtcaagtgcagcagtcattcaggatggttctgcagctgaaagaagtgacagagcatcatcatccgaggtcagcaatcctgatgctagtacatcaggaacggattctccattctatcagctgaggacagatgctacaaaacttgttgcgcaaacatttcaaagaggacgaagaaatctttggcagctggcaacaagtcgcttatctgttttattatctagttcagctgtttgttcaactagcatataccaattcctgaagaactatgaagatcttgcaattttcattttggcgggtgaagcattttgtgggtttgaagctagtgagttccgccagaagttgaagactgtctgtttgaactacgtagtgtcctttcaccggcaaaatgtatatgcacttaagatggtactggaaaaggaatcttggacaataatgtctgctgaagcgtcgcagataattagtttagctggcctaactggtgacggtgctgcactgtgctctcctaccagtagaagttccaagttgccaataaattcttaccatgcgaattcaactacagccaatccgggaaagcaaaagctcggattcgcttcttggcttaagatcgaaaatccattttcttttaggctagaaaatggctctgccgaatccccaaagtccaatatgcttttcgactcatcagttagcaataatcatggcaatgggaataattcatctctcgatgaagagaatgaagaccttctagcggatttcatcgatgaagatagtcagttgcctagtaggataccaaaagcaaaaattgtaaaaggcaattattcacattggaaagatggagatatttcatcgcagacaggctcgtcactttctctgttaaggatgatggacaaatacgccaggctaatgcaaaagctggaaattgtcaatgttgagctttttaagggtatctcccaactgtttggcatcttttatcactacgtatatgagacatttgggcaccaagacaggagtcaaagcggcaggcatttaccagatcatcaatcatctcggcttaaagctgctttatcaaaaatccacaagactctgatcagtggacaaaaccacataatgttcatattca

SEQ ID NO: 41691 - DNA, 1328 bp, Setaria italica
  Peptide Sequence Number=SeqID_107665
tttttaaagggtaatactacccaaactagtttaggacaatcttttaatcttttatcactacgtatatgagacatttgggcaccaagacaggagtcaaagcggcaggcatttaccagatcatcaatcatctcggcttaaagctgctttatcaaaaataacacaagactctgatcagtggacaaaaccacataatgtttcatattcaccttcatcccctttgtcaatgagttcaacttttggtcaaatggatgtgatgcctactgcgcctcccagttcaatgttcacttcctatgggttaaaggagagatgtgcagctgctgaaacagtatcgttggttgctcgagttttgaacagatctaaagcccatctgcactcagtgttgtctaaaaataacactaatgctgttgaagagttctatagaacactggtggattctgttccagatttgactgagcacattcacagaatgagtgcacggatgcttttgcatattgatgggtatccagataagattgcaaatgctaaatgggaggtgaaggagcttggaatagagcacaatggatatgttgatttgttattgggtgagttcaaacactacaaaacaagattagaccatggaggaatttctaaggagctccaacatctgttgatggagtacggtatagagagcatagcagaagtcttggtggaaggtctctctagagtgaaacggtgcactgatgaagggcgtgcattgatgtcgcttgacctgcaggtactaattaatgggttgcagcacattgtatcagcaaatgtaaggccgaagctgcaaactgtggacactttcataaaggcctactatttgccggagaccgagtacgttcactgggcacggtctcatccagaatatagcaaaagtcaggtcgtcgggttggttaaccttgtggccaccatgaaaggatggaaacggaagacgagactagaaacagttgagaagattgaggcgtagacccggcggaaggttctgctgtgattgattttgttttgtttgcttcaactgctgcacatagagctgtatcttattctctctttctttttcttccctcctttttataatcatttttgtcgattctttcacctgttggccattttgattgctaaccccatcaccatcaggccatcacccgcccatccatggtgtatatttaagcgatgacaccctgtatcatatcaaagcatgtgggggcgagtcgagttgccatttaccaaaaggaagagaactgtgtactgaacctttacatggagcatttggctcaataaatatgaggaactgcccaggcacacagggg

SEQ ID NO: 41692 - DNA, 555 bp, Setaria italica
  misc_feature (487)..(487): n is a, c, g, or t
  Peptide Sequence Number=SeqID_107666
attgttcgttgtagattatcagccgctttacaagcaaggcaacacacccggaaatactaactacaataggcacaatccacatggtgtcctaactcctaaactatcagggaaactggtggcagaggcggtggcagttggcatggacattgcagacgtggataaaaggttgtgtccatcaaggatgtaaaggagctgataatctacaacgaacaatcccaatcatgattgctgcctaaagttcctggagtgaggaagattggtagaccctgatgacccctggtgagttaggcattgaaactggttaaccatctgtgcaacctcattctgggacagcgatgaagaaccttcagaaggttcagaagacctcaaattggggcgacctccactacgtttcttcttcttcttcttcttcttcttcttcttcttctcagcaggagtaataacaggagcagtgctctggagccaaatctcctcatcaataagggtnttacgtgccttgatcacagacggtagaggagaacagctcaaacaaccgaaccttggcaggctcaaact

SEQ ID NO: 41693 - DNA, 666 bp, Setaria italica
  Peptide Sequence Number=SeqID_107667
cgtctgttgcccgcaccggcgcaactataggcttactccgcgtagcaaaaaaccgatttggggatctggaaatggaggttggtgactgccttttatgtcatctcgtttcgttaacactgtccaccgattgctgcatctgggagcagcgattgctgttctgatcatcgctgacaactttgctttaggctcttgggtaaattcgatgggaactttctaacagctctcgtgtagtcgtgtggtttttatctcccagctgttcttcttgcaagagtttgggatcgatgcttcagttgttgtttcattttcacatcaaacaagattgattcaagtcatttcgttgtgtttatatcccttgtcagtagtctgttaagcaaaacttattctcaggttcaggatttatgtctaccgaatgaaaatgcaatttctgaacgtgtgggaagttcagtttgagaaggatactgtagttgacattcatctttactacctttgcatctttattgatctgaattatcagagaccaaacagaaacatgctatggaatttttttacactgtaactagaaatcaagtacttgtacaactatcccatttgcagcaccacgaatgtatttgaatcaagttacacacgaagccacaatcatggctttgcagaaatgtatgttgcgtc

SEQ ID NO: 41694 - DNA, 283 bp, Setaria italica
  Peptide Sequence Number=SeqID_107668
cccgattccccgagggacacgcagcagcgccaagcagcgaggcatccatggaggtggtgggcggcgtgtcgctgaggccgtcgtcggcgcaggcgccggcgcgcatcgggaagctgtcgcccgtcgacgtgggcgggcgcttcgtgctcagggcggcgccgcggaggcaaccggcgaggcgcgcgctggtggtggaggcccgggggaggagctggtcggagcggcagatggagcagcagcggcgcatgccgcagcttcccaagatcgaggacgacggcaaccc

SEQ ID NO: 41695 - DNA, 671 bp, Setaria italica
  Peptide Sequence Number=SeqID_107669
tacgaatcgatgtcgtcgtaggcgcccaggaaggcgcggagcgccggggagcagcccttgccgggccgcccgccgtcggcctcctccttgaaggagtcgcactcgcggcgcaccgccgagtagagctcgtcggagatgatggcgtggctccaagcgtactccaccatgcccagctggtccgtcgcgtcgttcagcaccgcgttcccgatcatgaaacctttgatgttgatggctctttccctgctcgcccctttcctcccgtcgtagatgagctccgcgagctggggaacataatgcccggcgtagctctccccggcgatgtagaagtcccgggtcttgaactcggggaacttgtcgagccagttgaggaggaagctgtacgagtcctgcgccgtcacgcggtcgccgagccgccgcaggtccgccgtccggttcgtgtaggagaacccgacccccaccggcgcctccaggaacagcaggttcacggctttgttccacgcgtaggcgttgcgggtgaggttagcgccgtagctcctgaccaggaacgggcccagctcctgggcggcgccgtaggcaacagaggagcatccaggccctccgttgagccagagcaagagcggcttcttctccggctcgcgctcagcctcgaagaaccagtagaagagcgcctt

SEQ ID NO: 41696 - DNA, 996 bp, Setaria italica
  Peptide Sequence Number=SeqID_107670
aactttttggttaagaatttggttggagacaagcctggaggttgcattcttgctcatgccccgggttcggggaaaacatttatgcttataagtttcattcagagcttcctagcaaggtatccatctgcaaggccccttgttgtgctgcccaaagggatattaggcacatggaagaaagaaattcaacagtggcaagtgcaggatataccattgtatgatttctactctgttaaggctgaaaaaagagtagaccagttggaagtcatcaaatcatgggaagacaagatgagtatactgtttcttggatacaagcagttctccacaatcatctctgatgatgggggcagcaaagcagcagctgcatgtagggacaggctgcttaaggtccccaaccttttgataatggatgagggtcatacacctaggaatcgggagactgatgtactagaatctctgaatagagtggaaacaccacgcaaagtggtcctttcaggtacacttttccagaatcacgttaatgaagtgtttaacatcttgaatcttgttcgcccaaagtttctcaagatggaatcatcccgtcctattgttagacggataatgagtcaagtagtaatgtcaggtagaagttcaaaagggattgctgacaatgcatttactgagtcagttgaagaaaccttgttgcatgatgaaaacttcaagagaaaagctcatatcattagaggtcttagagaacttacaaaggatgtgcttcactactataagggtgatatcttagatgaactacctggcttagtagacttcagcgtgttcttgaaactcactcccatgcagaaagagatcactcaaaagaagatgggagcatatgacaagttcaaaagaagtgcagtagatagttcattgtatgttcatccttgtctttcggaaatttcagaagttaatgctgaggatagggctaacacattgacagataagtcaattgatattatgattgattcc

SEQ ID NO: 41697 - DNA, 512 bp, Setaria italica
  misc_feature (27)..(27): n is a, c, g, or t
  Peptide Sequence Number=SeqID_107671
tcatctattcagcttgattgagttagngttgcagaaaaggcccaagaacgcaaaaatcttgcggtatgtaactttcatcagaatctgacttgcctatagcggaagaggagaaccaaaaaagaaagtgatggtcttgaggaatattggaaagatttgtttgaaagcacaaaggcttcaaggagaagaacaaattgctatggacgctcaaaggatgctgatgagatagactggtagtgttaaactgtctgaagattccatagttgcagatattgctattcatcctaggcaaatgagactgcatcagttggaagattcaacttttcgttaaggattttatcggagacaagcttggaggttgcattcttgctcaggccccaggttctgggaaaacagttatgcttatgagttctgttcagagcttcctagcaagatatccatatgcaaggtaccgtggtgtgctgctctatgggataattatttggtggaagttggttaagttaaagttaaatttt

SEQ ID NO: 41698 - DNA, 2667 bp, Setaria italica
  Peptide Sequence Number=SeqID_107672
agtttggtatttggcagtgctagcaaggaatgggaaaacattcgtcagcgcaaggtccaattgatcaacttcctttctagtctggaaagtccctctcaaaattctgccatagctgggaaaatggcaggtagcaaattgaagaatcattctatggagccaacagaacaaaaaggaaagcctgacatcataattcttgattcagatgatgaggacgaaaacaattcaggatacaataagttggcgcctaagacaaacaaagaactgacaacatctgaattggctagtaatgtcatgaaatgggtggcatccaatgggatgagccaagcatctgaaaccatgcatgctgaaggagacaaaaatacacagattgttccatatggtcaaagtgcagctttagtgaatcaatttcctttgcaaaacagctggcaaccatctattcaatttgagagagttgtgttgcagaaaaggcctgaggagcagcgtatgcaagatctcgtggctgctaacatagcggagaggagagcagaaacacaagtgttcctttcacttcctactgagaaaaagcgaaggaggtcagaccccagcttgcatgtcagggaagatgctagcactgcccctagacaaagaaaaagaaaatctgacacagatccagtaggtgctgatttatcatcgggtttaagacaaaccgatatttcatcagaacctgacctgcctatagaggaagaggagaaaccaaaaaatgaaagtgatggtcttgaggaatattggaaagattttgcgttggctgttgaaagcacaaagcttgacgcagttgatgaggcagcaaatgagaaagaagaggatagtggaaagatggaggacgtcgactgcattcatgacattcggattcatgaagatttgggccatgtatgccgtatctgtggtatgattgtgagaagagctgaatcaataattgattatcagtggaaaaaggcttcaaggagaaaaacagattgctatggaggacattcaaaggatgttgatgagaaagactatggtattgttaaactgtctgaagatttcatagtttcagatattgctattcatcctaggcatgctaggcaaatgagactgcatcagttggaagattcaacttttcgttaaggatttgatcggagacaagcttggaggttgcattcttgctcaggccccaggttctgggaaaacagttatgcttatgagttctgttcagagcttcctagcaagatatccatatgcaaggtaccgtggtgtgctgctctatgggatattgggtaagtggaagaaagaaattcaatgctggcaagtgcaggatataccgttgcacaatttctactctgttaaggctgaaaaaagactagagcaattggaagtcatcaaatcatacagacttagtaagacttcagcgtgttgttgaaactcactaccatgcagaaagagactattcaaaagaagatggagcatatgacaagttcaaaagaagtgcagtagatagttcattgtatgttcatccttgtctttcggaaatttcagaagttaatgctgaggatagggctaacacattgacagataagtcaattgatattatgattgattccatcaatgtgagagatggggtgaaggccaggtttttcatgaatatcctgtcacttgctaattctgcaggagagaaattacttgcttttagccaatatatacttccaatgaaatttttggaaaggctgcttattaaggttaagggctggcatgtcgggaaagagattttcatgatctctggtgatactagtcaagaagacagagaattgagagtagatcaatttaacaactctgctgatgcaaaagtgctgttcggttccatcagggcatgtggcgagggcatctcccttgtcggcgcatcgagagtcgtcattttagatgttcatctgaacccatctgtcacccgtcaagtgatcgggcgtgcattcaggcccgggcagcagaagaaagtgtttatatacaggcttgtagctgctgattctgctgaggagaagcatcatgagaccgctttcaagaaagaagtcacaccgaagctgtggtttgaatggagtgaacactgtacaacagaagacttcaagctcagtcaagttgacattgatgactctggggatgaattattattggatactaaagcagtgcaccaggatatcaaggcactgtatagaaggtaacaagctctgtggccactggacaccatgtaaatattggaatgctgatcttccaaactgttccttgatctgaaggtgttacagtggctccattgtggtgacagacctgaatttgctctaagctaggactttatgttattatgtcattttcaaactatgtttatggaatggctcctttgtagtatgtgccaacttgcgacagcaatcaggttgatcttgttctctttccttgactggttaggttaagtttgtgaggattaacagccaccgttttctccccctaaatttctcgtgggcaacaataaacaactaaataaaccctttcgtgaatctgtttctgttcgcttagtttgttctgtttttgagcattggaggttatgcagctattttgttttgtccttgagcattggaggttatgcaactgtttgttcttgggcgttggtag

SEQ ID NO: 41699 - DNA, 1858 bp, Setaria italica
  Peptide Sequence Number=SeqID_107673
tttttatgtttttttttttagtttagctttcaatcaaaattttctgaaccttcttcacacgctgtttacacgtacaaaaggaggccaacgttcccagtaaatgcagagttggccattccggtatcatcttgtacagaagggagattcatccctttgatctaccctgatctaaacaacaatcacatacagttatatatctagaaatgcaaccagcacaggcctgaccttattgcccaatatatttacaaggcgcctaaaatgtggctatatttgggctctagagcttttgaggtgttttcaccttcttttaaacctgaaaactaacctacgcacacacttctatgttctgctgcctctatacctgaacataagaaaactatcatctgaagctgcatttgagcaagtcactcagcaaccacatctctttgcctttttttttaagtagatccgaagtgaccgagaaaggtggtaggaagcagcaagctgccaacttcagagcaggcattcactggaaatctggaacaacttccatggtgaaaccagattgcacttacacttcatttgagtaggtaccttgtgcatcagtggcgtccttgctagcattggaaggcacttttcctttcagctcagcacatacaagctttgtcaagaggagcccagcaaggagagctgctgccatcagcattgtgaacacagcactccaactcttcgaggagatgtaccctgtgagcaaaggcccgatggcagcgccgacagatcctgtcccatcaatgattgctgtcacagtggccagtgctcgggaattgccatttaaagagctgtgggtgccaaggtcagctgacactgcagttgtgatcagggcataaggcccgttgacaaacatgccagtgatgaacatgaggcagatattccaacctatcgacatgcttccatatgtgcggtacaagaatagggcaggtatcgcacaatacatgaagctagcagctgtgattgcccgcgcatttaagcgatcggagatgtgaccagcaagaactcctcccaacacaccaccaacatcaaagattgtcgataagctaccagccatagcatcagagaggtactcaccaccaatacgtgtatggctgatgtagaatggtagccaatacaggaaggtatatgcaaccaatttggagaagaagaggcagagagcaaatggtgccactccaggaatcctccatgcctctaagaaacctactgccttatgtttcacttggcctggttccaaaagggcctccttcacggtgtctttcacacagttagattcaccactgtcaatgtctatttccattacctcaggattaaccggcaggaaaatatacactatcaacccaacaaaagccattatcaggctggggatggcaaatgaccaaccccagccaaacttcagcaggaatgcagcaagtaatgagccagctatgttcccaatagaagtgtgtgcattccatatacccatgatcaaccctctcttgctcttcccaaaccagtttccaacaactgcaaccactgaaggccacccaattgattgaaacagaccagaaatcatctgaataaccaagaagtagtagaagctgtgaacattcagccaataaccagcaccaaagagagttgtgaatatggcggtcccaagcatgccaattgtcagaaagattcttaaatccatccggtcaccaatatgtccagcaaagaacattccaacagaatatacggcaaggaacgcaacatcaatctcaccaagcaatgctgagccatcagcagtgttaaatggcaaccagccaatgtttaagctgttgcttgcgtgcaagcgtccccagtgtgaaaa

SEQ ID NO: 41700 - DNA, 610 bp, Setaria italica
  misc_feature (596)..(596): n is a, c, g, or t
  Peptide Sequence Number=SeqID_107674
tttattttgttccaatggtgtgcctcctcggttgtattattctatatccagcgagtgaccatggaaatgaaaaactccaacgttgctccaggtcttgtagaaaagaagcatgagagcgggtttttttttatcatttgtagtgcgaactagtaaaagatagtctgtgctttgggtgcagcttacgctttgaaattttgacaatccatgaagaatacaatattaaaaatggatctctcgacattatttagaacttgtagtgaatactcaacggtgactgcaaatctgataagttgcgatttcttattactgagagcagggtttttttggttgaagttctccacttagtttttagttaatattttctgaatgatgtgatatcttgagagcactggacccaaaatttgtattcaagaatgttgtaaggaatatatgaatgccagcaatgtgctttgttgttgcactgtcactttgagacgaacgatggttttatggacttccattcccatgacaaatctgggcttgcataatgttatttttgaagcactcgaaagtcaacaattttcatggtctgggaaatttccttgcattttgtttgnggcaataggaactt

SEQ ID NO: 41701 - DNA, 533 bp, Setaria italica
  Peptide Sequence Number=SeqID_107675
gggcgggtggcgaggagcagcgtgaggaaggtgaagggcaggtccagccacgggaggtccatcgccgccgcgccgccggcgaggccgcgctcatcgatcgggcgcgcgcgggagaccttgctgctcaggctcagctcagcgcgaggaggaatccatggggaaaatacggagcggattccgttcgtggaggctccctctccgcactaaatttccggctttttcctccgggcggacaagtcaagaaaagttgatcaattcgagggaaagattagtactgatgtgagtgccgaatggtttgcttccacatcaccaaagcgattagcgcacgccggtgaccggatcacgcagtcgacgacgcctaataagcaaagagtaaacttgcagcatagttaaatccgagaaaagaacacacctttcttctttcaccgtagctgttgaactgtgactacccaaccagtatataaaaatgatgagcagcgtgatcgcaattccaccgcgtaaaatcaatcaaggcctaaatttgacgcggcgac

SEQ ID NO: 41702 - DNA, 569 bp, Setaria italica
  Peptide Sequence Number=SeqID_107676
gcatagtatatagcaagaggaacaacacaaataaacagttggtattttgattagtgaatatattggcctggacgccacatcatggctgattacgtaagctaaccttgcagttggctgaatctagtcacaaagtcgaaaatcagcacacctaatatttttctacagttctttgtcgcaacaagttcctaaggtatgactcagaatgaaagcaatgtaaggaacttcaacattatagatgcacctcatctccacagatgtctatatccttctcgctactaatgattctttcactttctgcctcctcctttctttatgcctgatagcgctacttagaccataaatcctgactggcatttgcactcaagttcaaagacataaatcataccagtatatccttttgcacctttctgtctaacatgacattaggagtcttggacacagagagttgtgctgtcaacgtcccaatctttgcaggcaaagtatttcccagcattggagaaaataccagtgagcgatcgtctggatgtattggaacttatcaacacaatcaacataactgatatgttgaa

SEQ ID NO: 41703 - DNA, 697 bp, Setaria italica
  Peptide Sequence Number=SeqID_107677
ccggggcaccgacacgtactccttgtacgtcccggccttcacgtacatcacgtacgcggtggcgctcttcgtcggaaccttggccagcgccgcgttgatggtcttgaagtcgccgctgccgtccgccgccaccgtcacgtccggcttgaagtcgggcgagccggggtggccttcagcacccggcgcttggcgtcgtcggtcatccacgacggcgcaccgccgttgcccgcgagcagccggcggtggaagctcggcaggcccaggctggcgagcgtctcagagaactcgtccacgagggcgagtatgttctccgtcagctcctgcgaggtgttgagcgccctgcgcatcttggccgcggcgtccgtcgtggtgttctcgaacccgtcgaggcacgtctcctggtacgtcagcgcggagctcagccacgtcttgaggtcgtccacggcggccttgaagttggtcatctcgaacccgccgagcctgtcgaaggtggtcttgaggtcgtcgatggcgtagtccaggagctccttgcagtttctgagggcgcccgacgtgcgcgggtcgttcttgaggtcgttgagcacggcggactcgcgcgcggccttctcgatccggtcggaggtcaccttgaagatgaccttggcaaggtccgttgggctcgtggcgttgccggccgtcgcctccagcgcgcgctcgc

SEQ ID NO: 41704 - DNA, 403 bp, Setaria italica
  Peptide Sequence Number=SeqID_107678
agctccgccattgccgtcgccgccgcagcagccaggaattcggcgatgaaaggaagcgtggacaggaatgcagccgaggaagtcaggaacattctggatatggcagaaagggcatcccaactaagagatgttttccacaccaattttcttactccacctataataaaggaggctatgctggcaattgagaagttagcagatataaaagctgtagctcagggtggctacccacaggctgagcggtgccgaatttctgttggacacccggactctatgacaagtaacccagatgtagttgctgctttgagcatctcagggaatttccgattggaaccctgttctcatggtgactttctgactttgaggccaatcagcatctcagggaatttccgattggaaccct

SEQ ID NO: 41705 - DNA, 430 bp, Setaria italica
  Peptide Sequence Number=SeqID_107679
ttatgtctgaccagacatgtgagttcttgttttgaccaagttggcatcatcgattgtcataatggtttttgcttcctttttgttcaggtcgctgacaactactacaggcctgatcttaccaagccagctcttgcaaggctgagcgcagtgtaccgcagcctccaggttgccaagtctggtgtcaagaagaagaacaggcaggtgaactaagtcacaagaacttgttatgatgggtggtgtttatgtttccaggtttctagatttggagtgtgatggttgatgtgcgttcttagactgccacaaactttcaaattaggttccaccttgtacccatgacataattaagcctatgaatatggaatatccttttagtaattattggcattaggtggttgtgctgaacgacaacggagggtagtacggacgaagg

SEQ ID NO: 41706 - DNA, 1294 bp, Setaria italica
  Peptide Sequence Number=SeqID_107680
atccgactcaacaacctattcaacaggggtgagaaatcttagataaagacattgaatgatccacataagaactcaatttctcactttggtccgagccgaaaccatccctcataaccccgcaagtctgtgccttgctcactgctactgtgaacagcctcatggccacagacttaccttacaagaaaactgcattattgcgataatatatgaggacgaggtttcaagcgatctatggctcaacagtggtaacctgctgccattcaccatccacagcttccttccacagggtcacattgttgttaccgtcggacacagcaagtatattccctgtcaacgaccatgacagcctccacacaggggttctgaaatcatacaggaccctgccttcccactgctcgccttctttcgctgctgtccagataaccacggtaccatcctgagaggcgctggccatggtggactttgggaggccaaggtttggcgcccacgcgacgtccctcacccagtccttgtgcatctgtagtgcggggaaacaatccatcctccaacttccattggtgagcttccacaccttgactgtgttgtcgcagccaccagacgcgagtttctgaacatattcatactggccagaaggtcctgcactgattagagcaccaggtgccatcgaaggagcccaagagactgaggtcactcccactggatgcgcctgatcaatgcgtgttgtgtcccaacctccatcagaacgagcagtgaagactgaaatgttcccatcagatgaaccacacgccaagcttagacccagctcatgaggcgcccatgcaatggaattcacagaggacttgtgctcaacaaaggtgtgtgcctgtgcccattcatcgggtttgctaccctctttccagatgataacccggccatcatagctgcaggatgcaagcatggaaccaaacttaggatgagcccatgcgacttgccaaactgggccctggtgtccactcaaagttgcaagctgctgatgcgaggcgccacttacgccaatgatctttatcgtgttgtcagaggaggctgtagcaagacgcttcccatagtaatccatggcgatatcatgcaccacatcttgatgcccggtctcaatcttatgaggcggcattgttcctcagcttgaagacacgacaaccagctctttggtgtttaccacgtcagactcccgcgggcggaggggacgaggaggaggaggagcgagcggagccggcgtgcgaggaggagatgggtagatcgtcgcggcggagagagaaac

SEQ ID NO: 41707 - DNA, 510 bp, Setaria italica
  misc_feature (460)..(460): n is a, c, g, or t
  Peptide Sequence Number=SeqID_107681
gtctaatctgttattcggcaccacggtaattcagaatttgcattcagattgctttacgacagtggcgtcaagtgtcaagattttagcgatctgtatatttaatcttagcttggatatggtaatcgacttaatgagatgctttccctgcttagagaagttgtacatacagtcatgtttggcaaaggacaaaaacttgtggcgtggtaagcatcgcaatcttagaagatgccttgacatccgcctgaagacaattgtgctaaaaaaattaccaaggcatgatgtcacaagttaactttgcgacgttctttgtattgaatgccaaaatgctggagttcatgagatttgaggttggagccgacaacgacaacgaagtgtttattgcagagcagcatagaaagcttcagctagagaaaaaaggcatctagatatgctcagttttatttacaaacagtggggggtntcatggtcttggactttctcatgtcaagcctgttactgacctgtctataa

SEQ ID NO: 41708 - DNA, 531 bp, Setaria italica
  Peptide Sequence Number=SeqID_107682
ttgtctcgtcttctggatcctcttcgagaacgtcatgtccatgcaccgctccaaggccgccgtcatcggcctgctcgaggccagccgcgccaacgagtgggtcgtcaccgacaagctcggcagcagcaaggctgcggcagcgccaccggcgatcgcgaggaggaagaagcaaccggtgcggagacgggaggtgcatgtgctggagctcgtgatgggggtgtgcctgctctactgcgccatctacgacatcgtcttctttggccaggatcatttctacctgtacctgctcctgcagtcggcggcggccttcatcgttggcttcggctacgtcggcgcctcagtgccggcagcaccgtcctgaccgacccaccgacggccgatcgacgacgactcagtgcctgcgtgtgatccccactcccaaacattcattaattgtttggagcctcgtgtcatggggaataatcatgaaaaatcaagctcaatttcgttacaaatttttttttcaaaaaccaaagagacaggttcaaccgc

SEQ ID NO: 41709 - DNA, 467 bp, Setaria italica
  Peptide Sequence Number=SeqID_107683
tctggctaaaatccataatcgtaaggcagctcacgatgattccattacaacaccctttctctaccctgtcgagatatacgagcgcttatgggcaatcgaccggttggaacgtttgggcatatcctcctacttcagatgtgaaattgacgactacttaacctatgtttacagacactggaccgaggaaggcctgggttacacgagggactgcgccgtgaaggacatcgatgacacggccatggctttccgtctcctacgcctgcatggctaccatgtctctccttgcgtgttcaagcgtttcgagaaggaggacggcgagttcgtggtgtacccggggcagtccaaccagtcggtgagcgccatgtacaacatgtaccgcgccgccgaccaggccgccttccccggcgacgacggcggcgtcctccggcgggccaggcgctactaccgccgcgcgtttccttcctgga

SEQ ID NO: 41710 - DNA, 457 bp, Setaria italica
  Peptide Sequence Number=SeqID_107684
atcaaacacgacccagaaccaacccaacaagacacctagctgtatagatcgtcatcatccgctccgcctgtggaaggcaaaaggatcggctgcagctgcaggaccagcggtcgtggactgctccgagaagcggaactcgctgccaaacccacgggactgctgcaatgtctgggcgaacgcctggtacttgcggatatcggcatcgctgacactgcgacgggcgtacttcattgactcctcaaagtgagctgccttgatttcagcaatgtcatcgacttcatcctcctccattgcctcagggttgtcctttctccgcctttccctctcaatatccttctcgatattctctctgatggcatatttaactgcacgctggcaaatttctgtgatatctgacaaccaactagaacccttgggtgtacttggcaagagcattcaagtccacttccttcgccac

SEQ ID NO: 41711 - DNA, 419 bp, Setaria italica
  Peptide Sequence Number=SeqID_107685
atggagcattcttctctgcttcttcaaatgccttcctgagattgctctcactctctcctgctagctttgacataatctctgggccattgataaggaagaaaaaggctccaatctcatttgcaacagcacgagcaataagagtctttccagaaccaggtggtccatacagcaatatgccctttggtggcttcacaccaatagatttgaaaagctgaggatggcgcagtggaagctcaacaagctccctgatttgggccatctgcttcctaactccaccaacgtcttgacgaagttggctatgatgacgttggtggagttaggaagccaacttcgtcaagacgttcctcatcctccctcttaataaggctactaccaatacaacaaaaataatttacaagtaatactaaggtaagaacaaa

SEQ ID NO: 41712 - DNA, 367 bp, Setaria italica
  Peptide Sequence Number=SeqID_107686
agctcagaaaatcaacgcacaacaccctcgccaccaagtctgacgctcgtccgatgataacacgaacggtagcacgtccagcacccttcaattgtttctgcaacatcagcacaccctctttgccttcgtcttcagtcagtgtatttagcttgccatggccctcaaggacatgacactgccccctccacgaaaaccagcttgcccccaagctggtgcatcaggaaatcgacgagatatgtcatgaacttcctcccaagtagccaggtccgatggcaaagctgaccactgaaccaacaactgagagacaggtgaggaacctttggaaacaatacgatgatccagcaaagttataggaacacttaggtta

SEQ ID NO: 41713 - DNA, 466 bp, Setaria italica
  Peptide Sequence Number=SeqID_107687
aaggaagtaaacattgagaaactgcaaggtgcagatgccaaacaagataagaaagagcaacagatgatccagactatcacatacatatgctgtatggaacgcaaaaaggctcaccctgtaagctcatgtaagggaaggggaagtgaggtggaatggagtaggtgaaccaatgaagggcatatatcaattagacgtacccgtaaaccctcaaacattctaacggcacctgaccagtcaccttttgccaggatgtccagtaacactccagacgcttggaaatagtgctccatggtaggaaaacagctcttccaggaaccaaaaaaggttcatgccaataaatttcccatcaaaggaaaaactgatccaccttcccaagcctctgaggttttactgtcaagatctttatcatccttagatacccttaaatcaccacccagttccacactcctggccattagatcaccag

SEQ ID NO: 41714 - DNA, 614 bp, Setaria italica
  Peptide Sequence Number=SeqID_107688
taccattttccaaaacaacatatcacattatgggggattcgcacaaagaaaaaggtttggcaaaatgggctctccatttccttcagttttcttgttggtactgctgaaattgcttataatagaccaatgcatctcaaagttgggtacttggcctgcttgttgcatgtcatgcaaaagtgccgtagccttctgtagattgctgtttctgcaatagctatcaagaacaactctatacatgccatgggatggtgtggatcccaaggtggttagcatttccaaaatcttcctagcatcacaagttcttcccagggcacaaagaccatgtacaagtgcatcacaggaggactcacttggtcttaggcttgcgaattgcatttcagcaagaaaatcaagtgcctgatcaaattctttcaaaatacacagcctgtatatgacagagctgtaactgacttcactaggtagtttgcccttctttaacattgtatttagcaggttaagagacattctcaagtctcctattgtgcagaatttcttgatgagtccatcaaaattcatgtacgatccgataaattcacttttgctcaggttgttcagacatgactttgcttccaaat

SEQ ID NO: 41715 - DNA, 1455 bp, Setaria italica
  Peptide Sequence Number=SeqID_107689
ccaattcgttcctcaacttacctaactcactcgcggaatttcatttgactcctgaaaatcagcgtcgccaaattctttgtgttccacttccgtgtttacatggtaatcttcttgggttttcctgtcagaatgcagaagactggaatctctccggcctggatgcccttttcctccagcagtttgcacaacagacccaccataaacactcatggttctacttagttctttgccaaggtaattgttctcgatttctatctctccaagcctcttgttcatcatcttgatctcctgataaagttcactgcctgctgtttgcatacagccaaaattattatgcaaagacttcagctgcaacgtcctctcttcatgaaggcttctaaagatcacactgaggatatctttgctgactgcttcagtaacgagattgctgaagtcatgttcaaacaccttctgtttctcaatggagtcatttaattcacttgacagaaaagagttcgcttgtaacagcttggtcatctcgctttgcaatgacctcctggactcttgcagttctgacagccttccaactaagaacttcgcctcagccttcagctcatccactttgtggttacgagcctctacctcttccaagaactcatcacttatcttcataagttcctccttttctctctgcagctggagcagttcctcattctttgtctgctgatcttgcttcaaggcatgccgctctgacctcaagtcagctacctcttgtccaaaatgctcgagaagtgtaacaacaagtgatctctcaaccagctcattctgcttcacatcctgggcatcagatatattattcaacaggcagcttatctcagtcaagatgagttgcatgatgatttcaagcttcatttggtctaaggattcatacttacgatccaaatgcaacactttcaccactgaatcaatcccttcagttagtttctgattatgctgtgataagctgtacattttaccctcctggaccttgcatgtttctttcttctttcgcaactgtgctgagatatcagaatttacttctgccatgtcattcaaacactgttgcatgacaaatatctctacctgagctttgacaatcttgagctcctcttctccaagctgcacctctctattcctgccctcttctagtaataggctaatcttatcctgtagagcatcaaatcgagtgttgcttgagtgtgtactatcttcatgctccttcctctcaagcctgatttgttcctgtagcttaatcacttcatcgagcactaagtccttctccttctgcagatccgagtgtctcctttctagttctttgtattgcctttccaaattcagtagagtgacagtgatgctgtcaacctggtgggcaagcgttttcttctcatattgaagtatagagttctgattttggagtgcctgtgaagattctttcag

SEQ ID NO: 41716 - DNA, 414 bp, Setaria italica
  Peptide Sequence Number=SeqID_107690
actcaactcaaagtcaagtcagtgtgcattttatactctgattttgatcccacaagcttctgttcatttcaactttatgtttctttagccttacttttgacacagtttcaaagattacaacaataaacaaaaccagatccctccattctttgatacacatttttttattccgtcctcataaactgatatgtgttacactcttaatttataaaataatgtaataagtttaggtaatatgtatgctgctattccatattcaacaaagtctgtctttgacctacccattgctcgttctgccagtctgttgcattggagcttggtgtcccccatgagaacatttttgctaatcagttactgtttggaacctctggagagtatgtcgggtttgaccccaccaagcctacttcacgaagt

SEQ ID NO: 41717 - DNA, 608 bp, Setaria italica
  Peptide Sequence Number=SeqID_107691
taagaaccaaagaaaaacttaaatagaccaagagaaaacttaagttagaacttgttcttgatagacctctgcgaatcacaacagatctcaaataagcataagtatttgattcattaatcatacaaattttaatgtggctatgtatcatgaggtattgttaatatcataattcatttgaattaaagtaacacttccatgaaaagatccaccataccacatccatatacacacaaagaccagtctgcggaagatcctgggagaacctatcacaaccaccaactcaaatgttttaagtagtgaaggtatcaacaatacattttcccttgactcttttaaacttttctcttttgcttacatgcctcagcaaataagtgaactaccttggtttaaaatttttgcacaaagttttactttaatactctatgcatctgagatgtaggtattgcatttaaatttacagcacaatacagttttctgtttcacttttatgtcgcagagtaaaatcatgtttcctttgtgctaacatattgatgatgagacatgcgatttttatatcatattgttgattagaggtacacttttccagagaatgatgctgctaggagttc

SEQ ID NO: 41718 - DNA, 423 bp, Setaria italica
  Peptide Sequence Number=SeqID_107692
taaggagaactgtcgcagcttcttagagaggtggcccctaaatcatcggagggcaagaaatctggtggtatcgataaatctcaggttaatgctctgaagaggcaagccttactgctgaagcgggagggtagacttgctgaggcaaaggaagagttgaagaaggctaagattttggaaaaacaactagaggaacaggagattctgggtgaagcagaagactctgatgatgatttggctgcaattattcggaacatggatgatgataagcatgatgacatattgatggacgatacaaaattccctgctttaaattttgaacaaattctgggtgcctctaatgatcttgccattgatggccactttgatgttacggatgatgacatgaatgacccagatatggctgctgccctacaatcatttggc

SEQ ID NO: 41719 - DNA, 364 bp, Setaria italica
  Peptide Sequence Number=SeqID_107693
tccttcatatggctatgttcactttatagctcggttccctggttctcaccacaccctaatcgaaattttattcttacaacgtatgcattgaaataattgcacaacatatttatgcttgtgcgaacaggcctctagctgagttggttagatggtctcagtagcactcctcaggtccttgtcaccataaccaaagcataggtcaaggcccggccaaggtcgtagctgtggttggtttgggccctcctacctgggtagttgcagtggtcgctagcccagtggtagtctcacaagggttacaggcccctgtgtaagggtggggcagaggtttggggattttcttgacctgcgtgagaatgtcttctct

SEQ ID NO: 41720 - DNA, 601 bp, Setaria italica
  Peptide Sequence Number=SeqID_107694
tctactaatttgttacaatttagtaattgtagtagctacctaaatgatattttccaaagttatcatcaaacaagaagcgaacgggcctctagctgagttggttagatggtcctagtagcactcctcaggttctgtcaccataaccaaagcacaggtcaaggcccaggccaagtcgtagctgtggttggtttgggccctcctacttggggtagttgcagtggtcgctagcctagtggtagtctcacaagggttacgggcccctgggtaagggcggggaagaggttcgggggttttctcgacctgcgtgagaaggtcttctctcttagaaaaaagcccgagggctgtcttaccccccgcaggtcgagttttttttatcatcaaacaagaaaatacataaacaaactccagcggttccatccattttccaaattgggtgtataatttgcatgaacataggtaaccaagctaatagccctaggatcttttccatgttatatgcaaaacatggtctcaaaatataagaatgcaaaacaggaaatagcaagaagccattaatgcaaaatgatcaaaattaaacaaatacatatacctcccagaagag

SEQ ID NO: 41721 - DNA, 438 bp, Setaria italica
  Peptide Sequence Number=SeqID_107695
tgagaaaaagaagggaggtcgagatggtgatcaacatgttcagagcctgccaaatttgtttgatccaaccgtttacaaaacgacggagaaataagacgatactgacaaaaagtgcaccacagtatttttggcacagctctctgaatctgtctttctcccattttgcgcaaggttggatcatcaaatttggtgaagacacagaacaagtcaaacactactccccttttcttaactttttggcaaaaataaagaattccgcccaccttaaacaggttagagtactttgccacaggtaccaaatcattaagcccatgaagcaacacacacatccttttatgaaccaccccccttttttaattgcaatggaataatcatatactaattgtaaaaaattaattaatagttcttcttactcccaggccccccctgccagtaaaa

SEQ ID NO: 41722 - DNA, 872 bp, Setaria italica
  Peptide Sequence Number=SeqID_107696
aaagtttgggattatgctggggacaactatgtccatcgtcttattcagtcaaaaacaagatggaaagctagttgagtacaattgccatggtggtcacacagcagagaacacgtgttcactatgtagtggtgatgccgcaatgagtgaagctctactgaacagtaaatttgaagctgtaatgtgttaagtaaataatttattttgttgattgttatccaataccatcttgatagacttcctgtgtgccttgcattacaacattgattttcccttcttttagattgttgaagagtacaatgatctcgtcacatctcagcttgaaaagcaaagaaattactatgagtcacgtctactagtagaagacaaagaggaaactgaggaaatttctgctgctgttgagaaagctttgagcataaaaatccaaaagttggaagcaaagatcgagaagtgcatggaagagaaaaggtttcttgatgaagttcatgagaatcttgtcaggaatcaggagaagtggattgaaacgatacgaaaagcacaagcaagggagcaagctgcccttaaattaaaagatgaaaagattgaaaaactgaacgaagagacaagagacctgatagctcatctcgagtgccaatatgccattgcacaagctcctgactcgatctcaggcgacatacaagggggcactattcttcctgtagcatcttcgacatcctcaagcaacagcgacagcagcagccctattcctggcacgatgaaaatgggaagctgaaactacaggacagtatagtaggaattcccacccccaccccccggttcaagactcaaaagagggcggagaattttctgaagcttaaacaaccaatccagcgggc

SEQ ID NO: 41723 - DNA, 1664 bp, Setaria italica
  misc_feature (1661)..(1664): n is a, c, g, or t
  Peptide Sequence Number=SeqID_107697
tcgcttctgcggcgccttcgtcccccacacgctcgagatgcgcattgtcaggactgatggtgcagaggaccagtatagtgttcttataaatttcgacactcagaactcaacagacaacttctataagcacttcaatgggaagcagttttcttcgctggagggggatgtttgccatgtccgttttgtggaagatgtgcactacactcaattgattgagcatgcacatagctcggttacaagcttggctgagcaacctacatgtccagtatgtcttgaacgacttgaccaagatcctggaggcattctcacaacaatctgcaatcattctttccactgctcgtgcatatcaaaatggacagactcctcatgcccggtctgtagattttgtcagcaacaaccagagaagtccatgtgttctatttgcggaactttggagaatctttggatatgtgtaatttgtggccatgttggctgtggaaggtacaaaggcggccatgctattgaacactggaaggaaactcaacattgctattcacttgaattagagacacagaaagtttgggattatgctggggacaactatgtccatcgtcttattcagtcaaaaacagatggaaagctagttgagtacaattgccatggtggtcacacagcagagaacacgtgttcactatgtagtggtgatgccgcaatgagtgaagctctactgaacagtaaatttgaagctattgttgaagagtacaatgatctcgtcacatctcagcttgaaaagcaaagaaattactatgagtcacgtctactagtagaagacaaagaggaaactgaggaaatttctgctgctgttgagaaagctttgagcataaaaatccaaaagttggaagcaaagatcgagaagtgcatggaagagaaaaggtttcttgatgaagttcatgagaatcttgtcaggaatcaggagaagtggattgaaacgatacgaaaagcacaagcaagggagcaagctgcccttaaattaaaagatgaaaagattgaaaaactgaacgaagagacaagagacctgatagctcatctcgagtgccaatatgccattgcacaagctcctgactcgatctcaggcgacatacaagggggcactattcttcctgtagcatcttcgacatcctcaagcaacagcgacagcagcagccctattcctggcacgatgaaaatgggaagctgaagtgagatctgcacccgctgcaagctgcaacgctgtgaaccagtgagaattgatttctttcgtttgttcgcagactacaggacagtatagtaggaattcccacccccacccccccggttcaagactcaaaagagggcggagaattttctgaagcttaaacaaccaatccagcgggcgccgaattctaaggctgaccaatgtagcaaataaattgttacacgtcagggtctcatagcttgtttcatactgcatagaattttgctaatgtagaggagagagaaagatgtttcgcaaaataactgacttataagctaaatattagtaatatgaggctactacactattgtatgaatcatactattgtatgaattgtggttgtcatgcaacttgtaatattttttacacacaaattgtagaaaaaaaaaaagtaaaaaaaaaaaaaaannnn

SEQ ID NO: 41724 - DNA, 419 bp, Setaria italica
  Peptide Sequence Number=SeqID_107698
aactgaactggtggaagaaaatgataacgcaggcccatcaatggcagtgcctaggagtacctcaagaagcatgaaagccgaagcagttgaggctgctcaagaggcgtcttctgcaggagcttcgcaggcaaccaggacgtccaaaagaaggaagaaatgatgacggtggctaatgaatgataggtactgagattggcggctctcttttgttatgtacatatggtagctggtacctggtggtagtagatggtcattttgaagcggcgatgctgcagctcctaatgctggcagaatatgtagccttcagatgatggtgttacaaactcctagagcttatttaacttgtgacagtatatcaatctagctaaactggtgcctattttacttgtttggaagtagagaacctatctctatttgtg

SEQ ID NO: 41725 - DNA, 597 bp, Setaria italica
  Peptide Sequence Number=SeqID_107699
gtagctcagaaacttcttccctccctgcgtcaacaaaatttcagatcagtaatcaagatgcatggatcaatgttacacagaaagatgtctgacaacagtgaagtaaaagttcaatgtgcgattatttgtgtatcagttaatcgtacaatttcatatctgatatttcacaagtacatgcactcttgaatatgtggcagcaattgggttgtgatttaatttaattctccattgtcacaagcaacaaagtaaggaaacagagatactaatatactattttttttaggaactactaatatactacgaacacgccaacaaactgtagcaaaatgttctagcttgttgccaactaatctttagtttgctgcatagtattcaacaattttgccaagctacaacctgaatgttgcttatcccctcaactgactcaacccatgacccatcattagtttccctaagattcccctctggacagtgacacaactaatacatcagcgcagctttctaaaggcatgtagatatggagaatatgattaagaaaataagaagattcgtccttgccaatcagtagatggcaaaccaatctatagccgtttctgt

SEQ ID NO: 41726 - DNA, 968 bp, Setaria italica
  Peptide Sequence Number=SeqID_107700
caggaatccagggcgaagctcctcaagaagcaaccgggaagcaagaaaggatttgttcacaggaaggcaaggattcagggagatggaaaatcgatgtagcgaagagcagggtcatcccttgttctttccatatattttcacatcgtggttccaaaaccaatccaaacgaattatggccctcactcgaacaaaaaaagatggagcagatgccaatcctccctccaatatattagattacagggtgacattgtaccacaagtcgcaaactaatcgctgacgacgcgtacaaggagaccgctgtttaccccataaactggtttggtttgttcttcgtacaaggacaaatatattacacacttttgtggatacttaacaaaacccagacctaattgctcacatgttttgtgctttcacacagaacaggcagtggcagcacttcctctttcaggccttgatacagcactggaagtagctcagaaacttcttccctcccgttggggagtggtcgcggtcgtggagcggccggcggtggtcgtcggcggggcggccgagcttaggctgcgccttggcctgcgcctggttgcgctgctgctgctgctgggtctgggcgaggtcgtcgtcgccgccgaggctggcgcgggagagctccttcttgttctgcttccgcatctcccggatcttggagaagtccatggagtagtccggcagcgcgccgttcttcatgtcccagtccccgaacgccggcaccgtcatccagccgttgccgcccgccgcgtcctggccccgctgctcctttaggttctccatggatgatctctcgctttctctccctcctgttcttggcgtcttccttggcccctgtcgtccctgatgatgaagctgtggagcaaattcagcagtcacgcagcaacagtgttggacttgtcttcttcgcgaggcacgggcaccgcacaggcgactgttttgag

SEQ ID NO: 41727 - DNA, 618 bp, Setaria italica
  Peptide Sequence Number=SeqID_107701
gtcccttgagggcaaagaatttctgcaatgctgtttcaagaggaatccagcagagaggccaactgcaagcgagctgttggatcatccattcatccgcaattcaagtcactacaacaaacatggctccatacattcatttgcagggattaaagtcaataatattgctcacagtttaagagacaacaaaccaacctcgaagagtgactcgagcatgaaaggaaaaaataccaatattgaaccaagcagagctgccaggtcttctgaatcaacatttcgattggctccactaacaatccaggaagctactcaaaacttatcgcctcggcctttaggtttcggcaacaatcctggttcaacggcaaattttgtgaacaccatgcattttccaagtgcaaaccctcagcctagtccattgccaaggcctaacgggaaggaagttctgttctaatcgtggatgatgctgcatgccatttagagtgccatttctatcagtagcagttccagtctaaaagtggcttgcggaatcctgtgcagttaaggtgctgactgctcagggagcactgcaatccagaaggactcggctaacagcccggagatggagcttctatcttactaata

SEQ ID NO: 41728 - DNA, 344 bp, Setaria italica
  Peptide Sequence Number=SeqID_107702
taattcgttgaaggaaccatcagtaggcacgaagctctcgctgctatactatgccaagtccaactcccatgtcacggtgatgtcgagcaacatacggagaagtttgttggcgcagctcagcgtagttggtggcaaactacggcaccacatctatagcaacctgcttgacctccacaggttgctcgccgtggccgccgcgcgacctccgcatgcaagggcgtagccaggatttgaacatacgggggccaagacaccaaacaaaaaacgatctcataaaaacttcaaggactctaatatgtatggatgacaaagttattttacaaatgagagtgccaaacaataca

SEQ ID NO: 41729 - DNA, 417 bp, Setaria italica
  Peptide Sequence Number=SeqID_107703
cgccggcaaccggtcgctggaggagctggcaggggaggtgggagcctcgccggcgtggcggcagcccggcgcgctgccgaggggccggagcgtcaggatcttctcctgcatcggcggtatgtgaggaccggtcggtgcacgcacgcccgcgcgcggctccgtgcctagcttactgcaggcctgcatcggcaggagccggccggtgggcttgggttcgtgcaggatgcaggaatttgctcgtgtttttgcttagttctcgaggtggtagtaaggagtaattgtgcagtgactcgtaccatgttatccaactaaattgtacatacgcctggatttgcgaagatgcaaatgatggtttacatattccttgcacgttctttctttcttatgcgacgacgaatctctgtatgttttttcgtt

SEQ ID NO: 41730 - DNA, 287 bp, Setaria italica
  Peptide Sequence Number=SeqID_107704
tctaagtattggggaaccagccgtcggagaaggcgagctggatggagtcggcgcagctctggaacgggcccggcgcagcgttggcggcggcggacactgcggcgaagggtccgcagacgcccaaagagagctcggagcaccagttgccgatcgacacgctcggcgcgctcgacactgccgcggggcagcgcaacggcggcgcgttcctcccgttcgccaaggacaaggccgccgcggaagccgcggcgctgccggagctcgccctcgcgccggcggagaaagacgcg

SEQ ID NO: 41731 - DNA, 574 bp, Setaria italica
  misc_feature (1)..(11): n is a, c, g, or t
  misc_feature (59)..(59): n is a, c, g, or t
  misc_feature (66)..(66): n is a, c, g, or t
  Peptide Sequence Number=SeqID_107705
nnnnnnnnnnnttcgttccggttcggtacgttacgttcttactttttttgttttttttnttttttntttttttttttggttcagcagcagcaatacatgcatttctggattctgatcaactagagagaaagagtgaaccttaacaacagttgtgaaaagagaaacaacaggaagagattcatggcgtcgtcgtctgattgctgttggttttacatgtcgcgtccaagaaggcaagaaagtgtgtcaagcaggtcgagcggcggtgatggcgtcggcggcggcggtcagttcatgtcggtggcggcggaccatgggcgggagcagccgagctgctcgaggaacttggcgacgcgggcgtgcttggcggcccactgctcggccatcttctcctccttgagctgcgcgtcgcggcggagctcggcgaccttctcccggtgctcccgctcgacgcgctcggcggcggcggcctgctcgagccgcatggtgcgcatcttggcctcgaactcctcccacacctcgcgccgccgcatctcgcgctccatctccagctgctgctcgacgcgcttgagccgcc

SEQ ID NO: 41732 - DNA, 599 bp, Setaria italica
  misc_feature (33)..(33): n is a, c, g, or t
  Peptide Sequence Number=SeqID_107706
cttagtgcttctcttgctggtcctgatgggcgngttttaggtggtgcagtagcaggacctctaactgcagcttcgccagttcaggtggtcattggaagctttctggctggtgggaaattggagctggaccctggatcagcacctgagaaacctattttcggtgggtttcctactgctagcagtcctccgtccaggggtactgaatcctctggtgggcatggaagcccgccaaatgctgctggctcgttcaacacctgcagtcaaccaggctttcctaacttccctcaatggagatgagcttagctgttgctgtccgcctgaccaagctgtggggactaggcttcgttgctgtgttaggtactcccgaaggaactgatggttttcaggcctcaatgtagatcgttgtcatgtaatgtgccatttggttaggtttatgcttatcgatcctttttctgtatttctaactggttacaatgaagtgttagcttcttgtttctcttgatgtgctacaacatagagttgcaccaaggtgatcgtaacataatgttaattagattggggtttttttttttattaaactaaaaaaaaaaaaaaaaaaa

SEQ ID NO: 41733 - DNA, 672 bp, Setaria italica
  Peptide Sequence Number=SeqID_107707
acaagacggcggcgccgccgctgccggcgtcagatgcttcatctgccaagaagaggggccggccgctgggctccactaacaagaagcagcagccgcaggcggcagcgccaggaccaggctgggctggattgaaacctcatgttttcacagtccaagctggagaggatatagcatcaagagtaatgtcattttctgggaatggatgggcagtttgtatcctcacagccaatggtgctgtatccaatgtgaccctgcgtcaaggagattcttctggtggaacagtaacttacgagggacgttttgagattctctctttagctggttcatatctgctgtcagaatgtgctgggatgagcagtcgaacaggtggacttagtgcttctcttgctggtcctgatgggcgtgttttaggtggtgcagtagcaggacctctaactgcagcttcgccagttcaggtggtcattggaagctttctggctggtgggaaattggagctggaccctggatcagcacctgagaaacctattttcggtgggtttcctactgctagcagtcctccgtccaggggtactgaatcctctggtgggcatggaagcccgccaaatgctgctggctcgttcaacacctgcagtcaaccaggcttcagtttaaatatccttctggtatatcttt

SEQ ID NO: 41734 - DNA, 416 bp, Setaria italica
  Peptide Sequence Number=SeqID_107708
agaattttatcgccagagcttacaccagtggtaaaattactactgcctactgcctaggttgaagtccctcaaacagatcattaaaaactatactactggtatagtcgccccaccaaattattctacaaaacagcaaccctatccatctgagcagtttatgggttgacgatgtagtatcgcagcatgttggctaactatattttaggtaaagggggcacccaaatcccaggggacaccaacaatttttcatatcctagggtgtgggcatcccattagtaaatttatcatgctgcaccgtttaaaaattgtcaaaaatattgtatttagcacacacaaaaaaatgactgctacaattcaggttcaaattcgtcctagatgtcattgtgtcaagaaacaatagacaagaatacaatact

SEQ ID NO: 41735 - DNA, 1411 bp, Setaria italica
  misc_feature (1)..(84): n is a, c, g, or t
  Peptide Sequence Number=SeqID_107709
nnnnnnnnnnnnnnnnnnnnnnnnnnnnnnnnnnnnnnnnnnnnnnnnnnnnnnnnnnnnnnnnnnnnnnnnnnnnnnnnnnnnagtttattcatctaaaatgccaagtatttatgaccagaggtagtaacaataacagtttaagaacgacaccatcctttcttaaaccacacatcacagctgctatccattcctcaaataaattcacccagctattcacatacaacaggaagagctaaactacagaaaacgatattcaactctacgggtcatcacaacagttccaattttacaaatcatacacacagcgcatactaatagatcaagaagaaaccttagcttcgaggttctaccgatgatctaatgaaagaccttctccaccatacctggaaagatctaataaggttcggacactcagctcctttagtcgcatagaactggaaccattcctcaaacaaactctgctgctgcctgagtgggagggttagaagacctcgccctaaattctcttccaatgatctgatatcaagacctttggaacagcgctgtagccagccaaaatccaacagcattgtgctgaaccatccgtgaaagagaaggctccgtacgtcgccacggcactgcacttttcctttgccaagtgcaatgaacacgcaagctgatattcggcttagctcatacctgatcatcggtgatgcttgctcgtgcatcctgatgagcctgtcttgcttcgcccacagttctacaaattcctccgccatgtcattgttcaaaaggatgtctaagagccagttgaggttctctgtttggctagatacccgctcgatcagtggcttactccctctaactaccacagcctgacctgtgtgatctgttgattctgtggcctcctcaaagagatcaaccagtgaatccaaacaagaataaaagatttggtacaggctctccttgtttagccctgaggtgtccttttgatagactgaacttttgcttagaagaccatttaccagagattgcatgtcttttcttgctccgctgttggtgctgctagtgacagattggataagctgcaccgtgaggtcatctgagcttttccagctgtgcggacgcaatcttgccagtatatcctgggatattgcttcatcaaacgtgaatcttgcaaagagattcttcagcttgtcttcctcattctcactccagggaacagcttctatgtatgtcaagcatgattttattcctctgtcgaacatgattgaggaacatacctctagcacatcgatggctagcgacacaccggcagctgcaagccaccgcatcggatcaggctcgtacattagttccactgcggccctgaaagcatccaaattctccaccccatccacctctattctcttcccgccaccacccgcca

SEQ ID NO: 41736 - DNA, 444 bp, Setaria italica
  Peptide Sequence Number=SeqID_107710
tgatcgttcctgaccgtaatgtactgaggatgctgtgtcatggaaacccctgaatattttggtacacccatataccccaccactaaatcctgcacagatttccaacaaacactgcctttagctgtgagctgcttctccgctccaagagtagagagcagacggttaagacatatagcaagataagaggaaaaaagctgatacaaaataatggctaaaaagataatgagctaatgtctcacaacgcatgctattctcaacctgaagaggggcatacaggctggtaactcaaggtcaaccgatggttactacagctaggctagtgcctatgataagaccaatccagtttagatcatgcaaagcataacgatccagtttggtgtgtttcaaaattgttctagactatctaaatggtacatgttccaagaaaatctatttccagatgag

SEQ ID NO: 41737 - DNA, 253 bp, Setaria italica
  Peptide Sequence Number=SeqID_107711
gcgaactattacgtgtacgattgatgtgtcagacagtcagtgtacaagacacccccttggccccttcatatgttctccaacagtacgagtactttgtggtagagaagtatgtgtgtcgcagactggaagtcgcttggttggcttcaaaaggtagccaaccatgcatgggagaataagaacttgatcaaaagttcacctctgtatggcatggggccaatgatccagaatgggtgagcctcaagcctattaaata

SEQ ID NO: 41738 - DNA, 1083 bp, Setaria italica
  Peptide Sequence Number=SeqID_107712
cagggggcacacagatctgttgcagaacagtagcaatccgttgatgtttttcacctggttagctgaatgaagcaatttgttgctgttcttcacaggattgctgctctagatctgaatgtctgaatgaaaggaacaccaacaaaaaccacagcaattcatccccattcaattgctaccagcaaagcaacaatcagtaaagcaagctctggactttattttaacaatccatccagcagaaggcagagatcaaccaagcaatccatcaatcaaaagaataagagtatttatgttcatattaagcagccataggggctcgaatcaatcgatctcttactttacaacagcaggaacaaacacaaatccatacagcggcaatgaacaaatccatagctctagtagtacttgtaaacagtagcagcagcaaaagaaaagaacttattttttttttggactcgggagacggcggaggagcggcgaaagatccggcatttccccgctcccaccggcggatccggcggcggagggcaccggaggagggagggggcggccatggaggaggagctcagccgcggcagcgggtgatgcgggagcacccgcggtggtaggggttggcctgggcgccggggcggcagttgtagtagctggcgccgcggcgggagcagggcacgttgtcccggcggagcgcgccgtagctgatgtagccgcggcccctgaggatgcggcggtgcgactccgccgacgcggagccgagctcctcctcctcctcctcggccaggcactcggccaccgtgccgcggcactccctccggccggcgccggcggagaggaagcccaggtccatgtcgatggacgccgacgccgacgccgaggccgccacggccaggagcaggatgagcgccagcgcgagcttcgccatcgcctgagcttcgcgcaggtgctcgacggaatgcaagaaacggcggcggcggcgagggggagaagacggaggaggggaaagcgcgttggggagagagaaagcctgagctgtcttggtgtcttgtggtgatgcgagctcgtgaggagtggagagagagagggtctgca

SEQ ID NO: 41739 - DNA, 432 bp, Setaria italica
  Peptide Sequence Number=SeqID_107713
gagttccaacatggcaagcaagaaacatattggaaatatttagtggcactgttaggttaccttgggatcccgtttgagtaccatgcaatagttagctgagttctattaggaagcttcggagacttctcgcgccagggtttgacagaatagttgctggtagtacagatgctaaccgctgctgataccacattcctttgttcctttttacctccatggcgtgagatcatgtgatctagtgagagttttacccacgtgtgcgtgattttgcgaccgccattgttcgaagaacaatgcaatttgctgactggctgttaaatcttccttcacctgtttgtgtgactgtaagctcgaggcttccttgttcatcctcgttagcctcacagctcaatgaaacaaacacatttttacttgcaaaaaaactagtagcgactg

SEQ ID NO: 41740 - DNA, 912 bp, Setaria italica
  Peptide Sequence Number=SeqID_107714
ctgcaataaaaattcagtgcaaatgtcaaatcaaaggatcactagtaactgtgaaaattgatctcctcacagtaacattagccagcataatatgagatgtattatgctgtctacttggtaaagcgtctagacagagtctttcagagatagtttttaacaagataagattcaggtgggaactggtgttcactttcagagtttgttctttatgaacttttatttaagaatctgaagaatgttacaaaggcctacgtacaggttgcctggtttctccactgctgacaatggaagcatgctgaacggcttagtgtagacctgtcgatttataatcaacagatgagcttttacccttcttttaagttgataaaagaatataagaaattttacaaaagaatttgctcgtaaatagatgttatatgctacacaatttgctgaagtactgaatgcagtaagcacacctccagagtgacctccaaatttacatcgatgtctaagcagggctccttgtcgttatcgctccaagttatacggttactcataaatgctgcaagaattcagtagattcggaaactcaaatgatggttgaagaacagacacatcatacattttgcaggatagctaaccgatggcattgtttcgcagttgcatgagatgtttgcaaattgcaaaggaatctatgaagaatcgttgggcaagcagggcctgaattttacctgaaaagagttcattctgcagctcaatcgattctgaaccctcaaacctgcacgacagcatctcgatggtgcagtcggtgctcgtcggggcgacgcggaggtcgagcaccggcgcgatctcgaagcccaggaaaccgatgcggcggagcgcgcacgtgaaggtgccggggccggaccccgccggcgcgaagctctcgag

SEQ ID NO: 41741 - DNA, 522 bp, Setaria italica
  misc_feature (4)..(4): n is a, c, g, or t
  misc_feature (69)..(69): n is a, c, g, or t
  Peptide Sequence Number=SeqID_107715
accngaaaatacactatgtattctcatattacaagagctggtaccaactctctggatttccaatggtcncctttcccactgaaatgactggaatgtccgtcattgtcccatccccatcgggatcaaagcttcttgtagtgcgtagtggagagaaaggttgccctactaagcttgaaattgttgatcaatcgcatatggagaaggagatacatgttggtcagtccatgcatggtccactttataccgatgaatggtttcatggtatttcttggaatcaagaagagactttgatagcgtacattgctgaagctccaccccaaccaagaacagctttcaatgattgtggatatagaaaggaagattcttctgaggaagactgtaatagctggaaaggacaagggggattggggaagaagactgggggtgaaagatactgcagaaaagggagaccctcattgtttattcttgacattgccagtggagaagtgcgagcggctaaaggcattgcgacatcgttgagtg

SEQ ID NO: 41742 - DNA, 633 bp, Setaria italica
  misc_feature (581)..(581): n is a, c, g, or t
  Peptide Sequence Number=SeqID_107716
tttttttttagtaaaaaaatttaaactaattaagtaattctaatttatcagctagcattacaatatcctaaccgagatcgaacaaaagggcaaacgagcacaattaaagcctctcatctcaactcttttgccccgtgctctaggcctcatctaagcttggtggccaccaggatccttctcatgtcctcctgctgaggtttgcatgttgttggcttgtcttacgtcctcttccttcttcaaccttgctacttttctagaaagagcttctactctgtccctcagttcgttcaacttcggcttaacaaaagtaaaatagtgtgagtagtcaaacatcaaaatgcaaacgcaagtgtttgtagtcgttatgaattgtgcctttgcgcagaaaatcacaaatgcaagtaacaatatcttatcagttatcaaataaacctttacagctcctaaaattgaaataatgcagatatatgactctacatagtgaaaattgacaatttgtgacttgatgacatgttggatgagaaccagaaaaaagagagagagagagaaaggaacaggaggttgtaccgttccaatttaangagattttcctgtccagtgtaggatccctgatgctggttggcggtggggagg

SEQ ID NO: 41743 - DNA, 386 bp, Setaria italica
  misc_feature (339)..(339): n is a, c, g, or t
  Peptide Sequence Number=SeqID_107717
ttattaagtatgaaaaaagaacaaaatattaaatttatatttagtcttttcaagataggttcaatgtccgtacattgctacgggcaaaatgaatatataaatccaccatgttggtacatgcacatattcgtatcacctgctacaaagtacatattggcacaaatattcaagaataggcacaaatattcaagaagaggaacacaagggtgttcagagtagatgcaacgaagcagctcttttcaaggtcaatcaatggattctactcatgacttagctacgacttacgcaattagttttgtaattagctcatgtttaaccatcctaattggcatccaaacntcagactaatttttagccggaggttccaaatgagttcaggaggctaa

SEQ ID NO: 41744 - DNA, 483 bp, Setaria italica
  Peptide Sequence Number=SeqID_107718
gccttcgtaatgtaacgtcgattccaagcctagctatcactgcagcttctagtatttttgtctccattccgccagtggtgtcatgtgcagctactgatatctccactcctttattgttgccttgcagtaatgcaggttttacaatagaccagcttccattatcatccacctctatctcccttagaagtactgcatttggatcagttggagggcgatcatatactccatggacatctgtcagaaatacaacatatttcggacttagaagctgcgaaagatgccgtatgatgacatccccactcaatatggtgcagtccagcaattcgtcaagaacagcatctccatgcaaaacagggacaaagccagcatggagtgactgaattatttgagaagcatcagctgatgcaagttttctttgcttggtagaccacccacaagcaaatggtgacataccaacagatggtattccttctcttgccaggg

SEQ ID NO: 41745 - DNA, 624 bp, Setaria italica
  Peptide Sequence Number=SeqID_107719
tgaaaacaagtgatgttctttgtgacatattgtttccagcttttttaaaaaaatgtatataccaagctgcaaggattggaaaatgatgaccgtcaaacatgataaattgctttggacatcagtatttttgtagttaatatttggtgaatttatgggacagatgtgatctatataaattttgcattctaaatatttaagttattagagcctgcccttgtctctatatcagggatcctggccattgcccttactaccgtcggcagggtggcaatggaggagacctatgccatgctgcagtagggcacgcaagttggtattggcccataccattgaggcaagcttgacatcagggtcgatccagatgagagctcgctcctaggtggtgttgaactggtgttgtgtcgacagttgcccaagtgctcaggaactggtgttgtgcccaagtcggctgatgcgagatacagatgagagctcgctcctaaaccctgagcagacaagataggccaaagagatatgctgacatatgcgctccgagctgcacattaatatttttaatgtaagtggcaggagctctgcctttcaataccgtggagtctttcgttttgttatgttgattggttctag

SEQ ID NO: 41746 - DNA, 399 bp, Setaria italica
  Peptide Sequence Number=SeqID_107720
acaaaggggttctgcccacaagcttgaagcaagcaggcaaggcagtgcgttaagcaagcaggcaagatcctgcaaccatgaccactgctggaggagcgagaactgtttgaggggcaaccatgaccttcagcaccttccacgatttaactcaaccttactagcagagctgacatgcttcatgctaactatatagcaagtggttacataaggtgagtggcacttcttagaaactgatttcaccattgaaattatgtgctagacctaaaaaaatgcaaatgtaccttcaaatgttcccctttttttggtctttgtaacaatttggtcttatcttccaaagtggtaaataattgaaatagtagagagaattgtatgaaatttaattctatgattggggaaatt

SEQ ID NO: 41747 - DNA, 401 bp, Setaria italica
  Peptide Sequence Number=SeqID_107721
tttttgtaattctagatcatcggcggcaacagcaggcgagctagcgttggatcatcagccgcatgtacagaaggcccacttactcttggcgcgcttgggcggcgtgtcgtactggtggctgtcgccggacctgtacccgccgtcgccggcgctgccgtactggtccctgaaggccggcggtatgcccgcctgcgcgtgcccgggtccggccgtcgtcttcttgccgtcgcgggctttctggaatatgacggtgaagccgtcggccgtcgccgggttcttcacgtcccactccccgaacttgggcagcggccgccctgctctgcccggcgtcgccatggccgagagggagctagcccggacccaacgacggagggacgcgacgcccggccgtcgccggggac

SEQ ID NO: 41748 - DNA, 1500 bp, Setaria italica
  Peptide Sequence Number=SeqID_107722
cttccgaggtttcaagtcaaccacaatgacagtgatattgtcctggtccccttcttcagtgcgagcctcataagataatcagcagcggattgcgcagcaggatcagtggattcatcaccctcatcacacaatgatgttgtaacaccattgttcttgtgccacaattggatttgtcgccgcgcaactttgcatgcctcttcattcgacacaacgtcccacagcccatcacttgcaagaacgagacagtcgtcgtctttcgccctaggaatgaccgtaacttctggttttggaatgacgaacggtttcaaatatcgatcccctgcaacaagggtttccatgtccacgttagcaggtaacacaaaaatgggacaagtgctatccaacacacagagaatcagctgaactgttggttcaactaaattttcaggtgaatttggaggaacaatattgtccaaatgttaaacgcaatagcaaagctgatttgagtagggtgagaatgtgaacaagtccaaccaaggcccgttgttaacaatggtccaagctgcagccacttgcatgaatcatgacataaggtacctttgtggtgtcgataaaagatggcttttctactttggagaagcaactgcttttcctaatcacatctgcattctgagttctagcatagaaatatatttaagttcgttttataacttcattgatagcattagagccaatatccaagcagtcaaattccattacataatttcatgagagtatcaagtctaacatgcttcctatctcggatagagacaagctgttcaacccaaatcgatgataagcaatttttacaactatagcatggtaaatggaaataatggcggacagaaatttctcatcttacaaaatgcccatcacactggcaacaatcacctttagttcaacagagtctttcaacaaaatggcaagagtaaaatttgcctgggtcaatatgaaataatactccatttgattcatcaacatgcttgcctaccataaacaacaataacaaccaggaagttgtgacatcaaattgcatgatcttaagattctacataccgcaaaattaataccaacatcaactagttgcttagagttgatcttacaaagctttgtaaattctaatgttgcaaaacccataatttccagctcacttgaataaggaacaggttattctacctaaatcaagcacatgaatgagcattcatacctattgatcgcgacatagcaagtataccggacacccggtaaccgttccattggatgaccttgcctcccagggcctcgatcctccctcgctcatcctttctgtcaggcttgtgatcaatggacaacgccaccggctccttccctcggcagagcacaacacgtgaatctccacagtttgcgaccacaagatgagatgagcacacgaccgcgacaaccgccgtggatcccacgttctccgcggcaactggcctggactccgggacaccaccgacgtag

SEQ ID NO: 41749 - DNA, 1277 bp, Setaria italica
  misc_feature (1)..(30): n is a, c, g, or t
  Peptide Sequence Number=SeqID_107723
nnnnnnnnnnnnnnnnnnnnnnnnnnnnnntttttttgtgttatcataaaggtaacaatatgttaatttcagtgaccgtctcagccgcttcgctctttacaagttcgactatcatacagcattacagggagtatactaaaagtgccagggctcaaggtagaagatgactgaagaacattgtagccaccagaattcagcatgggggtaaacatcattgccccctagatggaaaatgcatctagcatatacatgtacaattcttgaggcccaacggaaaaaaactgtgggtcaagtctcacgtggacgaccaactagcagtatgaactcttcggacatatcaaggttagctactcttgatgaatccagctcttgttatgagttgttcttaagcttcttccgaggtttcaagtcaaccacaatgacagtgatattgtcctcggtccccttcttcagtgcgagcctcataagataatcagcagcggattgcgcagcaggatcagtggattcatcaccctcatcacacaatgatgttgtaacaccattgttcttgtgccacaattggatttgtcgccgcgcaactttgcatgcctcttcattcgacacaacgtcccacagcccatcacttgcaagaacgagacagtcgtcgtctttcgccctaggaatgaccgtaacttctggttttggaatgacgaacggtttcaaatatcgatcccctattgatcgcgacatagcaagtataccggacacccggtaaccgttccattggatgaccttgcctcccagggcctcgatcctccctcgctcatcctttctgtcaggcttgtgatcaatggacaacgccaccggctccttccctcggcagagcacaacacgtgaatctccacagtttgcgaccacaagatgagatgagcacacgaccgcgacaaccgccgtggatcccacgttctccgcggcaactggcctggactccgggacaccaccgacgagcctgctcgcccgccctgacacctcgtcatctaccctctggaaacatttgcggaacagctcgtcccagtgctccttcatgtccgcctcgcccacttcccccaaatcatcgccaagcagccccagctcctggctcaagagcacctggagcctttcccggcagtaattcgccacctcggcgccgccgtggccgtcgaagacgccgaacaggtgcgcgggcagcctgagcgcgtcggcgtcgaggcccagcccgtcgaggtcccggcggctggcaagcaggcgcaccggcaacg

SEQ ID NO: 41750 - DNA, 415 bp, Setaria italica
  Peptide Sequence Number=SeqID_107724
ctatggttccttgaaaagggtatagcttagtcgacatggaactaattttatattagcaaatgaaacattcgtacaagaggcccactgtcgtattctcagttccttattgttctgcatgtctttctctgcaaaatggtgtattgatgttactcatgtcagtcggactctattctttaataagggagcttgtatttgatacgtttggttaaggaattggtcttgcatttgatctacttattaacagaagtggactactcaagcatggttacttatttttcatcattagtcattcttttactaactgctttgacctgcactacatgggcaagttgcaaatctgcagagttggggatgacctgttcttgtaaaattgtaatgcattgcaaagggatcagggttcatgtttaaacttatg

SEQ ID NO: 41751 - DNA, 919 bp, Setaria italica
  misc_feature (1)..(43): n is a, c, g, or t
  Peptide Sequence Number=SeqID_107725
nnnnnnnnnnnnnnnnnnnnnnnnnnnnnnnnnnnnnnnnnnnctagtttttttttttttttttaaacctaaacagaataccaccaagtctcttgcttcattctgaactttcgatgagcatacctccatacagagtattaccaacctactcagggttaaacccaactccaaaccatttttaataatctagctcccaaggactaaaacctgatccagtctcataaactctcaagataaatacttcttcccaggtgcataatgtagataaatttaacaccttacataccaaaaagtactaccactataacttaacttaggattaaggtaaactccatagctgtagagaatcaattcacaggaaccgagaagctcaaatcaaacgaacccatcactcatgccaccagagtgctggcggcggtggattcgtacttccaggaggcggggatcttcttggcgcggcggtagtagcgggcgaggcggtggaccctgctctcgacgaggatgaggcggaacttggcgtccacgtccgtccggttcctgtccaggtgcttcctgatcgcgacggccttcttgatgaggaagtagaggtcctcgggcacctccggcgcgaggccgcgggccctgagcacgcgcaggatcttgccgcccgtgacgccgtggaccagcggcacgccgtgcgcgtcgcggagaagcgtgccgatctgcgacggctgctggcccttcttggcggcgcgcacgatcatgtcctccacctccgccgcggacgacctgacccacccgggcgcggagcgagcgtagggcagcaccgacgaggacatgcccttcccggggccgtacatgcggcccatggcgacggacggcgcggcggcgagaatggagagcgagcgctacaagtggcgacggcggcgagaccggaaac

SEQ ID NO: 41752 - DNA, 676 bp, Setaria italica
  Peptide Sequence Number=SeqID_107726
cgagaagagcggttctttgttcttacatctggtggggtgaggggcctcttcatgttcaacgtggaaacgaagaagcttgtgaaggtttgcaaggaccattttgccaattacctatgcccatatgtggcagatattggttcttgcctagcagcaatgaaaaagtttttatggtcggatcaagattgaggttttatttctgcatgatcgtgttgaagtccttattggaaaggaatgttctacattctgctttaatttgatgcacttaaaggttccctctttatttgaagatggcgcatcgtgataccatctggcatctgctatgtttatttgcttttctatttttttacttggcatggtttatactgtttatttagttgtaacagggcacaaggttgttgaatgcattagatgcaactaagaaaacattaattcgctgcagtgggtttaatccctcggaaggaatttgggttctgtagtgacatggaaatggaagaaatggagctcgtagtttttttaaaagatttcttgcagcctagtttccatctaattgagaaattaagcattaagacagcctataggttcacaattcttgaaattctacagccatcgttgttgcagctgccattgtttttccatatcctgtgaagcaataggtcaaagctcaatgcaattgcag

SEQ ID NO: 41753 - DNA, 1354 bp, Setaria italica
  Peptide Sequence Number=SeqID_107727
ggtgaagacggttatgatcagcaagtttcttcctccgaaagcaaggcctcatcaggtgaattatctaccattgctttcaaatggtttgttaaaccactgagaaaagtcctctgatgaattaaatatattgggcaaaaggaaattcaaaagtgcccacagctcctcaagattgttctgcagaggagttcctgtcaataacagccgatgggagctccgataaagcttcaaatcagcattgagcttacaagacgcgttctttatgcgatgcccttcatcaattattatatagtgccattgtattttgcttagttttggcctatcatgcttgttcatcaagtactcatatgttgtcaaaaggacattaaacttctgatgaacaatcatctctttgaacattctgcgcctttcttctggaggaccagcataagcaattttgtttatactaggtgcccagaagttgagctcagattcccatccaggaagaacggatgatggtacaaccacgagaaaaggtccccggtcattttttgtttccataaggtagcataacagagagattacttgtactgttttaccaagacccatctcatctgctaaaattccattcaaattattattgtacaatgaaaccagccaacgcaaaccgttcatctggtactctcgcaatttgccaccctgaagataagatggctgatcattcacggtctccttaacactgtgggccagttgatagtacttttcattactttccagataatgctgtggctggtagctctcatcttcgatgtcgtttgcagggtcactcttatcagaaacataagatgcacgtccatctgtggacttcgcattctgcaatttgttcccaagtttctgtagatatttctcagtttcacgcaatagttgcttaactcggtcagattttgcatccttgaccatcctaagatatccctcaacatcgttgttcttaagcagattgattttctctcgttggatcctatccaatttctcccgatgaattcgctctttcctcttgtgaaattcttttatgtacctattgaaacccttcaagcgttctctcttaaccttgaagctgtcctcaagtttctctctgtgagcctctatatcagcaaagaactccttctgcctctcacgaattctcttttgcctttcttccttcattttctgttcaattttttcaagctgtttcacgcgccgtccatgcctatgtttcttcactgctttgatgcgctccaagtcagctgtattgggcttgaaaaagtccatcaaaaactcactgcgtacacgacgttgaagtggcagaagttgaagctttttcaattcaatgacactcttt

SEQ ID NO: 41754 - DNA, 652 bp, Setaria italica
  Peptide Sequence Number=SeqID_107728
ttcgttatttggttcttttgtctacttttcctagtcttcgtaggggttacgggtaacgtaccgggttggtcgttccgaggaccaggtcctggactggtgcgaccgcctctacctcaaggtggagcctcaagacgagaggaatcttgcactgtggcccgcgcgtctcagggatgttcttcacgagttcaccgcaaaatgcacgacactgaaggatcgtctcctcccagaaatggcgaagctgctggagcttgacgacgactacttcggtaaccagttcggtgacaaggctgatacctatgccagattcagctactaccctccgtgcccgaggccggatctcgtattcggcctgaagcctcactccgacgccagcttcatctcgcttctcatggtagacagcagcgttggtggacttcaggttctcagagatggagtctggtatgatgtgccaaccaaacctcacaccctgctcatcaacctaggagaccaaatggagataatgagtaatgggatcttcaagagcccagtgcatagggttgtgacgaatgcaaagaaggagtaggtttattctagtttgtttcttgtttttatttcttgttagtattcctttgttaaagttagttaaattttccttagtttcccgttttggttt

SEQ ID NO: 41755 - DNA, 515 bp, Setaria italica
  Peptide Sequence Number=SeqID_107729
taggaaaataaaagaacttgcatcaatagtcattgtttacgtgaactcgttattacactatcacagagccatacataaaagcatagagacattacactaattgagcaccataggaaaactacatacacaactttgattataagctcctatctattccttttatttagaaggttcattatatgcactaatcacttctaatgtcacttgtgcaatttaatgaataaaacttaacacatgcaggcccaacaccagataagtcaggctagcaggaagctagctacgtgcgtcaaaaaatttccaaagtgagagataactactaaggcctaacaaggaagccacaagaatccgcaggtctaaatctttatcctcaaacttcttcaggaaagggtgattctatgagaacataaatgataattcagtacaacttactcaataagcaaccaacagtcagattcactagaaacttaaatcagtcaaaaggcaatgctgaccaagagttctacagcagacatccg

SEQ ID NO: 41756 - DNA, 428 bp, Setaria italica
  Peptide Sequence Number=SeqID_107730
tttttttttttaactaccaacaaggaaaaatctgaatccatgtaattagtatcagttgccattacagccttggatttttgtttgaggcactccacccttggaattaatccaagcaaagaatggaaaacggacaagtgaaataatcatatagatccatcaatctacacgtggatatatatgacacaaacacatacacaaacaaccgacccgccggctcacgtagcataggaatgttcatggtcgctgcatgctggacggccgaattgttgaggctcagctggtggctcatgaagcgggcaccttgccgccggtgagttcaatctgaatggggacgccggcggccctacctgtcgttagggacttcgcggcagatgcagggagtaggtcatcagtggtgatagtgatcatgccatcaccctccgacagct

SEQ ID NO: 41757 - DNA, 376 bp, Setaria italica
  Peptide Sequence Number=SeqID_107731
ttctctacgaccataaaaaacaaatctgaccacatagctagaaattacacgagtacttagactccaaacctattcagcaccgtataactctcagtaaaaaaatgtacttcgtagagccgcatattgtgcttgtacaagttctcaaataggaggaactgtcttcacgcaaggaccctgcctcgatggtaaagcttcctagggcactcattggcttgtgcagtagtgcgtatgtcaagaatcagatggttcagcttcgccttcatctgcaaggaccaaagaagagcaaatcgggaggacgacattcttcagttggcaagaacggcctaatccttgtagctctgcacgaaatgaattacgggtttctgtaaatggattg

SEQ ID NO: 41758 - DNA, 806 bp, Setaria italica
  Peptide Sequence Number=SeqID_107732
tcttcctgcaccaaaagtccatgtcgttttggtagtcaacagggcaaaccatctcagcaactccacagaaatgtgaaacttccgttaacctattagaccataatattggactcagtaattcaagttcaagaatatggaaccaaatgaacgcggccaaccagaaatgtgaacatccgttgaccgaaaagaacagcaaaactgggcacaaggtagaactacttgcagctatcacttgagcatctctgaatgcagtatccagcttcaggtttccaacagaggatgtcgaccacacaccgtacttgatagatttgtgaatatcagcctcattgtaggactttataacaaagaattttgcatttgtatacaccacttggaaatcatctctgttatactgatcagtcctaatgattattctaccctctgggttgccaataaggagccttgatgtataggattttccaattatttctgaggacaatgaacctattggcatttttgctttacttatgttctgctgactcacggaactcaaccttcgattagcatagctgatggttcttgcatatggttgggatctctcagctgacaacatcttacaatggtcagatccaacatttgaaacttcattgttgtatgacagattagtctgcagagaagaccggacagaaggaactgccacttgtgtagactgctgtgatgcccgtcgagcacgaggaagtctagctggcaccatggacccaccagagaattgtcgcttccatggagctggccaacgcggttgttccttggtagaaaagtatggcctt

SEQ ID NO: 41759 - DNA, 523 bp, Setaria italica
  Peptide Sequence Number=SeqID_107733
ccaagggcaatggtattgtcccacctcaaccattatggggacacctccatcctccacagcctactgggtttcagcagcctcccttccagtcttatcctggtcctgtagggtctcttggcaagccaatggttggggcttctgctgcgactatggcctttgcaaatgtccaaccatctggtgacccaactgctggtgaggatcggaaagaacagatgtcaacaaatccaggatctgaacagcccactcatgcttcagctgggccagattctacaggacatggaggtcaagtcaatgaacagctggaggacaaaagaagtactattgttcagggttcggatgcatggtctgctcacaaaactgaaactggtgttgtatactattacaatgccctgactggagaatcgacttatcagaaaccacctggttataagggggagcctgagaaggttgcaacacaaccagttccagtttcttgggacaaagtggctggtactgactggagcatagtaactacaagcgatgg

SEQ ID NO: 41760 - DNA, 379 bp, Setaria italica
  Peptide Sequence Number=SeqID_107734
ttgctctatgttgcccaggggaggtattctcatttctcaggtgataggcaggaccatagagctcccaaaagtttatgtcctttgtgttaagctaccagggcaggtggagatgcatagccaggcagggcctatctcaggtggatcagcactctgactctccatttgtggggcaagctgcagcccttttggggtggggcagttctcaagccactgaggtaataatgttccagtggagagcacaactgacttggctacacagaagagttcacgcaaggaatggggaatagcaggcagcaggaagcctcacccagattccatgcagttggcaaggcagctctcactcccacagtgctctgctaatagtactggactaagtctc

SEQ ID NO: 41761 - DNA, 425 bp, Setaria italica
  Peptide Sequence Number=SeqID_107735
gtcctgacatgcttcacccctttcttccattgccttaatatcttgatcaacctcatcaacatcattgttgaggaatgtaataatctcatgaaggcaaagctttattctctccttatcattattcgataggccactgattggttctgtgaataatggaaaagttctattgcaaatgttgccatctttgcctttattttgagtactaccaccttgaacttctttacaacctcctttacggaaagagtcatcttgccccctcaagagcttagagagaacatatttgtagtgctccatatgatcaacattggactcattctcctcgaaagacttcctcgacactttcctaggcatctcagatccttcaatctccaatccccctggcctagatctgcccaactctctcttatcgtggcctcgctggcctt

SEQ ID NO: 41762 - DNA, 426 bp, Setaria italica
  Peptide Sequence Number=SeqID_107736
ccctccgccaccatatcctccatatctgccactatattcaccaccatgaccagggtaatgaccatatccaccaccatgcctagggtaatgaccgtatcccccaccatgtccatggtaatgaccgtatccgccaccataccaaccatgtcctggtgtatagccaccatagccaccactgtaccctcccccatagccaccaccaccgtatccgcctccgtagccatagccaccatagtactcatgtccatgtcccaacttctcttcgttggtgccatcgccactggtaagtttcaccttctttccatccgattcattggccttgttagtgaaccgatcggtagcggccgctacatcctgcgtgatcagccggagggaaaccagaacaatggcaagcagaagcacggacttgaaagccatgcttttatt

SEQ ID NO: 41763 - DNA, 540 bp, Setaria italica
  Peptide Sequence Number=SeqID_107737
taccaaccgaacaagcttgcgtgttgagcctatatacgagtcgttcctgtgcccactcaccaaacaggttatgcgggatcctgtcactattgacagtggtgttacgtttgagcgtgatgccattttgaagtggttcaatgattgtcttcacaagacggaaaagaggctcatctgccctgtgactaagaaggagctcagcaccaccgatttaaatccaagcatagctctgaggaacactattgatgaatggatgaatcggaatgaggcggccaaacttgatgtcgctcgtaagtcattaacttctgattgcacggaaagtgatatcttacaagcactccagtatgttgatgagatatgccagagaagtcgatccagtaggcaagttgtgagaagagatggattgataagcatgattgctgacttgctgaagaatagctctacgaaagtacggcaaaaggcattgggaaaactcttcgttccatttcaaaagatgacatgacaataaggttgagatcgctgctggagacaatattcgcacaa

SEQ ID NO: 41764 - DNA, 516 bp, Setaria italica
  misc_feature (1)..(26): n is a, c, g, or t
  Peptide Sequence Number=SeqID_107738
nnnnnnnnnnnnnnnnnnnnnnnnnnaaaaattttgttagtttacacatactaattattattacgccattggttcattatattcacgactacaaacgcactgttatgtcctgaatcctggcacatacatacatacatacatacatacatacatacaactcatcaatgtacataggtcattttattttggcacacacgtacgacgtactgatgattgcacgttattcgttcaggcgcttatttgcagctgtttgtaatcgtccatgagtagagaagagcgtgtagagacctaggcgatgtagtacatgggatccggcagcttgaatgtgcgatccccctccggcgcgcccagtaggtcactccactggtcgccgatgttgccgacgatgacgtagccggcgtccaccagcttcttccgctcgccggacttgaactccaacgaatgcatcctcacgttctgtggcttgagcaggagcttgaggtagccggtgtagccggcgctggcgaggttcctgac

SEQ ID NO: 41765 - DNA, 501 bp, Setaria italica
  Peptide Sequence Number=SeqID_107739
gggggccaacttagagagaaaaataacaaactaactaccataagtggtacaattgaaaaaaaaacacctagcagaagtggaacaactgaaagttcaaaccatgaggctggaattcaggacagacaattccaaacatgagaatgaagcagaagactgtaagagctcatgcggtcaggcctagtgtcccaagacttcctctggatttctagaacgtgaaaaggaatcatgtagtctcgtcataagacgcatcatgcatggtcttcgctcttcagaaagtcttgcctaatcaagtctttgtcttccaagtttgataatgctagtgcttgtttagactttagacacatagcaactaagcgtggtaagcttggagttgaattgcttggaacaacggtgatgcatgagtagaatacctcaaacctctcctcctcgatggccttcctcatcaatcggcggaggcgcagcacaggctcctcctcctcgaacgacctgagcggtagtcgt

SEQ ID NO: 41766 - DNA, 725 bp, Setaria italica
  Peptide Sequence Number=SeqID_107740
gtaacagaggcctcagcaattgggacgtattcgcccatacgccaggtaaaattgaggatgggagcaatggtgataccgcagatgatcactatcatcgttacatggaagacattgaattgatgcattccatgggtgtcaactcataccgtttctccattgcgtggacaaggattctaccaagaggtcgatttggacatgttaatccagatggggtagcattctataataatcttattgatgcacttctgcagaaaggcatacaaccgtttgtaacaatatctcattacgacattccacaagaactggaaacgcaatatggtggatggttgagcccagaaattcagaaggactttggctacctcgcagaagtatgcttcatgatgtttggtgaccgagtaaaattctggataacatttaatcagccaaatttgtggttgaagttcagttatatggatggattgtaccctcccgggcgctgctctcaaccatttggtaattgtgcctttgggaattcttcaatagagccatacatagcaggtcataacatgatattgtcacatgcaaatgcagtcagtatttacagaaaaaagtatcaggtacaaaccacagtcctctgagataatatgacattgccatcccttgtctttgcatacgaattatataatctaaaaaggagcatcagctgaagttttctaaaaattttgtttataacaataaaccagtaa

SEQ ID NO: 41767 - DNA, 1774 bp, Setaria italica
  misc_feature (24)..(24): n is a, c, g, or t
  Peptide Sequence Number=SeqID_107741
gctcatgctcctcgaaaaagtaancgggggggaggggaggggaaggagactaggagagagagagagagggagaggacaatggcaagcgggctggtctggctggcgctcttgctcgcgcacgggctcctgtcgtggccgtgcgcgtcggccgccgtcgaccgcggccagttccccgacggcttcctgttcgggaccaccacctctgcgtaccagattgaaggcgcgaatttggagggtaacagaggcctcagcaattgggacgtattcgcccatacgccaggtaaaattgaggatgggagcaatggtgataccgcagatgatcactatcatcgttacatggaagacattgaattgatgcattccatgggtgtcaactcataccgtttctccattgcgtggacaaggattctaccaagaggtcgatttggacatgttaatccagatggggtagcattctataataatcttattgatgcacttctgcagaaaggtagggttaacaaaatttgtgcaatgggaacaaggtagggttaacaaaatttgtgcaatgggaacatgattttgaagacaggagcttttaacggcatccataaataggcatacaaccgtttgtaacaatatctcattacgacattccacaagaactggaaacgcaatatggtggatggttgagcccagaaattcagtatgtctattgctgtggcataaagttgccttattatattccttgattagtttttatttgacttatagtaaataccttccaggaaggactttggctacctcgcagaagtatgcttcatgatgtttggtgaccgagtaaaattctggataacatttaatcagccaaatttgtggttgaagttcagttatatggatggattgtaccctcccgggcgctgctctcaaccatttggtaattgtgcctttgggaattcttcaatagagccatacatagcaggtcataacatgatattgtcacatgcaaatgcagtcagtatttacagaaaaaagtatcaggggaagcaaggtggtcatattgggatttctatgtgctcgagatggtatgaacctttctcgaatactacagtagacatactagcagttgaacgtgctctagctttcgatggtccatggtttctagatcctatcatttttggtgattatcccacaaagatgcgtgagatcttgggtccaaacttacctgagttcacatcgcaacagaagaagaaattgaaggctaccaaattggattttattggactcagtcattatacaacattatatacgaaggactgcatcttctcaccatgtgaaatagatcctattgatggtgatgctcgagtttttagttcaggagtaggagaggatggagtacttattggtgaagtgacaggatcgccattcttttattctgttccagaggggatggaaaaagtggtcatgtactacatgcaaagatacaataacataccaacatatattacagaaaatggatacgctcaagcaagcaacagcagcatgactgccaaggattttaccaacgacacaggaagagttgattacatccgtgactacctgacctttttggcgtcagcaataaggaagggagccgacgtgcgtggttatttcgtgtggtctttactcgactgcttcgagtggacgtccgggtacacgcaaaggttggggctctaccatgtcgacttgaagacgctggagaggacgcccaagttatcggcgaagtggttcagtgagttcctcaagggtggctcgc

SEQ ID NO: 41768 - DNA, 882 bp, Setaria italica
  Peptide Sequence Number=SeqID_107742
aggaggttgttaaactcattacacacttgggtttgagtcataggaagttagaaatgactcaattagccgtctccttcgtcagtcagtgctaaagctttgcagtcaattttgaaagcaaaacgtaaaaaaaaaatcatttgaagatctgcttgaagggaataatcgatagtaattgatgattgcaatctcattcatgcagacaggatcgccattcttttattctgttccagaggggatggaaaaagtggtcatgtactacatgcaaagatacaataacataccaacatatattacagaaaatggatacgctcaagcaagcaacagcagcatgactgccaaggattttaccaacgacacaggaagagttgattacatccgtgactacctgacctttttggcgtcagcaataaggaagggagccgacgtgcgtggttatttcgtgtggtctttactcgactgcttcgagtggacgtccgggtacacgcaaaggttggggctctaccatgtcgacttgaagacgctggagaggacgcccaagttatcggcgaagtggttcagtgagttcctcaagggtggctcgcttgtgggaacaaggccccggaaagaaaatccccagtcgaagcagtacgccgcgcagtaatccatcaaccgtgttctcctcgatcgccggtttagtttgctacgtgaaagttaccgtggcttacatgcccaggtcatgcttcgttgaataaaatggtttgggaaggtgtcttgtccatttgtcattggagaaaacgcaagcaaaccgccgttgagtgaaaaccgttgtgttttgcctaatctgaatctttttctttattaatataagcggcagcttgattcgtttaaaaaaaaaaccgttag

SEQ ID NO: 41769 - DNA, 2645 bp, Setaria italica
  Peptide Sequence Number=SeqID_107743
tccttattttgtctgatcgtggacctgagtggagggttgagagaggcagaacatctggagggcctgctctgccctgcagagattttgtggctggcaggtgcagaagaggcacgaattgcaggttccttcatgaagatggagggcagaggccatttgaagatcattatcctgctgacccaagggaaagatatgggtttcagaacaaggaattcatggattcacgagaaccaaatgactatttgcgtaataggcaatctcgagatcattatgatgatgggccatgggaaagatctgaaccccgaagggattatcggtctactgaacaatgctataattttgccaaagggaggtgtgctagaggtgctagctgccgatttgctcatggtgattctgcttctcatggtggatggagagatgaggctagggaaagtgcccatgatagagttggccctgattcatcctatgggaataggactgagcaccgtagggtaaataaaaacccttgtaagttttttgctgaaggtcgatgtcgccgtggtgaaaattgtccatatctccacgaggaagctccccagagtcagataggagtgagtgcacctgatgagcctttgaattacagtgatgggcgttcagcaagaggagactactcaaactggggtgaaacaaaataatgctatgcgtgcaacttctcagattttatccagggatgacagggaaaatcctatttctcagaatattggcagaaatgattctcattatgagtacgagaaccggctttcaaaagatgctggaaagagtcagtaccagattattcctcaggaagattttcgttcacaagtggaaaataaacatgaagttgctgtttcacaacagccacagttattaactcctgtccagattactgcagataacatgaataatgagaacatatccggcatgggtggtcagaatgctcctgcaacagagatgagcatgcaatcgggtatgcatagtgctaatataatagcagagcaaagccttggacaaatacttcagagacatgacgcgattcctcatattcctgggccatcaactcttccagtcaccacccaattgcagaaggttgcatcctcattccattcgaatagccatgcgcaacagagcaactttcctgtacatcagaacaggcaagagcaatttgtagttccacaggcatctgcaaataatactcccagcacgcagggccagccggttgctcctaatatgggacatggccaacatggctatggtctagagccacaggcactgccaaatccctctgcacataatggacataatttcagtgttgccagtcaagttccacagaatcttccaacaactgtgcttcaggcaacagtcgacatccccaggctaagtcaagacagtggttctcaaagcatacgaaacatgcagaatttccagcctccaaatatgcaaaatcaacccttgcaagggttacctcttgtgccaacttccagctcaactgatgtggctggagttcctgtttctcacaatgcagcaaaaagtgaagaagttagccgcgttactgcatccttggcacagtactttggaaataccgcttttggtactggtacagttggattacaatcatcacagcctaatgttaattcgagcctgatggccacttcatctgctgcacctccagctgtccaacccaatcagtggccctgggcgcagcaacaaacaggcatagtccaacctggtcttgctgttccatctgaacagcagcagcaggctccccagacattccagatgccaatcgccgtcggtattagtaatggtaactctatgcacttacctcatggaggtgcaccgtctggtcctgctgccgctgcttcagtggtcaatgaaactgtgcctccagaaagtaagaaaggagagaacaaagatagtgacgctgaggctcatgaggatggtgataataagaagagcaaggactccaagacactgaagatgttcaaggttgcacttgcggactttgtgaaggaagcactgaagcctacatggaaagagggtcagatgagcagggaggtccataaaaccatcgtgaagaaggttgtcgacaaagttacaagcacggtggaaaatacacctccaacgaaagagaagatcgagatctacatgtcctactccaaagaaaaactaaataaactcgtacaggcatatgttggcaagtatgccaaggcgtaacatttcacgaataacattgctccaagtctgaggttgaaattactgaaagcgccacattctgcgatcaaaaggtttaggattcttctgtaaaatagtggtgcgctggcgcttcacacccaggttttgcttgcagtttgagagtttatagtgttgcttggttagacggacaggtggtgccgctgctagcgcgcgatggcaccaaacttctcagctgtaacttttgtagaagatttatttgaagattggactttatgtagcgaagtacgcaaggtgtggactataggagataaacttacatgtggtgtggtgtgtgctcagcaagttagcaatcagcatgcctctgagttctacttcctggtttgtgtgatactcggttgaatcgtgactgatttatgtctcatttcgatttgccttct

SEQ ID NO: 41770 - DNA, 458 bp, Setaria italica
  Peptide Sequence Number=SeqID_107744
ttcttgcttgtgcttgttgtttactcagcatggatctgcccatttgaactagcatttctgagacatctctcatgggaactttttctggttgagaacattatcgatagcttctttgcaatagatatcattctcactttttttatagcatatctggatcagaagtcgtatcttctagtggataatccaaaaaggattgcagctaggtcagcatctccatcttaactatgttatacctactagaagcatgcactaaaaataacaattgccatgaaactgagaatagcctgtatgcagatatatctcctcctggttcatatttgatgtttgttcaacaattccgtatcaatcatttggctactatttaaaaagcgcgcaaatggtcttgcctataggatgcttaacatgcttcggttatggcgcctccgacgcctcagtgtctttatttgccaggtatgtaa

SEQ ID NO: 41771 - DNA, 514 bp, Setaria italica
  Peptide Sequence Number=SeqID_107745
gaatctgggagacgttcttgcttgtgcttgttgtttactcagcatggatctgcccatttgaactagcatttctgagacatctctcatgggaactttttctggttgagaacattatcgatagcttctttgcaatagatatcattctcactttttttatagcatatctggatcagaagtcgtatcttctggttgtccaaggaagttgccgtaccagaaattttgtaagttcccttccaaacaccagcagctactccttttatagttccggtgatgttgatattactgctttgtataacttaagcaaaaggacagaagtagaaaataaataaaaaaagggtttcaattgttagactgatattctattgtaaagcatatgcatcccaagtactatatgccaggataactcagaaaaaatattaaccttctctctacatttgtaagtatcatgcctagatttccaattgtttagtactctacgatcatgcacgtacagcaaacacaaaattaaaaactt

SEQ ID NO: 41772 - DNA, 520 bp, Setaria italica
  Peptide Sequence Number=SeqID_107746
caagcaactctttcaaacctgtcaatatggcttccctttcctccttaatggtcctccatgccttcctggtagaatgaaaagcaagttaaaacttctttctcactgatgcacatgcaatgtaaatcacatgcattgtcacttatgaatgaaatagatgcacatgcaatgtaaatcatagaccatattttatttggaaaataagacaacacacaccacatattgttcaggctagaggccacattacatgctaagacatttaaacatgttgaccatcagttcaactaaacaagtacacaacacttcaataaaaccaacggattccacacgccaatatctgcaaagcattggtcaatctactgcactacttgttctcctagttgaattggatccaatgcaagcggccctctttggttttcatcgttgtgaaggcccttcggttcattgcattcttgcataaaaatattgccatgcagtatagatcagacccctcctcgatatcatcttcttctaaaatccgcat

SEQ ID NO: 41773 - DNA, 360 bp, Setaria italica
  Peptide Sequence Number=SeqID_107747
aaataaagcaaggccaaagaatttggtgaatcagcattgttcataaactcaatgctagatggcgccaaccaagaacggtccatcacgccgatattccttgaggagtcagtcaacgatgagttgacatccctgatgacatgtgcttatgaggatgggactccgtgggggagagatgttgggtgggtgtacaacatcgcgacggaggacgtggtgacaggattccgcatgcaccggcagggctggcgctccatctactgctccatagaaccagccgcattccgtggcaccgctccgatcaacctcaccgagcgtctcctccaaatctacgctggtcaggtggctcccttgagatgttcttct

SEQ ID NO: 41774 - DNA, 460 bp, Setaria italica
  Peptide Sequence Number=SeqID_107748
ttaacttaacttatttcgttcgttacggttaggttacgtttggtttgttaggtatttccgtctattgcaccggcagggctggcgctccatctactgctccatagaaccagccgcattccgtggcaccgctccgatcaacctcaccgagcgtctcctccaaatactacgctggtcaggtggctcccttgagatgttcttctcccacagcaatgcattccttgccggtcctcggatgcaccccctgcagcgcattgcatacctgaacatgtcgacctacccgatcgtcacaatattcatcctagcctacaacctatttcccgtcatgtggctcatctccgagcaatactacatccagagacccttcggctcatacatcctgtacctcgtcataatcattgcgatgatccatctgatcggcatgttcgagctgaaatgggcgagcatcaccttgctggactgg

SEQ ID NO: 41775 - DNA, 685 bp, Setaria italica
  misc_feature (370)..(370): n is a, c, g, or t
  Peptide Sequence Number=SeqID_107749
ccagaccataaccctttccagcttgaagtaaattatgaatagagaaagcacaagcttcagaatcgccaaataggtgtaagacccctatatattctgggttgtatggcttctctgggggctttctccaagaccttccaagatggtgaaaaatcagcgcctgagcaaccagcatctgactgcttctgaccatgcatccccagttcacatcactagttagcttggaatcagatatcacatcaaatccttttcggtaagtgatccatattctagaagagaaatcttctaagaatgcagcatgcccgctttcggaatctgagccgccagacgactcctcaggtgactccttgtagcatttgccaaggaaccacanatcactggaggtcagaaccttggcgcatcctagaagacgccacatcgaggtgctgcccacaattctcctcaaaatccttgaccaaccataggaccctgaggaggactttggcgacttcttatcgcacgtggaatcctgctggccctcaaagatggtgaaaggaggcgtgaagacgctggataggatggagatctttggctgcttggagctgctatcttccttgtgctcagaggtagaagaagaggttgcaggtgcggtgtcttccttgcacaaagaattggatgacggtgcttctcccctctcaggcaagctcgt

SEQ ID NO: 41776 - DNA, 440 bp, Setaria italica
  Peptide Sequence Number=SeqID_107750
ttacgaattcgatccgcagaagcgggtcgtcaggtaccgcggtcagcacgagatttgtggtcgatgccccgtcaaggacacgtgctcgccgacgatgacggcgcgcgaggtaaccatgcccgtcgacccgtggccgtactccgaggccggactgttccatcgcggtatgacggtgtgcgtcatggtcgctgctctggccctgccaggtggcatgctcttcgtggcacggacggtggcggaggtggtcactcttatagcgactatcgctatcgtctgcctggctctcgttcccaccgctgcgtccatgcgccggcgcccagtggacatcccggaggggctgccgctggaggcgtcagtgccggataccgggacggcgcacgacgacggtcgtgtccgcgtgctcggcgttcatggacaggcgacgaccgatcgagccggtg

SEQ ID NO: 41777 - DNA, 640 bp, Setaria italica
  misc_feature (544)..(544): n is a, c, g, or t
  Peptide Sequence Number=SeqID_107751
tttactatttctccatgccctcttgggggtagttgtaaatcaccaatttgtgctcgtctacaggagatattgaagcattctaatgactgtcaaacaatagattgtttgtatggttactgtaaacaatcaaaggaggctatttatcactacaataattgtgttaataagcattgtcctatatgtagcaaagcaaaaagtctgagccactattgtgatcaaactaacaagaggaatacatttgaaaggagtatcaatggggcaaatggtgacagaatgggcatcaacatggtcacagctgaaacctttgacgatcaaccacctatgtcaaagcgtttaaggttgcaactcctgcctcctaatgtgtctcatagtgctgatgcctctgttcctcaagcatgtacaggtattgtgtcacagcaagctcatcctaaacatcttgggcaggataaaatgatattcccaaaacaagagcaaaaacattgagatcgatatacaatcaccacgaaaggttgagataattaggtcttgtgctgttggtaaaacngatgccatgatgtccaagatagagaaaacaaagagaaaggtgtttcactcatggaattgttcactcctgagcaaatacatagaacacgtccgtagt

SEQ ID NO: 41778 - DNA, 487 bp, Setaria italica
  Peptide Sequence Number=SeqID_107752
tcctctttcaccatctccgacattcttgacgccgccgccgccggtatgagtgccgaggccgatgacggaagcgacgacgacgacgacacggcggcggccagtgtctatgaggagctgctccgcgaggtgcacgagttcctctgtcgctcgtcatcgaaccagatggccattgacgcactctcgcttgttcttcccatacccgtggcgaagctgggggctcaaacggtatgctgggacattgccgccgctatccttaagttcctcgtgacgaattgcagtccgagggacttgctctccatcctctgcgaggcattagatgcgccaatggagctaccaaattgctcatccagcttcgttcttctactcaatgcacttactgaagaggcgacatatcgagcaagtaaaagtggtacttcctgctgtccttaaagttatgagtgctactgtatctgaatgtgatgaggaacatggaaaggctgctgttgat

SEQ ID NO: 41779 - DNA, 594 bp, Setaria italica
  Peptide Sequence Number=SeqID_107753
ggccggatccggaggattccgcgcagattgatactctggctagtgagttgaggacaggtggctgtccctgttcaggttcaataatctctaagaatcacctatcagtggaaggagaagcacagataagcaccttgattactaaatcatcgtcaggtgatcatatacataaaggaaaagtaatggtcaattctgttgcagttctgtgactcagtggcagttttggtcgaacacagcagtgcttcggccgcaaagagtttggttcagtgcagcttgttcggtgacgtacaggaggtggctgatgttcattcgggggcaattctgcccgcgtttgaagttggaggtgaaattgtcggccaagagctgcttccggacaagtatcagtatcgcgcagcatattctggggaaggtttcctgtgttcggcggatgaagttcaggaaaagaaacagaatcaaagctttggagaataaaccagagttcgtgttgctacctgaggaccgtcaggatcgctcaacagtgtgtcccaaatatgaatagtatggcaaaattgaactcctgggtcagcagcaacgttacatctgaagggatagaaaagg

SEQ ID NO: 41780 - DNA, 422 bp, Setaria italica
  Peptide Sequence Number=SeqID_107754
tatttgctcggaaaaacaacgtcaaaagaataatgagatgctgccaaatcatgggcaggaatgaccaggaggaattgactgctgcacagattttctacccttgcatgcagtgtgctgatatttttttcttgaaggctgacatatgccagttggggatggaccaaaggaaggtcaatatgctagctagggagtactgtgatgacatcaaaaggaagaacaaaccaattattttgtcacatcgtatcctgatcttgatctttttctctctctctacattctttggacatatgtgtctagtaatgaaatttaggacaagtggttgttcactgctgggtttgtgaaaacatatatttttcccttaaccttaaatgcagatatgctccctggttttaaagaaggtcaggagaagatgtcaaagagtg

SEQ ID NO: 41781 - DNA, 1524 bp, Setaria italica
  Peptide Sequence Number=SeqID_107755
cgcatccgccaccgtccaccccgccgccaccgacgcctccgccggctcccacccttcctccgccgccgcggccatggacccctcgccggcacccgagtcagcgccggtcgcatcctcttcctccgcccccgtccccgccgcggccgccgccgtagacaatctggcgggggccgtggcggcgatgacgctcgaggagcggttcgcgacgctgcgggggatcggggaggagtgcatccaggaggacgagctcatgcgcctgctgcagaacaagcccgtccccatctgctacgacggcttcgagccatccggacgcatgcacatcgctcagggcattgtgaaaacaatcaatgtcaacaagatggtccgggctggatgcaaggtgaaaatctggattgcggactggttcgcgcagctcaacaataagatgggaggtgacctgaagaaaatccagacagtcgggcgctacatgatcgagatttggaaagcggccgggatgaaccttgatggcgtggagttcctttggtcttcggaagagatcaacaagcgtgcgggcgagtactggccacttgtgatggacattgctcggaaaaacaacgtcaaaagaataatgagatgctgccaaatcatgggcaggaatgaccaggaggaattgactgctgcacagattttctacccttgcatgcagtgtgctgatatttttttcttgaaggctgacatatgccagttggggatggaccaaaggaaggtcaatatgctagctagggagtactgtgatgacatcaaaaggaagaacaaaccaattattttgtcacatcatatgctccctggttttaaagaaggtcaggagaagatgtcaaagagtgatccaacatctgctatctttatggaagatgatgaggcccaagttaatgtgaagataaagcaagctttctgtcctcccaaaattgttgagggaaatccttgtttggagtacattaagtacattgtgttcccctggtttggaaggtttgaggtcatccgcaaggaaaacaatggtggtaacaagacatttgtaaccatggatgaactcatttctgattatgagagtggtgctttgcatcctgccgatgtcaaacctgcactggcaaaagcaataaatgaaatattgcagcctgttcgtgatcacttcaacaacaacagcgaagccaaagttctgcttaatactgttaagaagtacagagtgaccaattgaggagcgggagctatattctcttcgtggggtgaatttcgccttttgcgattttggaatactgatccatttactgaataccaccagacccattagatcatatgttgcttagtgtacaattcgagatacatgcattttatggtctcagtgtgtctttcactgcgccctgcaacatagtaacaattattttggacatatggtactgaagtttaccctttgagaactggagttgacccactgggccccgcaacatagtaacaattattttggacgtttcattacatatggcactgaag

SEQ ID NO: 41782 - DNA, 853 bp, Setaria italica
  Peptide Sequence Number=SeqID_107756
cggcatggtgcacgcgctccggatacggaacggcgccgccgagtcctacgcgtgccgcttcaccgagaccgcgcgcctgcgccaggagctcgcgatcggcaggcccgtcttcccaaaggccattggcgagctgcacggtcactccgggatcgcgcgccttgccctgttctacgcgcgcgccgcgtgcggtctcgtcgatccctcccacggcaccggcgtcgccaacgccggccttgtctacttcaacggccacctcctcgccatgtccgaggacgacctcccgtaccacgtgcgcgtcacggacggcggcgacctcgagaccgtcggccgctacgacttcgacggccagctcggctgcgccatgatcgcgcaccccaagctcgacccggccaccggcgagctccacgcgctcagctacgacgtcatcaagaagccgtacctcaggtacttctacttcaggcccgacggcaccaagtccgacgacgtcgagatcccgctcgaccagccgaccatgatccacgacttcgccatcaccgagaacttcgtcgtggttcccgaccaccaggtggtgttcaagctcggcgagatgttccgcggcggctcacccgtggtcctcgacggcgagaagacctcgcgcttcggcgtgctgcccaagtacgccggcgacgcgtcggagatggtgtgggtggacgtgccggactgcttctgcttccacctctggaacgcgtgggaggacgaggagtccgacgagatcgtcgtcatcggctcctgcatgacccccgccgactccatcttcaacgagtccgacgaccgcctcgagagcgtgctcacggagatccgcctcgacacccgc

SEQ ID NO: 41783 - DNA, 558 bp, Setaria italica
  Peptide Sequence Number=SeqID_107757
gggcgagctcggatgcccggatgctgccgaggagcgcgagccagcggcgggagacgcaggcggaggcgccgcggccgcggccgccgggcacgcggcgcaggatctcgaagaggcacccatcggggagcgcgtcgagcgacggcagcggcagctgctgctgcctctgcttcttggcggccctcaagcactccgtggccgccgccacggcgaccgcggatgccgccaccagcgtgcgcttccgctgctgcacggcgccgcggcagaagagcccggacagctctgccggcgccgagacgaggcacccgccatcttcgtaagcgcagaacgcaggcatgtctccgaatctcccacgaccaaagggaccccttcccctcccagtactcgaatcaagaccagaagcacgaacaagaacgcagccaccgccggatctgaggcgccggtgagggccggaagcatttacagcccgccggagcaaggaaaacggaaccctatcgccgccggcgacagggaaaaagggaacgaagggaaggaaggggaagggggaacctctggggggga

SEQ ID NO: 41784 - DNA, 439 bp, Setaria italica
  Peptide Sequence Number=SeqID_107758
ttgctggcactgccatatttgaagtttgtttcattctgcaccctaaactacctttaccctccatatctttactgagacatgataagaaatcttggtttgtctcagagaaatccgataggagcatggaaatattatcatcagtatcattagcagtatcttcaatgacaccactactttccattgtttctattgtatcagcctttctcacaatgtttgggcacactgtggttgatgcatctggaagttggaacgctgaacacggtactcttctcaccttaaacataggtccaaaattccctccatcacacacctcacactcaaacagtgaaccagtaactctatcatgccagtatgatgtaaacccaacaggccatatctggtaggaattatggtagcttgtccgattgtcaatttctcccaagctggtaataaagaaatc

SEQ ID NO: 41785 - DNA, 2072 bp, Setaria italica
  Peptide Sequence Number=SeqID_107759
tgcatctttcagagcatgtttgatagtaaattttgtgtcggaaaagacttcctaacaagcccatctgttttgaaaaagagacttatacttatgggcattgcaatacttttgctgtcgccctgccttgtcatctttccattggtatatatgtttctgagacatgctgaagaattctacaatcaccccagtacagcatcatctcgaagatggtcgaatttatcaaggtggattttgcgtgagtacaatgaggttgagcatttcttcagacacaggatgaacaattgcactctccactctttgaattacttgaagcagtttccaactccattaatatctattgttgcaaaatttgtttcgtttgtatctggtggcttggctggaatccttctcatccttggattcctgggtgaatctatccttgagggccatgttttcggacggaatcttttctggtatactgttgtttttggaaccatagcaactgtaagtcggaaagttgtggcagatgagcttcaagtgattgacccagaaggagccatgacccttgttgtccaacatacacactacatgccaaaaagatggcgtggtaaagagagcagtgaacttgtgcggaaagaatttgaaactctgtttcagtataccataacaatgcttttggaagagatggcctcgatattcatcactccttacttgctcatatttgtgctaccaaagcgtgtcaatgatattttgtgcttcatttcggaatttacagtttacgtagatggagtgggtgatgtatgcagcttaagtttgtttgacttccaaagacatggaaatagaaactatggttcaccacttgattcagtaaaagatatgaggagctcccaagggaaaatggagaaatcattattaagtttccaaagcacatatacatcatggcagccaaatccagatggcaagcagtttttgtgcaatctccagagattcaaggaaaagcaaattcgtaaatatacttttcaagcaatggaagattcacaacttcggtcaagtattggtcaaagtggtggcagcattttccataggctgctttccagagaggtttttctaggcaatgggattatttataactttagtccattaggactgcttgacacagatcaaagagcttatccatatattctggactggtattacacgtgtcactctgaacgcttaggcagagatgtggactcatctacccaccgcgatgaaccaggggaggatatatggccacctctgactgggagcaagccattaactgagattgaagaggaggaaatctgggattctaatctatatgaaagagctcgaagccacttggaggcatcaacatcaagcgcgttctttcagcgtgccaccttcaagcgccagggcagggaacaaaattctacaagctgcccttggtgggcccaggcctctatacgccgaactgatccacgagacagttatgttgagcctcctcacagcagctttattgaacctccagactttgcaaatcactacacatctgaccattgttctagccagcacagtgattgggcactgaacactgcacatcctaatggtccagaagacagtttccatgagcctccgaactttggaaatcattatgtgtctggctatcattcaagctatcacagcagcgatgtgtcggagggcaccaaagagctagatcaaagagattacagaaccaccagtagttgcagcccccaggccgccctctccaagacaaggtacatggatgatgaccccgacctggagcagggcctgagtttccattttgctgatatcccacagaacgatgatggaaacgaagacaaagctgatggccatggcgtaaccggtatttgtagctctatgccagccagcctccatgtacggatcgtacctcgaagcagtgacccagtttaatttgaagaaaaaacacaaaaaaatagtcatatatgtccagtgacacgatcagtgatctcgaattaccttagaacaaaaagatgcaaatgttagtttgtgtgagctggcaaggccggcaaattctttgtacagatgaaccg

SEQ ID NO: 41786 - DNA, 1202 bp, Setaria italica
  Peptide Sequence Number=SeqID_107760
cgcgaatctcatccgaccatccatccatccatccatccggcgacatgggcaccgtcaccgccgccgatccgcacccctccttcctcgccgacaaggacgccaaggtcttcgtcgccgggcaccggggcctcgtcgggtccgcgatcctgcgccgcctcctctcgctcggcttcacctccgtcgtcgcccgcacccacgccgagctcgacctcacccgccaggccgacgtcgaggccttcttcgccgccgagcggccgcgctacgtcgtcctcgcggcggcaaaggtcggcggcatccacgccaactccaccttccccgccgacttcatcgccgccaacctccagatccagaccaacgtcgtcgacgccgcgctgcgctgcggctccgtccgcaagctcctcttcctcggatcctcctgcatctaccccaagttcgcgccgcagcccatcacggagggcgcgctcctctccggcccgctcgagcccaccaacgagtggtacgccgtcgccaagatcgccggcatcaagatgtgccaggcgtatcgcatccagcacggcctcgacgccgtctccgccatgcccaccaacctctacggcccgcacgacaacttccacccggagaactcgcacgtcctgcccgcgctcatccgcaggttccacgaggccaaggcgtgcgacgcccccgaggtcgtcgtctggggctctggctcgccgctgcgggagttcctgcacgttgatgacctcgctgacgcggtcatcttcctcatggatcactactccgggctggagcatgtcaatgtggggagtgggagcgaggtcaccatcaaggagctcgctgagctggtgaaggaggtggtggggttccaggggaagctggtgtgggactccagcaagccggacggcacacccaggaagctcatggatagctccaagatacaagggatggggtggaagcccaagattgaactcaaggagggcctcgtcgaaacctacaaatggtatgttgagaatgtcgtctcggacaagaagtagagcgatgccaatggtggtgtcttgttctccattgctactttcacaagctgctgtcatgatttgtactattcctactatggttgttgctcatcaggtcatacaattctgtgttataatttgacccacagattattcagccaacacataacattataacaaacctcttctatg

SEQ ID NO: 41787 - DNA, 789 bp, Setaria italica
  Peptide Sequence Number=SeqID_107761
taacccgaacgaactaacaaataccgacaaggttaccaacgaaggccaaggcgtgcgacgcccccgaggtcgtcgtctggggctctggctcgccgctgcgggagttcctgcacgttgatgacctcgctgacgcggtcatcttcctcatggatcactactccgggctggagcatgtcaatgtggggagtgggagcgaggtcaccatcaaggagctcgctgagctggtgaaggaggtggtggggttccaggggaagctggtgtgggactccagcaagccggacggcacacccaggaagctcatggatagctccaagatacaagggatggggtggaagcccaagattgaactcaaggagggcctcgtcgaaacctacaaatggtatgttgagaatgtcgtctcggacaagaagtagagcgatgccaatggtggtgtcttgttctccattgctactttcacaagctgctgtcatgatttgtactattcctactatggttgttgctcatcaggtcatacaattctgtgttataagttaacccacatagaagaggtttgttataatgttatgtgttggctgaataatctgtgggtcaaattagtatactgctagaaggataattgatcttgaacactttttgttgagagtttaacgaccaaaactgatggatggatgttcttgaccttgaaacaactgcttgcttattgagcaagctcttttgatttgtgaaatatcacaatgtattcaggaaaaaaaatcagtgcttcatatccttaacaaaaaaaaaaaaaac

SEQ ID NO: 41788 - DNA, 620 bp, Setaria italica
  Peptide Sequence Number=SeqID_107762
ggaagcggctctttgtcatgattaataacctccctaccatatatgaggttgtcacaggaactgccaagaagcagaccaagaaaaactccaaaagcagcagcaagaacaataaatctggcacttgtagtgcttgatgtgctcggccttggcaggagtgatcttgacacacttgccatggaaccatgtctcgcaggcatcacagcatatccagaactcatcctgaccgtagttgtcaccacatgaaccacacaatgtgttttcatggtcttcctcttcctcatcttcctcgcctccgctgtcatcctcatcctttggaggtggcatcttggaaccccttgagttgggttctggctggcgcggtggttttgtgccagatttattgttcttgctgctgctttttggagtttttctttggtctgcttcttggcagttcctgtgacaacctcatatatggtagggaggttattaatcatgacaaagagccgcttccctttgctcaaggaggtaaccaggaagagcactccatagacttaaaatacagcttgattgctcatgaggaggaaaaaggaataacaggtaaggacgtaccatcgtctgcctgactgtgagcaagtagaaag

SEQ ID NO: 41789 - DNA, 940 bp, Setaria italica
  misc_feature (60)..(74): n is a, c, g, or t
  Peptide Sequence Number=SeqID_107763
ttaactaacttagtaaaagtactaaactaaacttagtaaattagacgacgaatacatggnnnnnnnnnnnnnnntggtttttggtaaactgaaacacacaaccttttaacaaattaacatgagtacatgatgatgatacataatgcacaactgagatctaaagctatccccaaatccactacaagtgcactgggagaagcttgaagaaatacaggctactacagttagttgctagttactaacaacaagatctagaatgtctttgacatacagcaaacagcacatcaagacctacagctggtcctacactgaaagcaacaactgaatgcgcgatcatggggcattcagcaccatgcccccatgcaggtgttttacagtacagcgagtcaaattctggttcttcaggcatgagcaacggatatacccaccaggatcatgctcgggctctcttgctactaccgctgcagttcgggcacttgtagtgcttgatgtgctcggccttggcaggagtgatcttgacacacttgccatggaaccatgtctcgcaggcatcacagcatatccagaactcatcctgaccgtagttgtcaccacatgaaccacacaatgtgttttcatggtcttcctcttcctcatcttcctcgcctccgctgtcatcctcatcctttggaggtggcatcttggaaccccttgagttgggttctggctggcgcggtggctgtgtatgtgtttataagttcttgctgctgctttttggagttttttcttggtctgcttcttggctagttcctgtttaacaagtaacaagacgaagtacaaaattactaggttacttacaaggacaatagaagacaaacggaataataacccaaccaaggaatacaatagactacgggactactacttagactaactaaccgactagacaagttacgggaca

SEQ ID NO: 41790 - DNA, 807 bp, Setaria italica
  Peptide Sequence Number=SeqID_107764
aactaacgacaaggacaatcaggagtgatcttgacacacttgccatggaaccatgtctcgcaggcatcacagcatatccagaactcatcctgaccgtagttgtcaccacatgaaccacacaatgtgttttcatggtcttcctcttcctcatcttcctcgcctccgctgtcatcctcatcctttggaggtggcatcttggaaccccttgagttgggttctggctggcgcggtggttttgtgccagatttattgttcttgctgctgctttttggagttttttctttggtctgcttcttggcagttcctgtgacaacctcatatatggtagggaggttattaatcatgacaaagagccgcttcctggattctttgtcaaacccaaatcttgctccaaagtaaaaggccacagccagtagccaagcatcactatgcaccgcaacaagtgacagccaatctttctcatccatcccatcgcgtgcaaaattaattcctagagccggctctggaagttcaggaggaacctcctctgcaggcaagttcacttcccatgtttcgttggggaggccatacaagcacagattctctttctctgggtcgcactgctggtagaacttctccacgtcggtggtgagcgccttgatcatgccggcccggcgcgcccggaagtcccggaacacgtcctccggcgagcggggcgtgccgccgccgtccatgtcccggtgcgggcgcctgagctcgggccggggggtgagctagggttagggttttgggtggggcgccgaggcgagggggatgggagctgaagcg

SEQ ID NO: 41791 - DNA, 998 bp, Setaria italica
  Peptide Sequence Number=SeqID_107765
taaaccgaaaatgtgctggcgcgcccgagttcttcccggagccgagctcgtttgggcggcctcagggcaggccgtgggagtccaggcagatgtaccggcagggtggtggcatgccgattccagggagggagaagaatgttgggcgccatggcccctcgagctcatttggtgatcatgagcatggccatgtgccgaatggagtggacaggaaaggccatggtgatgcagctcatgaccagaggattggagtagagaggaaggatggcctgaggcactcgcagtcggaggcggacaccaagcgagccaaacaacaatatgctcagagatctcgtgtccggaagctccaatatattgcagagctcgagagaagagttcagtccttacagacagaggggatcgatgttactgctgaaatggattttctcggtcagcaaaatatcatgttagacctggaaaataaagccttgaagcaacggcttgagagtctatctcaggagcatcttattaaacgctatcaacaggagatgtttgagagggaaattggtcgtcttagacaattgttccagcaacaacagcagcagcagcagcatgtaccacagcagcaggctccaacccacagccgcagtaacagcagagaccttgattcacaatttgcaaacctgtctctgaaacacggcgatcccaactccacgcgcgatgctgtctctggccttcgcatttaagatctatttttttccagcttttggttctctgagcttcacaacttgctgcccttgttacaccactctgtggctgttgcatcaaaagcggagcggcagcagtgaacctggaatcacatgccatggtgaataaagctggaaaggttaataactgtggatccaatctttagttctttggagtgtgcacctgacggtcatccttagctcctgtccattgttgatgctcgaccagtcggaggtgtttagggtctatatgcagattgatgcctttcacggatc

SEQ ID NO: 41792 - DNA, 831 bp, Setaria italica
  Peptide Sequence Number=SeqID_107766
tagtactgcagaactcagaatgagcaatcatacaatataattaacacatcatacattgtgcaaatgagacttatttaactgcctgtttaaatggtttgttcttgcaatccgaaatcaaacaatgcaaatgcgatttaaccacatgtaaaatggtttttgtggttgtgatcaggaaatcaaacaaatgcataggatatatggccatatgccaccattatttgctgagttcatatgtttctggccgaccgcacagcttcctcaggcgaacaatttcctcggattgatcatgctcatagcgaacaaggaatgtgcaatcacattcttctggaccatgcgcttttactttcctaccatgcacttgagcatcaaaataaaggccactctgttcagtttccttgtaacaaagtacatggtgccaaagtttcacgagttcacattctgaggccctgaatggaaaagaacgacgtcgcacacaagtacgagcattgacccattcggcttcctctactccaaatccggagaatttgaccattacttcctgttcacctgattcagacatcctagaagaaacgaaggcatcaacatcataccatgcgccatctctagctgacttagcttcatattggacctgacttccatccatggaaatgctcccatttttttggtcttgttgttgccaatattgttcttgggtgtggacctggtggcaccttggtctctccctcgccctcggacgactccagccagagccgcccctgattccgccgccgccggagccacccctgttgtgcggccttcgccagagccatggccatgcccagcaccggcaag

SEQ ID NO: 41793 - DNA, 557 bp, Setaria italica
  Peptide Sequence Number=SeqID_107767
ttttttttttttttggtccaaagtccaaacaactctctaccgtggaaacaaaacgtaaagggcacacattggagtggtacacgattaaaacaaataggcccatagtcttagatgggcttggcatatcggtcttgcactactaataggttataaggcccatggtaaaagaacacaacgaaacaggaagcgctcgtcgtccagagcagtagcttctccggcgaagccaacgctgacacaggtgacgagcaaataatcaatccgtaggctcggcacctcggcggggacgaaggtcgactacacaccgggcacgggcacgcgaaggatggggcggaggaggaggtcggccttccggcgcgctgtgatgccgaacgcctcggccatgtcgagctcggccgggtcggcgatgccgggcgcctcccagtcgaagtggaacagcaggcttgcgagcgcgagctcgacgttggcgagcccgaacgccatcccggggcacatcctccgcccggcgccgaacgggaggagctcgaagtcggcgcccttgaactccacccctccgacct

SEQ ID NO: 41794 - DNA, 922 bp, Setaria italica
  misc_feature (388)..(388): n is a, c, g, or t
  Peptide Sequence Number=SeqID_107768
taagttaacttcttaattcttcctttgtttgtgtcagttatttcctaatcgatggacacaaaaaactggtattctttttgtgatgagtggtgatcaggaggttcccttgcgagtggatgatattctagtggtttgtcgctatccagatgttttcccagatgagctcccaggtttgcctcctgaaagagaggctattttccacataaagttggttcctggaacgcaacctatatataagacaccatacaagatggctcctgtggagcaggtggagttaaagaagcaattggatgaacttcttgctaaagggtttatccgaccaagcacgtcaccttgggctgccccagtcttgttcgtagaaaagaaggatggcactaaaagactttgngttgattatcgagcacttaatcaagtaacaatcaagaacaagtaccctttgcctcgtattgatgctctctttgatcaattgagaggtgccaaggtattttctaagattgacttgcaatctggttaccatcaactacgtatcaaggaagaggatattgagaagacggcttttaataccaggtatgggcattatgagtatgtggttatgtcttttggactaacaaatgcccctgctgtttttatggaggccatgaacaggatgttgcatgagtacttggatgtttttgttgtggtattcatcgatgatatcttagtttactccaagtcagaggaggagcataaggttcatctcagtcttgtcttggatgcactccggaagaacaagttctatgcaaagttgaagaaatgtgcatttttggctttctgaagtgagcttccttggtcatgtcattaatcaacatggcattaaggtggatactaaaaacgttgcctcagtggtggaatggcaagaccgaccaatgtaacagaagttcgg

SEQ ID NO: 41795 - DNA, 1265 bp, Setaria italica
  misc_feature (1246)..(1265): n is a, c, g, or t
  Peptide Sequence Number=SeqID_107769
cgtgggcctctcggcgctggtcctcaccgccttctcgctctccccgttcgtcgcgctcgccgtgctcgccgcccccaagatccgcccgtcccgctggctcgccttcaacgccggcgccgtcaacctgcgcggctacttcaactccatgttctggaaccttaactactgggacaaggccagcacgctcgccggcgaggtcgaggagcccaggaagacgttccccaaggcggtgttcggcgcagtggggctcgtcgtcggcgcctacctcatcccgctgctggccggcaccggcgcgctgccgtcggagacggcggccgagtggaccgacggcttcttctccgaggtcgggcagaggatcggcgggccctggctccgcgtgtggatccaggccgccgccgccatgtccaacatggggctcttcgaggccgagatgagcagcgactccttccagctcctcggcatggccgagatgggcatgatccccgccatcttcgcccgcaggtccaagcacgggacgccgacgttcagcatcctgtgctcggcgacgggggtggtgatcctctccttcatgagcttccaggagatcatcgagttcctcaacttcctctacgggctcgggatgctcgtcgtgttcgcggccttcgtcaagctgcgcgccaagaacccggacctccccaggccgtaccggatccccgtcggcaccgcgggggccgccgccatgtgcgtcccgcccgtcgcgctcatcaccaccgtcatgtgcctcgcgtcggccaggaccgtcatcgtcaacgccgtcgtggtcgccgccggcgtcgcgctgtactacggcgtcgagcacgccaagaggcacgcgtgggtcgagttcctggcgcccgtgccgccgccgcctgacagctcccacggatcaaccacggcgcttgaagacgccgacgtcgaggacgtccgcgccgggctgctcgccgacgagaccgctgacgaaggcggcagcaaggtcgagtagcttgccgttcggtatacagcagttcagtaaggccttgtttagttcggcgaagctggcgccgctaaaatcactgtacggcaccgtagtatactgtagcgttttatttgtatttatgaattattgttcaaatattgactaattaggctcaaaagatttatctcgcaaagtacaaaaaaactgtgcaattaatttttaatttctatcaacatttagtatgtgttcacgtcggaaattcagaactgaacnnnnnnnnnnnnnnnnnnnn

SEQ ID NO: 41796 - DNA, 472 bp, Setaria italica
  Peptide Sequence Number=SeqID_107770
tacgtaattaagtcgtctttctagtctatttctttcgttgtactactagtactacttgcgtttggctcgtccaggaagagcagcctgggcctcatcagtatctcaagggcaatgctgaccctcctcttttcaccaccactgatgcccctcaggtgccagttgccgacgaccgtgtcggcacagtcctgcagccccatctcgatgatggtgccctctaccagggcctgcttctcctcccagggcatcttgtcagggagacggaggcgcgccgagtatgagatcgtctcccgaaccgtcaatgtgccgataaggttgtcatcttgcgtcacataggccgcggcgccgaaggagaggttggccttgcgtccgatgaggaggacggtcccggagaggaaggcgttggcggcgagccgccgcgagcgcgtcgaggagcgtggacttgccggagccggagggccccatgagcgccgtg

SEQ ID NO: 41797 - DNA, 343 bp, Setaria italica
  Peptide Sequence Number=SeqID_107771
acaatacgtactagccaatccagggatcactatcgtcgcacggtgtcctatccccttccagaaatttcttgtacatagtcgggtcgccatggtcgaggttcacgacagagtcgggggtgaccggcggcttgcctttggacggctccaccgtgttctcctcgccggatcggctcccaccgaagtagcgccggcggatgtacatcacgagcagggcgaggttcaccgccacggatgccgcaaccccgatcctcccggcgcaccgcaccgccatcccgccggtctccctcgccgccattatcttctcactcctcgatctctcctgcagagacgggcaaaaggcaag

SEQ ID NO: 41798 - DNA, 377 bp, Setaria italica
  Peptide Sequence Number=SeqID_107772
aaagaggtaccgaacatctggaccatcaaaattttgggacttgggacccaatgggaacacacatgcaacctggatggacaacaaaacaaaatttcaatagccgagagtatctttataaggtctaaagggctttctataaaggaacacatctcaacttagcaccatagcataaattgagataagtgaaaagtacaagttagataaagtgcaagaatggagaaaaatctgcatcaaactctgaacatgtatatatatcaggcttctattggagatctccggtgcatgtatacagctttgcaaatattgccacatatgagttactataatcttcaatatactagaacagggaaggatgttcaagtatttcaatagctgaa

SEQ ID NO: 41799 - DNA, 697 bp, Setaria italica
  Peptide Sequence Number=SeqID_107773
taagaaaacagagcatcggtatttggttccatagataatagagaaaaatatttacattgtctactagaaacgagtcgaaagtatatgctttccactttaagtacacctgaaggctgcatagaaacatgcccacaaatttcagatgaacaagaaggtggcaagacacatacaaggactagagtaatgatagcattaatcaacttttggtgagttttatgccgttgtttggcagcttcactgaaatgtgagtcataagctccaaccgttgggacttcattgtcttcatatatgatttcagtaagcttgaggttctcgtactggacatccaagtcactgaaaaaataactacaaagacatacaaggtataccatcatccagaaccctgacacctctaaacttgtcgcattaggtaacactacaaagaatcttgaattgatcacatcaaagttcacttgtgaaaaaactgcccctgtgacctcgttaatagatcaaatccttggcaaagattgcttctgatttacagaaagacgtctggcaaagcgaagaggcacatcaaggcacagatgagcaatcacaggggccacgataaccagcacacagtcatcagtattcgagccaccaacaataactaagctcttcaatgtcggtgatgaaatctcataaagatagcgccctctgcaatttttcagaaccaata

SEQ ID NO: 41800 - DNA, 317 bp, Setaria italica
  misc_feature (13)..(13): n is a, c, g, or t
  misc_feature (308)..(317): n is a, c, g, or t
  Peptide Sequence Number=SeqID_107774
aaaaaaggaaaanctcgccgccgtcccgtcgcggtgccggtgcgccgcgctgggcttcatgatggacggcaaccccggccgcctccagggcttccggggatgctccagggaggcgcagaggagcttcgcgcgcaggctgacgaggcaggcggagtgcgacctgcccaccgtcgacggcggcatgtgctacgaactcgccggggagcactggggcggcgcggtgtcggcgtactgaagcgtggcgtcatggagtggaataattgtgaacaataaaatttaaggagaattgtgtaccaaaaaaaaaaaannnnnnnnnn

SEQ ID NO: 41801 - DNA, 725 bp, Setaria italica
  misc_feature (683)..(725): n is a, c, g, or t
  Peptide Sequence Number=SeqID_107775
aagcatcccaagagcacttactccaatcaagaaagaagaactgctagcagctgcgctgctgcccttcgccaccacgcgtgcaaagcaaatggcttccagattcacggcgctcctcctcgcggcgaccctcctgctctcctcggcggccgtcgtcgtgcgcgggcagcagcggggcaacccgtgcccgacgaacgcgctggcggacctcaaggtgtgcgccgacgtgctggtcctgctcaagctcaagatcaacgtgccccggagccagcagtgctgcccgctgctgggcagcctcgtcaacctcgacctcgccgcctgcctctgcgccgccatcaggctcaacgtgatcggcatccccgtcaacctgccgctcgacgtgcccctcgtgctcaactactgcggccggaacgcgtcggccgttccgggatccaactgctcctgagtgtgtgttttagtgtccggtctcgtatgcagcatcgatgtgttcctgtgggtggatgatccatggcatcaggttagttatgatgaataactgtgtctaatgagcttattggacatggcaaaataggggttccatcatagtgttccaagcaggcttgtgtgtgtgtctacatgtaacaatcatcgtttgtgatgtgaaccgttttctgtatgccactgatgacaagtcattcagtggctannnnnnnnnnnnnnnnnnnnnnnnnnnnnnnnnnnnnnnnnnn

SEQ ID NO: 41802 - DNA, 390 bp, Setaria italica
  Peptide Sequence Number=SeqID_107776
cgacgctggaggccggcctgcggagcgtcaacctcgcgcccctgcgcgcccccgtggcggcggcgatgtcagctgccgtgcggtggctcggcgtgtaccgcgaggtgctgctcgtcggcgtcctgctgtcctggttccccaacatcccctgggaccgccagcccttctcggccctgcgcgacctctgcgacccgttcctcgccctctgccgcgaggtcatgccgccggtcttcgggcgcaagctcgacctcagcccgctcgtcgcgtttatggcgattgacatcatcattatgatcctgcgcccgcagcctcgcatgtgatggcttccttcagcaatgggattggagaatggtggttggtatggtcgttaggttttgacttagtgggagc

SEQ ID NO: 41803 - DNA, 588 bp, Setaria italica
  misc_feature (554)..(554): n is a, c, g, or t
  Peptide Sequence Number=SeqID_107777
ttgtccgtccggttctttcgggtcgtctaagtcttcgtaccttcagcccgttctctgccgcgaggtcatgccgccggtcttcgggcgcaagctcgacctcagcccgctcgtcgcgtttatggcgattgacatcatcattatgatcctgcgcccgcagcctcgcatgtgatggcttccttcagcaatgggattggagaatggtggttggtatgttaggttttgactatgggagcgatggatcataggctatttttggtcaccggatggcaaagaaaggtgctgcttaattctaaggcaagaaagtggtggttacggattagctttgggatcccagtatagctcttacgatcgtagccgtgcaatatgaatgattccgggacgtctgtagacaagtctagcctttatgctaaaacttccatttgtgacgttcgatggttgcagtagtcatattatgtgttggctacatattgcagttttgctctgtatccatccattatctagcagtataatttgcatcttctttttgttgtgatccagaataaaaaaaaaaaaanaaaaaaaaaactaaaagagaactagaccaaaggc

SEQ ID NO: 41804 - DNA, 370 bp, Setaria italica
  Peptide Sequence Number=SeqID_107778
tgtggtctaatatttatttttcttttaataaataaaataaaaggagaatattactccatgtatccaaataatttatatgtattatcagaaaactgttcgaaatggccacagaattctctactgtacagaaatgggataggacattaatggccattatatgtctggagaaatctatttctttagccgatcttttctttttagggaagcaatcatgcccatgtggactccagaaaagaatcaaatatgatttagcctatcctttttttctggaaagtcaggagcgtaggcccctatggccctacctattttcattaaataagtcaaagaaagagtgtgaagaattgctttagcaaatcgattgctacttgat

SEQ ID NO: 41805 - DNA, 282 bp, Setaria italica
  misc_feature (191)..(282): n is a, c, g, or t
  Peptide Sequence Number=SeqID_107779
tatatgcatgaacagtgagctaaatagctaatcagttcttggccgatgcattgcttacctggttgtttcgtggcaatacgtcagtagctcatcagtgttacaatagctgcagcttagctattttatatggattttcacatggttaactagaactcttgtcttagaaccggtaaaaaaaaaaaaaaaaaaannnnnnnnnnnnnnnnnnnnnnnnnnnnnnnnnnnnnnnnnnnnnnnnnnnnnnnnnnnnnnnnnnnnnnnnnnnnnnnnnnnnnnnnnnnn

SEQ ID NO: 41806 - DNA, 464 bp, Setaria italica
  misc_feature (438)..(438): n is a, c, g, or t
  Peptide Sequence Number=SeqID_107780
ttgttactttccttgactccatgacgaccgcccactgctgacggtgactgagcctgccgccctcgccgttgagttcaaccatctcagtgacctcatcgacgatgggttcatcaaccccttcgacgcgcacctgtttgaggcatgcgacggtctcccgaagctgaccatggcttagatgccaacgagccgactcgggcatcttcctcataccgatccacagcgcgatggcgggcagagtgcataccacgagcatccagcgccatgctccaccggacccggctgataccgacagctgagtaaggaaggcatgaaaagcctggtcggtcatcgctcccccgtgggaggtcgtcatggcctgcaaagtgtcccaggaataagttcccggagacagtcgtcccgtcggatccgcagtcaccatcaaactgggtcccccatganccgctgagatggcggcattgacggag

SEQ ID NO: 41807 - DNA, 432 bp, Setaria italica
  misc_feature (35)..(35): n is a, c, g, or t
  misc_feature (73)..(73): n is a, c, g, or t
  Peptide Sequence Number=SeqID_107781
cggaacatttctaaaacaatgagaccctggaaacngaacttccagacagcgcctaacttcctcgagaatgaanaaaggaatcacaaggactcaggcacgtgtgcactcagagaagcatattcaacaacagcattggcatcccatccattcaaaaccaaaagtttccagctcgtaactcgtgagcagcctaaggggaggcacctcaagttgagcactataaatacatgactccatctctcatcttatatatatgtacaatacaatcttctaagccttgttcgttcgtctctgtgccacagatggattttcccatgcactgcctctcagctttgctttatctgtttgcactcatctccaaggctactgttgattgatgactgaatgcagactgtgaacctgacatgccagcttctgggccgaactcatggtgca

SEQ ID NO: 41808 - DNA, 757 bp, Setaria italica
  Peptide Sequence Number=SeqID_107782
cgacgaagaactagaattaacaacgcaagctaaaaaaaaaagggtaaaaaattctaagatgatcagctgtatatacagatcgatccctctcaaactcaaactcctgtccctcgggccctcctaaattcggacccactaatcatcatcatcacacccgtctcaacaacgcaatcattcatagaacaatccaaaaaaatcaacagaaacagattccaaaaaactaatggaactagcaacaagttttgctcttgcattgccttcgcttggcttggcttcacttgcttcttgcacaaacgcagcgctccatctccatgatccacgccaccgattcctccagccaatcatcctagccccgatccggtgacagctcagggcgcgagcaaggcagcaaaattctaagctctaacacctattggatgcggatgctaccagaaagatgcggtcatggtggcggattcggagctcatcatcatgttgttgcgcgagcttactgtgagctgttgttaccatggttctcctccccgctgtcgtcgtcgtcctcctcgtcgttgccgccgccgtcgcctccgtgctgctgttccccctcaggctgctggtgctgctgctgttcctcgcttccgccgcggttgtacgcattgagcgcggcgagcatgcctatgttggtgtcggccatgccgccgcctcctccaccggctgcagcggtgctggggtagctggcccgcgacatgaaccccgttcgttacttatttgttaactt

SEQ ID NO: 41809 - DNA, 408 bp, Setaria italica
  Peptide Sequence Number=SeqID_107783
aagacttgcaacaattaaccaggaacacttgtgatcctcaatgtcagtcccaatcttgcctatggtattaggattagcgaaacaatccaagtaatcgtcctgtgcttgaaaatatatacccatttcaatgagtatatcccttagctcactgaagttttccaattttgcaccagacaacagcaatgcacaagcaacagggagataaaaggatagtaagatgtcttgtacttgacaatacgacggtacccttctatattgtattttgcaagttcatctgccccattatgtgtgctaataagatcaagcatctgtcctaaagatgtctgcagagctatctcgttccataattcagagatatcaatatagtaagttttttccctaaagatgtctgcagagctatctcgttca

SEQ ID NO: 41810 - DNA, 743 bp, Setaria italica
  Peptide Sequence Number=SeqID_107784
ttagcaaactaatctacttactagcatgcattggtttgtgtcccatagctgtagcctgtagagttcactcgctacgacgatcggagtcagtcatcagtcaagcaggatggcgagcgtccagagggcgtcgttcttgctccaggtcgtccggacctcgtcgcgctcgcgctcgcgcaagcgcgaggaagcaggcgccttctccgccgtcgcgccgtggcggcatcccgtctacggcggcggcggcaggttccagccgccgcggccggccaagctgctggacaccatcgtcgaggaggacagctccagcgtcgtcagcagcatggcggcgcacgacgccggcggcggcggcgggtacttcctgcagggcggggcttcctcttcgtcatcatcaagctcggttcctaaggccttccgcttcgcctcggcggcggccggcggcggcgcgcagcagagccgttgaggtgatttgatcttgggaatatatgtccttgatcccacatatatatgaagtcatgttgtgtcctttgccataatatatgtatgcgatgctcttcgtatattgttatcgaagggtttcccatgagttcttcgtgtattgttcaactaataaaaatctttatggtcgcgtatgtacttgtaacattgtcacaactctaatgatatatgtgatgtactctaattaccgaaaatcagccgataggagcgacaattgactgaaatgaaaatttataagctccttggac

SEQ ID NO: 41811 - DNA, 786 bp, Setaria italica
  Peptide Sequence Number=SeqID_107785
ttggaagtttcgcattgtctgatcccaaagcttcccaacctattggaatctactgtccggaaggcaaaggactgctaaacagaagagcctagcagctcagaagacggtcagacatttgttgcagaagcatagcctcattgaccaagctcaagaggctgatcacttctcattatttgaaacctcaccaagtgcctttccattgaacatatcttttgaggactctcctgggactcctgaaagttatttgaattcaggttctctaggcaagttcagcagaagttcatcagcgcgaaagaaaacattttcaagattaagagctgagcgagctgaaccaagcccagcagttctgaagcccatcaagaatcttatcttacatgagaaatatgtgaaccagttatctcgtagagaaggtacaaaaaggcctcgcaaaaggactccaggctccaaagccgctcattctgggaaggctctttctcggcagcaagttggtggtctgaaggctgcaaaaaatgctctcatctcagaagcaactgactttataagccagttcaaaaagttgcaagccaattcccttgcacacattgttgaaaatagtgaggatgatgatattgatggtgatgctagtgatagttgccatgatgatgataaagaataaggaggttcttacagtgttgattccaagctgcctatagaaagcattcttcttttatcttccgtaaagctgcacttggataagatgttgccaactgaattagtcatcagcgttagacactagcaatatgtata

SEQ ID NO: 41812 - DNA, 978 bp, Setaria italica
  Peptide Sequence Number=SeqID_107786
ccttgacatactccgtagtctaataacttgcttagccaaaattttctccttatcaacaccgattgatgttgccaactttctggtcatgttcatcacccgttgaccacaagattttggttcgccactcccctcaaaccaggccctcaagttgtactgtcccattgcatttgaccacaacgccctcttctcttcccatccaatgaggccactggaaaaaagagacagagtaccgaagcctgccgtattttcgagctttcaaccatgtccatgtccattggttgtactatactatcgaaaataaccaatgcacaaagttccaggaagaaagtgccaacaaatatagtaaataggtggttgcaatatcagccctactgtacttatgtttcttgccagcaaggaaaagcaggaaggcaaccaaagcagataactgagaggtacaacgaagtgtattaatgccactccttgttctaagcacaagaaccttggtgaagagatcatcatacatcataccaagttcaaccctgagcaccttgagcacttggttgggtagccacgtcccaaaccctcacgaccaaacctcaactgatcaccaacaaacaaggttcggccagagaagaaattaaggacatctagcattgaacgcagaccagtgcagagtgttagaataaccatcatctccaattccccatcaatcaattctggaaaccgatgcttacagtgatttccagtggagctctgaagacttttaaagctcccacacttgagagaccatgtcctttctccatacttgataattcccgcaacaaacacaaaggtacctgaaactagaagttccacgctgtgtcttctaatggacttccagaaaacatataaagataggaaacctgtagcacaactgcacgagatttaataaatgcctcaaccacaagttgttgccctccatggcaaaagcagtcatagttgttccttaccctacct

SEQ ID NO: 41813 - DNA, 230 bp, Setaria italica
  Peptide Sequence Number=SeqID_107787
taattcgtttcagcgattccatgtagcgatcacagggaaccacaaactctgctggacttgtcctaggtttatagtagacagtgaacatggttccagtgttaacagcatgccatgctgtagcaagaactccaagatgcatgctgtggcttgatattactgaagatggaacatttgcttgctgcctcattgcacgcctaactccaacacgcaactagaacctgctgtaagcc

SEQ ID NO: 41814 - DNA, 119 bp, Setaria italica
  Peptide Sequence Number=SeqID_107788
cgcttctttttgttcggagctgaagaaatcaggcagggatgctacagcattagagcgaggccttttgggttctgtgcaccggaagcggattgatagggggaggggcttacagcaggttc

SEQ ID NO: 41815 - DNA, 623 bp, Setaria italica
  misc_feature (304)..(304): n is a, c, g, or t
  Peptide Sequence Number=SeqID_107789
tttctacgcatacattaggtggtaggacaagcgaccggctaacttacctcaccaaagataaaccaaaactgcagcaaatgagagggttcgacttaagaccaccaggacgagcgccagctataaatactagggtactttgggctcatccaaatgcatataaaaagcattaagctccactactaggcctatggatacatcgccttccgtcctctgctgttacttcaaaagccagctgcgaaggcattagcagttcccagagttaagggatgaggctggcagtgtctccctgacagcagaacccctntccattgaattagcagggctgtcctcggaccccgagttctgcaacatggtccacaagatcttcatctacacaacggaggaggtccagcggatcatcgccgaccagcatcatatcgccttcgttgtcggtgtagacaaccatccattccttgttagaacctttcagctcaccgttgaagtcaaacatctcatccagctcagagaccaattccgtgtagcccttgaactttgtaagatccacagacctgccaagggcgattccttgcttgtggaccttcttgcagcttctggttgatccaccttgtgatttacactgtgtg

SEQ ID NO: 41816 - DNA, 280 bp, Setaria italica
  Peptide Sequence Number=SeqID_107790
ggcaatcacaatatgtttggttcatggtccatgatgccttcaagtactggcttcgggttgaacagacaaaactatccaatgatacaggaagttgggacggccagcagcaatctgatcaggtaaagaacagaatccctgctgattttgtagatctttaggttgctgatatccagataatccagataacatctcattgtaactctcaggcctgctcatctgcatccaactatctgaacccagcttactctgcgtaccaatggtactcttctcccgatcaaat

SEQ ID NO: 41817 - DNA, 342 bp, Setaria italica
  Peptide Sequence Number=SeqID_107791
tgtgcctggttggaggggcggacgtgcttcggctggtcgggggcggcggcggtggcggagggagggatgtgggcgatggcggcgcgcttgcggcggaggtagccggcgaggaagacgagggcgatggcgccaccaaggaccgcggagatgaggggcgccgtaagcaaggacacaagtgacgccgccatctctggcgcggtgtgtcgccggcgggcggtggcggatcgggaagcctttgcttttgctttgcttctcttctctctgtctctctctctcgtctcccactgataagctgaagggaacaaggcttccacgaggccagtggcggtgtcttgttgcttg

SEQ ID NO: 41818 - DNA, 428 bp, Setaria italica
  Peptide Sequence Number=SeqID_107792
ctaccctccgccattcagctgctgctggagtttgtggcatcccatcatttgcaacacttggtggagacttcaaaggttcagatttagctgggctgtcaaggtgaattccaaaaagcttgcatgaattgcctttcattttctgagcgtcaccatgagcaagaaccaaaggttgaggcttgatcacgcgtggctgtgcatcgtccatgcgagaaccaggtaccatatggccaaaccatccagctgagtattgatcgatgccacggccaggcagtggagtataaactccattcccaaatttggtgcgatgcctcagagttctgcaaataccaaatttgggaatggagtttatactccattcccaaatttggtatttgcagaactctgaggcatcgcaccaacttccaattgtattactaggtaagtttggt

SEQ ID NO: 41819 - DNA, 1014 bp, Setaria italica
  Peptide Sequence Number=SeqID_107793
caggacgagcgccagctataaatactagggtactttgggctcatccaaatgcatataaaagcattaagctccaatactaggcctatggatacatcgccttccgtcctctgctgttacttcaaagaccagctgcgaaggcattagcagttcccagagttaagggatgaggctggcagtgtctccctgacagcagaacccctctccattgaattagcagggctgtcctcggaccccgagttcagggtgcctggattcatccgctggacctcctccgttgtgtagatgaagatcttgtggaccatgttgcagaactcgtcccagggatcatcgccgaccagcatcatatcgccttcgttgtcggtgtagacaaccatccattccttgttagaacctttcagctcaccgttgaagtcaaacatctcatccagctcagagaccaattccgtgtagcccttgaactttgtaagatccacagacctgccaagggcgattccttgcttgtggaccttcttgcagcttctggttgacccacctaagacgccaaagcaacttgatgctccacaggcagatcctgtcccatgtccacaatcttcaagaagcacacagtgtaaatcacaaggtggatcaaccagaagctgcaagaaggtccacaagcaaggaatccgcccttggcaggtctgtggatcttacaaagttcaagggctacacggaattggtctctgagctggatgagatgtttgacttcaacggtgagctgaaaggttctaacaaggaatggatggttgtctacaccgacaacgaaggcgatatgatgctggtcggcgatgatccctgggagtgagttaactgttgaatatttccctcaatttcttagtcgatctgtgaaagttaaaatcttgatccttttgcctggacagcgagttctgcaacatggtccacaagatcttcatctacacaacggaggaggtccagcggatgaatccaggcaccctgaactcggggtccgaggacacg

SEQ ID NO: 41820 - DNA, 527 bp, Setaria italica
  Peptide Sequence Number=SeqID_107794
cagcaccgagaagccaccatgtgtgctggtgtccgaggctgtcaaggtcttgcagaacgagtgcacacgtggcctcgcaggtgcagcagagggtgcagcaggcatctcttgctcactagagccattctcatctggctgcttcgattcagggagcagagtaagctgggcataaacctcatcagtgtctggttcggccttcaattcaacgttcatgacctcgcacaggatcttccatgggagattgtacagttgcatgtgctgctcagccacctggttggtcgatgcctccacctgctcgatgtgtccctgcgggaagtagtagaccttgtccccgaccctgggcaccgtgaccagcgggccggcgcagaggttccagagctccgtgtacatgccgtcctccgcccctccacctccgcctccgccgaagccgccgccacctcgcgccgccgccggaggagccatggcgagcaccagatcttcacatccgcggcgcctccgcgcgcgcgctcacccaggcgcccccctcg

SEQ ID NO: 41821 - DNA, 682 bp, Setaria italica
  Peptide Sequence Number=SeqID_107795
gcggacaatatattatacttgatgatgccggggtggggtggggggggtggcggcgcggctatgtacaacgcttagtgccgagggaaagcgcgggagggcttcgctcagttgtttctacgcatacattaggtggtaggacaagcgaccggctaacttacctcaccaaaagataaaccaaaactgcagcaaatgagagggttcgacttaagaccaccaggacgagcgccagctataaatactagggtactttgggctcatccaaatgcatataaaaagcattaagctccactactaggcctatggatacatcgccttccgtcctctgctgttacttcaaaagacctgcagctgcgaaggcattagcagttcccagagttaagggatgaggctggcagtgtctccctgacagcagaacccctctccattgaattagcagggctgtcctcggaccccgagttcagggtgcctggattcatccgctggacctcctccgttgtgtagatgaagatcttgtggaccatgttgcagaactcgtcccagggatcatcgccgaccagcatcatatcgccttcgttgtcggtgtagacaaccatccattccttgttagaacctttcagctcaccgttgaagtcaaacatctcatccagctcagagaccaattccgtgtagcccttgaactttg

SEQ ID NO: 41822 - DNA, 456 bp, Setaria italica
  Peptide Sequence Number=SeqID_107796
gtcaatttatcatagcatcctctctacaagtaaatattaaatgtagtgctcctgcttccaatcaataatgtgttacaaacccattttacaacaaaatagcctttacaaattcctttttcctaaatacatattgacaatcaaaatgattacaaggagagaacaatagctatagcaacaaaatttacattccattgtcctagacaaatacgctatgtacagttgttgccttagacaatgccatgtagctacaaatgaacagatcacaacaggaaaaagaaacaattttgtgtacatgacaagttacaagagaagtcccggtacaaaaaagacatcttacatggtgttaccagcatgcgactaccaaaaagtacaattaaaattagagggttacagttggaaacaaaaaaggaatcagattaagcttcacttacatctcgaattcttgctacaacacat

SEQ ID NO: 41823 - DNA, 1192 bp, Setaria italica
  Peptide Sequence Number=SeqID_107797
tgtacttctaagttgttgtagttagttgttcacccccctcccgcattttcccgcagcttattcggccggcgagacgcgagagtccgtaggctcgccgggatcgcggtccccaggatggccgccaacttctgggcgtcgtcgcactgcaagcagctgctggacaacccggaggatgcggacctggtgccggcggcggaccgggagcggggcatcacgccggaggagttccgcctcgtcaagatccacatgtccttccatatctggcggctggcgcaggcggtgaaagttaggcaaagagttatagctacggcagtcacttacttcaggcgtgtgtatacaagaaagagcatgtcagagtatgatcctcgtttggttgcacctacttgtttgtatttggcgtcaaaggtggaggagagcacagtgcaagcacggcttcttgtcttctacataaaaaagatgtgtggtacaggttccgatgataagtaccggtttgaaattaaggatattcttgaaatggaaatgaagctcctggaagcacttgattattatttggttgttttccatccatatcgtcctctcttacagttattgcaggatgctggcataactgatctgacacaatttgcctggggcctcgttaatgatacttacaagatggatcttattctcatatatgcaccctatatgattgcacttgcctgcatatacattgcaagtgtccttaaagataaggacaccacttcatggtttgaagaactccgcgtcgacatgaacattgttaagaatatctcaatggaaattctggatttctatgacacttacaagatcgatcctcaaaggggcctcccagaggataagattagccctgtgctgaacaagttaccggcaaagtcttaagctccagtttcgctatttatggtctatttcaaactaagcatgagcgactaacaagctcacaattccatgacgggagtgtgcgtgtgcgcgcgtgttttgtgtgtaacatgtattggcgaactacctcttagactcaaagccctaatttgatatcccatggtaggggatgctctgtcggtgcttgtaatcgtctcttgttgctttcatgacttcgatatcatacacaactgcgatggaattttacaccggctaagtagtatctacgtactttaaaactaaaaaaaaaaaaaaaaaa

SEQ ID NO: 41824 - DNA, 271 bp, Setaria italica
  Peptide Sequence Number=SeqID_107798
ctcctcttcgcttccgaatcaattccggcgagcctcgccgcgcgcccccgctcccgaacaatctgcagctaggagcgcccggatcccgcctcgtccccgagatggtggtggcgctgcggttcccggcggtcgcgcgggagtctcctgccgcgctcgccgccgccgccgccaagctcgggagggagcaggatttcgtgtgcgcgagtgccaggccgggaccgcaatgctggaggcggagggggttggtggtgcgttgccagacgggggccgg

SEQ ID NO: 41825 - DNA, 455 bp, Setaria italica
  Peptide Sequence Number=SeqID_107799
tgcgagcacgctggagttcctgctccagttgagcaagtttcagcctgctattctcaagttgctcaacatatgccttctttcttagacggcttttcctagcagcttcacggttttgggccagacggcggagtgccttttgacctagcttgtcgtttgatttgtcaccagaaccggaagctgtaagggaagcaagctgtcctagttccaacatttgattcttctcgtcagtatctagatctgtcgatgtatcagtcccagggcttgcataagccatctcagactcttcccagctctcagtgtttcctgttgtttagaactcaagccgacagatttggttgttctcctcttatatgtactgaagtccaacttcaggtgctgcaggctgcagcacttccaacagtacaaagaatagattgaaaaatctataaatttgaaccatataaaagcttaagaca

SEQ ID NO: 41826 - DNA, 428 bp, Setaria italica
  Peptide Sequence Number=SeqID_107800
taacttaaataatgcactcgatcagtctaattgttagtctgggaccatcttatattctgcactgacttgtactggtatgatggagacttttcgcccaatgactagcaaaatacatatcagctttacagtaacccattgtttgggtcctgctggtatggagattcactgtaatggtggttatggaatctttaattcttcataaccccaaatcatctcataactactaagttctagctttgaacagatttgaggtgataaagattacaactgctcttatttaatgtaaaaattggaacttctgttcttgctgagaaagaaaagggagggactacaaatataataaaaagcacttagaaaggaaagtggaaattttgttcaacagaaaacttaccgaacaaaatctcccttcagagcaggagttccagagt

SEQ ID NO: 41827 - DNA, 516 bp, Setaria italica
  misc_feature (351)..(351): n is a, c, g, or t
  Peptide Sequence Number=SeqID_107801
agcccaggatggaattgctgaccactgatctagcaaaactttcactctattcatcctgcactgctcacaagaagttcacatgggtgaatacatcacaacaacttgacttgcatgtgcaacaatattttgaacatttgcaagagcccccacaattatgtgaaataccgtgctttttttggataaagatgtgaataacggatacttcagcccctaaaggtaatattaacatcatggttagcggtttgtacacccctacgaatgggctgccatcacctgcacccctttggcagctatccgtaacttcttcagtctagagcacagagtacttgtccatagttccgtgcaaaaacncacaggataggtacattcacaaattcgtaaatcatgcatcagggattcagaattgcagcaaaagatgctagcaccgcagctcacagcgtttcattgttttgggcggtagctgaaataaattcaaggctgatacgtctcatcagtacatttcccttgtagtcttgt

SEQ ID NO: 41828 - DNA, 816 bp, Setaria italica
  Peptide Sequence Number=SeqID_107802
actacaataggaatgtgtcgtcagtgaaaacggcctcaatttacctgtattcactctcttttagtaactcgcaggttcagtgcagtattctcagtgctctttcaaatgccaacagcttgacgttggtatccccatctgtctatgaagatgtggtgccaaaggtattgcagcgtgatcttccaaggtgtgagacattcagtaaactgaaacgattgcacctgggcgagtggtttttgagtggtgggtgctatccactaatatacttgcttcggcgctctcctagtgtggaaaaagttatcctgcaacttgacactagtggagctgatgactatgacaggcttgcaaatgctatttctgaaatatgtcgtccttgcaaggaagcaacaatgacgtttggttgcgaaaagcttaaaaaaatcaggatctactgccacctggagagggataaaagagcccagatcatcatgctcatcttgtcaacccatattagccctctccctagcattaaaatcaagccccttcccgtgtaggatgggaatctgatttggtgactcgatagcaatcggaccatatggattagagcttctgacacttggaagacttgttatttctccccctgatgatgacagtatcaatgacttggctagtgctactggctgtgcgcaactaatgtattcgttagtgtttcttattgctactttcattcttctcatgtcctttttcggcgtaaaaactgcccttcgccgtatcgtggttatggcagaagcagcattgtatttgtctgcgaattcatgacgccgtggattactggcgcaa

SEQ ID NO: 41829 - DNA, 414 bp, Setaria italica
  Peptide Sequence Number=SeqID_107803
tcgtccgttcgatctgagggagcaccttcccgactccgtcgccgtcggcttctcggccgccacgggcgaggccgcggagctgcaccaggtgctctactgggagttcacctccaccatcgaccccaagaaggagacggtgatcctgtgggtggtgctaggactatgctgtttgctcctcgtcctcgtcggcgcgggcgtcgtctggttcgtgaggcagtggaggaaggccggagaactcgacgacggcgacatcgaggtcgacgacgtgatgggaggcgagtacgatgagctggccgacgagtttgtcgtcgagagcggcccgagaaggttccggtacgccgaactggcggcggcgacgaggaacttcgccgaggaccggaagctcgggcagggcgggttcggcgccgtgtaccg

SEQ ID NO: 41830 - DNA, 379 bp, Setaria italica
  Peptide Sequence Number=SeqID_107804
aaagaataatagtttctttgagaatctaattgtaaggatagttttgtgattaatttcttttcaagaatattgattttcgaatgtcttttagaaagtgtgaagttttgtagctctgtatttcagctcacttgaaagcaagatagtaattgaaccactcatgtttcatcatattgcattttatatatccattgtagaaagttattgattttaggatgatttctaaaattgcctgctaactgttgctcgtgtttttttgacaaatgaaatgctaattttgtgctgcctaagttttctgctgattgcgatggttgttgtataaattatttagcattattgtgatattagcattcatatccctgctgggatttaactttagttg

SEQ ID NO: 41831 - DNA, 445 bp, Setaria italica
  Peptide Sequence Number=SeqID_107805
agtaattctcactcaatttgttgattcagtaatccgaactgtcagattagtttcggagagtcttgcggtaagctacttcatttgcttgtcagttggtgcttggacaattattcgtccaggatacagttttctgttcacatgtttttgtgtgtgtgggtgtcatattgtggggaaggggctgagaaggtgatgcaatttggagacaatctccagttcatcgatatttcaatggtttgcacaatgtgggtaccatgttgatgatgattgagactaaaatttactggctatgtcttgttcttttacagagacacatctatggattgaaaggaaggaacatcgatgttttgcagagaatagcagcttagccattaatcctcactacatccagtcttggttggatcttctgtcacgaacatcacgggttgcgccttttctgcagaaaatg

SEQ ID NO: 41832 - DNA, 1974 bp, Setaria italica
  Peptide Sequence Number=SeqID_107806
acgaccccgttacggacggactaacggcgggggtgctggcggcgtcacgccttgaggagctgcaggagccatggcgacgtcggctcccgctccgcagccctcaaccaccacgccgccgcgctcccgctcccgccaggcgcagacctctcccgctccgcgctcgtcgcgccgctactcgacctcccgctctccttcctcagagagtacctggtggagaaaaaacatctcggagggttgcttattctgctcccaactaagctcagtgacaaggatggtacagggaatgatgttgacagagggcaagtaaagggtgtgctggctgaactcgagaaattgcttgtgcatgaagaagttccgtaccctgtgtacttcgctttccatgatgacgactttgataacctgctggcagatatccgaaaaattgcctcttcaggtcaaccagcctctgcaacaacaggagggtacaaacttgttgtgtcctcagctgaacctagaaaagtgtcatctccaaccatttctaatatccagggatggctacctggattgaaaggagagggtgacactgaacagcttccaactattgccatagttgcaaactatgacaccttcggtgctgcacctgcactttctgtgggaagtgacggcaatggaagtggagttgtggctcttctagagattgcaagactcttttcacgtctttattcaaatcctaagaccaggggcaagtacaatcttctctttgggttaacatctggtggaccctacaattacaatgggactagcaagtggcttagaagtttcgatcagcgtgtacgcgagagcattgactacgcaatttgcttgaacagcgttggttcctggagcaatgacctctggatgcatgtatcaaagcctccagaaaacccctatatcaagcaaatcttcgaagatttttcggatgtctctaaagaaatgggtgtttcagttggaatcaagcacaagaagattaatgtctcaaatcctagagtagcatgggaacacgagcagttctctaggtttagagtgactgcacttactctttcagaaatgtctagccctcctgaatttttggaaagcactggtggtcttcatgacactagagaatctacaaatgttgattcagtaatccgaactgtcagattagtttcggagagtcttgcgagacacatctatggattgaaaggaaggaacatcgatgtttttgcagagaatagcagcttagccattaatcctcactacatccagtcttggttggatcttctgtcacgaacaccacgggttgcgccttttctgcagaaaaatgatcccttcatagcagcattaaaaaaggaactatctgaacacactgctgatgtacatgttcagaatgatgcccttgatggcatgttcactttctatgatgccactaaagcaactctaaatgtataccaggttgcaagtgttacatttgatctgctgttccttttgttgcttggttcctatctaatcgtcctcttctgcttcctagtaatcactacacggggtgttgatgatctcattaacatattccggcggcctccatcacgcaaactcaagggagcataggctaggttgtgttttgtgtattagtgcctgagacgtatgcctagttagaagagctagacatcaggatgacaagaggcaagctagcttcccacagcacatagacatgtaattgcacaattttaccgtttcccctctccagccaatgtgagtggtttcgaattccacagcacgaaaacatttctttcttttgtgcgaggaattttgaatgtaatttaactgtatccattttgttatgatgcttacaattttgggttatttatccaggcggtgtgtcaccagctctgaacatggatgctgtaaaattcttctccgaacacacaagaccctgcatgcctgtgttaatctacttgcatgcaaatcaaacttggtagg

SEQ ID NO: 41833 - DNA, 1122 bp, Setaria italica
  Peptide Sequence Number=SeqID_107807
gtttaactaaagatttctcctaaaagaaaaaaaaggacagttcattagttacagtaccgtagcattttacagcagagttggtaaccgactaatcctcgcaaaagaaggaaaaacaaatcaacaaatcatactatgccacttgatgatgactgatgaggagacgatgggtgtatgacacatcgaccatatgactatatgagtacgcgatgctctgatgttcaggtcctagcaacgagcgtgtgctgccgcagatgacggctctgcttcttccgttgtatccggcacatggacgccttctccttgagctcctggaaggctcgcatggtgtccacgtcgaatccgcccgcaaactggtgtactctgaaggcgaaccgtactccttgaagcatcagttcctcctcttcagggcctcccttgattgcctcgagctcagaggagacccgtttcaggtacttcattgccaacttcaccgactggagtttgatctggctgacgatgccggcgtcctgtttcatccactcccacgggatctggaaccgggtgtaccggctcgtggcggcgtcccggacgcgggcgaggttgtacacgccgtgctccaacttctcgaagagcgcctgcatcttcttgagcgccgcggcgcagggctgccgggcgtcgtcgcggaacgaggcggcctccccctccagcttcttgaggtcgcagtagccgaacgccgcctcccggagcgcgtccgccttgtgctccggccactcgaagtgcttcagcaccgcgcgctcgtccaccaggcgcgagagctcgacgtcgagccacttgacgaagctgacgacgtcctcgatgtccacgaacgccgcgccttccacctccttgatcaggaaccggatgaagtcgccctgcctctccacgtccgacttgatcgcgagaagatgagcagaccggttctcgatctcgccgatcatgtcgcgcgccgccgcggcgccgccgccgttcgcggcctcgctcgcggcgcagccgtccctccaccttgagtccctccgcatcagcgagtggtagaactccaccacctccggcactcgcctcacgcattcagcgggcctagggagtcggaggccgaagtcgcagggg

SEQ ID NO: 41834 - DNA, 645 bp, Setaria italica
  Peptide Sequence Number=SeqID_107808
cgatatgtttctaattaagttattacacagcaaagagccgaagatggacaaattcacactgcatgtgacgtcacacgtgaaattaagtgtgcctctagatcatgcttgctaaatcctccatgttatatggcataggacggctttcagactagatatatggcttaggtggtatctgtagattcttcaaccttcctgtcagcatgtttaccacctttgtcattgatggccggttttggggttccactgaatgcaacagagtgccacaatggccaactgcttcaccttttctttctcctcttctgtgacttccctattaagtaccaggtcctgcccagcaattactctctcgtagatccactgtgggaggtaaacatcgccttggttctcaatacctgggtctgagttcctccttccactaaccatctctaacaccaacatgccgaaactgtaaacatctgacttgtatgatatcccaccgaagttccgagaatatagctccggtgcaatatagcccattgttcctcttgctgctgtcaaggtaacaatgctttggtcccgtgcacacagcttagcaaggccaaaaatctgaaattttgggattgaagttgtagtctagcaagatattgtgaggtttgatgtcaaagt

SEQ ID NO: 41835 - DNA, 353 bp, Setaria italica
  Peptide Sequence Number=SeqID_107809
ctcctgctgtcatcccctctccgctccggccgacccccgctgccgccccttctccttgctccaatccaatggcctacgccgcacacgtcgtggccaagatccagcctgccgcctccctcgcagcgacgccgcggtccaatccccgccgcccctccagcctccgcgtaggagctctcagtggatccacaacagttcaacagaaaaaatttgttgctaaatctgccacctctgtggtggaaggtggtgatgcatttgttggagtaaagcaaaatactagaccaatcatagtcatagacaactacgatagcttcacatacaatctatgccagtacatgggagaggtgggggctaat

SEQ ID NO: 41836 - DNA, 366 bp, Setaria italica
  misc_feature (40)..(40): n is a, c, g, or t
  Peptide Sequence Number=SeqID_107810
tgtggccagcagttgtggtggatgagtcagatgtacctgnaaaccgagctttgaagcgtttcgtattggaccaatcaatacttgttcaattctttggtactcatgattttgcaagggttaagttgaagcaagctgtcccgtttctgaatgggcttctttcttctttgcatctcaaatgcaagcaagcaagtttcagccggagcttagaagaagccaaggaatttctgcgcactcagcagcttccggaaattatgatgcagctacggaaatgcgttcaacacgatggttctgatgataattcctgcgaggacagggtagactcttgtggtaatttatcagaagatagagcagtgcaaaatggagagg

SEQ ID NO: 41837 - DNA, 645 bp, Setaria italica
  Peptide Sequence Number=SeqID_107811
tagtactgacgcacctccgcctcttccagcactgcataacctgggagagcaggaacgggcatgtcggagaagtaggtggacgaccggccgaggtcctcggcgtacggcggcgcgtgcacgtcgaggagcgcgcacggcgtgacggcggtgagggtgtggatgttgccgccgctccggggaacagcaccgacgccttgcacggcgcctcccgcaggtcgtccacggcaacaaccttggctaaaccgtctgcatgaattcaacttttcaatcagcgtatgtgcagtggcttgtcaaatgctaggtcccctggtttgtctatgatcagttccacttttgtttctttgttccattccggtactcccttatcccaaaacagggtggacttttggattgagcagtggaattagcgtcacgtactttcttttcgcagaataaatagcgtcacatgcagatactactagttgtgcagttgttttcatgagctcacaaccaggtatactctgcacacgctctgcatattttcccccccagatcgagcccgtggctccagacctctggggatgccgcgtacgtgcccgagacgtttaactatacttgtcaatacggtgacaaactgggaaacgagaagaaaatcgaacgtagcaa

SEQ ID NO: 41838 - DNA, 421 bp, Setaria italica
  Peptide Sequence Number=SeqID_107812
gaccctgacggccgcggccgacccattcggactccccgacggctacatgctgcagatggcgaccgccgtggagaagctgaaagagctcgtcggcttcgtcacccaggtaaccaaccgacccggtcgccaagcaccatccgcaagtggaagatcccctgcttctcacacgctacccattttgcaggcggaccatctccggcagacgacgatgcagcaaatgcataagatcctgacgacgcggcaggcggcaggggcctcctggcgctcggcgactacttccagcgcctccgcgcgctgagccatctgtgggcgacgcggcgcgaggcagcgattagctagacgtcggtggcgaaaaccaactgaagatgaatgaagacgacgacgaagagtaagtaaggtacgttagtaaggaccaagacca

SEQ ID NO: 41839 - DNA, 247 bp, Setaria italica
  Peptide Sequence Number=SeqID_107813
ggatacagaactacaatcaatcatattggcttctccaacataaggtgaggtgatcaatataagtattaatttaagggagatcattttgagcatgttatgatggagctctaccatggatatcttgaagatcatttcaacctccacaagcttagcgccgcctccccgccggagttcatgacctctgcgtccgcggtgcagttcgcggcggtgcctgtcagaatgggggtgtacgagcggccggcgccgg

SEQ ID NO: 41840 - DNA, 396 bp, Setaria italica
  Peptide Sequence Number=SeqID_107814
taagtactaattagagcaatgtccgccgtcgagatggaggtgttctccaacggccagctcctgatcatcaccgcgctcatgttcgccggcggcgaggtgttcatatcgctcgtggggctcgcgtccaaatggtccaagctgaggaagcagatcataaacaggtcccagcgcgtcgagagccacgacgacggcgtcgagctcgagacgccggcagccatcgccgccgaggccgaggccgctgccgacgccgatgacgagaggtcgtcgatgacgatcaccaccgtcaccgaagatcacaccggcccggtggtggacgcaaagatgctgcggctcaacgcggtgcgctccatgttctacatcgtcctggccatcctcctcgtggtgcacgtcgtgggc

SEQ ID NO: 41841 - DNA, 231 bp, Setaria italica
  Peptide Sequence Number=SeqID_107815
atagcctatatttgagtcctgaacagactctgtaggaaatcaatgcacagaaattcaaggaatcagctatctcatggaaagagaagtacagtatgaacaagagactgcagagttgtgcgtggcaggccatggcagggaatgatgcaatatggtaggctgcatgaattaataaaaaaaatagactagtcacaaagtctctacagggagtcggaagttgacatacatgcccgg

SEQ ID NO: 41842 - DNA, 430 bp, Setaria italica
  misc_feature (402)..(402): n is a, c, g, or t
  Peptide Sequence Number=SeqID_107816
ttttttttgaaagagacttcatcaccttcatcattgtagaatcattccctagtgaacaagaatgtaacatcgaaaatagtgaagtggaacaaggagaaaaggccagcctctaatataaacatatcatcagcagctcttttaatgatgaaaaacagaatctatcctggagatatggtagcggctacggagcacaggacgatgcagctgttgcaggcagttttagaaccagaagcaagtggggaagaagagaaggtacacctggtgttgtccatggaggatggtcacaaactgcaacaggctttgcaacttgttccgcgcataagaaaaatagtccttgtccatatccaccgcccagcaatgatgatcccagtcccgaccagtaagaactctcctgtagaaacntataaatgacacagatttttttttctgg

SEQ ID NO: 41843 - DNA, 256 bp, Setaria italica
  Peptide Sequence Number=SeqID_107817
tttacgtctaaccgtccgcaaccgctttcttctccgcctcctctcctctcccctcccttccccgcgtcaccccccaccgctccacgcgagtcctcctcccccattccgctccacaagccgcagcgacagccgcaggccaggacccgggggatttcgctccgccgtcgtagcccacaggcgccgcgcgcgcgcgcaggcatttctggtccggagagatgttgggggagctcctctcgaagatcctgctgctgctctt

SEQ ID NO: 41844 - DNA, 1143 bp, Setaria italica
  Peptide Sequence Number=SeqID_107818
cagaagaagcagagcttggcttgcttcatctggcgaaggatcgagctagaggagctctagtgcagggagatagcagagagatcacaaggacaagcgcagagcaatggcgtcctcctctgctgtcccttccagtgccgtcgccgtcgccgcggcggtgctgctgctcgccgccgtgggagccgaggccgagacgaggaagtaccagttcaatgtgcaaatggcgagcgtgacgcggctgtgcggcacgaagagcatcgtgacggtgaacgggcagtacccgggtccgacgctgttcgcgcgggagggcgaccacatggaggtcaccgtggtgaaccgctccccctacaacgtcagcctgcactggcacggcgtgcggcagctgctcagcgggtgggccgacgggccggcctacatcacgcagtgccccatccagccgggcgggagctacgtctaccgctaccagatcgtcgggcagcgggggacgctgtggtggcacgcccacatctcctggctccggtccacgctctacgggcccatcgtcatcctgccccccgccggcgtgccctacccgttccccaagcccgacgaggaggtgcccctcatgttcggcgagtggtggaggaacgacaccgaggcggtcatcgcgcaggcgctgcagaccgggggaggacccaacatctctgacgcctacaccatcaacgggctcccggggcccctctacaactgctcggcgcaggacaccttcaggctgaaggtgaagcccggcaagacgtacatgctccggctcatcaacgccgcactcaacgacgagctcttcttctccgtcgccaaccacacgctcaccgtcgtcgacgtcgacgcgctctacgtgaagcccttcgccgtcgacaccctcgtcatcgcgccggggcagaccagcaacgtgctcctcgccgccaagccggcgttcccgggcgcgcgctactacatggaggcccgcccctacaccaacacgcagggcaccttcgacaacaccaccgtcgccggacaatcctcgagtacgaggacccctcctcctcctcctcctcctcctcctcctcctccgccaccaccgccgccgccgccaacctccccatcttcgcgccgaccctgccgcagatcaac

SEQ ID NO: 41845 - DNA, 1566 bp, Setaria italica
  Peptide Sequence Number=SeqID_107819
cgagaagcccattccacgagccgtgcagtggcagccatggctcaagcgctagtgcagagtggtctgggtctccatcagcaactgaccacggcatctccgcaagcgctcgcggtgtcgctcttggtggtcttctgccctctcctcctcctgctcgcacgcttcgcgaccacggccaaagccacgactcctcgcgagaagctgctcgcgaagctcccgtcgcctcccagcaggctccccgtcatcgggcacctccacctggtgggctccctcccccacgtctcgctccgtgacctgaccgcgaagcatggccgcggcggcgtcatgctcctccgcctcggcgccgtcccgaccctcgtcgtgtcgtccgctcgcgccgcgcaggccgtccttcgcacgcacgaccacctcttcgcatcccggccgcgctccgtcgtcacggacatcctcttctacggctcgtcggacatcgccttctccccttacggcgagcactggcgcaatatcaggaagatcgtcaccacgcagctcctcacggtgaagaaggtccgcgcctaccgcttcgtccgtgagcacgaggtgcgattggtcatggaaaaaattggagagtcagctgccttgggcaaggcggtcgacttgagtcggctattaccctccttcaccaatgaaatcatgtgcaacatcgtctcgggcaagctgttcaaggacgaaggccggaacaagctgttccgcgagctgaccgaagcaaactcccagctcctagggggcttcaacttggaagactatttcccaagattggggaggctgggcgtggtgaggagggtggtctgtgcaaaggccgagaaggtgcacaagagatgggacgacttccttgatatgctcatcgatggccatgctagcaagtcagtagcaaattgcagtgatgacaacaagatcagtgacttaatcgacgtgttgctctctattcaacaacagtatggactcaccagagacaatgttaaagcaatattagtggacatgtttcaagctggcacggacacttcatccattgtgatggaatacgcaatggctgagctcatgcagaaaccgtgcctcatgacaaagctacaagctgaggtgaggaggatagtgcccagaggaaaggacatggttacagaagacgatctgaacagcatgacctatctgaaggctgtcatcaaagagacgctccggctacacccaccgcttgtgcttcttgtgcctcatctttgcctggccgactgtgatatagagggatacacaatccctgcaggtacacgagtgattattaatggttgggctatcggccgggatgctagctcttgggagagggcagatgagtttgagcctgagcgatttatggaaggaagcagcattgccgctgttgactataatggaaacgatttcctgttcttgccgttcgggagcgggcgaaggatgtgtccgggtacgaactttgcaatttcgaccatggagatcatgctggcaaacctcatgtaccactttgattggaagctacctgatggatacatgaatgtaaacatgacagag

SEQ ID NO: 41846 - DNA, 644 bp, Setaria italica
  Peptide Sequence Number=SeqID_107820
ttataggcttcctgggaggtggatcataatttttattcatcattgtcatcatcacaatctgcatgcccaccagatttaggccttgctggcatagattgtttctgtgcacccgttgccgccgtagcagaatcttctccgtcactgtccttaaaataattctcttcttccttatcagcacctctttcatctgctttctttctcatgtcaaccacactagcactttgctttgttttggcactctccatgatctgttgatacttaagtttgaaggcctgaatgctctccagtcgttcaaacttcacaagttggtcccaaaaggactcagcaacatattcaataaggaactcaagattttcctttcttatgaaatccaacaggtcaaggaacgtcgagtgtagcatgttgtatctatcgccattttcaacaaatgcctcaataataggcttcaacaagttcaacttgataatacggctattaagaaactcatcctttctgccaatgacagtccgcataaaacggacagctgccacaaccaaagccgcctctctctgacaggttaaagtaagaattttctccattgcattgcttgcaaaaatgttgaccttcatcctgtgatagtgatgacgtgcacagaagcataatta

SEQ ID NO: 41847 - DNA, 568 bp, Setaria italica
  Peptide Sequence Number=SeqID_107821
ttctttaacaaagtgtagtgtggaaagtctgtcctctcactgagagaataacatgcaaatttagcttggtgcgccaagcattctctattggcattaggccagtttgaccaaaccagcaagtttgacttcattgtcattggccataactatagctcatgaaaatcatattagggttcctttttgtttcttggcaattagtttgatcagcacatgggagattatgaatgtggtgacaactcgcaaacataagaattcaggtttgctttaatgcagaactatatagttcagtagttcacttgtgcaatctgagagcattttaaacaacctggatttctgagcagcttaccatgtgacatttgcaaaaatgttacattgatttgtctgagactccaagttcgaactaggctaataccattggagttctaaaaaagaacttgctgaccagattgatgatatgttataaatgtgattttgagctcaatcaacatagcttttagtctttaaccagactctgctgcagtattgggtatttgtagtttcgtagcaatcagtgagtgggtttgaacgg

SEQ ID NO: 41848 - DNA, 818 bp, Setaria italica
  Peptide Sequence Number=SeqID_107822
tttgctggagcagagaaatgcctgtcaaactgtcttttgatccctgcaatgtaagattatttaccaaaatttcaaacaaacagcagaagctttctttatgcattagagattgactattttttacttgctacatatgacatgatcttcagggttcaagatctatgggtatgagaatgtgttttgtgggcataattcaaaatcgctgaggctctattaaatttttatttcatacatttttcactttccatattggagatttaatattcttaagccaacatcaaagattctcaagacacaaattgttctttgattattgttattagtgaaaataatctggaactctaagctaactactttatgctagttgctcgctaaatctctatgtttggtttgtttctgaaagtatatgcttgttacttccacctatctttagttcttcctatggaatatgtgctaaatctgtatgtttggtttctttctgaaagtatgcttgtttctttccacctatctttttgttcttcctatggaatatgtacagttgatgctcctatcatgcctgcagcttaaggtgaaaggcgaaaagggatgcatctctataactgaattcaaacaacaataccacatctatgtaaactctctatagcatgattgcattctatgtttttcttacaaaagataccttatgatatcttctgtacgattttttttttgattaaggaaaaggaaacttggacaggaaagacccttactatcaaatctgagcctcgtgttctctatggcaactatggctactctgtttggtattctgtgtttattga

SEQ ID NO: 41849 - DNA, 528 bp, Setaria italica
  Peptide Sequence Number=SeqID_107823
aatggcaagcttatattgcagcaaaaaggggggcaaaaggattgaaccaaaaagagtggttgtttcatgcttggatgaagaaagaagcaaaaggccgacaatggaatctgtagtgcagatgttccttttagctgatgggtcttacggcatgcactagggtgatgttctatgtactgaatcgacacacaggtaggatgtgagctatcgaaatctaattttctagcattacttcactgtgtggctctacatatgtatgcagtacttgctggagtcatttgctttgtatatcgtcatgaagtggcaatgctggcagaaacaagaacttcaggagataaggtatgcaagaaatatatgataaccagaaagctaatatcaaaaataggcattttataggttaaccagaacataaggtacactggaaggaaagtaacaactgtaatgtcacacattattaattaaccatcaggttaatttaattgcccagcatgttttattccaaataaatcattgtagggtacttactattgt

SEQ ID NO: 41850 - DNA, 509 bp, Setaria italica
  Peptide Sequence Number=SeqID_107824
aaaggaacagggctctgtgataagtgattacttgttacttccaaagttccaatttcacgaaataggcagacatgagcttataaggactaactttatcagcttgtccagctgttcactcgcatgagacaagcatgggtagaataaaatggtccatgtcaccatctgatgaaccaacaggtgctcttggtagtagcaagtgccaaactcctaaacggcaaatggttttggagttgaaaggtgttttctggactctagcaagaggttagtgggtttaaaatgacttgttccgttacaataaagaaatgtttgtcctgtaatccattattaaaaatgtaagaagctgaagaagatatacaaatcatcctactttgatttgcagtctgatgttacaagttaccacaatgtgtcagccccaaacctacacacagagtacaataggcaagaagataacattagttgtctaacttatttttatttttcttttactttttctaagtttttgtttattt

SEQ ID NO: 41851 - DNA, 625 bp, Setaria italica
  Peptide Sequence Number=SeqID_107825
accgcctcgatgagctccgcgaacacggcgcccgtcgagccccacccgcgcgggcgcgccctcgccgggtgcagcagcgccgcggtgtgcggcgccgggaaccctgcgtaggggctctcgccgtcgaacagcttctccagcagcgtcggcacgacggcctcgctcggcaccggctccccgcactcctccctgaaccggaacaggtcgtgcggcggcgaccgcgggtagctctccgtcgccgcggccgtggcgttcggcgccgggtcggtggttgaggcgtcggtgaggtgcgcggcgtgcgggcgcacgatcgtcgtctgggatggcctcggcgacgggcgggtggacgaggagaggaggccgagggagtagccgacggcgaagacgacgaggaaggaggcgagccgcgcgaggtgcgggcggagcctggccggcgcggcgtaagcggacgccgacgcacccgccggcgggcgtggcttcatggtcacgccacaaggtgcctcttttgtctccgtttgcggctcttctggaggcttgcttgacaggcgtacagattatctctcctttattcgtcgtcggtttagacttctgttcgaggattaggttttggatttctatttattta

SEQ ID NO: 41852 - DNA, 484 bp, Setaria italica
  Peptide Sequence Number=SeqID_107826
ataaggataaataaatgtttgatacaaaagaaggcttgcccctgtaattgtaagtacttgaccgacatcctcggatgacagactaagtccaccatagcttctgtcgctttcagcccatagaggaaatatctctgagtaagccatatcatcaaagcaggcaatgcaatagagaataatagatgacatcagtggccaattcttaagtaagctcttatttagagctgaactagtgttctgctcaacaaattcttcagaatcagcagccaaatgctcaatgatacattgattttcttgatccttcttttcaacaggtttatgtttatgaagtgtctccgggagccatatgctgcttaatagaataacaaagcagaagacagatatgcataaacatggcaataaatatgggaaccttaccaaataatgagttggcaggaaaaacattggatactttccgttggctgcgaaagatatccaccaatagctg

SEQ ID NO: 41853 - DNA, 143 bp, Setaria italica
  Peptide Sequence Number=SeqID_107827
aggatgttaaagttaacattcctgcctgatgccatcttcctagattgaatctgtcatttttgcgctcgctgaccgtttagactgttctcaaaatggttcatgtaatgtttgacctgtgcagaacatttcgctgatgtatatag

SEQ ID NO: 41854 - DNA, 213 bp, Setaria italica
  Peptide Sequence Number=SeqID_107828
aacagattcaatctaggaagatggcatcagggaggatgttaaagttaacattcctgcctgatgccatcttcctagattgaatctgtcaggaatgttaactttaacatcctcccttttttttcttccagagttcaggtgcttctcaaataagatttaaatagagctcaatcttttaacttcacagtgcccttgaacacaattcttttttttaat

SEQ ID NO: 41855 - DNA, 491 bp, Setaria italica
  Peptide Sequence Number=SeqID_107829
cagtcagctgaaagcccagaagaaagcagcaagtcagtggaactagaggagatacacttcaacaaagaggcttgatgaacaaccaatggttatgaccaagcagcatgctatcaacaggaaaaacaattatctacactggggatgagagataattgatccttttggtcagtcatcaggctgcttcagaccgctcagcaattaacagtgactcaagttcttctctccgtttctcgagctccttcaaatccttgaccgcttgctcccgtgatgtctctttctgctgcttacgacgtttcaacacaccaaggcacaatatacccgagattatgtagacagctccacatgcaagaagcatatagctggcaatctcctggagcaaaagcagatcattcctctcaacatttgttgctgccttcgtcatgacagcaacaaatatctgtagcattccccttgcaggcaagtattcaaatatcttgcagaacttgacgatg

SEQ ID NO: 41856 - DNA, 468 bp, Setaria italica
  Peptide Sequence Number=SeqID_107830
acagtctagaaaccagcacgggtacagggtagtgtcctgctgatgaagacgttctgtacgtacgtcaagtttctcggcaccatgactctggacacaatcgaggccatgccaaaaatatggcaaccagtgcaactaagaggggcaaccaatatttgaagtgagtgaacaataacgaggccctccacgccgtctgacctgctgccgaacttttagcagtaccaatgttactcagttcattaacaatctgggctatggtaggccttttcgctcggtcatggtccacacatcttaacgcaatttcgatgcatgtcctcacttcctgagatgcatagtacgacgacattgttgttgcctgcagcctcttccgccagtttccatgtacaagcttaataaattcttctggaggtgtgtctacacaatcgaagtatcccttctttcctgccatcattcgtatgattatcacaccca

SEQ ID NO: 41857 - DNA, 1849 bp, Setaria italica
  Peptide Sequence Number=SeqID_107831
taccacataagagacacgctaagctaaggaaggttactaaaatgctaatcggtgaactaatcccaaatatgaatatgataaaggaacttacaacacaatcgaggccatgccaaaaatatggcaaccagtgcaactaagaggggcaaccaatatttgaagtgagtgaacaataacgaggccctccacgccgtaaatttgaattcactatgaacacagctatcatggatgtcctcttcatgattactctgacctgctgccgaacttttagcagtaccaatgttactcagttcattaacaatctgggctatggtaggccttttcgctcggtcatggtccacacatcttaacgcaatttcgatgcatgtcctcacttcctgagatgcatagtacgacgacattgttgttgcctgcagcctcttccgccagtttccatgtacaagcttaataaattcttctggaggtgtgtctacacaatcgaagtatcccttctttcctgccatcattcgtatgattatcacacccagactaaaaacgtcaaacttcggactgattgtctgtctgtggatgtattctggtggcatgtatccgcgtgttcctgtaacattttcggattgcgttatatacgtttctaccgaatcaaagagtcttgacaaaccaaaatcaccaatttttggcatcatgtctttatccaacaatatattttcaggttttaagtccagatgataaatgggatgatctgatccattatgaaggtaatgtaaaccctcacaaattcctttgattattttgtaacatgtgtcccaatcaagtctgcatgcctcatcagaaaggtgcttgtcaaggcttagaccctgcaagtattccaggcaaagagctctttgttccacactagcagcaacaagttttccattgtactcaacaagtatttgtgttgtatggttgcagtagccaactaaccgtacaatatttttgtgttggaccttcataagattattaagctcattcttaaataattgcctgtcgccaatccacgccattgggtgaagcttcttgacagcaacctcttctccattgtccagtactcccttgtaaataactccaaatccaccacgcccaactatgttctccatagaaaaattacttgtaatacgctctaagaactcgagtgtaaactcccttgtcctataaagctgttctatagaagacccttcagcaatataaatcttattcagtttatctacaatttcggttattgtaggcctcatcactcggtcagacttcacacattttaacgctatttcgatgcatgctctaacttcacgagaagcatatctccaacttgtttctggcacccgctttgcccagagtccatgtacaagctgaataaattcttctggaggagtatctgcgtatttggagtaactctcctttcctgccattatttgtatgattataacacccaaactgaatacatcgaactttggtgagatttgctgtttatcgatgtattctggtggcatgtatacacttgtttccatatcttctgatatgttgttggtttctagtgaatcaaagagtgataaaccaaaacctccaatccgggggatcatgtggtcattcagcaaaatgtttgttggttttaagtccagatggtaaataggatgctcgagtcccttgtgaagatactgtaaaccctcgcaaattcccctaattattttgtaacatatgtaccaatcaagcccacatgattcattagaaagatgcttgtcaaggctttgtccctccaagtattcaaaacatagagctctttcttccactctagcagaaacatattctccgttgtgctcaa

SEQ ID NO: 41858 - DNA, 593 bp, Setaria italica
  Peptide Sequence Number=SeqID_107832
aaaataagtaactaaggaaaataggtaacaattagtagaattaccaatacgcaactgctgcagtcagtggagtgataaattctgtgcatttgctccacaaaaatcatcaatcagaacaggccaagcacctcgtgggtcatagccttccagatcttcatttacacacctgctgaaagccagtagctgctgccaggtgtcctcagatatgttgtggcgttggtacttctcaacaaagttacaccatcgatcaagcaaccggaaccttccatttagaacaatcttccatgctgctacagctctctgaatggttatactcttttgccccttttcacgacagatgaagaagacaaaatcgtagaagcaactgaataggcccatatctaaatcaataaatggcatgagctttggaatgtcagcgaatattccatccattattactgtatggggcattatgcaggtttatatgacctgggctggttaaggatgccagtgtttgtcttggccaggatttacgagccacaagcaatggaaaccgccatgatatttgtaacatttgaagtttagccaccatgatattagcacaggaaaataag

SEQ ID NO: 41859 - DNA, 333 bp, Setaria italica
  Peptide Sequence Number=SeqID_107833
ctttggaatgtcagcgaatattccatccctcattccttcgattccatctatagcgtgtgaaagctcaaccaatccttgtcttgccttcacgtttgtacctcctgacacagtaccgtagtacttggcgaaagcctcggcggcggctgggcacgcggccgcggcggccacgaagccttcggatcccatgggccaggcagcggatccgagccagggaccctatgccccgagcctcgccgccggcggggtaacaaccaccagtccaccgcctccctccccccgatcttacgtgcgagccgacacggacgcgagcgcgagaagcaagaggtgagaggg

SEQ ID NO: 41860 - DNA, 1088 bp, Setaria italica
  Peptide Sequence Number=SeqID_107834
aaaaaaatgccttcaatgatgagacgtggatggcacatactccgctgtgagttatacagcatcattcgagtacaaaagaataatatcccccctctcatcattgactaaatacacacgctggaagatagtggcacttaagtttggaatgtatgcagattatggctgccacaaaatgactaacctatgcattcctggttatatcaaaaggagcatttcatcgagatgcaaccctcgaacccttttgacagggcatcctcaacattacaaggcgagttctgaagacagccccttggattgtgtaaattcgtatcctcgaggtagtctgagcaactatttgagaaatctgtacctttgttggattcccccactccatagttagtgccatgactttccttcagtcgttttattggtgtcagatggacagagcgtgtaaaactatccgaaagctctacatcctcctcattggacctaaagtgaggagggcatttcctctttgatccaggtagaaggtccagtcctttaaatgtactggaaatggtacattgtgattccatcgcactgctgcagtcagtggagtgataaattctgtgcatttgctccacaaaatcatcaatcagaacaggccaagcacctcgtgggtcatagccttccagatcttcatttacacacctgctgaaagccagtagctgctgccaggtgtcctcagatatgttgtggcgttggtacttctcaacaaagttacaccatcgatcaagcaaccggaaccttccatttagaacaatcttccatgctgctacagctctctgaatggttatactcttttgccccttttcacgacagatgaagaagacaaaatcgtagaagcaactgaataggcccatatcctctaaatcaataaatggcatgagctttggaatgtcagcgaatattccatccctcattccttcgattccatctatagcgtgtgaaagctcaaccaatccttgtcttgccttcacgtttgtacctcctgacacagtaccgtagtacttggcgaaagcctcggcggggctggttaaggatgccagtgttgtcttggccaggaattt

SEQ ID NO: 41861 - DNA, 553 bp, Setaria italica
  misc_feature (17)..(17): n is a, c, g, or t
  Peptide Sequence Number=SeqID_107835
caaacgaacagtaccanaacttaacaatccatgtataggacgaactaataggttgtcatgcaccttattaggatactagaccatagtaaaccgagttcatgtctacgctcaaaatccactcatcagcaaagtttagacaatgctgatcaccagtccagggaatctgcgtcctaccacccttcatcgccagggcaacagcagaactgctgttggctaccggagaaggcatatgcttgaatgctcttgacgctcccgctcccctgatttgtgcggtataacaacagccgagcttgctgggaatgccgcagtcatccgggttgtaggttccaccagcgaagatgagctcgtccgttccctgtcagaggcattatttagcaccaagggattgccttcgtggagaccaacatcattgatgctgtagcgctgcttcttagcgctgttttgctgtcgatgaaagtacttctgggcgtgactggagatctgcaccggcgtcctagttgtaacaaagaatttggatatgttcttccagttaccacggccatacacttgtaga

SEQ ID NO: 41862 - DNA, 411 bp, Setaria italica
  Peptide Sequence Number=SeqID_107836
ggagctagacggccggcggccggaaatcgaaacatactacggcagggaggcggcggcgcatcacacggctagcaagctagccgcattgtcgaggtctcaaggatgggtgactgcaggcccctcgggttcctgctctccctgcccttcgccttcctctcgctcctcctctccgtcgtcggcgtcgccctctggcttgtcgcgataacgctgtgctgcatctgcccgtgcttctcgtgctgcgtcaaggtggtcgagctggccgtggccctcatgaagctgccggtctccatcatcatcttcttcattaacctcatcccgtgctagcacggttctgccctgttgtttatacagcattacttgttgtacatgtgatggggttagtattcagtattcacgcatcgaggagcacgc

SEQ ID NO: 41863 - DNA, 632 bp, Setaria italica
  Peptide Sequence Number=SeqID_107837
gtactacaatggagctacatgtaagccttttgttcacataaagaaaccattttgcttctttaccatgattaatgttttttctgtaaaagtcttgtaatactattatttgattagtcacgttcatgtattacttttatgatggttttgatgcacacaaaaattaattggcaagcacatctaaagcattcatcatttcaaaagatcaggactattctataatgaccatgttcaccctatgattcacatatgataattctggtaagaaaggagtcatactatatatctagataagcttatgtaagttataattccaaatccttgtttgatccttacttaagtatggatcatttaaattggagcaagaataagggggcagggaacatcaaataaccaaaagatgatagtacatgattataccgcagctgtaaattgaactggcagaagaatcaaaactgtttgacttttaggcttttttttttttaactctatgtgaactgcaagttagataaactgttgatccattttatcaggttgatgagaacttgaatatggtgcattccaaatttggactcaggtgcatttataccgataaaacttgcatcaagagaatctaaaattgactaaacgttgcc

SEQ ID NO: 41864 - DNA, 198 bp, Setaria italica
  Peptide Sequence Number=SeqID_107838
tttggtaaggttccttggagcttgggcaagaagaggcgcacggagaggccggtgacggagtcgatgacgacgtccttgtctacttccacggcggcgggttcatcatcgagtccgcgaggtccgccacgtaccacaactacctcacctccctcgccgccgcggccggtgtcctcgcggtgtccgtcgactaccgcctcg

SEQ ID NO: 41865 - DNA, 598 bp, Setaria italica
  Peptide Sequence Number=SeqID_107839
tctaacatgtgacacgtgctttaagtaagtcagtcgaagaaaacgcccccttagtccttctaattagcatccgaacattcgatgtgacactgctaaagtttagcacctagtatcaaacaccctttagccccactataactgaccccttgcctctatctcttgtctgtggtggcatccttgagtgttacaggttgctaagcaactccaacacggaacatggtgaggagggcgacgaggagacaccaccgaaagccaggagccggtggtgagctgaagcgacgagacgaggctgcggaaggccgcggagcagaacacaagggcaagaactcacgatccaggactgttgtcaatgatgggatggctgtccatccatatgatcatctcgagctgccgcaggccgcagctaaggtgtgggtttccagcgtttgctgttccgcagatcatgttcccagggaggcaggagtcgttatccatctaacacagatctgctgatgcagaaatcagaatgcagatgatataagtccttgcacatgtgacgtctatcagtagatgctactcggattcatcagaggtcttgtttttaagtcttggtttaaaa

SEQ ID NO: 41866 - DNA, 493 bp, Setaria italica
  Peptide Sequence Number=SeqID_107840
ctgaccatggttgaggtttaattttggatggaaaaattgtcggtcgttcttattttctaaagtggcacgtatgaaattaagaaaataaaatctggtgaggagcgcatatagttaagcagatactagcactaaggcattaaaacataacataataattgaatgcatgaaccaaacttatttgaagagcaatagaggtgagcatagcatagttgatattttggcttcctaaccaaaacatatgaactataacaaactgcaagttgcccaagtgaatgcgttggaccaacaaagcattagctacaaaaggatttagcgctcagacatgaaagaacatgcaagggatgagcatgcagtgccaaggaagtgccaaagcagagatgaagacagctaggcaacagtttgagttcgagatcaacaacagcatcagccactaggtcagccttagttagactgaggacagaaattgcgctatagtgagaatgttaccgaagat

SEQ ID NO: 41867 - DNA, 1558 bp, Setaria italica
  Peptide Sequence Number=SeqID_107841
cgagacctcgtgcgcgctgccgcggcggccccgacctacctccgtctcctcggcgccttcgataccgtctccatcacgctcgacgcgcctccgccagggactcccggcagcgccgttgtcgtactcgttgacgtctcagaggcccgcggacgcgctgccactgaattcggcgtcttcgctaacactcagactagatcatgttcactggaaggttcactgaagttgaagaacctatttggatactgcgagacctgggatgcagcaggtgcccttgaattagatcagacagcagaactaagtgctggagtggaaatgcctagaatcggagcaataccaactccactggtggctagaatatcatttctgtccgaagactggttaaagtcctcacttaaagaacacctaatgggtgtttctgttggcttgctctccaccatgaaccacaaccttgcctacaatttgacatggcgaaaattaaccgatccagcacgcatgtcatccaattctgtacaagagcagttagcacatagccttttgtcctctgttaagtatgcctacacggttgaccaaagggactcaagcataaggcctacacgtggatatgcttttctgtcgtcttctcaagtaggaggtcttgcaccagggagcaaatattcacagtttcttagacaggaatttgatcttcgagtggctttgcctctgggtgtgctgaatggtgctctcaatgccggagttgctgcaggagtcatccatccattggaaaggggatccacaggatctgtctcaccactttcagaaaggttttacttggggggtaacaggtctcttgtatgccgcttgggtggaccatcgtcactcttaggcttcaaaacaagaggacttggggctacagaactcagaacctgtgaccccaataattctgaaaacggtacttccacttctcctgagctaaatggtcttggaggtgacatagcagtgacagcctttgcggacctgtcctttgatattcctctgaagccgctcagggatcttggaattcatggccatgcatttgtctgtgctggaaatcttggtaaattaactgagtgtgatctgcggaaatttccccttaccaacttcctacagacattcaggagttctgcgggatttggtgtagtcgtgccaacgagattgtttcgcatagaggtaaactactgccacatcctgagacagtttgaccatgacaagggaaagacaggcatacagtttagcttcgcttcaccctaatttcattggcaaggtgttctcatcaaaatgaatagttgtatcccccccccccctcgctgttcagattttttccccttttggcaagagcttacctcgcacactgtaaatgataaatcgtaggtgctggcttgtggatttgatgttatgacttgtaaagcacaaaaacaaaagggaagtggttgggagcttcagtttccattgctgatctcaaggttctggactgaacttgatgaaactatgttgtataaagatctgctgcgtgaataagctaatggtggttggaaacaaaaaa

SEQ ID NO: 41868 - DNA, 432 bp, Setaria italica
  Peptide Sequence Number=SeqID_107842
ttcccctttgaaagacgcctcaactagtcatcagtagtcagctactcagcttatcgattgttgctttacatttctgggtctgtacatcactatgaaacaagcaaggtctccaagttataggattcacattttaaactggcaattcaaaccgtcgagtctaaacgtttgagcttcaagttgagatctactgcagcttaagtgttgttaacgcatcaactgatgcttacgttcatcggcacagcagggacacttgaaatgaaattgcacaaccgtgcacggcagacagaaggcatgcttgccccccttgcactgcctgattgcctacagtcagctgcattgatttggttaatttggcacgatagctgcatgtcctgaaaaggacgaagagataaccgcgacaggcgagcacgcacaatgcccttcgctccgtgg

SEQ ID NO: 41869 - DNA, 613 bp, Setaria italica
  Peptide Sequence Number=SeqID_107843
aacggcatcctcagggctaaccggcggcagccatacacgctggctaagccgttcggctccaacgacaggaggctcgagctcgcgcaacggagggcgaacccgctcgtgcacttcgctctgtgcgacgcgacgcggtcgagcccgatcgttcgtttctacacgacgcagagcgtggagccggagctccggcacgcggccagggagttcttcctccacggcggcgtggagatcgacctggagagccggaccgtccacctcaccaggatcgtcaaatggtacagcgctgactttgggcaggacagggacattctccggtggctcctcaactacttggacccgaccaaagccgggctcctgacgcacctcctgaacgatggcggcccgatcaacgtctcctacatgaactacgactggtctctgaacgtctgagcagaatccacccggcgaagtcttcttgtccgtacagttggtaaagccttgtggccttgtgggcgtgccacgacccacgatacagtcagagttgcagtcagtgggattagcaattggccaatggccaatagggcgaatcactgagcatagattgcatcaggatatggagcttaatcggtaagga

SEQ ID NO: 41870 - DNA, 397 bp, Setaria italica
  Peptide Sequence Number=SeqID_107844
tgtttgtcgtggctgtgtgctttgcttagttggttctttaggatccgactgtgtctagtaaccattactatagacacccagtcacctagttgacttgtggatctctcgtattccgcttgcctggatttgaggcttgattttgggatagaggcctaattctatgaaagaattttttaggctctcattcaccccccccctctggtcgctggttcagtccttcaattggtatccgagccggttaaggtttctcaatacactaatcgatttcaaaacccactatggcgagcgttcttcctcgactgttgcaccttacttgctggctctgactattggtattggaaaacccccacatgaaagcccatctaaaatgtaagggagtaggggtttggaaatcact

SEQ ID NO: 41871 - DNA, 241 bp, Setaria italica
  Peptide Sequence Number=SeqID_107845
cttcaacaagtttttgcttatcaacaccatatgcttccaatgaatcattgtcatttaagcgaatcccatccatatattccaaaatcagaaccttgtcagttgactgaataacttctggaatgagtacaccagacgccatttgcgcaatattgctcagcaattctggtggaacacctggccctgccctgattcctgataacttctgaagttcttcagtgtcaactgtcaaggttgccagacg

SEQ ID NO: 41872 - DNA, 3247 bp, Setaria italica
  misc_feature (1)..(103): n is a, c, g, or t
  Peptide Sequence Number=SeqID_107846
nnnnnnnnnnnnnnnnnnnnnnnnnnnnnnnnnnnnnnnnnnnnnnnnnnnnnnnnnnnnnnnnnnnnnnnnnnnnnnnnnnnnnnnnnnnnnnnnnnnnnnnttttttaatttcttgtaatcaccataccagctcgccattttctttgaacgtaaactttctttacactgtagattctgccgaataaaacagtccgtggagttttacatgccacctcaaattcaaaatggcgtgtgtataatatataccacgaaaaaatcctgtagtttttcccgcttcctattcaatcttgtgtcacaacagaagctaccaaactggtaagttttgcaacgacagttacagcgttaacagtcaaaccagctggcttcgtcgtcatcgtcatctctgttgctgaggtggtgcaagattaagcaccatgtcaggtcccttctcccctgatgttgagaactcgtcgggcacaggcagacccagctcctccaagatgaaccggacaatgccgcgagtgacgcttcccagggacatcttgttcaccatcaccgccatggcaaagttgttctccacatcacaaaacccggtggacccgcccatcccggagtgcccaaagcacctcagcgtgccgccgctggggttgttgtacctcctgaacccgagcccgaacttgccatttgggtgtaccatgctctggtattcaccgacacccatgaacgcgtccaggatcttgtcactgctgaagatcctgccgccgcttcctgctgctgcttcatcgttagcgtcactggtgcgtagctggctgtacccattcttgtcagtgttgctcacatcttggagatttcctgtggaaccgacacccttctttccagcgccttttttcttcttgagtggggcggtagggaacttgggggtgtgcacatggctgccaaggggtggcttggagtccgcagagtgcggtggtggaattgaaccaccagttgcaagcgctgcatagtatcgagcaagtgctcgagcagagcagtggccattcgcagcaggaataatggcccgacgaacatttaacgtgttgaaaagaactggtacaccagacgccatttgcgcaatattgctcagcaattctggtggaacacctggccctgccctgattcctgataacttctgaagttcttcagtgtcaactgtcaaggttgccagacgagattcaacacctggtggaatgccaatatatagctccccttcaatgtgaagaggacgaacaatagcctcttctagaacctcttgaaacttcttcccagatgcatgctctatgactcccccacacaaccaaccaaaggataggtaatggtaaatttgtgctgaaccaggttcagtctcaggtgtacacttggcaacctggtttagtgtctcttcccagtcacataccaacatgggatcactcttcaccacatctcccagcgcattgtgcaaaccggatgtatgatttagaagatgatgcacctttattagctccttgctgttagttccaaagtttggccatatgttggccactgtttcctcatacttcaacttcccttcgttgacaagccaatgtaccatcccagcagtgacacccttagtcactgagaaaacaggaaagagagaatcatgttgaacaggtcgtggatcgtacttccccaacataccagcggcagtatctattatgacctttccatctttatatgcgcatacttgtattcctaaaattttgtcacttcccaactcaagcagataatttctcagtttagactccacgtcagagttagcaggtgagtcataaatccactgactgttaggtatttgtccatgcatcaaactcccgagcaaagttgattcagcaaatggcctcatgatgtctagataaactatcctaacatttagtgaagctgaaagacctctgagaagattcaagaccctcataaatattattgcatccccagggaaagcatccacaggattaaaacgttgaacttccttcttgttcaatttcatcttttcttgaagagctttgacatttcgttctctttggtcattgagtgcctttatgttctcctttgcttcacttgcagtagttgactggcgaaaaaatattgtagcaatatccatagcctgctgaggcatgtcaacccgcagtttaagccccatttctgcaaatgctgacagcagtgccacatgatctccctctgcgcatgacaaaaacatcttagctagtgcctgcctcatagattttgatatgcgcttagtgagcccaaagtcaaggagaattggtttatgtggaggttccttgctcacaagaaaattgccaggatgagggtcaccgttaaagaagccatcaatgtatatttgatgagcatatgcacgggttatctcttcaacaagtttttgcttatcaacaccatatgcttccaatgaatcattgtcatttaagcgaatcccatccatatattccaaaatcagaaccttgtcagttgactgaataacttctggaatgagtacatcaacagcactggaactactgccactcccacagtcagtttcgcgactaagattcctggagacagtcctagtgttctctgcttcatggttgaaatcaagttcctttggtgcctccttgcaccattcatcaatcattggattaaaattatactgaggttctgcccacgctatccattcaatcaatgattttgcgttcttcagatcctctaatatgatctctttgataccatcatgctgaattttgacaacaacttctctgccatctgccagagttgcacgatgaacttgtgctattgatgcagtcgcaagagggtccagggcaaaatcagcaaatagatcactcatgggttttccaagttctttctctatcgttccacgaacctcttcggaagggcgtggaggaagtgaatcctgcaattgcttgaggacatttatgtagggttcaggaagcacatctgctcttgtggacaaatactggcccattttcacccataaaccttctaactctatcatcaggttgaggacacggcgagcatttcgctcatgtgttttcgtccatatagcactctttttaccagtgctaacccattggactctcttctgaacagccttatagtcaaagtagataagcagtgccatggagaaaactttgagccttctggttatggtgtttccccatcccattatcagttggatagtcaggacaagcgatagcagaaattc

SEQ ID NO: 41873 - DNA, 663 bp, Setaria italica
  Peptide Sequence Number=SeqID_107847
tactttaggcttgaactgtactaagctgctactgcaaatttattattattcagaatcatgcttttggttcccctctttggtcctaatttgtttctgttgttctgtaacctaaattggagttactaacatgcagtaataatctttataggggagtttgactcccttgaaaactggaagctatgttaaaagggtgtaaataatctgctgttggtgttttttttcttgggttggattcttgttgaatgattcatgttgagccaagagtaagcactcttgtaatcttattagtggctttttcgctgcaatctttctcactagtcccacaagttgtatgagacatgattcacattaatttatatcctgtagttgaatgagcttaatgtgcaacgtgtatcatgcaatacacagtacaactgcatagcatttgctggtggtaaagaaattatacttggctggcctgcacttctgttagatttttcattaaagtttatctagcaatgcaagccaggcgtacattcatagtggaagaaacatgaggtgcacattgtggtagtgttctcagtgggtcatgatgctgatgttgaactagttacgctgattggattttgttgttgcttagtctggcatgtacttctactgccacaagttggaactctttttggc

SEQ ID NO: 41874 - DNA, 452 bp, Setaria italica
  Peptide Sequence Number=SeqID_107848
tcccgcgcgccgcgcatcgccgagtgcctcgtcggggatgacaccggcgccatcgtcttcaccgcccgcaacgaccaaggtgcctacttctacttgccgtctctattgtttctgctgtggcgcgtggcgggctaggttccttgagccccgatctgattgcgctggtccctctcgaatttgatgcaatgcattcttttgtaaagtgatcgtatttagtcgtggtgattataggacacaacctagggaattaagtgctgagacggctttgtcttatgaatttatttacttccaatgatggatggataatttgtaccaaaattatgcggcacttagttcagacaataaaacctacttttatgtacaacggtaacgtacaagcagtggatcgtgtgccatatcagaggtcaatactgcctatatgccgttacttgttctccctgtcttgttttggt

SEQ ID NO: 41875 - DNA, 484 bp, Setaria italica
  Peptide Sequence Number=SeqID_107849
atcactactgagaagtgagaaccaagacaacactcctactagtcgtgggctattggccaacctagcagggcacgctcaagccatggcaggccgagctctcgctcccttcctgctcgctgccaccatcctggcggcgctcctcgccacatgccacgccggtggcattgcggtctactggggccagaacgacggcgaggcgtccctgtccgagacgtgcgcgtccagcaactacaagttcgtcatcctcgcgttcgtctacaagttcggcaagggccagacgccgcagctggaccttgccagccactgcgacccttcgtctggcggctgcagggggttgagtaaggacatccagtcgtgccagcgccgcggcatcaaggtcctgctctccatcggcggcggcgacggtagctacggcctgacctccgagggggacgcgcggaacgtggccgcggtacctctggaacaactacctcggcggcacgtc

SEQ ID NO: 41876 - DNA, 776 bp, Setaria italica
  misc_feature (33)..(33): n is a, c, g, or t
  Peptide Sequence Number=SeqID_107850
atttacaatctacaggtcttttggcgttctggngatgttttgtctctcagattctttcatattccaatatggtatcatatatcacctgaatatctctgctggcaacaaaagcatctctgtttacggtctttcttggttggttatcattgttgtagtgctggtcttaaaggtggtatccatgggaagaaagaaatttagtgcagattaccagcttatgttccggctgcttaaattgtccttgttcattggatctgttggaacgctggcagttctattcaccgtcttacaccttacagttggtgacatatttgctagtttccttgcatttgcacccacaggatgggcgattctgcagatatcacaagcagtaaaccggtggtcaaggcgtttggctttggggatctgtcaaggctctctcgaggggttacgagtacctaatggggatcgtcatcttcgttcctgtggcagtgctcgcatggttcccatttgtctcggagttccagacgagattgctattcaaccaggcgtttagccgaggccttcaaatctctcgtatcttggctggtggaaagaagcaaagatgaggttagtgcaggaagagacgttcgtaagcacaggttaggcgaggaattagctccaggattttgacattggtgttgttggagccatcctcaagctgctggcgctttcagaagttgttgtacacacagggcggtcttttaggtgttttccttgtatatttcatacggcattgttactcgtggtacataggttac

SEQ ID NO: 41877 - DNA, 572 bp, Setaria italica
  Peptide Sequence Number=SeqID_107851
caaggacgtgctgcagaggaagcggccgccgcacatcaaggagatcgacgatccgtccttcgtcaccgcgttcggcatcagagatctcttctatgtgtatgatatcttggcagagaacctcatggacccttctcatgtcccatatgcacataaggggctgataggcggacctcgcaatacagaagatcccgggagagttgagcacgataaagaaggcggcggcccgatcaagctgaagatagaggaagcgagcatggacgggttcctgtcgtcgtgggaacgcggcttctggaagttcgtcgcgccgtgcacgttccacagttcagggactagcatgcaggcgaaaccagggaaaaagaaagcgccccggttcatgctcgtggtcttctgcgtcccggtggctcctggccggagcaggctgatctgggcgttcccgaggaacttcgcggtctggctcgacatgatcataccacggtgggtctaccacatcaaccagaacagcgtcttggattcagatgcttacatcctccatatcgaggagcgcaagtttgccgcgtcagggcttgataact

SEQ ID NO: 41878 - DNA, 1124 bp, Setaria italica
  Peptide Sequence Number=SeqID_107852
tttttttttttttaagtccaaagctgcagccgcggcgtccggctgggtctacagtttttttagtgcagagcacggtgcaggtacaacaagaactccgccttcggcgtcttcccagttcctacaagtaagtaaatacgtacaatccggtaatcctacggtcatactgctactagtatctttctggtccagtaatcaagctgtacaggagagggtgtctgcatgctagctaactaatagagaaacatcagcgcctgcagtccaaccgcatttggcttcttttccttgcggtgaagtgaagcacaggcagccagtgtccaaatgagggtttggtcaaggttgcttcgattgcagtgagcgaaacatcaccgcggcgggcacgagggaccgtctgcaggaatgcaagctgttgtctccctttaagcgacttctcaagaaaggctttctgctatagcacctgactcgccatcttttcttggcagatccttgacagtgcttctacatggaaattttgtagctcttcaaggactttaacacctagccccctgaggtcctcgcccttcaatctggacacgacgctctccaattctttgcagcgccttctttcaaaattgtacgcagctcttgcttcttcaatggtactgaggccatcccagctcccattatctgaagattgcaattcacttaccgctctgccactatcagtcttagatgagtggaagccattttgctttgctttgaattcaaatacatcctcttgagagctttctttcttcacctttgaaacaaggacccacatacttgccagctcgttttccaactcatgctcacggcattttgcatcgtcaattatctttataagctcactctctcttcgatccttttgagatagtgtgtcctctaacacagcctccctctgacaactagcaaccagctctttctgcaactcctccactagaattccattctcattatcacaccgttttgtgtcattgtgaatgttactccttgaaactgatgcagtttgctcttttgccgcagctaagtctgcgttcagttttgcattttcataagaaagcctggtgacttcttccgccaaattctttagttcaactgcagcggcagat

SEQ ID NO: 41879 - DNA, 977 bp, Setaria italica
  Peptide Sequence Number=SeqID_107853
gacttgagtctagaaggttatagcagtccgaggtttcctagctggctcatggccatttctcatcatctccctaatcttacttgtattgaattgaagaatctgcctacatgtagcaacctaccaccacttggacagttaccgtacttagaaagcctgcgtctttgtgatatacccaatgttataaaaattgaaaggggtatctgtggtggaaaaggagcattcccccgattggcaaagttcacagtggctcatatggatggtttggaggagtggaatacaacatgccctggcgaagatggtgtggaagagttcatgttccctatgctagatgcactcaaggtatatgaatgtccgatgttgagactgaaaccatgcccaccgaaatgccgtgagttcctaatatcacaaagtgaccaagttatatcttcactggtggaggtacaaaccagcagccatcgctgcaactctactccaaccatcaccagcctggttatcagctggataaggtaccaccagagttgcaggctgtttcaccacttcctggccctccaggagctgcaattctactcctgtcaaaatctgacgagcttgccagagggcatacagcaactctcctcccttcagtcactcgagttgagtaattgtcacagcatatcagcactgccagaatggctgagcgacatctcctctctcgaaaagctcatcatcaggcgctgtgatagcatcaagtctttgcctacatgtatacagtacctcaccaacctcaaggagttagttattgatgggaacacggaactacagcaatggtgcgagtcagaagagaacaaggccaagctcgcacacatcaacataatgtatcgtgatttcaactttctttgaacttaaaaatgccaccagtgttgggcatacatccccgggtccaccagaagacttgtacagacccacatagggagacgtacactgagacgatccaggac

SEQ ID NO: 41880 - DNA, 597 bp, Setaria italica
  Peptide Sequence Number=SeqID_107854
actaataggacaaaggaattaacatgggtgccgatggggcattcttcagttctttggatttcggggtcgcctgcggtccatgaagatgctagctgacaagaaacatggtcagcggaaaagcagtggtggaggtagacgcagaagctgctatgcaccattgaaaaatgaagacagtggcaccatggatgatgagaaaaatactgaaattagaaaaaaacagaaggcctcaaaaaagaattctggtaaagctagtttgaggtcctttattctaaagaaattatatggaaaggaaggtcagaaagaaaagatgcttcctgttgcaccaaagctattgcgcaccatttcgatacactatttggaaagcaacgaatatgttattgatggtgaatccgcttccagtggtgatggctcttcacatagtactaaattgtcactacaaaatgctaccgacacaaacttgcgccattctacatctagcatcccagatggttgtgttagtgatttaagttcttcactgctcctaaaaagagatgacagtcgtgtgaagcgaaagagccaccgtagcatttcgatggatggagttcttcataaggtccc

SEQ ID NO: 41881 - DNA, 852 bp, Setaria italica
  misc_feature (849)..(849): n is a, c, g, or t
  Peptide Sequence Number=SeqID_107855
aatataaacctctaatgatgatgctccctcttcagcataccttagtgcttcacgacacaaactgttgtaacgccatgttggggagtgctcatcatcttcagcgctacttctttgctcctccttgggctcctcaactctgttaacttcatcaactttcttgcttgagcttctatccatggcattctttgtccatctttttacaaaatactgagaaggaagtgcagagatacctcttacaccaaatacagtaagtatgtgcctacagactataccaaaatattcaaacatccgacagctacatgttgcagaacttccagaagaactgaactgaactgttacaggcttctcacttccttcagatttggtcactatataaatggaaacaccactttcctcttttaccatttcagcagtgtaaacagaagcatcgatcatttcctgttgaaatttcaaaaacattgaccttgtatataactctgctccctgcttctctataggagatgatgtcttgatatctggaagtgaatattttgtttcaaattcttccttcacctccttctcataacaacagtctagagctttttcatactgctgaatgaatgactgtgaatcagtcctggcactgatataaccttcaaataacgaactcctggttgcacactgctgctttaatgacagatccccaaagaatgtgtctctcaagtacactggaacccattgatgacggcaattgtacattgagttaagccattcagtattttgagagctgaccatagaaattaatgccttccaatttgcttcaaactcatcaattgtctgagacatgttgatacaattgataaagtccanata

SEQ ID NO: 41882 - DNA, 307 bp, Setaria italica
  Peptide Sequence Number=SeqID_107856
cagaatacacctgtggaacagtatgattctggtatggtgccgtctgatgcactgtagtataattctgtggactgtgattggggtgcgcaactgctgtttggcggacctgtggatggttacgaaattgtactcctgcttggtgcgctgtagtatttgcctgtgggtttttgtgaactgttctgcttcccgtaaacctggatacctggtaacgtcgatcactctccgcacgtcctccagttctggcatgctaattattacacaagaactccaccacaaaggaataatcagcatgccagaactggaggac

SEQ ID NO: 41883 - DNA, 2537 bp, Setaria italica
  Peptide Sequence Number=SeqID_107857
tcaatgccaatctgcccatctcccataatggtcagtgacatggcatctttagtacagtatgttgttcatcgtctatgcgtgccgggtgtctctgtctggtgtttacagctatgttctgaactgtttttctttctttgtcgagcttcctatgtggtataatatgcttcctcgactaaaaccaatgctgtttacatgacgcaaagattctgaacgccgggcacatgcggtaaccggtaaatgaatttatgaaaggcgctgtaagtagacacaaagtcatgagatttcacctttactacaacctgcatctggtaattgtaaactgactgctagtgaacagcaatttacagcaagaacatacagaaagagagccatgcagcaatacaggtttgtgatgcctcaatagccaacccacacaacacaaggcttatatcagagtttactggcaaaagccacgtttcatatcataaagctgatgcccgttgtcgagcaaaagccgaacatggcatacattgatgaatattgccatgcaaaagtcagaagattatctgttactaccctcctggagtccatctatgctggtaagtgatatcttgaaggctatctttgagaagctgcactgtttgatgcttgtgatcgcgagtcccatattgatccattgttgaactgtccacgaactggctcatatcttgctgtcgtcgcagcatgcctattagtctgatgattcgatgtgtatccctttcgcctctgctgattctggttaggacctgtggtttggagccctggagtacgcacctgttggttctggttctggtatgttcctgctggttggaaccctgcttggtaaacctgattatgaccctggtatggtcttgctgtttggaatcctgtaccatgaacctgattgtgatccaggtatggtccttctgtttgaaaccctgcagcataaacctgctgatactgattctggtatggtccggctgtttggggctgagcagaatacacctgtggaacagtatgattctggtatggtgccgtctgatgcactgtagtataattctgtggactgtgattggggtgcgcaactgctgtttggcggacctgtggatggttacgaaattgtactcctgcttggtgcgctgtagtatttgcctgtgggtttttgtgaactgttctgcttcccgtaaacctggatacctggtaacgtcgatcactctccgcacgtcctccagttctggcatgctgattattcctttgtggtggagttcttgtgtaataattagctgtgactctcccaccaagcttcaagccaacaccaggggtacacaacaacgccaataattctttccggtcgatatgctcaagagagtcaaacttgtggcaagcatcattgaatgcactagcaattcggtcaagacctttcatactaaccgctctagctgcattatccggtctctcaactggatcttcaacaaataaatggtaagatttagtcatccaacttgggttgtcctggattcgctcaatctggcccgagtaagtagatatgacattatccagcagggcactgatatgagcaaactttttgaaaaatgtcccaagtagacgacaaagagaactttcatttctttggtgcatgttctggagtctatatcttgctatgtttgtgacacaaagctcatcaagatgttgctcatcataaagtgtagcttctgtaatatcctctgtaatgttcccttcataaatatccttaagaggtggtagaattggtggctcggatgtctgaaaatgaaagaggacaagtaggcaaagtgaataggagttgagggacccactctttggatcattaatgttttgtgcttttgcccattccttgatcagcaaaaccatatcaccaaaccgctcatctaaagtattcacccagtagaagattttagatttaattcgaccagcaaagttgttgaccgatatatcacaggagatgccaaagcggttgctcacatattgaatgaccggaactcttgcatgaggaatgaactgtatatatccagcaacgcctcgaatttgtaaagctctcctaacttctctcaggacattctgcttctttttcttgtttatagggaggtttaaaccattcccaaactgaactgataaatctagatcgccagattttgagtaaagatctgatacaaaggacccaaaaggtttgacagcagtacccgccaaggatgcaagagaatggatgcaattttctagctcctgaattgtggatagtcgcttgcttctatcatcctctactggtttgatttgtgcaaggatatccttgacacagttgcgcagcacaatattgtcatgtacagaatcaaccatgctgaaatcctagcgaacgcagcagacggatctgggcgattcagaaggggcgaatcggcgcccgctatgtggcgatggcggccttggcctccgcgtgtggcgagctcgcggcgtcgagatcggatgcgaggaggatgaagtaggggatgggggccgacgacgagggcgag

SEQ ID NO: 41884 - DNA, 291 bp, Setaria italica
  Peptide Sequence Number=SeqID_107858
tgtcttagctataaaacatgaaaggtaatacagttgtgcaattgacttgtgaagaaaagcaatagcaatatcagaagatttttttccttggcaaggaaaggataagcacatcaatattgtttaacagtctttatcgacgcgtagcatctatcatctggatgttgtcaattattccatgatcatattgatgttctcatgtatatctttaatatcttattttcatagaaacaatcacatggacatggatctagaatgttttcaggccttcaggtttaggaacgccatacacac

SEQ ID NO: 41885 - DNA, 675 bp, Setaria italica
  Peptide Sequence Number=SeqID_107859
tttttttctttacaagattaaacatagcagcttccccaatcaacacataaatgaccacaaaccggaatgtaccatctgaactcatagatataaattcttgtctccagaagaatcattacaagcatacagcaccaagcagcagactcaatgatcaatgagacgatctcaaatggagcaagacccggctgcccatccaagttcatgatggaggtaccagtggcaatccgatacagcggctctgctatgcagtacaccagtagcagcccaagcagatagttgtagtacggtgaacgtaacttgtatcgctgcactctgtagtccctcgttgtcctccatatacgatagaagcaaacaccaaagagtgcgaggtgtgagatgcacaccaccaaggtgtcgatgccacacggagtgtaggggccgaatgcattctccaccacatgtgaccaagcaccatgcttgaccggctggcagtaccaatccattgggtcaaaccccatctggccccttccacttagcaaacctgatcttcacacagttctgatgcccccccacggcggcggatcaactggagcggcggaggcggaggcggagacgaagtgtcagcatccctcgcggtggcgagctgtggacacctctcgccttcgtgttgaggagagcggtcgagaggaggaggag

SEQ ID NO: 41886 - DNA, 380 bp, Setaria italica
  Peptide Sequence Number=SeqID_107860
ggttggggatgggcaccaacatgtacccctcgtcggcgctgctcgggcagtgcaaagatgaagccattgcctccatcccggtagacgatctgattgagaaggccgacggctttgcgggcgtcttcccagagcacaagtacgagattgtcaagaaattgcaggagaggaagcacatctgcgggatgacgggcgatggcgtgaacgacgcccctgcactgaagaaggcggacatcgggattgcagttgccgacgccacggacgcagccaggagtgcttctgacattgtgcttaccgagcctgggctcagtgtcattatcagcgccgtgctcacaagccgagccatcttccagaggatgaagaactacactatttatgcagtg

SEQ ID NO: 41887 - DNA, 370 bp, Setaria italica
  Peptide Sequence Number=SeqID_107861
atttggtttggcaccatctgaaaaaaatcatggagaataatcctgatcctgaagacttggtcggagaagcaacacgtgaaagccaggagcagaatattttatttattgtattacgagccgggcagtggaaaactgaaaccaacttgccagccgagcgctacgtcgtcgtggactcgtccgctgtgagccgaagacgtgcgagccacgcgctgggaacggagccgagcggacatcctgctggacacgcgtcatcagtaggaggctggtgcccacgggatccgcgtgctcggggtaggtattgtctacttgccctagaatcaggcacagttcttttcagttctcctccatgaccatcctctgcccgttgccg

SEQ ID NO: 41888 - DNA, 686 bp, Setaria italica
  Peptide Sequence Number=SeqID_107862
cctttcgaataaaacaatcaacaatcggaacttaaagtttcgattgttgtttcttaaattctggttggagtttcttaagtttcgattggaattgaacttttgtgttaattgaggaatatgtctatttttctgtgtctaggaccagtaattattgaaattgactgggcttgaaattgcttctcattctcatagttacgaaatggtaagaaagataaaatacgagcctgttttatagcaagagtaattaatcgttgttgtttcaaggttaatctatttattcgtctggataataattttccttgttcactaataaatcgattaattaaactcatgtttctataatcaattcgatcccccgggcctattcgagaacgcctacgaaaaggttgtttggatttacgaaaaggttgtttgaatttacgaaaaggttgctttgatttatgaaaagtttgtttggatttacgaaagggttgcttaaatttatgaaaaggttgtttagatatatacatgatttattccttatttaaaaatttgaaaaaaaaaaatggatttctttattttattaattttggatccagaagaagtagtctttctttggtccatatattatttaattcatatactatatataaaaataaaaatataaaccctctatacaatacatatgaaataatatctacctaaaa

SEQ ID NO: 41889 - DNA, 403 bp, Setaria italica
  Peptide Sequence Number=SeqID_107863
tattattatttgcagcaaggtagtacaaatgtgtcattttccaacatttggagacaccaatagcatttgcagctagatttgttggcattttaaaaacaagaaagtgactcgaaaaagaaggaagaaaagcatggctttctgactacttaattgcgcatggttggaaggatctcagacgtttaatcaacgtgcttaccgatcacatcacgttgaccaaatcgtaaccaccggatattttagaaagccacaggtttggcaaaggaagatcatggagaatttggaagggaaaaacaaacagactcgaattgcttttacaagaagccacgtaacagctctagaaaacatgacaattgcatgactaacagctctaccttctcctcatcaagaaatgcatgttcataaa

SEQ ID NO: 41890 - DNA, 519 bp, Setaria italica
  Peptide Sequence Number=SeqID_107864
ttggatataatgttcctgagcctcccttcttagcttctcaagtgggagcaactcccacttgctgtagtttgaattcttacgtgcctcactcatatctgaagtccctgatactggtccgtagtcagggtcaactgttccccataccttgcaattgctaaatggccccagctcagcttgctggccagtttcatgtttttttagacggaaggctgcagcatgcgctcttctgatctcttctttgcttggtatgtctgaccaatcttcaaccctttgtgctctcatgggagaatggatccgaatgacctacataaggtaattatcatttaagtcagaataaatttaaaatagaccacaatgacaacatggttgaagcttacccaaggcattccagaagttgataataagcccgcccttgcagtggattgtgccctttcctaggggctgagaagtatcgtgtcctgaaataataatgtagttggcagaatatatatttatacaaaagacgtccagatagataat

SEQ ID NO: 41891 - DNA, 1513 bp, Setaria italica
  Peptide Sequence Number=SeqID_107865
gtaggtagttctagtttaacctaaaaccacagatttggaattgagagactgctggatgggcagcaaaatagctcccccagaattgacaaaaagacatctaggtacagctatgtcaaaaagtgaaaaccatctcctatagtatcaacatatcaaccccagcttaagctgctgttcctagaaggctagaacaagcaaaccaaccaataaaagaattttctgttcagggtaagatgaccacactctgaatctgatgcctcatctaattttacaagtgaatacagcaacatatgcagattcgtcaggcaatgcagctcttgttgtgtagcatcctttcaataccatcgtgaaaccaatcttacaattgtcaaaacgctatcttcggtcaagcttaggcgccgcaatctcaacttgatgagcgctggtgcctcacacagacaagatcgtctaacttgttcccgtccatcttgtacagagacacgccgcccatttggatataatgttcctgagcctcccttcttagcttctcaagtgggagcaactcccacttgctgtagtttgaattcttacgtgcctcactcatatctgaagtccctgatactggtccgtagtcagggtcaactgttccccataccttgcaattgctaaatggccccagctcagcttgctggccagtttcatgtttttttagacggaaggctgcagcatgcgctcttctgatctcttctttgcttggtatgtctgaccaatcttcaaccctttgtgctctcatgggagaatggatccgaatgaccccaaggcattccagaagttgataataagcccgcccttgcagtggattgtgccctttcctaggggctgagaagtatcgtgtccattctgtgtagccaggatcaactgtaaaaccatacatgtcaataatatcacacatggaaagggccagttctatggatttcatgccagttcctttagcacctcttcgtaggactataccttgaaaaaggtacacaggatttggaagttcctttatcaccgcattgatttctttgtgtgtcaaacttttaataataagcgcctcatcagaggagccctttagtattggtgccatatttcgagcagcacccctgacaaccagtcgaaagtcccttttcaatccaacatgttttgcatatttcttattaacaggtgcctcattatcccgaaacacagcatcatgcgcatcaatctcttgcccaaactctgttttcaagagatctcctgagttgccaacaactgcacatgttgcaaactggcgtgggtggaaaggaggtttagcaggcagcaagatactaaggagttcatcacagagggtacgattgtagcatttatcagcaccaagctgtgcaatccttttagccgcataatccaaccatccatcgggtctcacatccaagtactcccttgtcaatacagtcgtcatgttgcgatactgttcccacagtaggatagtttcacagacatcgtatttgtattctag

SEQ ID NO: 41892 - DNA, 564 bp, Setaria italica
  Peptide Sequence Number=SeqID_107866
ccctggctgacagtagaggatggctcaaagtaaggtcgagttgttacgaaagaggggtcctgagcattgaactcaaagtgctgtgctgtgctagtcttttgaagacctgttgattggacaagctttactaatttgtttgctatgattgtcatcggcgggcggagatctggtgactgcttgatgcaaagcaagatgatgatgcctaatgaagagatagctttagctggcatagagccactaattcttgggtcagttattctttccaaagaatcaaggtcattgagatgaggagctgcccattctactagaaactgctcattttgcctccttgaactgtcaaaagccttttgcccagtcaaaagaacaagtaaaatcacaccaaaactgtaaatatcagctttgatggcatctgctcctggctcagtaagttcaggggcagcatagcctttagcactggtgatagcttctggatccttcattattcttgcggtgctgacaaaatggcttaacttggttaatccgctgtcacagaggtagggcatgagctgagcatcaagcaaaata

SEQ ID NO: 41893 - DNA, 485 bp, Setaria italica
  Peptide Sequence Number=SeqID_107867
aggtagttaccgggagggcgagtccatctgcggccccatctcgcggcccaacctcgcgctgctctgctcgtcgctgctgcggacgatggcgaaatgccggagagggctcgacgccatggagctcctcgaggagatgatggcgcggggcgtcctcccggacctgcagactttctccggcctgatggagcacctggccggtgccggcgacctcaagggcgtgcaccggctgctggggctggtacggcagtgcgagctccggcccgacgcctacatgtacagcgtgctggtgagggcctactgcaagcgggagcgcgcggcgctcgcgctgagggtgttcgacgaaatgcgcgcggcgggagtcgcccccgacgcgcccaccaaggcgctgctggtgaagagcctgtggcgggagggaagctccgcgaggcggcgctggtggaggagaggtgcgaggacgtcaccggcggcctcccggaggcgtcgcc

SEQ ID NO: 41894 - DNA, 459 bp, Setaria italica
  Peptide Sequence Number=SeqID_107868
ttcctacctccttcatcacgacgcccgtggtcatggccatctacaagccggcgcaccggggtgcgccgtacaagaaccgcgccgtccaacgcggcaaccccaacgatgagttccggatgatggcgtgcttccacagcacgcgcaacatccctaccatcatcaacctgatggagtcgtcgcgggggacgcgacggcgcggcatcatcgtgtacgccatgcacctcgtcgagctctcggagcggtcctctgccatctccatggtccacaaggcgcggcgcaacggcatgccgttctggaatcggcggcgcgacggcgacggtgaccagctcgtcgttgccttcgagacgtaccagcagctgagccgtgtgtcgatccgtgccatgacggccatctctgacctgcacaccatccacgaggacatcgtcaccagcgcgcacaccagaagcggctgcgctcatc

SEQ ID NO: 41895 - DNA, 884 bp, Setaria italica
  Peptide Sequence Number=SeqID_107869
tcaaaatgtttgcccctgtaactgacatggaattttgcttttgccaatagcccctcagtatcaaactctccagattggacagttatgttgatgtcagagatgatcctaacaagatcaaccagtaaccctggacgatccgctgtttccaccacaagtaagcttctttcagggccgtcggcatagatatctatgtgggttgctatgtccacatcaacctgttctgcaggggcttcaggcccaaatgttgcccccatagccaattgactgctggactccggatgatattgtatcatgttgttaatgatcgtcaatcgtactgcttctaacaactctgggtcatcgattttgcggccagtggacctgtagagcattcctgtcactcattctaggcaagaagctttagttatagcaaacttgttatgcttgcccgtagaatcaaggcagacactagctttaacaacatttagccctaagttcttcagggcattcattgtatcaagaagatcgccaagacggtcacccaaggttacttcaacaatagttgcatccggatctgagtcttgatctattataactttcggggtagggactgcatcagtgttgctcccatcctgctaacgaaagtatatgtggttgaacaagcaagttcatccaatgttttttggtaacctacgctatgtacctcaacagctgcaggggaagcagccctaggaaccctcacagctggagaagacaatctcagcatagcgggcgccgccgggacaagaggccgccaccggccaagaaccgcggcaccgcgcgcagacacgccggtgcacggccggagggtgccggcggcggcgacggtcacggccatttcggccatctctcctcgaagaaacggg

SEQ ID NO: 41896 - DNA, 911 bp, Setaria italica
  Peptide Sequence Number=SeqID_107870
ggccgtctcaagaaatagcgcaggctattagaaagaatctgcagagatgaggtaaatcagaatgatggcaccaaaatgccatgcttacgagtatgttgagaaccagattgtcaagacaaaagaacaggtcttgtaatctttacctgtttcaaagcctcagtcaaatgtttgcccctgtaactgacatggaattttgcttttgccaatagcccctcagtatcaaactctccagattggacagttatgttgatgtcagagatgatcctaacaagatcaaccagtaaccctggacgatccgctgtttccaccacaagtaagctgaaatggaataacatagaatgatcggagatcaaatcgctttgatattatagagtaggaattttgaaataatccagcatttccattggtgaaacaatatcagtaggtcaagcaaggaaagccagcatatctgtaacagatacatgtaggcaatgtgtttttcattcaaagtgttcagacaaaatcaggcaaacatgttcttatgttgcttcttgttggacagtatgaatttctttaaataatgacaaaagtgaatacttttccttataatgtgaagaacattgcaccagttaagaaagacgtcataccttctttcagggccgtcggcatagatatctatgtgggttgctatgtccacatcaacctgccgatttacaagtgaaccaaggaaggttttttagtctccagaacaaagacaaaattctgatgctatacttggtcgcaatttcgtggccattgtatcatagttcagtcaagtatgtactgaaaacagattgcagatctagctacaaggtgacgacaacaaggacttttgattcggttaactttagcaatggagggaataaaaaaggaaccaacagccaactaaggaa

SEQ ID NO: 41897 - DNA, 1515 bp, Setaria italica
  Peptide Sequence Number=SeqID_107871
tatatatgaaaaatcacatcaatggatttatatacgaagtccttttaaaaccatgctgattttgtaagaatttccaataggtgaagttacaatggtcaagaaatatgcttttaaagatcgtactgaagtacatattacattttcaactacaattgactgctagcccacggttgccctttggactaagtcactgttcagcactctcaaagaaatttcatctagttgttacccagaagattattttctgtaatttcattaatctgatgaaatgtacaaaataaacacagcatttgatccagacattggatgatggcccccacaatgtcccatcttattatcaccaaataatgcatcccaggtagcaaaacaatcatgcgttacatgttttaggcatcgcagtcttctgcacttcatacagcagattccttgcctaaccttaaattggtgtgatgccaaacatcaagtatacctcctcagtccatctttttaaaaaattattgtgcttatttcaacaactttgatgatactatcagattcatgtgaatcccatctcaggtggggggccttcataattatctggctagaaactggcatcctctgttgtcggccgtctcaagaaatagcgcaggctattagaaagaatctgtttcaaagcctcagtcaaatgtttgcccctgtaactgacatggaattttgcttttgccaatagcccctcagtatcaaactctccagattggacagttatgttgatgtcagagatgatcctaacaagatcaaccagtaaccctggacgatccgctgtttccaccacaagtaagcttctttcagggccgtcggcatagatatctatgtgggttgctatgtccacatcaacctgttctgcaggggcttcaggcccaaatgttgcccccatagccaattgactgctggactccggatgatattgtatcatgttgttaatgatcgtcaatcgtactgcttctaacaactctgggtcatcgattttgcggccagtggacgctttagttatagcaaacttgttatgcttgcccgtagaatcaaggcagacactagctttaacaacatttagccctaagttcttcagggcattcattgtatcaagaagatcgccaagacggtcacccaaggttacttcaacaatagttgcatccggatctgagtcttgatctattataactttcggggtagggactgcatcagtgttgctcccatcctcaacagctgcaggggaagcagccctaggaaccctcacagctggagaagacaatctcagcatagcgggcgccgccgggacaagaggccgccaccggccaagaaccgcggcaccgcgcgcagacacgccggtgcacggccggagggtgccggcggcggcgacggtcacggccatttcggccatctctcctcgaagaaacgggcggacggggatccaatccgatccagtccaggaagcagtggccaagaaacaagggggcgggtggatgaggaggcggtgct

SEQ ID NO: 41898 - DNA, 552 bp, Setaria italica
  Peptide Sequence Number=SeqID_107872
cgccacctcccttcctagaagaagttcgtcagtccctctccctccctccctcccctcaaaaggccccgcggttccacgcgcacaagcttcccttccgtcccctctgctgcgctgcgcttgcgcctctcgctcgtctttctggcttcttgctcctttcggtccagactccggggtgccgcgcgcccttgtgttctgaacatcctcaccaacctcctctcctcctgcggctgtatcttcttctcgtcggtacctgtgaatctgtagcgctacagagtttgtgtgctattgtcggacgggaagctgtgacctgtgagccttggagatggcaagcttcaacgaagagaacagagcagctccgcagagggaggaggcatctttccagggcaagtacggcggcatttcgcccaagaagcccctcatcaataaggaccatgagcgcgcctacttcgactcggcagattgggtcctcggcaagcagcaaggcgcgagcagcaacagcgcgaaggtcccagccgcggagaccctcaagcccaagctccagcggacggcgta

SEQ ID NO: 41899 - DNA, 468 bp, Setaria italica
  Peptide Sequence Number=SeqID_107873
ctcatcaataaggtgcgttgatgtcggcaaggcattcttccaagatttcaaactgaccatgagcgcgcctacttcgactcggcagattgggtcctcggcaagcagcaaggcgcgagcagcaacagcgcgaaggtcccagccgcggagaccctcaagcccaagctccagcggacggcgtaccaccagcttccgccgcgaaggcccgcgtgcacgtcggagtagctcctgcgtcgatgatgggcgtcgctgctcgtgacgcgcaggcgagcggtactgtggatgtgagtcgttcactatacggagagacagaaagaatccatcgagctggggcgatgggatttggttgtaaataccggggtgcgtggttgtgccaccattgtggtggagttgtgtgaaatgaaatgaagtgacactcggcgtgtcatcttcggtcttcttaggtactacgttactaacttcttactaaaa

SEQ ID NO: 41900 - DNA, 341 bp, Setaria italica
  Peptide Sequence Number=SeqID_107874
ggttcctgctcgccagctcgcagttccggcggctgttctccgatgggtccaacaagaattacgagaagtaccatccaaaggagaaacaggaggagccaaagggggatgggagtgacaagtctaaccccaaaaaggattccaattcaaagtttcagtggaatttcaaagaggatgtcatgaaaaaattccaggaactccttgcccctctgctttttctggactagtgttggcaaccttacccaggggtaattccgcacagcagataagcttccaagaattcaagaacaagttattggaaccagggttagttgatcacattgttgtttcaaacaaatcagttg

SEQ ID NO: 41901 - DNA, 530 bp, Setaria italica
  misc_feature (508)..(530): n is a, c, g, or t
  Peptide Sequence Number=SeqID_107875
gtgcttgaaatggggtgatatcaatgccgtcagacctggtcctgctggggagcgtctcaggcggttcatttctgagatcagtaagactagaggttgcgggcttgcagctagctgaatcaattttggtgtttgttaagaagataatactttggatagaattttgggaagcaaataatggctgcagtgagttccgtgatggtatcatatggaaatggccaaaagttccagattcaggtgatgggaatccaagactgtctcgtccaacttttcaagattgcatattagcagtaacgtttatacagtctaggtatacaatacagactaggagatagaagtggcatcggctgtagttgtcaggaccatcttgttgtcacaacaccccttttgtatagatagtagttgtgagataagtatacacgtatgtataatgttgacactgatgatacaactatttggtctgatgttcaaaacttgaggaaaaatgatagttttctttcctccgaaaagnnnnnnnnnnnnnnnnnnnnnnn

SEQ ID NO: 41902 - DNA, 445 bp, Setaria italica
  Peptide Sequence Number=SeqID_107876
agaaatttcaggtaccacacaaaataaattgctgctgattaaccttaatatgctatctctcctgaaagtggacaaataatgaacagaaatatttgagcaaacacaccaatgaaaatgtaaaccctcattattcctgatacatttgctatctggatgagttttcagatagctgtggaacgtgcctgccattccagcattcccagcatttctaatatgacacaaataacaattttccagaagaaagttcatcagttttatactacaactatgaatttgaaatttcactctatacttccatagaacaacaggtaaagtcctcaatcttaaaacagcctcacttattgaaataagagatttgtttcttatgggaaatttcttgtgcagctgatgagaaatgacttaaccttttccagatagaattttgataacacaaatgaagagcttt

SEQ ID NO: 41903 - DNA, 410 bp, Setaria italica
  Peptide Sequence Number=SeqID_107877
gcacattcattgccagtccgccaactcctttggtggatctccctcaacgtctttgcattgtaacatgacaatcatactagaatctttcgttggatcatgtgctaagaagttgcaagagatagttacagaggaggccatactaattttaggtgtaaaagatgagctcacagaactgcagagaaggatggagaaaatacatcactttcttaatgacccagagcaatggagctagctcaaaagaatcagataataataattgtcttggtcagctaagagatgctatgtatgacggtgacgatattatcgacttggctagatctaaaggaagcaagctattaccacatcattctctgtcattatcaagcaaatcgaatacatgcagttgccttcccccttctcttgttttctaa

SEQ ID NO: 41904 - DNA, 623 bp, Setaria italica
  Peptide Sequence Number=SeqID_107878
gtgaatgtgaccagtgaacttcctaacaatgagttgcttctccagaaacacttcatggctgtactttcatctgtctggagatcaaatgctggcgtgatccccggcgtgttataagtacttactctagtgcactacgcatgctttctcctgtgaaaaatcctgctggatcaagtgtgaactggtccatggtaaactttagaccaagcttcaatctagttaggacagcccttgcagatgctcaggctcaatctacacaaattgtgattccgccaccaatgagaaatcaagaatactgccggaatcatttagaattagaattggatttcttgacagatcagcatcattatgaagaggacttcccatctatagtaaatgtgtccatactagaaccagaaccaatcaaacaggctgtggagccagtggaacaatcactattgtctggactttcttgtagacaagctgagaccagactcagaatggcatcagaagcttgttatgaaggtgaaggttctcattgggcatcatcagctttccacataaatgatgccacccggcataaatctgggccaaagtccataggaaagcacaaagcagcatcagaattgtggaagacctcccaaatc

SEQ ID NO: 41905 - DNA, 1937 bp, Setaria italica
  Peptide Sequence Number=SeqID_107879
tgcattgctgtgagagataccgagaactattctgcaaacatgcaatgtcagcaacagataattctaacagtgaaaaggttccttctgggactggaaaggctatactgagagtatctgaggatcaagctcagatgttggtgaatgtgaccagtgaacttcctaacaatgagttgcttctccagaaacacttcatggctgtactttcatctgtctggagatcaaaatgctggcgtgatccccggcgtgttataagtacttactctagtgcactacgcatgctttctcctgtgaaaaatcctgctggatcaagtgtgaactggtccatggtaaactttagaccaagcttcaatctagttaggacagcccttgcagatgctcaggctcaatctacacaaattgtgattccgccaccaatgagaaatcaagaatactgccggaatcatttagaattagaattggatgtatggacacatttactatagatgggaagtcccatctatagtaaatgtgtccatactagaaccagaaccaatcaaacaggctgtggagccagtggaacaatcactattgtctggactttcttgtagacaagctgagaccagactcagaatggcatcagaagcttgttatgaaggtgaaggttctcattgggcatcatcagctttccacataaatgatgccacccggcataaatctgggccaaagtccataggaaagcacaaagcagcatcagaatgtggaagacctcccaaatcaaaaatccagaagattactgaatcgcatcaggaagggccaagtacctcgagtaattttcttcggatgcctggtcaacttttcccaggtgcagctgacttccacattagcgagtccctatctgactttggtatcagcgattctgaattcaactactccgaggatctctggcaagaggttgactacaacgagttcctcctggaccaggatgactctggtctccttcctggtattgaggagatagaacctctttcagatttcacagatattggatgaacatagatgagcaaattgttcctgatggcatacccctcctaccaagaggatagaagatttcctctggcaggagcccaaggatatagattgaggtgctcagccaggcacagatgtgctgtaagcttgatcatggttggctggagcaaagctgttggcttggtgaggtcacattgatccgacaagcttgggggatgggtttgcactaatggcggcattgggtaatttccatacatgtatgtatattggtagtctagaatcttagatgtagaaatgtctccctcgtttgtgtttgagggcagaccttgtaactcgaccacatggaaattttgttgagcaggtactgacaaggaaggggaaagaggaggcccttggcatcaccaattagccgccgtttctcgtgttttgatcattctctatttaattcatggctggttcgtaaccttgccattggaaacatttcaaatttcaagttggtggttgccatctctatatcagaaatttaggatgcggtgttgccgcaaaagaatgtccagggccagctgcagcttatgtggagcattatctttggtcagaaccggtgaagctacaaaagaatgattagagccaatgtagctgcaatagaatgatcaatgctttgggatcaatatcagaactggtgttccagtttcacatgaggaatggattttctggtttgattgtgatcctgaagccaaatttttgattcgtcggcttcttcataggtggtaagaggccatgtatacatgcctgtaaaatgatggaaggtaagaagagttaattccctaatttgttctactatttgttggttactttgtttggttcccttttgttttggtttaccctttttgttttttctttttcggtttttgtttttattttttttatttttt

SEQ ID NO: 41906 - DNA, 1466 bp, Setaria italica
  Peptide Sequence Number=SeqID_107880
taatacaataatcatacacccaagataatgtgcatccagcctgctacaactgccaaaaaagggaacaggatacaatagagttaccaatagtcaagattgatctgcaacactagaacctagctgtttagttgtactgcctgccctaagaacatacatgattacatgccgaagcaaagtaaggaaggatgccttctttcctaacacaaaggtttacagagctagataatcaaactaccccacatgcataccacctcccatgaagtaagtgttggtttccatattcggtctcttatttgcatccatcacctgatccctcatatcaagaagttgtttcggatggtaaactggtggatgcggatgcagttgcataaattctgttgcggccattggcaatgagccactctccaggtttacattcaccaaatcaaaagtgtgcatcccattctgagaagtcgataccatattcatatccactctggtgtcacccggtatcaggtgaggggatgccatgttcatatcaacccttctgtccccgtgcatcagatgcggagatgccaggttcatgtcgactcttctgtcactgtgtataaagtggggtgatgctaagttcatatcaactcttgtgtccccctgtatcaggtgtggtgatgccatgttcatgtccactcttctttccctctgcatcaagtgaggagatgccatgttcatgtcgactcttccctctccatgaataaggtgggtggttggcattttcatctcaactcttctgtccctatgaatcagggccgtggcatttgatgtcattgtatcaccatgaactagggctggtgggtttgatgccatattcgcatcaacccttctgtccccctgaatcagggctgaggcgtgtgatgccatgttcacatcgactcttgtatctgcggacaccggaccagtcacagtcatatttacatcaacccgttgatcacccggctgactgtgatcaggcctgattaatctgtcctttgcttccttcatggccgacaacacaaactccttaagctcaggctctcttgctccaatgtcaatgacatcttcaaaatactcatggccacgagaatagaggtcatcataaatacccagatttctatctgattcggtacaatctgtgtttgcagatgaagtaagtatcctaaaatccttcctccaacggtccaggatgtactttgatggcagcatcagcacattctcttgcttcagaacagccaaagcatggctgcaaagaatgccccgtgagggaaaggagcgacaaatgcaccaaacatccttgtcagaattgttgtagacaactgtgtagtcaaccttctttccctgtattaactcactggccatgtaagtaattgagcttccacttctatctacctctttacaaataacatgcatcaattgcttaatctcatcttggaacgcctgaaacatggttactg

SEQ ID NO: 41907 - DNA, 614 bp, Setaria italica
  misc_feature (607)..(607): n is a, c, g, or t
  Peptide Sequence Number=SeqID_107881
caatacaaccaaccaacggttgacaaggaaatgcagcgggcgcgctacttcacctttgtcatgctcgtcaggatggtgcaggagaagataccacgcaacaccaccttcctgatgcccagcgacaggctgatgtccacggcatcaatctccgagagccaagtgctggagttcttgtccaggcattccatcgcggcaccgctgaagttcgacgacctcatcaaacttcccaatggaacagtagttcccacccgccactcgggtgacacgatcacagtgaccaacagcagggaccagaagctctacatcaacggcatcaagctcacaattcctgatctctgccactcagggaagttgttcaggtgccacggaataaatggagtcataaggccaacagcagcacagagagtaaaagccgcttgcactcgcacttctgcagcaccagtgatacctttggctgaaaaccaatccttgagcacatcttctctttcacctattcttccctaacttgccacgctccctgccaatgaacctgtgcagcagtcagcagacatgttaatgaactgtgcttgcctcatctagcagacgaaactttgatcctatcattacnccagaac

SEQ ID NO: 41908 - DNA, 542 bp, Setaria italica
  Peptide Sequence Number=SeqID_107882
aaatgatcaaacacacgcacaccatgtctgcacaggtaattacacaaccgatggaaatacagcgatccacgcttcgtttttcacccggagcaattcagaatttcagattgcttcgccttcaccccacctcaaactacgaattccttcacttcaccgcacgctaagctaggtcctctttgcctcctcttcagcggctctgatgatcttgtcgagcgcgtcggggccgtgcgtctcgatgaagcgctcgacggacttgcgcgcgtcgaggctcatcatctgcagcacccgccgctggcgctcgttgtagtaggggttcacgtagttgccgatcttgaagtagcgccggacgtgggcctcgtagatgtaggccgcaccgttgaagattggcagcaccagccagcagcagaagagcagcttcatgtacggccacagcgggaaccactgcaggactttccagcaggagagctcgaggagggtgatcagggagtacagaacccagtaggtgagccactgctggtcgtccagggaggaagggctctcta

SEQ ID NO: 41909 - DNA, 311 bp, Setaria italica
  misc_feature (308)..(308): n is a, c, g, or t
  Peptide Sequence Number=SeqID_107883
tttagatggtagatcttgccattgctgctgcgagtccagattctgaagacttgtcatctgaggtgctctgcgcaaggagcagcgcactcggacagtggcacagaatctctgatttttcatcaggatttaagcctcgctggaataagattgaatatttaacgtctgcataatttgatgaatgaacacttcgacatgagaaccaacaatctcgacttggagagatcagtgttgtgaggaatgtttatcaaattctaattcagatttagatggtaaattgcatctgaacaaaaaaaaaaaaaaaaaacagngac

SEQ ID NO: 41910 - DNA, 456 bp, Setaria italica
  misc_feature (380)..(380): n is a, c, g, or t
  misc_feature (396)..(396): n is a, c, g, or t
  misc_feature (434)..(434): n is a, c, g, or t
  Peptide Sequence Number=SeqID_107884
tctagtctctacgacgtctcctgggacgtcatcctcgtcgacggcccccgcgggtacacggcgtcgtcgccggggaggatgtcggcgatattcacggcgggggtgctggcgcggacgcgggcgggggagggcgcgacgacggacgtgctggtgcacgactacgagcgggaggtggagcgcgcgtgctccagggagttcctgtgcgaggagaaccgcgtcgccgagaccagcacgcggtcgctcgcccacttcgtcgtgcgcggcgggagcgccgtccgccgggacgccttctgctccggcgccgccgccgccgcggccgcccactagttttatcgctcctaattactcttattactcacctcttctactttttttaaccnctctcgatgatggttnccaatgatgatgcttgtttgtcatgtgagtgaaaaagngaaaggtgaagcctagtaaaaa

SEQ ID NO: 41911 - DNA, 780 bp, Setaria italica
  Peptide Sequence Number=SeqID_107885
tcgacgcgctggtgcagtacgcggcggcggcggggaacacgtcggggtgcatgccggagccggacgtgcgggcgatcgcgtcggtgctgcggcggcgcgcgccgtgcaacctgctggtgttcgggctgggcgcggagacgccgctgtggcgggcgctgaaccacggcgggcgcacggtgttcctggacgagaacccatactacgtggagcacctggaggggaggcacccggggctggaggcctacgacgtcgcctacgccacggcggtgcgcgagctcccggacctcctcgacgccgcccgcaccgcgcgcgccgccgagtgccgccccgtccagaacctcctcttctccgagtgccgcctcgccatcaacgacctccccaaccagctctacgacgtcgcctgggacgtcatcctcgtcgacggcccgcgcgggttcacggaggggtcgccggggaggatgtcggcgatctactcggcggcggtgatggcgcggaccaagggcgcggagacggaggtgctggtgcacgactacgagcgggaggtggagcgcgcgtgcgggcgggagttcctgtgcgacgagaacagggtggcggcgaccagcacgccgtcgctcgcccacttccgcgtccgcggcggcgccgccgccaaccgggaggcattctgcggcccgccggccgagaaatccaactgagctagccccacttctcttcccgaacgttctagtctcgtgctccatttttgtgacgcatgaggatgcgtaaagaaatgttaatgcatgc

SEQ ID NO: 41912 - DNA, 362 bp, Setaria italica
  misc_feature (310)..(362): n is a, c, g, or t
  Peptide Sequence Number=SeqID_107886
acgtaggcgtcgtggatgattctgaatcaatgaatctcaataagtctaagtctctgttcgttcctgcagactgctttgcagatccatctatcagttaatgttgctgagcagctgggctcgctgtgagttcctggctagtgtgtctgtcaatgaacatgtggtcggttcgtcaggtgttgatctgatggcatggcatcacgcactgcctgattcttccctgaaatgctactgtcaacctgtgtgaattacactgaatgcctgaaatgtctgtttacaaatggaatctatattctgagtggtaactaaaagnnnnnnnnnnnnnnnnnnnnnnnnnnnnnnnnnnnnnnnnnnnnnnnnnnnnn

SEQ ID NO: 41913 - DNA, 288 bp, Setaria italica
  Peptide Sequence Number=SeqID_107887
gactatttgtgctaaaagaaaagggtagccatgactattcaattgccagagtaaccgatttaatctttgttagcttcatttgtggtagtttgcagttatagttgcgtttagattacagattcaaaaggtcaattcgtgtcattgcagttttaggatgcaagtgggcaatgacttgttcagtgactctagattctgatacttgtattgggtagcataattgtatgtatctgtagcgattgcagttttaattaggttgtatgtgggtgatagtttgttacaaaaaaaaaa

SEQ ID NO: 41914 - DNA, 431 bp, Setaria italica
  misc_feature (1)..(5): n is a, c, g, or t
  Peptide Sequence Number=SeqID_107888
nnnnnttttttaatcaaacaaagcttccaagctccaactctgttaattaaatgtataatcgttacattttgcacaggatcatatcaatgcatcagttccatatttcaagtgccttttcttggcaaaggccaagctttttttttcacaaaactgaaacttcaaacttcagcttctagagctgaacattttccttcaagaaactcttagctgggtctgaaactcttaagaaatggaaggttttccatatctgttaggctagtgctctcaaattgccagctttaggatatccatttattccctgctatccacagatgtagaaagcttggtcactgcaacatttcacccttgacatcacagcccatcaaacaatggtggtgacgatcccatgagtttctcaaggaaaaacaactaacaaggtggttgtctttcac

SEQ ID NO: 41915 - DNA, 698 bp, Setaria italica
  Peptide Sequence Number=SeqID_107889
caagagaataagaataacttcaacttcttgcgttaagagccagtcctgttgttgggcacctattggacggttcaattttagtagtggagaagcggtggatggatgtggttgaaggatttggcgcacctgttcacagacatatatacgggacatgatgcaagctaacatgtctacctctggctctcgtggcaaggagtccactacattactcaagtttagaagaaaagaacacaccattaccccactcctgatgctaaagcttagccgatgcagcccctttgcgctccaaaatcctaaaactcctctcaacccatagcatgcttgaggaccaaggcatgtgcttgagcaaaaacaaaaacaagtggactgcttgccacgagagccagaggtagacatgttagcttgcatcatgtcccgtatatatgtctgtgaacaggtgcgccaaatccttcaaccacatccatcctaccgtcttctccactactaaaattgaaccgtccaataggtgcccaacaaacaggactggctctttaaacgcaaagaagttgaagttattcttattctcttgtttcaactcttcattatgggccttgcgcttctgctttatttttgtacccttctgtgcgtctgtcttctctgctggtccggtttgtattcttattttggtctaatttgtaactattccttctaattaacta

SEQ ID NO: 41916 - DNA, 433 bp, Setaria italica
  Peptide Sequence Number=SeqID_107890
aaaatcaatcaagcacattgcctgaaaagtaagagattaacttctatcatcatttcattatatggtacaattatcaaccaaaaatttgcttggtacagaaaataaccaaacacaatggtaagaaaaatgttcatgagacatctctttaagaggttaccttgtactgtataccacaactatcgatgagctttgtggcggaaatgataggccaatgacctcaccaggaaattcctggaaacttctgggcaagtgatgtgtgtatcgcttggaccattcacctaactgttttgcttccacatcaaatacatatacctcatttttcgatgtagttatcacaagagcattgttcttggggcaaaaaccgccagatgtaacagagccaccattcattctagatatgaaccagtgttgcctttgtacttcaagattaaaa

SEQ ID NO: 41917 - DNA, 1276 bp, Setaria italica
  Peptide Sequence Number=SeqID_107891
tttttttaacaagaagaaacaacgacttacctttaggtcaaacaacaaataacaacttaacggtaacagaggtgatgatacagtgtttacatctgacaaaaattttgcgcagcgacaaggtatgacaaactggcgcaaggagtccactacattactcaagtttagaagaaaagaacacaccattaccccactcctgatgctaaagcttagccgatgcagcccctttgcgctccaaaatcctaaaactcctctcaacccatagcatgcttgaggaccaaggcatgtgcttgagcaaaaacaaaaacagtggactgcttgccacgagagccagaggtagacatgttagcttgcatcatgtcccgtatatatgtctgtgaacaggtgcgccaaatccttcaaccacatccatccaccgcttctccactactaaaattgaaccgtccaataggtgcccaacaaacaggactggctctttaaacgcaaagaagttgaagttattcttattctcttgtttcaactcttcattatgggccttgcgcttctgctttatttttgtacccttctgtgcgtctgtcttctctgctggtccggttgatctatttggcaattgaacatcctcaataacaggcaatccaaaatcaatcaagcacattgcccttgtactgtataccacaactatcgatgagctttgtggcggaaatgataggccaatgacctcaccaggaaattcctggaaacttctgggcaagtgatgtgtgtatcgcttggaccattcacctaactgttttgcttccacatcaaatacatatacctcatttttcgatgtagttatcacaagagcattgttcttggggcaaaaaccgccagatgtaacagagccaccattcattctagatatgaaccagtgttgcctttgtacttcaagattaaatacataaatatccccaaagcagtttactgcagccaaccattgcccatccacacttaggaacatttttgttacaggtgattctcttgaagagacttttgttgcatctgcctttcttgtaggatgaaatacatttgaaatttctcttgtttcgatatcaatgacatatatttttccatcacgtccagctagtatcaaattggacgagtcaactgtaaacatcatactctgagaacagggcagtcctttcggcagctccaatttgtcaagggtgtacttctttccactcttatgctttagtgcaaacaggcagggcctcacacaatctgaataggccaaaagcgttcc

SEQ ID NO: 41918 - DNA, 1647 bp, Setaria italica
  Peptide Sequence Number=SeqID_107892
taaagtaaataacaaaaattaaggaacgaagtacaaactagtaaatacatttgaaatttctcttgtttcgatatcaatgacatatatttttccatcacgtccagctagtatcaaattggacgagtcaactgtaaacatcatactctgagaacagggcagtcctttcggcagctccaatttgtcaagggtgtacttctttccactcttatgctttagtgcaaacaggcagggcctcacacaatctgaataggccaaaagcgttccatttgtggaggcagcactagagatgatttttcttgaccccttgcttttcaaacgagcaagttgtcgcactttagcatcttctctagatgatgtacttggagttaacttgttctgaactgtcacaagtaaaacatccagccagttggcagattggacaagcattactgaatctccattgactgtgctatctcgagcaagatttatcaaaggacgttgaggtgcagggcagaaattatgtggtgcaaattgagtaaactctcttgccgaataagcaaacagcttagtgtcatcaccaccagatattagcattggaacaccaagatgagcccatttgtggtaactgaattgacgcttttcacgccggcgaatcttaaccgccttttcctccgataattcgtcttctctacagattggtacagccatggtcaatgcccttacatcatgagtgtgagctcttacgtatcccacatagacccacttgcgaacttgctctttgaccacgtttttactagtgccagaatcatcttttgatactttgtaaagaattacctgcccatcagaccctgcggaaaataccctgttctgactaggcagagttgctagtgcatttacgtcgcctttatgataagagtgagcttgtaaaagtgtcccatggctgctatcccaaaactgtacactcccggtactatctccgctaacaagtgttccacacctcagaaacaataatgtccagatacatagttccgatccggtaccagcccctcccaatccagcagtaatacgatacttttcttggaaagatgttgaatcccagcatctgattaaaccatcactgcttccagaaaatataaatttggcgttactactccacgtcacactcagagttcgcccgcttactcttggaagagatctatagtaagtcaatgcgcctgattcaggcacattgtacaatcttacagaaccatcatcgcaggcaagtgccagtcgttggagttcattgacatggtatgaagatctcgtgttggctggactgtcctcatcctcagagtcatcaccatcatcaacattacttaagtcagagtcgcttgagtcgttattatttgcatggccattgatggcaattcctgagccattaatttcggtatttttagaatcatcggacggctcgatggccatctgccagagtggtcctccagcagtatctaggacagtcttttgctgcaggtggaagagatcccactcgaccaccgacccatcaacgctggatgagagcagccggccggccgctccaactccactccgcccccacaccagcgatgtgaccctcgactcggcgttcccctgtatcgtgagctggtggtgccagccgacggagcccggggg

SEQ ID NO: 41919 - DNA, 318 bp, Setaria italica
  Peptide Sequence Number=SeqID_107893
cttcggggcggtcgcggcgccgccggcgggggaggagacgtaggggttgccgacgtagggaggcggcgcggcggtggcggtggcggcatggtaaggcggtggcggaggcggggccacgtcctccggcgagagcctcgggtacggcgcgtactccggggctgccgcggcgcggtcggctccgccggtggacgcggctgctgcgggcgggttcatgtcgccggtgggcgtgatggccgagcggtgcggtgcgtgggcgttggcgttgggttcgatgtccgcagctcgtacgtttcgtggacgagatgacaaagctgcacg

SEQ ID NO: 41920 - DNA, 370 bp, Setaria italica
  Peptide Sequence Number=SeqID_107894
gaaagatcaaagcgctttactgcatacgaagatctcaccgcattttagatctgactctagctatgataacgttagaaagagttcctttgcttacctctcttgactcctaagaaaaattcaatttgattatgcacctagacaaatattctagatacataaccaaaattgcatttctcctgtgacagagagagcagttcgggcccacgtgtcagccaccgaacaatcagttgggagagtggtcccgtggcgtcaccgcaccatacaactcgcacaggcctcacgccagacaccgactcacacacctcagcagtcctccagctgtccgctccctcgctcctgattggcccgctgcctcctcccacggatcgcg

SEQ ID NO: 41921 - DNA, 475 bp, Setaria italica
  Peptide Sequence Number=SeqID_107895
tttttaaattaagtaagacgacgaacttccttctcccatattttgattcttaagatgtcgttccaattttgatgcatcctgggggcggaggtaggcatttggttggcagaggtcagatttacttcctcttcaacacgacagagagagcagttcgggcccacgtgtcagccaccgaacaatcagttgggagagtggtcccgtggcgtcaccgcaccatacaactcgcacaggcctcacgccagacaccgactcacacacctcagcagtcctccagctgtccgctccctcgctcctgattggcccgctgcctcctcccacggatcgcgcccccaagacgaatccccgccgtccccttcctctagatccaacggcgctcaccccacatcacgcggatcgcctccccccccctgcccctcttccccactgaccccgctcgcagctataaaagcagcgcagccttcgaaacagcgaaacc

SEQ ID NO: 41922 - DNA, 1591 bp, Setaria italica
  Peptide Sequence Number=SeqID_107896
gaccgccaagtgataaaatcatgtgaacatcttacagtgtttaaatgaactgatatctgaactcatatgttgttcatgatgcacattgcacaacatgttcagtcactattacaaatacatcatgtttgctttcaaccccatcaacatcattcaaatgaatttgggggcagaccagtgtgaatccaaatttttttaccctaaccacttccagaaggcctaccaatctgacctctcatgatcatcgatctaacaagctccagttgcgcaaagtactcccttctgcatgcaaaacttggccaaccagtcaaacgtctataacaattgctgctgatggcagaagatggtagggaagcggcaatcttaatcccaaagaggcttatgattggtcacagattgaatatctgaataggccagctgcgcttccagccatctgagctgaatgctgtggtttcaaccgatatgtctatgctacggtgctcagatgccctcacaatgcttatccgtgatctgagcattgtggctgggcactcatctgtgccaacggatgcagatgaaccaagggttgattcctccttcaccattgcgatgggctcttcaaaggtgaagattgtctgtgaccagtgagttggtgtagagaagggagaggtggagaggacaacaggcttctccttgcagaatctatcagtaaaccccgtgtcgaaccacaagacaatgccataacaccaggttactccaggtacaacagtagcactctcactgagcctcagctcaaagcttgcagtaaagtccatctcactttccttcatagttgccagatcaaaggaatggagaacagcagtctctgtcacaatatcctgagaagcaattacatcaactacaggaaatcgagctgaagttgaagttacttctttgccaatgcatgacatatcaaagccataaacattttcccaaaatggcaagctagttccacctttcccgaaaccagcaccgacaatcgttgcagtatctgggagaatagcaccaccaggtttcaggaaatgatcacgtgcatatatgactgaactcagcatggattcaaacaacaggcagtatcccatccattcactgactaacacgtcaaagccatgttgtggaacttgtattttctggtttagctcttcagccttggtatgtacaacgcttatcacttgagcacctcgtttttgttctgctttcaaattttcatcatacaacagaccattattctttgcaacctgggtagccacagaagccatctttgcactcccatcaacagcaacaactctagatgcaccagccttcgctgcaaaaagacttagaattcctgtgccacaaccaacatccagtacagctgctccacgtaaaaggctaggattgcctaaaagagcatctctgtaagcatctgttctcactttatcaccgagcatctctctgtgaataccaaatgaactgtaagatccaaagtagttatcatccacagttttgattgccttggcattaacactagcacgtgcaatctttagttggctatcattagtctcatgagcaagagactccctgtcctccgcttgtt

SEQ ID NO: 41923 - DNA, 405 bp, Setaria italica
  Peptide Sequence Number=SeqID_107897
aggttgaataaagcaaacaacactacatctgaagatcaatcccaggtagtagatgtgcaagctcttgaggagtttaaatcaagctcaagatctcagaaggcttgtctcccaccaaaggttcctccacagctgattccagttttcatgccatatcccaaggagatacgaactgggaggattcttgggactgggactgtgcataatgggctctattatcttgatgaaggaagtgatgaagttgcacttgcaacaaaaatgtctccatgtcaagaattgttgctacttcatcgcaggcttggacatccttcttttgctaccatgtcttgttgttatccttctctttttggttcttgtcgaaaggagctcttgtatgtgatgcttgcgtagttagctaagcatacgaga

SEQ ID NO: 41924 - DNA, 422 bp, Setaria italica
  Peptide Sequence Number=SeqID_107898
acacaatattgtctctgagcttcaaaatagccctcccaatctccacttggaggccccttacatggtcaagcccagcttgtagctctttggtgaccttgttattttcttgcttcatattactcacctcaccttggaactttgcagcctggaaaggagtaaagtgagcttcactggtttgatccaacgttgttatctttgatatctcctcttgtatgctgcagagcaaagagaatctactctctagctcctcctgtaacagcacattcttctccaaccaaacttgtaaatcagtacttaagtcgcggaatgtcttttcaagtgcagctgactcttgttttctagcagactgactagcagaaccagagtctacgcctcctgagcttttgcatcaaaaactctctgtctccaagactaggatcagt

SEQ ID NO: 41925 - DNA, 312 bp, Setaria italica
  Peptide Sequence Number=SeqID_107899
attaggagtgataatcgagccaaaccaaacctaatgtttggattgctgcctaatgttgattggacttcatgtgggacatttttggtctgccaaatgatattatgatatagaaatctagcttgcaaatattaagcatgagagcaggaagcccaatgttccagcttagggggctagctgaacaatcatccaagtatatgggattgaggtgtcttcttttgtttatctagaattgttggcattttttccttaaaccgtaaaactgaagaagtgtagttctagtcttctattgttactttttaatttaggggttta

SEQ ID NO: 41926 - DNA, 361 bp, Setaria italica
  Peptide Sequence Number=SeqID_107900
cgcctgtgtagttgggcatgttgggcatggtctggttgaccatattggggtaggcggagctgacggccggtagcgtggaggggaaagcagacgtgggtgtggcggtggagccgctgaagaagacggggaagggactccccatgacgggggagccgtcgagctctacgtggaccatgtagttgccgcgcttggggacggcgtaggtcaccgtgtaggatccgtccccgttgtccttgacagcgccgtcgaggtcgtccccgccgactcccgcagcaggggagacacgcacgcgcacgcgcgcaccgccggcggtgagcctccggctgtggcggtccttggcgacgacggtgaaggtggcggg

SEQ ID NO: 41927 - DNA, 257 bp, Setaria italica
  Peptide Sequence Number=SeqID_107901
acttggagtactctcgtaatcacaggcatgacgatcgaccggcgctacccgctactcgtcgtcgccaccgtcgccgccgaagagcgaggtcctgtagtagagcaggaccacgatgagcgtgagcgcgagcgcgacgccgacgggcgaccccccgacgcggtggacggagtccggcgagccgccgaaggagaggacgtcggcgagcgcggcggcgccgcgctcggacgacaggatgcggatgacgaggatgaggccgg

SEQ ID NO: 41928 - DNA, 887 bp, Setaria italica
  Peptide Sequence Number=SeqID_107902
acaatcaataagccaatctggtgttgcttcagaggcctcaagggaattggagagggagctcacaaaatggtatcgctgcttcaacaagtggatcagctcacaaaggtcttgtgtcgaggcgctgaatggatggctcaagaaatggttccctgaggctgaggcgccacaggaagatacagccgatggagtcccacctttctctcctggaaggcttggcgccccacctgtattcgtcacctcaaatgattggttccaagcgattgagatggtctccaagactgatgcactgagagcaatcgaccatttctctaagcttgtgcatgaattcaagaagagcctggaagaagagcagcggcagaagcggaaagctgaccatgcttccagagattataacagaaagtctgaggttttgcaggaagaacttgggctgagtacaatggagaaccctcactacagccatgatgaccgagtaatggacttggaaaggttgaggaaaagaagggacgaggagaggaccagccatgaaaagatcctaaaccatgctcatgttgcagcctcagccactctgctgattggtttggttcctgtgctgcaacagatcaccaccttctttcagaaaaatcagcaggtctacatgggaatcagaattctaggcacttgagctgcagaccacatagaaatagatttcagtggaagattaacacacgagagttcagtttacgacaggcacatttgtggctgatgcggcgaccaatagtagtgctactttttgatagaattatagatgtgatttggggttagctctgattagctcttacaattcttgcagatgttaggttctacgttactctgacccttgctttgtacagggtagtgctactaactat

SEQ ID NO: 41929 - DNA, 250 bp, Setaria italica
  Peptide Sequence Number=SeqID_107903
caatcgtggaacaacattcattgattgcaattcctggaataaaagcttgcaggcatatggcagcctcatcttggccatattttccccgttcttacacattgaaatagagccattgtctatcttaggagttgtatccggacttattccttatccacaccataaccaatctccacgtaatacttatcagtgtgctatgggttatggtgtggataaggaataagtccggatacaactcccaagaaatggacat

SEQ ID NO: 41930 - DNA, 812 bp, Setaria italica
  Peptide Sequence Number=SeqID_107904
aaaatatgcgggcactggatgaagatggcaattgctgcacctggtcaaataattcgcaatcatgatgtctatgtgaacaagcaatctcccaaagttatagatagaagaggtgctggtgcaccgttaatggacagggactacaaggactcaccggccatttacaaaggtgttgatggtgagactactgttgtagatcgtgtaatgctttgttcagatacaaatgagaagctatctattaaatgcattatccgccatacaaggaggccagaggttggtgataaatttagtagcagacatgggcagaaaggtgtttgtggcaccattgttcagcaggaggacttccccttctctgagaggggaatatgccctgatttaattatgaatccacatggattccctagtcgtatgactataggtaaaatgattgaacttattggtggaaaggctggtgtatcttgtggtcgattccattatggcagtgcatttggtgaaccaagtggtaatgctgataaagtggaagacataagcaatactctaatcaagcatggcttcagctataatggaaaagatttcttgtactcaggcattctaggtcatcctctggaggcatacatcttcatgggaccaatctactatcagaaactgaagcacatggttcttgataagatgcatgctcgagctagtggaccacgagtgttgttaaccaggcagcctactgaagggcgaagtcgcgatggaggtctgcgtcttggtgaaatggaacgtgactgtttgattgcatatggtgcaagcatgctgatctttgaacgtct

SEQ ID NO: 41931 - DNA, 1493 bp, Setaria italica
  Peptide Sequence Number=SeqID_107905
gcaaattggagagtttgtaagcattttgtaaatagagcaactgcattgcattcacattgcctctgatggtggtcgtgtatgtcgcccacttataattgctgataagggaatatcaagggtcaaagagcatcatatgaaagaactgagggatggtgttcgttctttcgatgattttctgcgtgatggattgatcgaatatcttgacgtcaatgaagagaacaatgcattgattgcattgtatgagcatgtggatcaagatgatgttgaaagaagcagcatcacacacattgaaatagagccattgtctatcttaggagttgtatccggacttattccttatccacaccataaccaatctccacgtaatacttatcagtgtgctatgggtaagcaagcgatgggaaatattgcatataatcagttgttcagagcagattcactactctacttactagtgtatgcacaacgcccactgctaacaaccaaaacaattgaattggtgggatacgacaagcttggtgctgggcagaatgccactgttgctgtcatgggttatagtggatatgatattgaagatgcaattgtaatgaataaatcatcccttgatcgaggtttcggtcgttgcatagcaatgaaaaagtacacagttataaaggagtactatggagaaggtgtgtctgataggatcgctaaaccacaaagagataaagatggtgctttggtaaagcaaaatatgcgggcactggatgaagatggcattgctgcacctggtcaaataattcgcaatcatgatgtctatgtgaacaagcaatctcccaaagttatagatagaagaggtgctggtgcaccgttaatggacagggactacaaggactcaccggccatttacaaaggtgttgatggtgagactactgttgtagatcgtgtaatgctttgttcagatacaaatgagaagctatctattaaatgcattatccgccatacaaggaggccagagtcgtatgactataggtaaaatgattgaacttattggtggaaaggctggtgtatcttgtggtcgattccattatggcagtgcatttggtgaaccaagtggtaatgctgataaagtggaagacataagcaatactctaatcaagcatggcttcagctataatggaaaagatttcttgtactcaggcattctaggtcatcctctggaggcatacatcttcatgggaccaatctactatcagaaactgaagcacatggttcttgataagatgcatgctcgagctagtggaccacgagtgttgttaaccaggcagcctactgaagggcgaagtcgcgatggaggtctgcgtcttggtgaaatggaacgtgactgtttgattgcatatggtgcaagcatgctgatctttgaacgtctacttctatccagtgatccatatcaagtccaggtttgcagaaaatgtggcttgctggggtactacaactataaacttaagacttcg

SEQ ID NO: 41932 - DNA, 1059 bp, Setaria italica
  Peptide Sequence Number=SeqID_107906
gaggcatgcactggagtgtaccataactcgctctacgacctcgacacctccatcgcagccatagacgagagaaggtacggcgatgccaagacatccatgagcgccgccaccgatgcgcctgtcacctgtgaggatgaattcaaggagcagggcttagagccacccttcaaggcagagagcaaactcctgttccagcaggcggtcatctccctagccatcatctccctactatgatgtgtttcagatccagtatcagcatacttgcaattattaatatggaactaagatactactagtacatgacatgatatacatgcgcttgttccaacaggcggtcatctcactttatatatatggatagttaataaaccagacaagcagtcccagggccttgcatgctcttgataataagagcacaaggatgcattgtgcagccttccttgttgctgcgaaaccttccttgtacaccgcagcaatccactccgccaagaaatggacatcaaccaagcctttaactatccagcttggcaaccagctccataaaccatcatcgattcacaatctcaagctatccttcggttagcttcaatcgtggaacaacattcattgattgcaattcctggaataaaagcttgcaggcatatggcagcctcatcttggccatattttccccgttcttgcacattgaacagtacgaagtcttaagtttatagttgtagtaccccagcaagccacattttctgcaaacctggacttgatatggatcactggatagaagtagacgttcaaagatccttgcaccatatgcaatcaaacagtcacgttccatttcaccaagacgcagacctccatcgcgacttcgcccttcagtaggctgcctggtttaacaactactcgtggtccacttagctcgagcatgcatcttatcaagaaccatgtgcttcagtttctgatagtagattggtcccatgaagatgtatgcctccagaggatgacctagaatgcctgagtacaagaaatcttttccattatagctgaagccatgcttgattagagtta

SEQ ID NO: 41933 - DNA, 1608 bp, Setaria italica
  Peptide Sequence Number=SeqID_107907
actaggaagaaaggaccaaaagaagacaactaaccttaactcgcctgaagcgagaatgggagcaggaagcagctgcagcagcacaggaagctgcggtgaaagataatgtggagaagcaggacaggccgaagctggataaggctgctttggatggctctaagattaacctttacttcccaaaactgaggaaggtaaaagccttgccttttaaaggcacaggaaagcacaagtacagtttccgacatattgaagttccttcttatccgattcatttctgtgactgtgaggagcactgtggacctcctgaagcagctaataatgagtacgctgcagttcttaatgctgttgtgtatgaaaaggaacggaacattatgaattctgtgatgaacaagcttttcgagaaggaaaatgagcattttgattcatcagaaatgaagagatgtgatgttcatactgataccattgaaccctctgatgctgtgaataacatgcaaattgaagaaactgatgaggctccagaggaagatatgcaagtggaagaagttgaagagtcttcagacgaagatttggatgatgaccttgtgatcaatattgctccccgcaagtccaataaaccagcagggcaagcaaacatgaaaaagcaggaggtgaaaaatgacccacagttaagaaagtgtccaaatattgaggaggcttccctgccaaagaagaggcagagaaatgaggcttcgtctgagcctggaaaagggaaacaagaacctatttcagttatcttagacacaagaactacaggcaagcctttaactgttaaagcagaagacagcaaaagccaactgaagtctccaggttttacaggaaaaggaacatatgcgttgtcttcaacactcccaagagatgaaagctctgcagatcttcaaggtgtcgaggctcagacaagttcgaccaaaaatgaaagtgcacaaaatgtggctgcgaatgaacctaaaaagggctcgatgtggactcagaaatcagcttggagagatcttgtagggggcatgggaagcacacctttcagtatatcacaggtgctgccgaacacccatccaacgccatcagtacttccaaatgtcattgaaaatgcgagatcttcagaagtcttggaagctaccatgcagctcccatctgagctgaagttgccgagttctgtggaaatgctgtcttctggcactacagatgggtcaactggtggtaagtgtaaggatattaataagccgcagaaggtgcgggtggtcccaaagatcaccatcggtgaagtctgccctttcatgagaaatgcagagtcacaaaagcaatggtcaaaggcaaagaaagctataactgggttctcgaagaagagcaacgagagcagtggatccaaatccaatgcccggaagggaaaaccattgaaaaagctatgaagcttttgttttctgggctgtaacgcgttgatcaatatttcaatactgtcaaagtcatgaccatagctgttgtgttttgacgactctgaaataccaacggctgtttttgtaagggcaatcaatatttctgtttgcatgttgtcaatacttcttgcactcttgattctaa

SEQ ID NO: 41934 - DNA, 651 bp, Setaria italica
  Peptide Sequence Number=SeqID_107908
acggtaaactcacacctaatcgaaactcccattgattgaacagtaaaactggtattattcattggtatccaatgctctgttccattgatcggccccatctgaattttggatcaatctccgcctctactactgacctgggattatacctatgatgacagataacatcgtcacatgactcgaaccaagcgacaatgttaggaaatcatcgcagaccagctcgtttggcaaaccacgcacgccgtttgcccgtttatttccagaacagtatcatagtcaaaggaacgacgcctccttgcctatcgcgaagaacgcgcccgtcggcccaccggcgggaagcagcgccaccttcaccacgttgttcgccccctcctcaggcgtcaggagccccgagttccttgtcatgtcggtcttgacgtagccaggatgcgcgcagttgacgcgcagcctggggtgccttctcgccatgatcctcgagtatgcgttcacggccgccttggccaccttgtacgacgcgagctcacccggccaccctcgagcatccagtgcgccagccccgaagtccttcaggaacatgtccagaagctcgtccagcctctcctcggttaggttgtcggcgtcattcagctcctgcttcagctcctcgctcctgaa

SEQ ID NO: 41935 - DNA, 753 bp, Setaria italica
  Peptide Sequence Number=SeqID_107909
tttatttacctaaggttgtgacaagaatgccacatcagtacactcagtactaacctcttttgtcaagcatacatcatataccctcatggaggcacacttattaatagcctacatgcacaataaatacatcttatttctagcttttgtgccagatgtatgacaataatgcggctatatgtaggtaagcacgcatatgtaactagtaggctcaaggttgccttgaacttgaacatgaggggtgaatgctcaggtgaaccttctcccacctgtgcccgtttgtcgctgacaattgaagtacattgcagccacaggcttgccgaggttgaaacggcgtgcaaaattgcgcaagttgaagttttgacgcacttgcggtgcaaacacggtgccccgccccaattgttggtacaacaccaagacgatgcggtggattcccatggtggggcttgggctctcatatgttataatctctcggccaaagctatcatctgttgatgctgggatgtcagtcaccatccaatgcaagtattcccgcagggtcgggttgctgggattaggagcatcaggatccaccataacctaatatattttacattaacacaagcacatggtcaacatgttagggaattaaaaataacctgagtatttttgggtggctgagaatcctgcttttttttgtagtgtctcgctcacactgtaaatactacatatattagcaagagccaatcaatatcagtcctaaccgaactgggcacc

SEQ ID NO: 41936 - DNA, 467 bp, Setaria italica
  Peptide Sequence Number=SeqID_107910
acgaagacaactaacgaccgacgtaacaaaggccgaggagaccaccgacgcgctcgccgggtgcctccgcatcgccgaggacatcaagaaggacgcctccgacacgctcatcaccctgcacaagcagggggagcagatcagccgcacgcacgagaaggccgtcgagatcgaccaggacctcaccaagagcgagtctcttctcgggagccttggagggttcttctccaagccatggaagcccaagaaaacgaggcagatcaagggacccgccatggtgtctcgagatgactccttcaagaagaaggcgagccgcatggagcagagggacaagctggggctgagcccccgagggaagaatgccaatcgccactacggcgaggccaacagcgccatggacaaagttcagattcgagaagcagaagcaggacgacgccctcgatgacctcagcggcgtgctaggccagctc

SEQ ID NO: 41937 - DNA, 303 bp, Setaria italica
  Peptide Sequence Number=SeqID_107911
tgccctccctggggcaccgccctccaggaacctccacattttcagctatttggaaactcctgaacccaattatcttgagtttctatggaagcttcaggaagtcagcattccttcccccagggtatgaggcaggatcctctcagaggagggtcataagacccacaatcagaaagttgggaagattagagtcctgccttgggacaggtgaaaggagggcaggcaagagattctgtttcctgaggcctaacacacccaacattataacaagagactataaaaaggctatgggccaggaaccagcat

SEQ ID NO: 41938 - DNA, 568 bp, Setaria italica
  Peptide Sequence Number=SeqID_107912
tttctgaacctaacatgattgcatttgatacctttatcaggattgttgcatctctgaaattaaatggataccgtatactcaaaatgcaaaatgataaatgaaaaaaaggacaatacacagttcttaggtgtttatcccaccattcgttggagcagtcaacagtttgctttgcctcattccatccaagaccagtggcagaattcttgaactctgtttttccatccaacttattcttcaattgtttctttatttgcttcagctcagttttttcttcgtacttagttactagatttttccaatcagctctagtgaacatttccaagggcctattcccagcttctctctcctttgcatatgtcaatgaaatgcctcacattggcatcacaccaatctgccttatcagtcattcttgaataaagaaaaaatccattcaattcacaatcataacaatatcaataatcaatgcctcctccaatttgtcatgcatccaccaatttatcaacacacgtacatatacgataatttcacagtatagatacagaaacaaaacactaatgtacttgaacat

SEQ ID NO: 41939 - DNA, 1753 bp, Setaria italica
  Peptide Sequence Number=SeqID_107913
accaatcaaccctgcttcttcgtcacttgtacctggtggatcatgcagtggatctgctgtggcagttgctgcacaacttgtcgactttgctcttggcaccgatacagttggtgatgtgagaattccagcttctttctgtgggttactttgtttcaggccttcttatggtgttgtttctactcttgggacaatagcaaattcacaaagtctagcctttgttggatggtttgcgcgagatccatgtgttcttcatcgtgttggagaagttctactaccagctactgcaggtggacttaagcaaacaaggcaattgtttttgctgatgattgctttcagctgctaaaggtctctaaccagaaaactgtgcatggccataaaaaatgctgtccaaacattacccggatatcagccacctaaacacatcaatattggccaatatctttattcaaatgtacctagcctgaaggagttttgcgaacctgctacgaagttacaagaaggaatgtcagccttgaaagcgctgtccacagtgatgctgttactgcagagatacgagtttaaggaaaatcatgagaattgggttaacactgttaaacctaagcttggccttgatatctctacttgtgtgcttcgagctgtgaactttgcacatgataacattaaatctttgtatgcaataagaaatgaattgcgggcggcactcaagaatcttctcaaggattcgggaattttagttctaccaaccacagctggatatcctctgaagagaaactctaaagaaagactatcatctggatttgaggatagaatgtacaaatttgtgggcattgctgcactttctggctgttgtgaggtcactataccctggtcaaatctggatcatcatgtttctctttcatttgtagcagcacatggatcagacaaatcccttcttcgtactatcgtggatacatattctctcatccaggaccaagtagttttggcatccaagttggtagccgcaccagtagtcaatggtgacgttgatattgatgaatcagagttgctgaaagaaaagggaaatagtgctttcaaaagaagacagtggagcaaggctgctgagttttattcagaggccatcagtttgagtgacacaaatgcaacttattactgcaatagagcagctgcttacctggaactgggccgttttaaacaagctgaagcagattgtgaccaggccttactgttggatagaaagaacgttaaagcatacctacggcgaggttgtgcgagggaagtaactttgaattacaaagaagctcttcaagatttccggcatgctttggctttggaaccacagaacaaaacatctcttgcggcagagagaaggctgcaaaaactcctgaagtgatgaggagtgccagcctcaaacctgtaaatttttggagacgcgccttggctgcgccttggttgaaggcaattttgatcggtcacttgtaaaaaaacagagaaaaggagtgtccgtgcgatctgccagttagactatccacgagtcattgaactcttgctcggttttctgtcattcataaatttgtgcctcactagtcaggtcaggacgactgtgaggagatttttgtatctcctgagctgagaacagaggctctgtcgttgagtcgaccgaaattcaaccgactatactgtgagatccagtcgtcgccgtgcgatacggcaggcggcaaattttgtattatataatatggctgtactgcttacg

SEQ ID NO: 41940 - DNA, 630 bp, Setaria italica
  misc_feature (597)..(630): n is a, c, g, or t
  Peptide Sequence Number=SeqID_107914
ctcggggtagtggacgcggcggaggacgaggagttcggcttccccgacggcgactccgtggcgcgccgggtgctgcagaaccagaacaacgggtacataagctacggcgcgctgcggagggacaacgtgccctgctccgtgcggggcgcgtcctactacaactgccgccccggcgcccaggccaacccctactcgcgcggctgcaacgccatcacccgctgccgcggctgatctcgggccgttcgatccccgcgcggcggcggccaccgggaagaggaggaggttcatattcctgttaatcccacgccgttgattcagaatcaaaaaaaacaaagaaaaattgttgatctgccctttcaattatttagtagtacgattatttctcttgtcgtcaatgctgtggattttaacgagaatgattggtggtggttgggctgccgcccaagcgattcgagtccgtatggtcctgtaaattgcatgatttgtgtgatcgagcaacgggtgtataaacactgatggttatttcctcgtgaacctgtgtgattgtgattgtagccagggagggattcgtgtagctgtccagctccgtgatttcannnnnnnnnnnnnnnnnnnnnnnnnnnnnnnnnn

SEQ ID NO: 41941 - DNA, 295 bp, Setaria italica
  Peptide Sequence Number=SeqID_107915
tgttggtcgtagtggcgacggtggtgaactgatatgttgtgacaactgtcctgctagttaccatcaagcttgcttgccttatcaggatatcccagatggcaactggtactgctctagctgcctttgcgacatttgtggggaagtgatcaattcgaaggagctaagaacttcagtccctgctttagaatgtttacagtgtgaacgtcaatatcatgcaaaatgcttatctggcaaggttttacgcaatgagaaaggtggacctgatagcattttgcatgatattgacgttcacact

SEQ ID NO: 41942 - DNA, 968 bp, Setaria italica
  Peptide Sequence Number=SeqID_107916
taccttattaaatatatataatatgccattacccatacaatatacttgttggaactcagaaaatctgctttgccataagcaacctcaataactagttttaattgatatttttattcttttaaactcccttcgcttagttattgttttcttggagcacaaaaatgcttgatagaaaataaggaatgtggtggttgtattttggttaagctattcttaggttaatcttgtcctggcatattaaagaataaagcaaaagtctggggcatgcgaagcacctttcttacaagagtaaaattgtgtgattattttgcatagctatgtgcagaactgaaacttgccgttacaatagaagtaaaagaccacttttgctggtataactgtcccagctttatttatgaaactgtgtggtgaccattgttcacttacactcagcgtgttcaagagaaactgaaatatggttaaatgaagctattattaaggatttaaggcatcactgatatattcttgtagtaatctcgaattatagaaaatgcaccaagattccatgattgttacttcatcacactatcacagtaagatcagatcgtaccattttcaccattttacttgttgataatttgaatcgattctttgtgatcttgacgatgggaatgatagaagttactgtaaatctatttttgtgtgagctatatctacacgcgttgttttctttaaactacattgcactagatgagatgggaaccaagatcgacgagctggagcagagcatcaatgatctcaaagctgagatgggcactgagatgcctaccaagaagcctgaggaggcaaagcctgctgactctgcataacttggctgtgagccggagattggcgagacaaaatttggagcctttgtggcaaattttagagttatgtgtatgtcattgtcttccatggaccatctccattgcgtgagttgtctgtcagct

SEQ ID NO: 41943 - DNA, 492 bp, Setaria italica
  Peptide Sequence Number=SeqID_107917
cttgctcaacccctccttcggctctccgctctcctccccacgtttccaccggagccgcacccgcacccaccgcgatctcctctcctccgaatccgccggccgccgccgagccccgcctcctccacgacccgctgctcctccgactaacatggattcagagccctcatcgcagaacccaacagatatgactgcttttgtgcaaaacctccttgggcagatgcaaacaaggtttgagtcgatgtcgcagaacattgtgtcaaaaatagatgagatgggaaccaagatcgacgagctggagcagagcatcaatgatctcaaagctgagatgggcactgagatgcctaccaagaagcctgaggaggcaaagcctgctgactctgcataacttggctgtgagccagagattggcgagcaaaaatttggagcctttgtggcaaattttagagttatgtgtatgtcattgtcttcctgtgtacaaaaaatgatgagatg

SEQ ID NO: 41944 - DNA, 411 bp, Setaria italica
  Peptide Sequence Number=SeqID_107918
tagactacaaacccctaccttcggctctccgctctcctccccacgtttccaccggagccgcacccgcacccaccgcgatctcctctcctccgaatccgccggccgccgccgagccccgcctcctccacgacccgctgctcctccgactaacatggattcagagtatttataatagctgattgcaagctttccatttcaggtgcaaaacctccttgggcagatgcaaacaaggtttgagtcgatgtcgcagaacattgtgtcaaaaaatatccttatctgcaatcatttcattgttttcattctgttcatcttttcaaagaaaatatgaaaaacagagctatgccattattagttttttttaccagtaccgatattatttgctttctgaatagtaatatctgatgccatatt

SEQ ID NO: 41945 - DNA, 686 bp, Setaria italica
  Peptide Sequence Number=SeqID_107919
caatggaaaatggtcgactgaaagtaacagtgcagggcttgcttatgtgtctacttccttccaaatttgtttcctggttcccttcctggtgtataagttaggtaataaaattcatacaatacaatcccagtgatcccattgatgagtggccctcataacttggctctgcagtttcctgctgctccgactaacatggattcagagccctcatcgcagaacccaacagatatgactgcttttgtgcaaaacctccttgggcagatgcaaacaaggtttgagtcgatgtcgcagaacattgtgtcaaaaatagatgagatgggaaccaagatcgacgagctggagcagagcatcaatgatctcaaagctgagatgggcactgagatgcctaccaagaagcctgaggaggcaaagcctgctgactctgcataacttggctgtgagccagagattggcgagcaaaaatttggagcctttgtggcaaattttagagttatgtgtatgtcattgtcttccatggaccatctccattgcgtgagttgtctgtcagctatgtagactggagatatcttgttaatactgcatccttagtttgggctctcagctcttcagacatttgtgatttgtgcaagttgctatttgtttggctgttctaagctgtgatggcaaaggtgatgtgacgaaaaaaa

SEQ ID NO: 41946 - DNA, 371 bp, Setaria italica
  Peptide Sequence Number=SeqID_107920
ggaaccttgccgctcgccgtggagcgaattggcgatcggtgtctgtgtgactgtgtcttctctcgctcagggagctccgatcgagaagcagcactatcatagtcagatgggagagggcgatcggttcctgtacgagccgagtttttgctaccctgattctacagtgctgtcaccgcagcatatcatcatccggtacagttggagattcagagtttcgttttcgttcgttcctccaagccatcgagtgcaacggaaagtttatgcgatcagatggcacggcattacgacatgtaggtcgtatccagcacttgtccatccagtggtactcgtgaccttcggctgtcggaatgattaccagcacggagtaaaat

SEQ ID NO: 41947 - DNA, 569 bp, Setaria italica
  Peptide Sequence Number=SeqID_107921
attgagcatgttcgcctggagcgccgccagcttcttgctcacgcaggcgttctcatcggcgaagtggtcgcgccgcgccggggccggggccgggacaggtgccggagctgaaggtggcagcaagtggtcgatgcacggctgcggctgccagatacttgacgacgatcccagcagcagcgcgtcgaagagccagctcgtgtcgagctgatcggcgcgcgggcggccgacgagcttggcctcgaggtcccgcagcatctcctgcgcgcgctcgtaggccttgaggtgcgagtcggcgccgcgcaggccgtcgaccgccgcggggcgcacctgcttgagcacgtccttggcctcaagcacgcggccctgcttcatgaggcagatgcccaggttgcacatcttgttgttgtccggcccgatgagcagcgcccgccggtacgccccctccgcctccgtgtagttctccttctgcatcagagcccatcccaggttaccgaggagcctggtggcttcttgctcgagggtgacctggaacttgcggcctgcgacctcgccgtcttggtgcgcttcgg

SEQ ID NO: 41948 - DNA, 444 bp, Setaria italica
  Peptide Sequence Number=SeqID_107922
gatccgaaggtgctcgccctccgtgtcatcggccacacgctgaacccgctcaccgtgctcttaacccacatggtcgagccgcggatgcgcgtgaacccggacgacggcaagctgaccttcccgcacatgctgatgccgttcaggagagcattccatggaacgttcattgttagcggagggtatgatcgggaggaaggcaacgccgccattgccgagggatacagcgatctgtttgcatacgggcggctgtttctcgccaatccggacctcccggcgcgcttcgcgacgaacgccgggctgaacaagtatgacaggagcaccttctacacctccgatgcggttgtgggatacactgattacccctttctcgatcaattctagatgataccttgtactaatgacgacggttaagcaatattaaaaagtttgtgttgtctcaaagag

SEQ ID NO: 41949 - DNA, 429 bp, Setaria italica
  Peptide Sequence Number=SeqID_107923
agtgtctcatgtggatccgctggtggtggggagggtgatcggtgacgtggtggacctgttcgtgccgacggtgcccttgtcggtgcgcttcggcaccagggacctcaccaacggctgcgagatcaagccacctatcgccgccaacatgcccgccgtccagatcgccggcagggccaacgacctcttcaccctgctcatgactgacccagatgctccgagccccagcgagccgagcatgagggagttgctccactggtgagacggtggtgccgtacgtgggcccgcggccgcaggtgggcatccaccgctacgtgctggtgctgttccagcagagggcccgcatgaatgccccgcgccgatggccatgggtgggagaggcggcgcgcgccaacttcaccacccgcgccttcgccagccgccatgacctgg

SEQ ID NO: 41950 - DNA, 251 bp, Setaria italica
  Peptide Sequence Number=SeqID_107924
ggtcttggcccgttaataggaaataaaatgccacgctcagcggtggatggcccatgttgttcgtgtcaagcaagattcaagaagcagtagtctctgactctctgatctcaatgtgaagtacaagtaccgatgctactactcctatgtacgactgtgtgtatatgtttagggttatgtacggatctcggctgaagtggcatgcaacaatcctctaaaaggcagacttctagttaaaaaaaaactaaaaaaga

SEQ ID NO: 41951 - DNA, 268 bp, Setaria italica
  Peptide Sequence Number=SeqID_107925
gctgcctgtaaactaatcatttctaatctttttagtcttcattggggaagaagtgatatatattagcattccaaaaacaaagttcagaaatatctaaataaaaaaatcaagaaacaaagcaaagaagactggtttctgggcaacaaacacaacaaaaaacacatatccaacagcaggcaggacacctctagattccaaaatactgttgtgttaaaatcatagcagtgttctatgctgttactagatgaatagcttgaatgaaaatata

SEQ ID NO: 41952 - DNA, 438 bp, Setaria italica
  Peptide Sequence Number=SeqID_107926
tccgattcttattggaagctgccagctagactccatgagagtaggcctgtagctgctggggctgagagttttgttgaagctgaaaatgggtcgctggaagatgttgtttcatcacaaaactctgccatttcatctcaaaactccccagattacctgtttcacagaaacgagcatatgttttctagcacgccactaaagttcacagcagaggcctttgtccacagaaataagcctattggtaccagcagttcaatgacatatacagaacttttacggatgcaagagataaagagcaagtatagtgaaaacattgcatcatgggagtattgtgaagttccagacttatttacaaagaaggggccacccctcaacgagttacaagacctcaagaaaaaaacatcatcatctttacacttctgatacttatcaacagaatgg

SEQ ID NO: 41953 - DNA, 225 bp, Setaria italica
  Peptide Sequence Number=SeqID_107927
agttgtttagtcttatgaaagaatctggttgcttccctgatgttttgacatatactgctatgattaaagcctatagggatgatgggagctggaggagagcatgggacctgttcaaagagatggaaagtaatgatgtgcagccagatgccattgtatgttcatccctcatggaagcattgaataaggaagccaacctgaaatggtccttcagttgatggaattcat

SEQ ID NO: 41954 - DNA, 946 bp, Setaria italica
  Peptide Sequence Number=SeqID_107928
gtgccttgagcgctcgctccagctcgccgccccacgaagttgttcctcttccctgtctacctacatgggcacggcgacgcccatgtcggccaccagcgtgaacgcattgtagtgctgctcggcaccgagcggccatggaaccatcggcacgccgtgccaaaggctctcgaggatcgagttccagccgcagtgcgtgacgaagcctcccaccgcggcgtgggcgagtatctccttctgcggagccttcgcgggccacaccaggcctctcccctttgtctcctccaagaaacccgcggggagcagctcgacgaggttcccgtccgtgggcagcttcgtgccgggctcaggctgcccgcgcagcacccacaggaagcgatgcccgctgcgctccaggccgtgtgctatctcgtgcgcttggggcgcggtgaaggagcctgtgcctccaaagcagaggaacaccacggaggccggtggctgcgagtcgagccaccgcacgcactcgtgtgctgcggccttctcgccggtggacggggtgaaggggatcaccggcccgatggtgtacaccgaaggggcgcgggtcccgcgggtgcactgcccatcagcgatggcgccgaggacgcgcggctcaagctcggcgacggtgttgacgacgatgccgctggcttccatgtagcgcctgccgttgtacacgaaccacttgtatgtcgggatcttcctgttctccagtcccgtgggtaggcaggacgccggcaccggcgggagcccgggcacgtccaccccgccctcctccgactcctcgaactcgacctcggcttccagctcctcgtcgagcgccggggagcgcagcaggagcgcgcacatcgcggcgctggtgatcaggtacacgtaggccggcacgcggagctcgtgcaccgcgtcgaacagcgtcgtgcagaagatgtcgacc

SEQ ID NO: 41955 - DNA, 413 bp, Setaria italica
  Peptide Sequence Number=SeqID_107929
tagatgaagaaggaaaatgttgtccaagttatcacagataatgatcctgtttgcagatctgctggtgctctgattcaagaaaagtacagtcacattcagtggacgccaagcatagctcatactttaagtcttgccttgaaaaatatttgtgctggtaagagtagcgaagacgtcgacctcagagattgccattggatttcgaaagttgtagatgatgcaaccttcgtcaagaatttcataatcaatcacacatgaagttatcaatttttgaagagtttagtaagttgaagattcttgttattgctgacacacgttttgcttctgatattgtgatgctaaagagattccggttgatcaaacaatctctgctgaggatggtcatcagtgatcagtggcctgcttacaggaagggt

SEQ ID NO: 41956 - DNA, 749 bp, Setaria italica
  misc_feature (170)..(170): n is a, c, g, or t
  misc_feature (221)..(221): n is a, c, g, or t
  misc_feature (667)..(667): n is a, c, g, or t
  Peptide Sequence Number=SeqID_107930
tttttttttttaaggaaaattgacttaataaaataatctaaagcagtcataactcaaaacatcaaaccgaaacaggaaataccagtaatttactactccctccattccaaattataactcattctaactttttttggagagtcaaactattttatgtttgaccaaaattntagaaaggatcacaaagatttatggcaccgaatagatatactatgaaaatntatttaatgacgaaactaatggtacttatttggtatcatgaatattagtactttgttgtataaatttggtcaaacttgagatgttttgactctccaataaaattgaaatgacttaatttggaacggagggggtaactaatagccaccaacgtcgactatcatacaacaatgctgaacatgaaagggtgacactgccttcaactcattgcagtggtcgcacttcttcttgaggcagttgttggccctgacgggattgcgcgcgtagcacctgcacggcatccatccggacgatatagcagaaggcacggtgagcgatcgatagcaaccgatactgaagatttgagatggcaagttgtgggattcgtcgcactcgcggcagatcatcttgcgctggcggtacttgagcgcgagctggaggatggttgggctcgacgttcatggggtanctgccgccttcgcgctgttgaggcggagcaccaggtgcagcgtcgactccttccggatgctgtagtcggccagggtgcgccc

SEQ ID NO: 41957 - DNA, 534 bp, Setaria italica
  Peptide Sequence Number=SeqID_107931
cgacgcggcccgtgtccggcggtacttgacgacggggagcgcggcgacgacgtccgggtcgagcccgccgggcagctcggcggcctcgaggtcggtgaagaagaccgcggacacccgctccacgaggtcctcgcggcgggcgcggtggagcagcccggaccccggcccgccgccgcggagccagcagcggacgacgaggaagtagtagctgatgaggatgagcgaggtgaccatgaacccgatggcgatgacgatggcgatcgggaacgccgcgccctgcccggccaccggcggcggggacgcgtccggcggcagtatgggcgcgccagctgccatgcccgccgcgtccatcgccacgcgcgccccgggggaggcaaagtcaatgccttcgcgagcacagatcagcccctgggccaaccgaccgacccgagcaaagaaataggagggacggaggcgtgagccgcagctagcgagcgatccaaggaagcgagcgcgctgcaggctggagggactagccggtggccggccgctagt

SEQ ID NO: 41958 - DNA, 404 bp, Setaria italica
  Peptide Sequence Number=SeqID_107932
ttgttagcaagtgcgctcaaatggccagaatattggctcatcagagtcgttagcttctttcctttgcgatgttcctgcactagaactgggaggaccacattggaggcttctgactgcactgaaagaaggactgggaaagtcagaatcgagaatatcaagaaactgttccttgcctggcagcaaagcagaatcctctgcatcaagatctaaagaagagacccatatatctgttctgtcaagatcctcagactgagtatctgactgtactgtgaatggtgtacttggggtactgattgtagatgactgctcgctgaaagagctatcatatgaagaatcaccacactccgagtctgaaaggacaaaagggaaagccattcttttcaagtctccatctaatcgcctcc

SEQ ID NO: 41959 - DNA, 531 bp, Setaria italica
  Peptide Sequence Number=SeqID_107933
tgtgatggctatgagctatcgcccgctagcgaggcaaaccgcctcttccattttgctcagcggaaaatggcagaacgctggagcagacttcgtgctaccgtggcagcctcaggcatctttagcctcccaaatgagctctctgggtactgcacttttgctaaggagatagtggcagctaatcctccatttgcatggctccgttgccacaaggatggtgtagaagacctggagggttttctacgtgaaaacaaaataatgactcgaggtggaccaaagtttggtgtggatgagagggttgtgagggtcagcatgcttgacacagatgaagccttcgacgtgttcatcaatcgtgttgcctccttaaagtgaagccatgaatgccttcaaaaaactctgtcgtgattgcaagcatgagatgctattaatgttgctgatttaatggaagaatgtactagccaatttcaagttcaacttttgcatgttgcgagattctacccaaagcattgccttttacttgttagaatattcata

SEQ ID NO: 41960 - DNA, 561 bp, Setaria italica
  Peptide Sequence Number=SeqID_107934
ttgtttacttttgttttctttattttgtttctttttggtttccttactagtattattcgtcttccagctgcagtacactcaaggggggaaacaaaaggtttgacagcaatgaaaaacaacactctaatttgtcagctccataatggcagtgacaatgtccccatcagcagcctttagagccttgacagccttgggtctggagacggatgcctgggtcatcaccagctcaatgtccttgggctcaacaccggtatcgtcaacctcctcctcgttgtcctcctgaccgagcccagaagtctcaggcttggagatcatctggctcaagtcaggagccttgaactgttcagcagcctgggtctgcagctgggagctgaggtcctcaatcttggcctcaccaaagatgacataggtgtccgagttcgggctcttgaacacatctggcttggagatggacaaacagtatgttcttgcttttcttcacggtgacacggctgacaccagtgaggggcaagaaggtgatgccagtggcaaatcaaagcaaagcaggagcgagaagaagag

SEQ ID NO: 41961 - DNA, 625 bp, Setaria italica
  Peptide Sequence Number=SeqID_107935
ttaagctatagactttttgtgtaagcaagccagcaaagatgaaaccatgttgcaatttccttgaccaaagtgcaaccaagcatgacagtcattatggtccacagatatcgctccagctgcagtacactcaaggggggaaacaaaaggtttgacagcaatgaaaacaacactctaatttgtcagctccataatggcagtgacaatgtccccatcagcagccttaagagccttgacagccttgggtctggagacggatgcctgggtcatcaccagctcaatgtccttgggctcaacaccggtatcgtcaacctcctcctcgttgtcctcctgaccgagcccagaagtctcaggcttggagatcatctggctcaagtcaggagccttgaactgttcagcagcctgggtctgcagctgggagctgaggtcctcaatcttggcctcaccaaagatgacataggtgtccgagttcgggctcttgaacacatctggcttggagatgacaaacagtatgttcttgcttttcttcacggtgacacggctgacaccagtgaggggcaagaaggtgatgccagtggcaaatcaaagcaaagcaggagcgagagaagagccgcaaggccatgctgaa

SEQ ID NO: 41962 - DNA, 1017 bp, Setaria italica
  Peptide Sequence Number=SeqID_107936
tagtctaattgtaaaactaactacttcttaattttgggctgaaatatcattatatcaatgccagagagaaacaacattaagctatagactgttgctgtaagcaaaccagaaaagatggaaccatgttgcgatgaccttaaccgaagagaaccatgtcgcgatgaccttaacgaagtgaaccatgttgtgatgaacttaatcgaagtgcaagcaagcatgataaaattatctaagcattatggtccacagataacactcaagctgcataacactacaaattgggggaaggggctttcgaccgcaacaaaaataaaactctaatttgtcagctccataatggcagtgacaatgtcgccctcggctgccttgagagccttgacagccttgggccttgagacggatgcctgggtcatcaccagctcaatgtccttgggctcgacaccagtgtcgtcgacctcctcctcgttgtcctcctgaccgagcccagaagtctcaggcttggagatcatctggctcaagtcaggagccttgaactgttcagcagcctgggtctgcagctgggagctgaggtcctcaatcttggcctcaccaaagatgacataggtgtccgagttcgggctcttgaacacatctggcttggagatgacaaacagtatgttcttgcttttcttcacggtgacacggctgacaccagtgatgggcttcatgccaagcttcagcatggccttgcggctcttcttctcgctcctgctttgctttgatttgccactggcatcaccttcttgcccctcatcatcatccttgtcatcatcgtcgtcatcctcgtcatcatcgtcgtcatcctcaaccacaacctcctctgcctcgttcttctgctcctcgagcttctgctgctcgatctgggcggcgagctcctcagcggtctgcgccgtcatcttgggtgggaggggatgcgggggaagagagaggcggcggcggcggcttggcaaaaaccctagagcagactcgcgcaaatgt

SEQ ID NO: 41963 - DNA, 310 bp, Setaria italica
  misc_feature (42)..(42): n is a, c, g, or t
  misc_feature (284)..(284): n is a, c, g, or t
  Peptide Sequence Number=SeqID_107937
accgggtcgaggcggcgccgcgggtggcctggctccacgcgngaaaaaagttgtttgtgccgcggccgtcggcgacgatgtgctgcgtggtgaagccgacgacgagtgacccgcacgcgaagcgcgtgacctggatgagcatgagctccgtggcgccgtcgccgctggggtgcaggctgagcacctcgggcgtgggcttgagcggcatgacgctgtcgagcgtcacgtccgccgtcgcctccacgaaccgcgcgccggcgtcgttgaggaggatggcgcggttnccctggcgtccacgcccagccgcccc

SEQ ID NO: 41964 - DNA, 340 bp, Setaria italica
  misc_feature (10)..(10): n is a, c, g, or t
  misc_feature (25)..(25): n is a, c, g, or t
  Peptide Sequence Number=SeqID_107938
ttcgtatgcngtaaagcgctttgancttccttaatcctcctcccaagctccaagctagataccgagtaggaaaagttgcttacaaagttcaggtcatgtttattaaaaatcaagcaagatatatccatgtcttcactggtgatttatggtttttcactcaattcatggatggtaatagaggcgcaaatcatgatagtgagataatcccttattcatagtgagatacaaatggtttggctctcatagtaagaaatcatcacattcgaactacttcatattcatcaacacacggtcgaatacaaatcccaaaattcaatacaataatcctaatcctatattc

SEQ ID NO: 41965 - DNA, 555 bp, Setaria italica
  Peptide Sequence Number=SeqID_107939
tgagaatccattactaatatgcctctcgtgatatacagtatctctttggaagaaaatacattcttaatttcttatggcatatttcattttgtcaaatgatcttatgacatatttcacgtgtcttctagcagtggataggtgagaatgagtttgcctggtttgttcagcagtcccccatctgttagctctgcgaagttagcaagatagttttcttgtccattagtgttgactgatatgtttcatgctatgatggaaatgcagtgtttacatttagtccatgacctaatgtttaatttacctcatctgtgtgatttatttttccgctctgacctccttggtatcatgcctttggtggtactctagttcagtgtccgatatgctagtctagttggagactttgctctctgcagtccagggactggggaactgaacgattgcagcggcactggcgcactgcttaaaaagattcatattcattgaaatttccatctcagttctgatacagcttgcttaggatattcctatgtaaggatcactggtaaacatctgctatta

SEQ ID NO: 41966 - DNA, 330 bp, Setaria italica
  Peptide Sequence Number=SeqID_107940
agaccgccaagtcactgaacagcgaaacaccattgcaactttatcaacattaactgaaagcagcctttccgcttgaggttcctcgtgacgcaatgatgtttcatgaatattagagtcagacccaggtggactctgggatctagaacaagagccttccaacgcattatcaccaggacttatgcaccttcgcttctctccgaaggatggaggagcattttctgaatcagctctcttatcaagtaccgatgcttcatcggtgacaaaccgagaacaggatctttctacattttccctctcgttttgtggtggtgacgagaaggcaacttgtgt

SEQ ID NO: 41967 - DNA, 863 bp, Setaria italica
  Peptide Sequence Number=SeqID_107941
ggccgtaaccaccacctgaacggaagggaattttcagtttcagccggagaatcgggaggcgatgatggggtctcgcgctcgcctcgtctccctcctcctagccttcctcctcgcgcgcgccgccgaggccggcggcggcagcggcagcaggtacctgaccaaggacgagcggtggatgaaccagcgcctcgaccacttctcgcccactgaccaccggcggttcaagcagcgatacttcgagttcctggactaccaccgcgcccccggcggcccgattttcctccgcatctgcggcgagtccgcctgcggcggcatccccaacgactacctggccgtgctcgccaagaagttcggcgcggcggtggtgacgccggagcaccggtactacggcaagagctccccgttcaagcggctcactaccgagaacctgaggttcctgtcgtcgaagcaggccctgttcgacctcgccgtcttccgccagtactaccaggaatccttgaatgctaggtacaaccgcacgggatttgataatccttggttcgtcatcggggtctcctactccggcgctctcagcgcctggttcaggctcaagttcccccacctgacatgtgggagccttgcgagctcaggggtggtacgggcggtgtacaattacactgcctttgacaagcaggttggagagtcggctgggcctgagtgcaaagctgtccttcaggaaataacgaaacttgttgatgaacagctccggacggacagccgctcggtgaaggctctgttttcagcacaggcgttgaaaaatgatggtgacttcctcttcttcttggcagatgcggcagcgacgacgttccagtatggggatccag

SEQ ID NO: 41968 - DNA, 1407 bp, Setaria italica
  Peptide Sequence Number=SeqID_107942
ccctttcacagttggagttgctgatagaatacaaaaacaggggagagaaggaaaaacaagtttgagagagagggaggtgggggattgataaacgcagcgccgaagcctctggctcggcggcgcccgggatgcggctcaactgctctgcttccggcggcacgccgctgcgggaggccccaatggcgcgggattgatcgttaagttgtgccttctttttttccccctcttgatttctcggtgtgaatttccgtgatttcttgagtcgcccggtggactccttggggatcttggttctcctgagtgcttctgatggaaaaagccggatcttggtgctgctcctcaggttcctcaggtgccggcggcggttgaaggtcagaccttgccggtggaatgtacgggcggcaaggcccgttacttctcccgcaattcgagatcggctcccctgattgcgcccgcttcttggttgcttcggaggttcaatcctgaatttgagagaaaaagggattgtttccagtttgctttgcttgtgtggatttggctgctggaagattcatgcagcctttaggattgctgtagagtcgttgtgaagtttgaaggctgctctggtcatgttgggggaccagcgcatgatattggccttagactcagcaacctcatcaagctcggcccctggtttgaccctctctgaagatctcacttctggaagcagtaactgtgtgactgagagcctgcaggtgccgtgtgcacagaagggaggacaggtggagggtctggtgaattgttataggaaaaagaataaggtcggcagtggttcggggaatcctgcaatcgaaggttggggctccaatatggaggatggtgatcagaacggcgaagtcaacacaagtgaactcatcagcgggatcggccgggagttggcaatctcctgcctgctccgtcttccccgatcttactattacgatgtggcatgtgttaaccggtctttctactcccttgtaaggtctggggaactttataggttgagacgggaggcccggattgtcgagcagatgatctattgctcatgcaatgtgctcgagtgggatggttttgatccgtgccgccaaaggtggttcagcatcccttccatgcctcccatagaatgcttcacactagctgataaagaatccctggccgtgggcaccaatatccttgtcttcggaaggagggtggaggcccatgttgtgctgagctatagccttctaactaactcctggacaacaggagagatgatgaacacaccgaggtgcttgtttggctcagcaagcttcggcgagaaggctattgtagctggtggtattggtgagaatggtacattgagctctgctgagctttatgattccgagatgcggacatggaccactcttt

SEQ ID NO: 41969 - DNA, 1267 bp, Setaria italica
  misc_feature (15)..(15): n is a, c, g, or t
  Peptide Sequence Number=SeqID_107943
agaggtagagactanttgtcgtcgtttgtagggtaattagaaaccttaaactaaaaactaaaaactaaacctaaaggaaaacaaaactaactcctggacaacaggagagatgatgaacacaccgaggtgcttgtttggctcagcaagcttcggcgagaaggctattgtagctggtggtattggtgagaatggtacattgagctctgctgagctttatgattccgagatgcggacatggaccactcttccaagcatgaacagggcgcggcagatgtgctctggtttcttcatggatggcaagttctatgtcattggcgggaagtctgagaagcacaacgagatccttagttgtgctgaggagtttgatttggagaatggcacctggcgattgatccctgatatggcgcggggccttaatggtgggtgtggtgctccacctcttgttgctgttgtgaataatgaactttatgctgctgattatgcttcaagggaagttaggaagtatgacaaggaaaataattcttggatcactcttgggtcattacctgggaggtatacatcagtacatggctggggcttggcttttcgcagttgtggagatatgctcattgtcattggtggaatgagtcttggtggtagcggggtgattgaaatttgttcctgggtacccaataatggattgcctgattggaagatcattggcacccgccattccggaagctttgtatacaactgtgctgtgatgaattgttgacatacaaggtctattacattattaaaactgtacatcttgaccaaaaggaaggataaagaaggcaaattctgctgagcctgtttactccttggtgggggaatatcttccctctggcattttaggctgagctgaaggttggatagaactttctcatgtagctttttacttgcttatgtctaatctcttcattttaattccatttggagggcctgcaattggtttccggaaagtgggacatgcagtgcagcattagattaataattcggtgcaacctcaaacattttgatcttccctgggtaccttgatcaaagttttttagctccagagattagccttacattggcaaatcatttgcccatagattgtaagaaataaaggaagaaagaaatatgtccttgttgacaattgttgtcttttcttggttaatagtgattggagataattgtgaaacatttccttgtattttatgcaagtttttgcaagatctgtagagtatgaggagcatgagtactc

SEQ ID NO: 41970 - DNA, 554 bp, Setaria italica
  Peptide Sequence Number=SeqID_107944
gttcgtgtaattgtatggacgcatagaaactgaaaccttactattgggcactcctatttggtcatatatctctttttcgagtgttccgccttgtgaagctatctgtgagtgtggcactaacaaaatgaagcctgcctcgatttcggcgagtatgtctgggtcatcagggacgccgcctcctgatgcccggagatgaagcatcacgaaggcggccgagaggaagccgccgacggccaggagcagcacggaggcgcactttgcgctgaccaccttgccgacgactgcaccacaccggcagcggctgaacctggtcgccggcgcaccgttggggaaggcctgctcagcgcgaccggccttgcccatggtgagcgcatctggcactagtttctctctcggctcgtcagtgtggagaggtcatcaaagctggaggtggcggctgcgttgcgttgggggagaaagctggatggagagctggcgctggtgctcgccgttgccgcaacggcgacgcgaatggggatggatttgggtgtgtttaggagcggtagatgggaatg

SEQ ID NO: 41971 - DNA, 406 bp, Setaria italica
  Peptide Sequence Number=SeqID_107945
gtgtaacagttccgaggaaaattcaacataatgtaaaggggtatatttaggcacaaccaaaattttgagtatgtttccgaaaacaaaatgctacaactaaaggtatgagaatgggggtgtaacagactaacacttctgagttgaaggacccaaaagcgaatcaggctaaaactttttaagtgggcggattcaagagctacaggttgcattcagtcattaaacagaaagttcataatgttaaagaaaactcgctgaaatggacaacgaaacagatgcagcgcataaatgtgagcgtgctaattctggctaaatatggcttgatcactgcgttgaaaatcaagtatcccagttacaacgcctctagaaaaaaatcttaaaaaacgccgagaagtgcactaaataaata

SEQ ID NO: 41972 - DNA, 1487 bp, Setaria italica
  Peptide Sequence Number=SeqID_107946
cttggactgccaagatccgaaatacatgacatgctggatgaactggagcaactcttgaaaggtatcgcaatgatgaaagagctgacacttcgaaccagagactaccttgtttcatttggagaatgcatgtccacacggatctttgctgcttatttgaacaaaattggtgtcaaagcacggcagtatgacgcatttgatattggtttcataacaacagacgatttcggtaacgctgatgtcttggaagcaacttatcctgctgttgctaagagacttcatggagactggatacgggatccagcaatacccgtagtaactggattccttgggaagggctggaaatcaggagctgttactactttaggccgaggtggtagtgacttgactgctacaaccattggtaaagccttgggactgagagaaattcaggtatggaaggatgttgatggtgtactcacttgtgatccaaatatctacccacatgcaaagactgttccgtacttaacatttgaagaggctacagaacttgcttattttggtgcccaggttttgcatccacaatcaatgagacctgctagagaaggtgatataccagttagggttaagaattcatacaaccctaaagctccaggcacccttatcactaaacaaagagagatggataaggttgtacttactagtatagtgctgaagtcaaatgtcactatgttggacatagtgagcactcggatgcttggtcagtttggttttctggcaagggtattttctatatttgaagatctaggcatatctgtggattgtgttgccactagtgaagttagcatttctgtgtcacttgatccatcaaagatctggagtagggaacttattcagcaggaacttgacaatgtagtcgaagagcttgagaaaatagcaattgttcatctacttcagcagagggcaataatttcgctcatcggaaacgtgaaacgatcatctcttatactagaaaagaccttccaggtgctgaggaaatgcggtgtcaatattcagatgatctcacaaggggcatccaaggttaacatgtcgctgatagttcatgacagcgaggcgaaggcctgcatcaaagccctccatcaggcattcttcgaggacgaggatgttctcacacaagttgaaacggagaacctgctggtgggttgaccgatacaggtcgccgtctccagcatgttatccagcatcagctccaccttgtcatctatctccatcatcagtggcttaatccgctttgcgtgaacagcattgtgtatttaatttgtcagtctgcttcccactgaatggctgaaaaaagacatggctttttattgttcccaactcgggtgaacacaacgaacaccgcttgtgcatgaacactgaatggatgtttttgagagagataacaatgagcagttgaacagcatttgaatgcacagttgtgcacacatcaatgaacacagtgtgtactcgcc

SEQ ID NO: 41973 - DNA, 413 bp, Setaria italica
  Peptide Sequence Number=SeqID_107947
atagtgctcccctccctttcccttctactctgagttcgccttctcaagagctccgatggctggactagcggccagcctggtggtgggcccactggtgtccctggtgaaggagaaggcgtccaactatctcctggacaagtacaaggtgatggagggtatggagaagcagcacgaggtcctcaagcgcaagctgcctgccatcctcgacgtcatcgccgacgctgagaagcaggcgtcgtcccaccgggaaggagtgaagaaatggcttggcgtgctcaagacggtggcataccaggcgatcgacatctttgatgagttcgagtatgaggcgctccgtcgtcaagccaagaagaatgggcacatcaccaagcttggcaaggctggagtaaagctctttcctactcacaaccgtg

SEQ ID NO: 41974 - DNA, 297 bp, Setaria italica
  Peptide Sequence Number=SeqID_107948
cgccgccgccgctccaacccgccgccgccgccccaccctgccgcctcatctccccgccaggcgtcggctccgctcctggtactcccgaagcaacaagaactagcttctgtctccttgatcctcccggagccgcgagtcctatccccatcttccactaagaaaccctaactctccctgccaaggggcgaggaggccatgagggggaagaagccggtaatggagctgaagctcgcggtgccggcgcaggagacccccgtgacaaattcctgacggcgagtggtacattcaaggatggta

SEQ ID NO: 41975 - DNA, 1289 bp, Setaria italica
  Peptide Sequence Number=SeqID_107949
ttttgggttgtaagtctttggtccctaagtaaaccggttctacctaactttatttttgtatttaaaggtaggccatcacgacgaaggtattcattcggtaagcaacatcttacaacatgggcacagggcatccaagcatttccttgtttatttcctactccggacccagcatgtaccaccacttttgaaggaacacacactgcgacttcctcgagcctccggcttatgcttatgtctccagaatatgtacattggtggggaagcacagctgccaccattatatgccattttgtcagtctccgctcttcgcaaacttccttgcacttcaggtcccgcttaagtactttttgtacttgctttgggcaagactaagtaagaagtcggtgaacataatctcatatcccggcattttcccaaaacctgggaagtagttgatgtcaattatgtagtaccgatctttggttccaagttctctaatcatatctacattgaacaatctcaagcccagccggctacgaagctccctccctagtttctctagaagtggccttggaggaagctctgcaataagagggtcaagttctgcatcatccgcacttgctgcagcacatgaaactcttggcaaccgatagacgcccacattgtttagtaagtcatatgcgttaacatctggtagagagaatctgcggacaacctttaccgtttcaccaatgatatacaccttaaagaggatcccgccatggtttatgaattcctgtagaaccagcggtggatgaagcattgacaaggatgcctcatcatatgcaagatagagctcatggcctttagatgtcccatcaacaaccaatggcttggcaaccaagggccaggttagtccagccatggctacagctgttggtatggaggatggatcctttgtgatcaccagttggcgtggggtacaaacttctccatagagatttgacaggttcagatcagccacttcctcgagcattgattgtcgattgttcagatgctcaatagcattaggtgggtcaagaacagtaacttcaggatgttcttcgtgatagtcctccagaacctgctgccactccttgctagtaatcttgtgcaaaataacatcaaaaaagggtccttctgagaggggaagagactcatcaatggataacgccgctaccttcttgcagcaaccaatcattggttctggcctttgctagatcaattattgttgtacttttataataaagtttgcatgccgactcatgtgatcctaagaataagaaagtgtt

SEQ ID NO: 41976 - DNA, 778 bp, Setaria italica
  Peptide Sequence Number=SeqID_107950
atcaatatttatatcaccatcatctcgcatgatataaatattgatattagtagtagaaagtagaaacaggcgagatgatggtgataatatgctaataacagagtcataagagtatgaacgatggatgcaaatcgccgttttctgtgaattctctgatctgctcgttcaactgttggtgatcttgtgtcagttcttgcaaaccatttgtgatgtatataactatacctttttagttgtttagttgagtaaaggttcagcatgaattagcatccaggcatttgttgcagtttgattagcttagcaaaactgaaggatcaaatgattcgggttagaaattgggaagtctgttaatcaggttggtcaggaattgggaaattgcttgaagagttgctctgtatctagtgatgttttgtagtaggttagcagttctgaagactgcaagactaagagttgactctatattcacttgatgctggagtgttttgagcaaaatttccaatctcatggcatctgagacgtatagatgattttaatgtgtccagtctacagtcgtagttgtctggctacttggctagcctcgttgcgtgtgtgcatttcctgtgctgaactgatggaaatgattgtgtcgtgatttggaggttaagatgtcatggtttggttcaatcaactattcattttcttatcagtttgtctataagtaatccaggcgcatgggtcataatcttctggtgtatttttaaacccctagaggtttcggattggtgatgcctgtcgatca

SEQ ID NO: 41977 - DNA, 731 bp, Setaria italica
  Peptide Sequence Number=SeqID_107951
aatagtttacaagggtcatcccgtcccggtgcggcccgggccagcacaggctcctcccggaccgtgttcatttgggtttcggttgattgctattcgaagtcttcgtcgtactccccgtcagacaagtcatcaccttcctggaaggcagtgacatcggctgggtagcggaggatcccgccaatcccaccaaatccccggcagaactgagaaccttcctgggacttgttcgtgacgaactccagcgtgcagccaaactggtggtagttctcggcaaaccactcaagcagcagggtgttgtcgacgacctccagttctccagatgttgcttcgtcagtgaagttgctctggtcagcctcctgagcagggttaagatacttcacaatggtttctcctgtggcactgttcttgagctcatacctcctgacatcaaggttttcccacacgatcagagtttcgaccgctcccatttccagggctgtcatggtgtcttgcacaccgaggacgtacttccccgtgtcttggcttatctcctcaaagtacttcccgatcagcttcttttcttggacaaacttgacatcagataaaacctcagcagacatctcgatggcttggttgaagccgctatcccctccataggacacgtcaatcatcttgactaccttggcctgcagacgcggatcaaacatctcagattttcccagctcgttcttgaagtcagcagatccagcaag

SEQ ID NO: 41978 - DNA, 624 bp, Setaria italica
  Peptide Sequence Number=SeqID_107952
gctttcatggttccaacggaggtacttgctgtccagcattatgaacacctaacttcattgctggatgagtttgatggagatgataaaccaaacattgccttgctaactggttcaacttccacaagggagtcaaggataatacgaaatggtctcaaaactggagagatagccatggtcattggaacacacagcttaatagctgataaaactgatttttcagctttacgtatctctgttatagatgaacagcagcgctttggagttgtacagagaggcaggtttaatagtaagctatatacttcttcctctaaattgagtgatgaaaatacaagttcagatgaggcttctgattctgaaacatttatggctccccatgttcttgcaatgtcagctactccaattccaagaacattggcacttgctttatatggtgatatgtctcttactcagatcacggacttgcctcccggtaggcagcctatagaaacccttgcttttgaaggcaatgatgcagggttcaaaactgttttccagatgatgagggatgagctgatagagtgggggcagggtctaccgttgtgtaccctatcatagatgagtcagagcacctgccacaactccatc

SEQ ID NO: 41979 - DNA, 484 bp, Setaria italica
  Peptide Sequence Number=SeqID_107953
gaactatttgatcaacaattacaagtagaagttggtggaggctttagtaaggtgcgaagttatgtcaaatggatcaaaagaacgatttggacatccacaagagttgcatggattgccaccaacacctttgacatcactacaacaaaaagaacttgatgagttctggaggaagactgtggaggacatagagaacacaatgaacttcgacaatcacattttacccatgagctatgttgcaaaaatcataagagataaccaaggtagcttaatgatatcatccgaaacaccatcatgcctgacaaaggtcctagagatattcatccaagaacttacactccgtgcctggatgtgtgccaaatcccatgaccgctctagtaccatacttgaatcagatatctatgaggccattaattctaaagagtcatatgtcttcctcaatgatgttctccagaggcttgaagaacaaaatacaataactacaaga

SEQ ID NO: 41980 - DNA, 865 bp, Setaria italica
  Peptide Sequence Number=SeqID_107954
cccttagcttcgccctcttggactcatcgattggctggccgatgcaggtgacgcacttgcggccttctggcatcgatcccatcatcctaagcacacaatagctgcagtaccttgcgtcgcaaacaatgcacgactccttgctctcccatttcctcttcccacagcgatagcatgcccttctcctcttctccttctttgtgacggccacgtactgctcagacatctcctcaaactccttgctctcgtatttgctgttgggcgtgaagccaaaggtgaccacgggcgctctcctgccctcctgcatctcaggcctattctgcggccccggtgagctctgcgctgaaccgtgcgactgtgtgcgggagtcgtcgtcgtcgtcgtcgaactcctcattgtgcaggactgactcagagctgccaccaacctgcatggacaccggatctgcacagcgggcgatcctggagacagggaggcggatgggctcaacgacgggcgccacggggagccctccaggcacctgggggccggacactggctccgccgtggggattgcagggatctcgacggggtctaccctgggaaggtcgtagggcaccggcgggccgtcgtactcgagggcgatggagtagtcgaggttgggcggcgcctcagggatgggagtgcccggggggaggaatcctcctcatcatgtcctcccaggtgcttccatccatggcctccgccatctccgtgcttgccttcctctacctgccctggctgcttgtcaaccaccttccttctacgtcgccatcgcccacagagctgactggtggagatgaagcctgcccttttcaactccacccacgaagttgactccttccttatt

SEQ ID NO: 41981 - DNA, 227 bp, Setaria italica
  Peptide Sequence Number=SeqID_107955
tacaacttgagtttcacctcccactggcatacagaaagatgatgcatctgtgcaccaacaagttcgtgtatcttcaaagccattgatactaaaaatggacaagggaccgttcttggtcgaacaagatggggtgccatggtagctgtcaaatcagttgaatctgcacgaacagccattgtagctgcattaaaggattcggcacagcatgccagctctgagggcaacat

SEQ ID NO: 41982 - DNA, 702 bp, Setaria italica
  Peptide Sequence Number=SeqID_107956
ttttttttttaaggcacggcaacaaaattatcacaattataactatcgtcatcatcaacatccgaacaattacccacatctgaaaaatagatgtcgaacggaaggaggaagagcagcacaacagcaagcaagcaaacagctcgccatgcctttccaagttcctaccctctttgcatccctgtcactgcacgccggaagcaatatacacaagccaccgccgcggccatgattattctataagaacggcgctaccgcttacttgtccacaggcacgaacgcactcactccaggccgtcactcttcgtcgacgaactcgaactcgtcctcgcggaggtggacgaagaaccggacgggcttggcctgtccctccacggcgagctggaactcgaccttgaaggggaagttggccgtgatgcgcttgcccttccagacgcagacgtactgcttgatgacgccctccatgccctggatgtccaggtcgggcgccttgaggacgtggtagacgcggagcggctccgtgacgcgcacccgctttccgatcttgggcgcggccgcggcctcctcggctgccacgtcgtccgaggacacctcgctggtgagcgcgacctggaggagcaggcgcgcgcggcgcggcggaagcgatggcgggccgaggcgccgggcgaaggcgggcgccggggacgggagggcggcggagcgagg

SEQ ID NO: 41983 - DNA, 246 bp, Setaria italica
  Peptide Sequence Number=SeqID_107957
tgccacgtttccttgcttctctgagaagtctcaagggatttttaaatgctcctaggcattcatagcccaacatcctcaattcttgatcaggagatgctatactaacaagtgttattgcaagcagccctaatcgagcaaattcggcaggctcaatgtaacccatgagaagggtatgaattgagaaccgcaagataaaaatgggatcataaatctgaactgcatccattctttgagacgtttcctcga

SEQ ID NO: 41984 - DNA, 460 bp, Setaria italica
  Peptide Sequence Number=SeqID_107958
tgtaaattaagttgttagtttgtagaaaacttggctggatgctgtttgtggggtaacaatacaaaagcttgttcaaaattcctgttatattggatgtttcaatcctcatgttagcaagaaaaatgcaatagtagcctctgatacaatttctcttgtaggtatgatattgctacttactattcataatttgattgacttttttacactgttttctggggaacttgtcatgtacataacctgcttctggacgtttacttcttgtctcccatatttggagttatattttatttccagagattttgtagagttcccaggcaatattgactttgcattgtttttttgctccctgagtgtcttgacctctacatctgactcttgtgccctagattactgaaaaagtgattattgattttcaggaaagcgtctcctcctgctgagtccactgttatctgcattgacc

SEQ ID NO: 41985 - DNA, 312 bp, Setaria italica
  Peptide Sequence Number=SeqID_107959
agagtcagccccacgcccaggcgagaaaatggaggcgctcgtggtgcggcggcttggtgaacccacggcggccccggcggcgaggcctccccgttcgccgcagtatccggagaccatccggtgccggagctctcgtcgccgactgccgttcgggtgcgtgtcgcggcgaccagcctcaacttcgccacattcctccaggtgcagggcaggtaccaggagcggcccccgctgccgttcgtgcccggctccgactacgccggcgtcgtcgatgccgtcgggcccggcgtacgcgggctccgcccggcgaccgcg

SEQ ID NO: 41986 - DNA, 445 bp, Setaria italica
  Peptide Sequence Number=SeqID_107960
atgggcacgtctaaaggtgttgtcattgtcattccaagcaaatactccattcatcaagctgaatatagctatatagctatatagccatatactccggattcagtatttcgatttttgtttctttcagcaaacaaaggattccaacgacactagtagccgacaatgtgaatttgatggatttcacagtacactacgatatccatgcgccacgcagttgcgtttgacatcacaatttcttagacacatcacgagtgatttctcctacgagaatgcattgggaagcggcggatttggagacgtttacaagaagtgctggcacaacgcaggtcctctactccctgggaggcaaaagtgtctcggctgaaatgcgagaaaggttgctctgctttgagtatgtacctaacaaaagtcttcgtcagcacattcagatttcggtttgtcgaga

SEQ ID NO: 41987 - DNA, 498 bp, Setaria italica
  Peptide Sequence Number=SeqID_107961
ctgaaactgccggcgcccgccgctcttgacgaacctgccacaggccgcgcgtctccaccatctccatcgccccgccaccgccctcggctgccgtatggccgccacctccgccgccgcggatccggggacggcgttcaagctcctcctctcctgccccgccggcctcccccgctcccgtgtttcggttaagtttggtcagtcattcgacaggattccccatccggatgcaggcttggaggaatctatatgtgagatatggaaccaaaggcttcagcggaacccatctctatacaatggtacaaagtttcggtacggaggaaatgctgtgcactacaaagatgactcaaagcaggattaccatgtctcacttcatttgggtctcacagactataggacatttgtgggaacaaatctcaatccgttgtgggagaaattcttggtcccatctgaaggtaatttgtaatcttagacaacttaatcaaagttggcgcatccact

SEQ ID NO: 41988 - DNA, 707 bp, Setaria italica
  Peptide Sequence Number=SeqID_107962
atggtgtcagatcagaccttaagcaggacaaatgccggaaactagatgttgtccaaaccgttaaaagtacagtggagaaaaggaaatgcttgttttccactgaaatccagctcctggatggtggccagcctgtgaatgacaacaatgaagtcttgggatgtgaatggtcggacttaatcgccacaacctcgggtgagcttttggcctttgactccactatggatgaccatcacagaggaatgcacctggcggctaaaaatgcggaatcttgtggatacttgctgtcaaaacttgcaggagatggtgaaatttcagagagagcatatcctaatgcatctggtcaagtatactatcaagaactcgtgatgggagaagaccagacagaaaatgcccaaatatttcaggatggccaacaaacaatctcgactgaagaaattcaggataatatttatgaagcaaatggatgtattccattagactacaaggtggagagccaacaacaacgaggcgtacgaagacgctgcctggtattcgaggcagctgggttttcaaatagtgttgtgcagaaagagagtgttgaggatctctctgtctcaacatgtaaaggcaaaggccatgtgcaaactcagccccgtggattgcgcggtataggtctacatttaaatgcccttgcattaacaccaaaagggaaaatggcctgtcaggat

SEQ ID NO: 41989 - DNA, 357 bp, Setaria italica
  Peptide Sequence Number=SeqID_107963
ggaggcttttgacagcagcaagggtggtgccgagaagatgcgccgtgaaatgggggtccctttccttgggaaggtgaccatggatccccagctcggcaaggcagtgagtgaaggggaggtcatgtttcactgatcagaagtgcagtgcaagtgcaagtgctccagctcttaaacaaatagttgagaagctgatcaagccacagtaaaaagatagcgtggcgctagtgccgtgtgctccactgtatattactactgcttggtgagtgtttttcacgggaatgttagctttggataaactttctatcgtgctttgcaaacttggccaaattctgtagcgttctgtttttgatactgggt

SEQ ID NO: 41990 - DNA, 381 bp, Setaria italica
  Peptide Sequence Number=SeqID_107964
ttttttaagaaagaactaagcttatcgatcgagtaccatgccagggtcaattacctgtgtctctggcacgtgagaccagagtaattaaaaatgagccagtaaggctctgttgacagaggaacatattagctgctacagcacatcctgagcttttgcatctcagacatttaacagcacactaatctaatctaaagcaacacaacccaagctctacttgcagctgtcatcaccggctcctcataagctctgcgacatgactgctgaaattatgccggcatggcgtcgggacatgtggaccttgctgtccctgaactagttgagctccattggtttcaagggaactacatcacttggcggcctgcccagtatccccttgccggg

SEQ ID NO: 41991 - DNA, 970 bp, Setaria italica
  Peptide Sequence Number=SeqID_107965
ctttacatacaattatctatgttcagatttgaagccttctgtcagagcaacgaccttagaatgtaacttaggttgtagcctggaaacagcctgtcgaatatcctcaagactatatcgatttgagaaatgagtgagtacaatcgtttcatttctaaaccactgcgaattctccattatctcagacagatgcatgtggccatgctccctagcatgctcaacatcaacgtggtcatcaaggaaggttgcctcagttatgaggacctttgctctaagggcatctgcattccttgggtcaagaataaaatccgactttgtatctcctgtgaaggcaacttctgggtacagtatggtatctgtaatctcagttcctgattgcttcaatttcattatctgactacctttcaaatgagcatactgctttttcaattttcttcgaatagagtagatgacataaccctggctgggtatagcatggtaagtttgaaatggcctggcaacaagatcattacgtatttcatatgtctcccccaaatcaagtgcaactaattgaactgagcgttcaatttgactcattctacgatggacctgaagcagctcctcaacatcatccttgatgcagggcggtacaaatacagtaggaggcttcaagttgtagagaccacgggtagctatgtacatagggagaccaccgatgtggtcgaggtgggcgtgggtgatgaagaggtagtcctggctgacggcgaacggtggcccgcggccgatgtcgaacgcgacgttcagcgacggcacggtgacgcaggtctcgtgcccgcccaccgagatgccctcgatggcgtacccttccacctccacgcccttgcgctgcacctgtgctcgcgcgcgccggtactcctcctcgtccgccagcgcccggtccagcaccgacagcagcccgccctttgtccctcctcctcctccgccgccgccgccg

SEQ ID NO: 41992 - DNA, 581 bp, Setaria italica
  misc_feature (542)..(542): n is a, c, g, or t
  Peptide Sequence Number=SeqID_107966
gccagtgccttccagcctggtttcatcaggagttcaagaccactttcattcactctgttagacatggcagtgccactgtgtcttccctcttgattcccaaaggaatttcaataagactatttccatctacttcttcagccatgtcagtgacttcctccttgatttcgcaggaatttcaaaacgaccatgttcactaaagtcactggccattgtcatttacctttccctcgcatgtagcagctgtgtcttccttacttttgtttttcattctcacagcctttattgacctccaaactctattcaataaactgtgcttcttgccccgcagatggtcagccatggtggcggcattgatacacctgacactgcagcgctcacaccatacatagttgccttgttgaacaacttcatgcatttctccatcaaccaggatgtggattttcttatgtgcgtcactagggcctgcaactgacgctgcaacgctcgcaccatacaaagccagctttcttttcagatgttttttcccttaagatgttttttangtttagccttactagttgctctcacttgacagactgcac

SEQ ID NO: 41993 - DNA, 305 bp, Setaria italica
  Peptide Sequence Number=SeqID_107967
ccgaagaggtgaggctggtgattgccaagctccgggaggcagcggccgagggcacggaggtggacatcggcaagatgatgaacgcgttcgccaacgacatcatctgccgcgccgtgtgcggcaagttcttcagggcagaaggccggaacaagctcttccgggagctgaatcacatgaccactgtcctgatcgcaggattcaacgtggaagactacttcccagggcttgcgcattcggtaggttcattgttcagcaggtttacgagcaatagggtgaagcagacacacgaaaagtggaacaagttg

SEQ ID NO: 41994 - DNA, 453 bp, Setaria italica
  misc_feature (1)..(25): n is a, c, g, or t
  Peptide Sequence Number=SeqID_107968
nnnnnnnnnnnnnnnnnnnnnnnnngcagatgaaacagctgatggataacgttactgacaactgtactgaacaatcacagttgatctgcaatttctcgagaggatattgtggacagcattagtactgtggctctctactgcactggtcgcctactgaatgaactaccaaaattgtgctaaactacacaggcaattcctgctgctatcttgttttccgacttcgacggcggcattcgaagcagtccgagcacggataataggccttcactccgtttttacgatctatttgtaatttggtcggtgaaaccttaagttcctctacaagtatctgacgcagattttcattttcctcccgcagttcttcaataaccctttggtgcttcagtaccagctggagtacattatccattccttgtaaatttccaggcgcaatactactaggaagtaccaata

SEQ ID NO: 41995 - DNA, 412 bp, Setaria italica
  misc_feature (337)..(337): n is a, c, g, or t
  Peptide Sequence Number=SeqID_107969
ctctgctataaatatgccagtgcttcttcagaacctagatgcatccctttttataatcctttgaaatttgaaattcttcgtcttacgtagaactgccaaatagatggggactagttggaccaactaatatattgttatattctgtactcagatcagattctactgattaccataacctatgccatttcaaatacagaatactacctgggaaataggatataatacagaatgtgctgcagttgtgccgtttcaaaaagggctgatctatatttgctaatttccactgttagcttgtctagtaggagtactgtttttggaaatgacatatacagaaacnctatgagcttgcaccatgcaattaattttgttaagagaacaatatgaacactgtcagtgattagtgagtatgtgc

SEQ ID NO: 41996 - DNA, 436 bp, Setaria italica
  misc_feature (417)..(417): n is a, c, g, or t
  misc_feature (432)..(432): n is a, c, g, or t
  Peptide Sequence Number=SeqID_107970
tcgtttttggagtccgcaatgatgccaagatgttgcccagcttcttcagatgcttccccaatgtcgagaggctgcatatttattctaagaaaactgatgaacccactggcaagctcaacctcaagttctggcaggaggcaggtgccatcgagtgtgttagatcacatatcaaccagttgatattgcatgatttccgaggggagaagaatgagcttgccttcctgaagttcttcattgagagtgcgcagatgctgaagaacctggtgattgtgtgtgctaaagggtgtttcaattcgaaggctgaggtgaattccaaactgcagactctgttcgctggaaagaaggccagtaaatgctgttaccactggttatgagagcgcgtttcctgaaggaggtttcccctggaacttgcaaagngcatctgatttttcncgtg

SEQ ID NO: 41997 - DNA, 411 bp, Setaria italica
  Peptide Sequence Number=SeqID_107971
tctctcttaagtcatttttagattagtaatgagtgctgttcaacagctgtctaattctaatgaaaacttaatcagcctggatatagttgggcattgtattttgacagagatagtaaagatattttcatggcatcttgagtattgaaagaacttccatataatataattcaagtataatgtacctactgggagaagccagtatacctgtttctgtgtcagtgctaaaaataatggaatgagaaaagaaaaaaggcagagtatggaagttgtcagaagttgagagacagtacaatttaagaggtaagaatatggaccttaaactcagaaggaagaaggttctgatgctgtttaccatatataagatatttgccttggccaggtttgttgcccagcttggtttgttaaatgttt

SEQ ID NO: 41998 - DNA, 456 bp, Setaria italica
  Peptide Sequence Number=SeqID_107972
aaagaaacataataagaaaatgccagtgctgaaagctgtaccaacgaaatcttcatcctgagttttttgtagcactgattgttcaaagcattgtaagcatcagttatcaggacagctggccgcgcaaaagatccaagagcagtaccattcaaatgcctctctttccgatggttgaagtcaacagcatacactacatcctccccatcttttgttatcttccatactgtgccccccaaatggtgcccagccacatgtggaacaataactattccttcacctttatctaacaagagatactatgtgagcaaatgcagtatagcaatgctaaaatgatgcatctgaatatgatcttactgatcagtcagaaggtaattttgtaagtatttcaatctcacaacatttttgaatgcagcatcgacatcatccaatgtaaacaaatcaaagtctgaaactttc

SEQ ID NO: 41999 - DNA, 339 bp, Setaria italica
  misc_feature (335)..(335): n is a, c, g, or t
  Peptide Sequence Number=SeqID_107973
aggggatgtggagtaggagtatgcagtcattcatcaatggctggcactatagctggcatgttggttcctgatttacatctacagagacacatcaaactaagtttgacactatgtttgactaaatcagaagccaacctcatccgaatttaactgttggtagtattcccaccatctttggcatgaatttgctgccaaagttatatttatcatgtacgtgaacagattatatcactgattttatggtcattggcagggatgattggatcatttcaaaagatgctaatttttttctccttgtgacatttattcactgattttatggtcattggcagggntgat

SEQ ID NO: 42000 - DNA, 351 bp, Setaria italica
  Peptide Sequence Number=SeqID_107974
ctccgctatttcctcctccgagccgagctactccgccagccaaagccgtcatccactggccgtccccttcaaatccccacacctgaaccttcctcacctcgcgctcaaactccacgacccgctgttgacccagccaatctactccttggcggcaatcgccggattcccaaccgcagtgcaccaccgagccgccatgaccaccatcccttcgccggcgcagtacgcccagcaccggccatcttccttcaatcgcccgagccaacacctagataacctccctagatacctcctcgacctgtccccgccgctcgccatcgtgtccgcggccgggaatggacgattccccgcccg

SEQ ID NO: 42001 - DNA, 579 bp, Setaria italica
  Peptide Sequence Number=SeqID_107975
ggacaaaagaaaacaatcttccagggatacgtgtgtatacccttttcatgaaacccactgacatccaggaagaggtgctagcaaaagtaacaatgcccgtaccgggcattgcccgttatcctctggaggttgagctgctcatcacaattgcttctatccatccttggcttataaaaacaaccaagtgtgctagcacttactttaccccaaaagaagtagctagagttgagaagtacaagcagaagtacactgttggttgcaagacaaaatttgtgattgatcttctgcacaagtcctcattcagaggggagagggtgctgatattttgtcacaatgtatccccgataaactttcttgtcaagctgatagagattgtgtttggatggcgtcttggggaggaagtcctggtgttgcaaggtgatcaagagctccctgtgcgctcggatgtcatggataaattcaatggtgatagaaaggggaagaggaaggtgctgattgcttcaacaacagcctgtgccgagggtatcagtctgaccggtgcatcaagactagtgatgctggattcagagtggaaccatt

SEQ ID NO: 42002 - DNA, 414 bp, Setaria italica
  Peptide Sequence Number=SeqID_107976
tgttggtacggtcctattgtattactaagtctacacaagcacttgccatgaatgggcatggagtggctgcccttgttcggtttgcgcagatgctcagagaagggttccagcctgatgaggttatcttcttgagtgtactcaatgcctgtggtcactccagcctagtgaacgaggggtgccaactgttcaagtccatggtggaggagtacagcatcacaccatggatggagcactatgggagcatggtagacatgctgtgcaaagctggagcattgggcgaggcatttgcgttcgtcctggccatgcctgttaagcctgatcatatgatatggcgtgttttggccggtgcttgtcgtgaccatgggaatgccagcttagcaaggaaggtagatggatcatgtgatcggcatggag

SEQ ID NO: 42003 - DNA, 1067 bp, Setaria italica
  Peptide Sequence Number=SeqID_107977
tggtctttaccctattggtagtatttctagtaaacttctaagatgtcgtgtcaattataatgccattgagatttacccccgaaatagaaaagttaggcatacgtctggttcaagctctccgtcggaatggaccctttgtagtacttcacttacggtatgagatggacatgctcgccttctctggatgcacacatggttgcagcaacaaggaggctgaagagctcacgaaaatgagatatgcctacccgtggtggaaggagaaagtgattgactctgatgcgaagaggaaagatgggctctgtcctttaacaccagaggagactgcactggtattgcaggcgctcggcattgatcgcagttatcaaatttacattgccgcaggtgaaatatatggtggacaaagaagaatggctgcccttaccttagcttatcccaatgtggttagaaaagagacactgttaccttcagatctcaatcttttccagaaccattcttcccaaatggcagcactggattatatggtatccttggagagtgatattttcatccccacttacgatggtaacatggcaaaagtggtagaaggtcatcgcagatacttggggttcaagaagacggtactgctggatcggaggcttattgtagagctggttgatcagtacagaaacggcactctgcgctgggctgatttctcctctgctgtcaaggcatcacgataccagccgcatgggcgaaccgtcacggaggcaggcgattcctgacaaacccaaggaagaggactacttctacgcgaacccacacgagtgtttgcaccaaccagaagatctatcagccttgtgatacccacagtacatgcgctgcctttcagagctcagaaccacagtacaattttgacaggattggcgccgtttgttctgatgaacaagccttacgacagataaagggcctcctttcagttagggaattcttagacacagattgacgatgtgattcgctgattctttttttttgtcaagaataaacagtgtttaaatttttgtttgtacagatagagataacagaaaaaa

SEQ ID NO: 42004 - DNA, 578 bp, Setaria italica
  Peptide Sequence Number=SeqID_107978
acaaccagtgagtgctccttgtattgtatgtcacagacaaaattgtgatcaatatgggcctcaagaacagtgagattgttcactcttcttttaggcaccagtgcatctgggtcattgccacctagtgatcttcatgaaggctgacttgttgcatgtcttctccagaagcacccaggttccggtcaaactcctctttgtgccacgtcggagcaactccctcgcaaatggtaatatacccaagataacatcagcaccagagttatcaacaaaaataactgccttttcccatgatttcttggtccatttactcttaaaagcatcgaggtcgtcaataacccaaggtcgagatacaagattctggcaacttgccaagaacgacatgccgtctttagcaaaaacctctgcaagctgtgcagatcctagatcaaaaatgtttccagctaagatcccccggaccaagttctcaactcttttcccatcatcttcaatttcatcattccgctgaacaactccctcaaaccagtcgacatagccttggcattctcctcatccttaaccttcttgaagatatccctaaa

SEQ ID NO: 42005 - DNA, 394 bp, Setaria italica
  Peptide Sequence Number=SeqID_107979
aggtcagatgcatccacacctgcaacgcttcccatctgcatccttgagcttgtttataatctccatcaactctggataggtgacatcattgatcgaaggcatgtcattagcagcaagtatcacctgtagcaaccaaggttctcaattttattgatgatactaacaggaaaaaatttcataaagctcaattaatatatacaaaagcgcaagacaaggaaatttgtgagggctgaggcagaaaatctgtgaaatccaaaccagattgataagttcaaccacaatgtttcagccttccccaaggactgaggtcgcgatgactggtactgtatattagataccccaacaccttattgaaggatgtctctccaggctgtggggagagggtctgcaggcc

SEQ ID NO: 42006 - DNA, 585 bp, Setaria italica
  Peptide Sequence Number=SeqID_107980
tcagggtgcttaaccattccaatcttgatcgagtcacatttcatttgtgcatataggttagtttcaagtgctcttcccatgccttctaggacaaccaggtcagcatcatttgccataaaggcaagttctggtgacacactagacaaatctataaccggcagatcattaccagagttagcaacaaggaggtcagatgcatccacacctgcaagctttccatctgcatccttgagcttgtttataatctccatcaactctggataggtgacatcattgatcgaaggcatgtcattagcagcaagtatcacctgtagcaaccaaggttctcaattttattgatgatactaacaggaaaaaatttcataaagctcaattaatatatacaaaagcgcaagacaaggaaatttgtgagggctgaggcagaaaatctgtgaaatccaaaccagattgaaatggttaaccaccctgtcccccaaggatttttaggaggaagactttatgattgcgtacttcaagtttaacgaggcctgaacacagagtcttcaggcttcacttattgcagtcttacaagaaagatgaaggata

SEQ ID NO: 42007 - DNA, 605 bp, Setaria italica
  Peptide Sequence Number=SeqID_107981
cccatcaagaaagttgatcagcagtccagccctattatgtgcaaccagccacatgaagaaacaacatttgcctggtgcgcatgatttccatattcactccaaagacctaaatagaactgctccatggaatagtccctcataaaccgactttgcagaatattgtcgagtaacccagaaacgtgcatcttctacccctggttgttacagtgaatcctccttgtatgtcaagagacctaattgtgatcagtaaggacctcaagaacagtatgcttattcactcttcttttaggctaccatgatgtcagcaatgacacaaccagtgagtgctccttgtattgtatgtcacagacaaaattgtgatcaatatgggcctcaagaacagtgagattgttcactcttcttttaggcaccagtgcatctgggtcattgccacctagtgatcttcatgaaggctgacttgttgcatgtcttctccagaagcacccaggttccggtcaaactcctctgtgtaagcatacatatggagatgaaggggaccaagtctatctggtgaagacgcttgacaaacccactatcgttaagatcgttgaagaggttacggcaca

SEQ ID NO: 42008 - DNA, 380 bp, Setaria italica
  Peptide Sequence Number=SeqID_107982
gggggcgttggaattttgatgcggaagaatagtagtagcttgtacttggagtacgagttgttggaatcgcactttgggtggaaggaaaagtagttctacattggtgaccatgatccaaagctgccgaaggtgactcgttaccgcccagagtggaactacaggtggatagacgagccgacgcacaggaacagtcttcaagtacccgagctcttaggaaagattgcccaattgaagaataaggactgacagaaattggagtagccttcagttttatgaagaggtgaattcaaccctgcagctccgccacacctgttacaatgcctctgtgttcaggcctcgttaaacttgaagacgcaatcataaagtcttcctcctaaaaa

SEQ ID NO: 42009 - DNA, 1489 bp, Setaria italica
  Peptide Sequence Number=SeqID_107983
taacaaattaagaaataacgaaaaggaacaatagtacaattaagacaagtctgaagttcagatgtatctcaaatcgaaggaggcacatcaaattcattcaagcaacaatttcctaaccacccttgctgacacttgcacgaagccacatagacaacttatttgactcgctatcactcctaatgcgaacaagtgtttcagatgttgaaaaaaattactgcaccacgactccgacaggagttatctgaggtacctctgtgttcaggcctcgttaaacttgaagacgcaatcataaagtcttcctcctaaaaattgggcgacttcagggtgcttaaccattccaatcttgatcgagtcacatttcatttgtgcatataggttagtttcaagtgctcttcccatgccttctaggacaaccaggtcagcatcatttgccataaaggcaagttctggtgacacactagacaaatctataaccggcagatcattaccagagttagcaacaaggaggtcagatgcatccacacctgcaagctttccatctgcatccttgagcttgtttataatctccatcaactctggataggtgacatcattgatcgaaggcatgtcattagcagcaagtatcacctttgtgccacgtcggagcaactccctcgcaaatggtaatatacccaagataacatcagcaccagagttatcaacaaaaataactgccttttcccatgatttcttggtccatttactcttaaaagcatcgaggtcgtcaataacccaaggtcgagatacaagattctggcaacttgccaagaacgacatgccgtctttagcaaaaacctctgcaagctgtgcagatcctagatcaaaaatgtttccagctaagatcccccggaccaagttctcaactcttttcccatcatcttcaatttcatcattccgctgaacaactccctcaaacagtgacatagccttggcattctcctcatccttaaccttcttgaagatatccctaaaccccagctctctaagtactagctcacgaagcctacaaagaagtatgcagtccggtggtcccccatggctctccggattcttcttcatctcttcaagcatcgccgtgtacctctgggcgaacttctccgccttggccggtgcatcaggcacggtggggtcgttctccgcgcgctgcttgaaggacgggacggaattgaggaagaggtcgatccactggatctccacgggggtggccttgcgcgggttgtcggaggggaaacggtaggggatggtgcaggcgcggtaggtgctctccaccggcgcctgcagcagagggaacgacaccgacggcgacgagctctccatgatgccctcagccgccgccgaccgaccggctgatcgccctcctcgttagggtttcctcgggttctccgccggccgctggaggcgagatgttttgattgctctgatcgggttgggagttgggttgggactttag

SEQ ID NO: 42010 - DNA, 1588 bp, Setaria italica
  Peptide Sequence Number=SeqID_107984
aatgatgaggatctagaccattgcccagtatgcaaaattgatctgggctgcactccagttgagaagctgagacctgatcacaatatacaagatgtgaggtcaaaagtttttccattcaaaagaaagaaggttaatgccgaagaagctgaatctcccattacgctacctgttaaaaggaaagagaggtctatctcctcgttggtggtcaatacacctagaataacaccagcgggttcaactgggcggcgaacaagagcggttaccaggaaggctgctgcattacgtggccttggtcctatcattgcggaccctttgaaaaaggataaggataactcaaataagcaaactgataattcaagcttgctagatagtttgagcaaagtgccccaaacaagaagacaggtattgtcaaatggggatacatcaagtcatccctctggtaaagataaagcaagtgataataaggacctggataaggcagagctctggaaacctttgaactgtcttgtagaggctgcaagcaaaacaaagcctcgaacaagtgcacagagttcagcttttaagggagataagcccagtgaatctcccagtactgaacaatctagcagagcaaaggctagggagcctcctcagaagtccaaagttgaagatgacaagaaggatgatcctgagccaatagtcctgcttagaaagaaagggcctggccggaagaagaaacaccccctaccttcagcaaatgctgcttccagtgctgcagctatccagaaggggaagaaattcatcccaatatggttttcattaattgcctcatttgaccagaaaggcgaccctcccttgcctcagatacctgcacattatttgagaataaaggatggaagcatacctgcatcatccatccaaaagtacattatgcagaagctcagtcttccaagcgaatctgaggttgaaataagctgctgtgggcagtcagtgaaccctgctcaacctgtgcgcaacttggtggagcggtggctgagggttggcccggtgcgccctctgcaaacggtgataggctcctctgggggagattatgtgatggtgataagctacgggcggccaaagtctgcataatcgtagatcgtaccgtggtcgacctgctgatctcctatagtttgaacaaggttctcctgggaagaggcaaccaaagatcaagggtttgagcgtcaacatatatactcatcaatacctgcactctgcagacagccctcactgttgtattcatcctctcgctgatgctgctagatgatgtcctgttctttaagaatttgtttgttcttttgttgttattattatacagatgtgattaaagtcgttatgctttagagttcgttatgtaggctgtgagaaatgacttttaggttgggtaaacagagctcagatcgttaacctgcacttggaagctgggagcgatggatgaatggctacatggactgtagcttcttcagttttctctcctttttactttttttccttaaaacaaaatgtaatgtagtttcgttagttgtcctgatctgaaactgctgtaatacccagctgtgatttattagtt

SEQ ID NO: 42011 - DNA, 424 bp, Setaria italica
  Peptide Sequence Number=SeqID_107985
cctttttactgatccatctatgatgttcagatcaatttggcatctttgttcattttatcagttcagtgcaattagtatttgaaatcaggtgcttaggatttcctacggtttgaggtgattagtaatgcaactcatgaattgtacgtgccttcctttcactgatgaaagaaagaaaaaaatactttgttgttgatgtgcaatctacgaagttaaggaagaatagaacacatgtacattggttctgaacttctggatacaagagcaactcaaagttttgttccctgttaattatacactaccactgtacagactaaattggagtacttatagcaaacacagagtagtccattagctacagatttgtccaagtgatatatatgttggcggatggttttgggtatatcagtttgctgtcttgtgtggc

SEQ ID NO: 42012 - DNA, 395 bp, Setaria italica
  Peptide Sequence Number=SeqID_107986
tttctattgacctcctccaatgttggtgaataactctaaagtgttggttgtggccaacaatatggagaaacattgctagtttctcttcaacacaactatgaaggctatctgtcagcaaattcctttccctaagcaagttgcatagtgcaaaaaaaagtgcttttctcatgcgaagcatagcaacacactctatatcattacaattgtaaattctgtccagattctttggcattcctcatccatggtgctcaaagggccataactgatctgtggccttgaactatgttgcattccttatcctgctgaacaagaatgcatacatagctgtgataagagcagcagatcgggcaatcagcaagcgttgctggtcctccaaagccatctaagcaagcaag

SEQ ID NO: 42013 - DNA, 320 bp, Setaria italica
  Peptide Sequence Number=SeqID_107987
aacgctcccactcaaaaactttcagtcgccctcttgacatattcgatagtttccatgctgaggattccaagaaaccgcaaacaaaagcaccatctttttggaggcttgcagagcttagtcttgcagaatacttttatgctctgttaggaagtgctggtgctgcttgctttggttcatttaatcctcttcttgcttatacaatatctctaatagtagtggcgtactacaaaataggtgtccgtgatgtgcatgatgaagtgaataagtactgctcattcattgttggcatgggtataatcactgtacttattcacttcatc

SEQ ID NO: 42014 - DNA, 456 bp, Setaria italica
  Peptide Sequence Number=SeqID_107988
tattattgtgaatgaggcatgagggccatgatccattaccacctctaattgtaagccgtcgaacaagcattcactcaaacaattatgctcgccacaattctaggaccggagtcgacactgcaatgatttataaggttatccaaataagcatttgaatttcgattttgataatggtaacgttctattgtagtgatgcatgatgcccacatttgtttttgggttgtttcactgtgggtttcctattagttttgttcaatctaactggaaaatggtgtgaagttttatgtgttttgatcattagacattgcgtcaccctgatgaacaattttgactattggagattccacagcattgatggacagcacggagtcggatgaccctagcgattggctgcacaggcctgatccatatatgctataaatgctggtgaggttatactgcacctatgagcacatg

SEQ ID NO: 42015 - DNA, 416 bp, Setaria italica
  Peptide Sequence Number=SeqID_107989
aaaaaaaggcaccctggagtttatcgctttgcttaattagtcgatcccattctgttccgatgaaaaaaaattcaacacttccaagttttgggatgccaaaacacaagagaaagcatgtgtgggtactgggataccttagtgttcttgccaaatatagtgtgattgtggcactcgtgggagttggtaccattgatttctactttaactaaggggtgttctattcatagggcaacttattatgttttcttaagcatatcacacgtaaccaagtgattgacatccaataaagtaacacatgactctctacataaatgcagtggccgcaaatctgagttaaactaaaaaaatctggctacttctaagtagcattgttccaaatgcacttgaattgtattgtattttgcacctctacaatc

SEQ ID NO: 42016 - DNA, 388 bp, Setaria italica
  Peptide Sequence Number=SeqID_107990
taacaaaacaactaaagggaacttcatttggtattcaaaagaaacttgtgtcaatagaaattgtatgtatcttcagtcattgagtgcccagtacgctgcttatcagatatacaatttgaaagaaagttcacccttgttggtccctgttggtaacatgcacccatatattattcctactacaagcttacgtgaattgcagttccctacagtttctggtcagagtgtggatactcttgtaactggggaatttgattcagatttagctgatcagatgcttttctttgctgcaaactgggtaatggagcaatcaactgaacatgatcttgaactgtataccgtatggtttgagtggtataatgacctgttccagccttattgcaacttcttt

SEQ ID NO: 42017 - DNA, 517 bp, Setaria italica
  misc_feature (509)..(517): n is a, c, g, or t
  Peptide Sequence Number=SeqID_107991
atggtagtgattcaggagcacaacctgatgaagcagtttcatggggaaagatcaagggttcagcaaaacctgtaaaggtgcattgtgatgcgagtatcgctttcccgcttgttgttgctgcaacatttgcacgtaaggttcacggctccaaatcaacaaactgaacctctggcagtgagctttggatctccagctgaattttgatgaagtctccaaatgattgcttgatgtacgagctgtacttcacccgaactacaatggattatgcactagggttgttgacttggcatgacagtagtgcaccaccattcttccgtgtacacttgtgttgtagttggctggtagcatttttgttgttgttgcaactaataaataataatgtatggtaacacggacgtacaatttgttcattggagcccatctgatgatacctgacaagtgtatggaatcgacagataacctgttttctaagcacaatgatactttaatcatctgaaagttgtaatttnnnnnnnnn

SEQ ID NO: 42018 - DNA, 616 bp, Setaria italica
  misc_feature (1)..(1): n is a, c, g, or t
  Peptide Sequence Number=SeqID_107992
ncttttgcgagctctagcatcatgatgtcgtgtggctcttctttctcatactcagtaagataatgcatggtctctagttgccgcataaaacgagggagcggaatctctagggcacgggaaacttgttcctttataggagatgtaagcttgccttttgcagcctcaagatggcgcctagtgaaggcgatagcatcatctaagatcgtctcaccaggtaccgccatgtgagcagcattgtacaagctaagcaggcccctcgggtcattgcttagatttacgttgaaactaccggtgtcatctctgaatttgtcgaatacatctgcggatacccaaaagccatgttgcctaagaagacgaaaccggagggcaacaacatgcaagtcattggagctgccaaagtccagctcctcatcgtggacaccctccaaggccttctcaacctccttgaccgaaatggttctctataccaaggcgttcgagcgtgtccaccaacctcaccgtgtcggccacgctcatggcttttccaacctcaaacttccggcacacttcccctttgagttgctcactcctctctctcatccactcctccgacctctgtgatgaggtaggagtgtaa

SEQ ID NO: 42019 - DNA, 256 bp, Setaria italica
  Peptide Sequence Number=SeqID_107993
cttttaaacatttattgctttttggaaaacctgcttttcgctagattgtctctctttttttgtcaactgaggtttgtgttgattctgatcaatgtgaaggataattgtctaatagttgcacatgtaatggaacttgagcagagatgtgcgcatgggagcgcaagatacatgatgaagaaaggagccaccatggatttggtgctgagactattgataactttcttatggctgatatcagttagtattatatctggcg

SEQ ID NO: 42020 - DNA, 290 bp, Setaria italica
  Peptide Sequence Number=SeqID_107994
ttcgcagatggcggcaacacccagcaaaccaacagtattgcgtaaaaggggtgaatgccgaggagaacgaggccctaatcgaaccccgggcggatggtgggcggattaggttaccgcgctccacatccgcagcggaggtaaccaaatccaatcccatcggccacgggttgcgggacgccaccgccacgcggagggagatttgggcgggtctcgattcgattgctggaaccgaggagaggggatggtcgggaatcggggcggagctcaccgggaaacacgggcgggcggat

SEQ ID NO: 42021 - DNA, 299 bp, Setaria italica
  Peptide Sequence Number=SeqID_107995
acccatgttgacatagcatgtcacgaggacttgtaaagcttgcactggaccttaccacccttcctgtaagctatccattcatagggtgattggaatttgtcaattgtaatttccgttactgtttaatccagccagagagttggttatgctaagtgcattctggaaattgcatattgcagatctgcgtctcatctgtagatccttcagcgttccattctgcagtacaagctggagctaaaatggtcaggcttttaaactttggattagaagaatagtttacttacgttaaactttaacaa

SEQ ID NO: 42022 - DNA, 1426 bp, Setaria italica
  Peptide Sequence Number=SeqID_107996
taaacacacggccgtttctgtgctactagtgtcatcttatctctttctccttccctcccaaaaatcttcagcaagggcagtggaagaggagcagctgagcaagaatggcagcaccgggttccctaggccttctccacgccccgtccttcaccgcggtcaagtgccagccggtggcgagccgggcagctgcgcctgcgcggcgagcgccacgagcactgttcgccgtgcgcgcctcggcagctggcgcggccgacaaggacgccgtcctcaaggccttccgcgagaacagggctctcaagattatttctgggctccaaaacttcgacaggagcagtgttgcatctgttgtcacggctgcagataagggaggtgctacccatgttgacatagcatgtcacgaggacttagtaaagcttgcactggaccttaccacccttcctatctgcgtctcatctgtagatccttcagcgttccattctgcagtacaagctggagctaaaatgattgagattggaaactatgattccttttacgagatgggcattgagttctcttctgagcagatactgaagctgacaagggaaaccaggaagatgcttccaggcatcgccttatcagtaacagttcctcacacactgagcctgccagatcagatgagacttgcagagctactcgaagaggagggcgctgatatcatccaaactgagggtggaaaatgttctagccctacaaagcctggagtgcttggattaattgaaaaggcaacaccaacactggccgcagcatactccatctctcgggctgtcagcattccagtgatgtgctcatcagggttaagctcggtgactgcaccaatggcagtaacagctggagctgctggagtgggagtcggttctgctgttaacaaactcaacgacgttgtggtgatgattgctgaggtgagaagcattgcacaatcaatggggctggcttcaagaatcgtgtcagaaaacttgagaacagttcaccactagtgggtaggaaccaatcttttgcttttcctgagggaacttgaacagtcaataagaaagcagaggatgcagcagctctgcaccgtagaagtgctgccttgatcaatagaagttgtaagaactgaattgttttccatgtgtctcttttatcgctgcacgtggtgttgaactcacaagtcacaagcttcaggtaggtgctgggtttgtgggggacaaattgtttgtgcaatgcaaatgagctcttgctcttgctcttgcaaatttgactctattttacgttccgtggaggaaaattgtcttagaggcatctgctactgctagcagtacttcagagttcagcattaacacttcgagttgctgtctattaatgattgagaacataaaactgatgaccataacaaaaaaaaaaaaaaaaa

SEQ ID NO: 42023 - DNA, 411 bp, Setaria italica
  Peptide Sequence Number=SeqID_107997
ggttgtttaatgatggatgtcttccaaaggtactggttcttttggtgtgtttatttaattttagaggatattgtggagagttagttaactgatttagtgcagtttatgcatcagtcgttattgcagtttttttattgggtagtggagcttcaaattaagaagatttgggcagagtttttgaactggttgaggttcagtttggagagtttctaatttgtgagtgctattgaattggtttctatttcaagtgaagaggttataactgttagatgtatatgtactgttggtgatttaccttttctattagggggttttctgtatattttccccttcttgtacctgtatatatatgggcctagagcccctgttatgaatacaagtgctattcctaacatggtattagagccgcgt

SEQ ID NO: 42024 - DNA, 543 bp, Setaria italica
  Peptide Sequence Number=SeqID_107998
tgtttgtgattcatgtggtgggagaggtcatttggcaaatgcaaagagatatgtttgtctctcatgtaatggtttaggaagagtcactaactatccattcacatccacctgtggtgtttgcagaggtgttgggaaagtaattaaggttcaggggtggtagatggtatgaaacatgtagaagtgaatctcccagcaggaattgattctggtgatacaattcatgtacgggaggctggagatagtggtggacttggcaccgaacatggaagtctatacatcacaattcaagtagcaaatgatccggtgtttacgcgagatggtgctgacatacatgtcgatagaaagataagcttcacacaggcaatgattggtggaaaaagttgaagtacctactttaaatgggaaaacagaagtgaaggtaataattgatgccgaaaaaaggcatgcatggccactaacaaaaattatgagagaggagacacttgtgtattatattatctgttgtgttaagaatacccaaaggagttcaaccaggtcaagttg

SEQ ID NO: 42025 - DNA, 455 bp, Setaria italica
  Peptide Sequence Number=SeqID_107999
tatgatgtactatctgcagtgtggttactgaacgtcaacgtgcgctgctggaagaatttgcagtggaggaagctacaaaagaacaaaacacttctatggtgggaaactggctttatcagcagctctctactggttaatacttacaggtgggagctagtcgcagaaaatatgacaggacaaaaagtcatgatcggagtcggcatcctcatactgattcacatgatactgagcaaggctgtgagctaaggcttggaagctgcacttttgtcggggcagtggggcagcatcataaatttctctgaagatgtgacttcacacaatagaacagtgggtcacgattccttaaagattctttgcacccatgagagatcacaattttgaaggaggcgtcagctagaagattactggttcctatgggaaagataatcataataaatatttggatctcatcacat

SEQ ID NO: 42026 - DNA, 1958 bp, Setaria italica
  misc_feature (1431)..(1431): n is a, c, g, or t
  Peptide Sequence Number=SeqID_108000
taccttcccttaaggccttagttacctaacttcttccagccggggcacccgcacttctcctcacccgtgcgctccagtagagccagtccccgccgcccgaatcgacctctctccattccgcgccgccaccgccgccgccccccatgggccggttcgggtggctccggcacgcctccagatctctcgcgttctgttcaggcgaggtggctgcgccgaggagcacatggattcggccggatgcgccttgcagctttactggtatctatattggtgataagtactatggccgattcatgctgacatcatctgtattgagcaggagttttcatgctacaggtcaccgttgttcgatagataaagattattacaaaattcttggtgttcctaaggatgcatcgcaggatgacatcaagaaggcttttcattctcttgcaaaaaagtaccatccggacacaaataaaggcaatactgctacaaaaaggatgtttcaggaaataagagatgcatacgaggcgaacattacgggatccttcaaagagagagcaatatgacatgctattttctagagggtcaaggggggattttgatggatcctatcatgacacattctcaggatccaaccatgaccctttcacagaattccacagacagaatgatggccatttctctagtaaattctataaaatattttctgaggtttttggacaagacacagatatgcgtgcaaatgatattaaggtagagttgaatctatctttcaatgaagctgccaacgggtgcataaagaaggtgtcttttagtgcaaaaaatgtttgtgattcatgtggtgggagaggtcatttggcaaatgcaaagagatatgtttgtctctcatgtaatggtttaggaagagtcactaactatccattcacatccacctgtggtgtttgcagaggtgttgggaaagtaattaaggattactgcttgacatgcaaaggttcagtggtggtagatggtatgaaacatgtagaagtgaatctcccagcaggaattgattctggtgatacaattcatgtacgggaggctggagatagtggtggacttggcaccgaacatggaagtctatacatcacaattcaagtagcaaatgatccggtgtttacgcgagatggtgctgacatacatgtcgatagaaagataagcttcacacaggcaatgattggtggaaaagttgaagtacctactttaaatgggaaaacagaagtgaagatacccaaaggagttcaaccaggtcaagttgtagttttagggaaagattgcggcgaaatctggcaggatactctggggaccaatatgtacgattcttaattcatttcccctctgtggttactgaacgtcaacgtgcgctgctggaagaatttgcagtggaggaagctacaaaagaacaaaacncttctatggtgggaaactggtgggagctagtcgcagaaaatatgacaggacaaaagtcatgatcggagtcggcatcctcatactgattcacatgatactgagcaaggctgtgagctaaggcttggaagctgcacttttgtcggggcagtggggcagcatcataaatttctctgaagatgtgacttcacacaatagaacagtgggtcacgattccttaaagattctttgcacccatgagagatcacaattttgaaggaggcgtcagctagaagattactggttcctatgggaaagataatcataataaaatatttggatctcatcacatagtttggagcgtctgagattgtcatttgagttgcctatgatgtctcttcagtggtgcagtatggatgcttactattgggatagttcaatgtgtccaaccatgttagggtgaaatcgggtgtaatttcttttgacttcacgtcatcctttttccttgatcaagttattctgtacatatatttcctgtcagtcccgtccta

SEQ ID NO: 42027 - DNA, 643 bp, Setaria italica
  misc_feature (529)..(529): n is a, c, g, or t
  Peptide Sequence Number=SeqID_108001
tgcaccacctcgccgccgcccgcctgcttccccttggcccgccacccgccgccggcggcttggcagtagtacgtagccctcctcgccctcgacggcgcgcgcgaaccggccggacagcgggtcgaggcgctcgtgcaggatgcggagcacctgcttcatggacggccgcgccgcgccgtcccggtgggtgcaccagtggatcacgtccgccaccacctgcagctcgtccaggtcgaacgcgcccgccaccgccgggtccaccagctcgtggagccggcagtccgtgccgatcagctcgcgggaccactccaccaggctccggttgctctcctcctgcaccacgggcttccccgtcaccagctccagcagcagcacgccgtagctgtacacgtcgctcttcggggtcacctcctgcgtcaccgcgtactcagggtccatgtacccaggagttgcttggatcttgacattcactggggtggaactgggagttgtattgccactacttgggcggtgcacaagaacgcaaccngcaagctttgccaggtaattcttgtccaagagacgttgctaggcttaacatcgccatggtatagaggaggatcacagtagatatgaaggtactccaaagcattagcaacgtcaa

SEQ ID NO: 42028 - DNA, 611 bp, Setaria italica
  Peptide Sequence Number=SeqID_108002
caaccaaacgcgcaggcccattttgaagcctcgcgtctccgacttcagagccggcggcgaggccgcgcgcgtcgcagattgcagcgagcacctggaggaggaggggaggggaaaggaggcggcggcgatgtcgagccggttctggcggtggtacgcggaccggcagttccacaagtgggagaagacggtgctgtgggacatggtggagcactaccgcccgccgcgctccttcgcgccgctcgtcggcacctacgtcgccgccttctacaccggcgtcatcggtgccgctgtcaccgagcagctatacaaggagaagtactgggaggatcatcccggtgaggctgtgccgatcatgccgcccaagttctactggggaccatggagggtgatgaacggagaagttccccgcttcatccagacgccggacgaggccaagacggcgtaggataggagcttccgagcttggttgtaatcctttcagaagatcagaagatgcttctctggtctctatagaaaatccttccagagatgatgttcagatcttgttctgtgcttatgttgtaactatgattctcctggatgaataaatcggctgtggttgtaataaactt

SEQ ID NO: 42029 - DNA, 633 bp, Setaria italica
  misc_feature (619)..(619): n is a, c, g, or t
  Peptide Sequence Number=SeqID_108003
ccagtctatgcagaaacacatgcccgtattaataagagagtttaaacagggagtactacaaaatggggaaacaattgctgaaaagaaacttaattcgtcaataccaggagttacggataggcaatttgagaatgaggcctatcatcttatgaggctcagacatccaaatgtagtgctacttacagcctgctgttctgaaacagagaatacatatgtagagtataatgggaaatacatctgtgctgagaagtcagaaaggttgctttgcttagagtacatgcctaaaggaagccttcgtgggtacctttcagatgaattttccggacttagttgggacacacgctacaaaataatcgagggtatttgttatggtttacattatctccatgaggaatggcaacttaatgcacctatcgttcacatggatctgaaacctgcaaacatattgctagataacaatatggtgcccaaaattgcagactttggcttgtccagactcttcagtgaggagaaaacttggacttgcacgacaagtcgtgatggaacattgggttacatggcgccagaatacataaacagaggtctaatcacaacaaagtccgacatattcagttttggngtaataatcataga

SEQ ID NO: 42030 - DNA, 547 bp, Setaria italica
  Peptide Sequence Number=SeqID_108004
cctatcccctgtgtgccttgcctatcctctgttgcgtgtctcaggcagcggtgaacaagcggcggcgggcctgagagagggagaggagagagaggtaggcgcggcgtgggtccatgcgagtcgccgagtcaacggcgcacgcgattggagtgctgcctgcgtccactggtgaaaacgagttacgagccgttggattcgtttttgacgtcggatacataggcgaaagcaacatgactcactgaaggaagcctgcacgctggcgaagacaaatagatgtttgcagtcatgtgaaagtgcttttgcagtcaggattttgtttaaaagaaaatggactctgagtctagcagatatgaaaagctggagagcatgttacacaatggaagttcagaaccatgcaatctaccattagaatatttgagaaacatcacaaacaacttttctgatgagcgactacttggtgaaggtggttttggcaaggtatataagggagtactacaaaatggggaaacaattgctgaaaagaaacttaattcgtcaataccaggaa

SEQ ID NO: 42031 - DNA, 438 bp, Setaria italica
  Peptide Sequence Number=SeqID_108005
ttctgaacatggcaatcgatgggaaaaaagcacaatagacgtacaacaagtaggtggggtcatcaccaagtccttagctaaagtgaagttctaatacaagtaaatcctccagaagcagccacatgatagtccctttgaacagtaactggtgatacccccctcaaatccagaaccaacctcctcacgacaccatctccatatcttcgagcgcacagctggggaattttaaaccatcaccgtggggggaaatctacctagcgttgcgaatcggcaaggttcctctcatgcggttggaaatatcccaccaaatcctcaaaaatcccaaaacaattgactcaaatcagtcgattcgcaccaatccaaggcacagaatgggaaaaatcctcataacaccgaaatgatagctcacctgcttcacctctctgccttcgatttgca

SEQ ID NO: 42032 - DNA, 1137 bp, Setaria italica
  Peptide Sequence Number=SeqID_108006
gcccctagcaaaaggggaaaaaaaatttccctcgtgcaaaatttgaatcaaaatagcacagcatgcgtcattcagtacgccgggtgggcatcaccaagtccttagctaaagtgaagttctaatacaagtaaatcctccagaagcagccacatgatagtccctttgaacagtaactacacacaagcaaatatgaggcggatcgattggccattggatagaattcatacgacaaaaaaagtaggttatgttcacctaaacaatacagggaagcaactattatatttggagacaatactttgcctactaaaataaaagaacaatactttgcctaactaagaatagtatgttgcctatccaagaatagtacgttgcctatccaagaatagtactttgcctaaccctgaatttactaataaaaacacacaacatgcacattattagcacatattttggctaattcagaaccctcattttcaggcatatataaaagacagggagctcaacactactagtatgaaattaacaggtatgcattttttttctagtatccagatgtaacatgttacaggtaagattttttttttcaaatcaccagaagtatttttgtagtataaaagatatagcatgaggcatccatgaacaaagaggagctcagatcaaatctattctaactttctttgatattgagcgactcaaagttcatttaagtcttatttatttaaccaagaatcccctcaaatatttgagtcacttatgaattaacaaacaagttcaaacgagacagggcaaccagttaaaaaaaatataaatgatgaaagcttatgaaaattttggttattcaaggtgaaaattatcatttataatctcaataagttaggaaagatacatggctccatgtcaagtacctagctgactagctgctgcaatgtatatattgcaatttaggccaagtacctagccagctaggttcaagataatttacaattcgctacatcatgatgtatgatgggaatatgggatataactgcaaagaatttctcacttctacagtgacaccagctatgcaaataaaagcaacttcagtaacctaacaatgttgaatatgttgaaacttaagcaaatattctatatctacct

SEQ ID NO: 42033 - DNA, 505 bp, Setaria italica
  Peptide Sequence Number=SeqID_108007
ggaaaaatttccctcgtgcaaaatttgaatcaaaatagcacagcatgcgtcattcagtacgccgggtgggcatcaccaagtctgcacaaagaacatcacattaggtaacttaggattgatcaattgaacaatcagtatttctttgctacagttttcatttcagaattacaaagaagcaacaattagatgacatatagtagactaaaataacaagtctgatcaggctgaaaaactgacttctatatctagtagcagtgctggcagttatatgtgatctactagtggaggcaagcaatcaaaaaaggaattatgaaatgctcaaaattgcttaatgaagtatattgctttgcacaatatagaaaaatatttttctaattcttgcatatattattgcctaattcagagccatatcattgctaatttagaatcatattattgctttgtgagcaaattgttttgcctaattcagtagcataatattgcctaatgggttcgaattggacct

SEQ ID NO: 42034 - DNA, 886 bp, Setaria italica
  Peptide Sequence Number=SeqID_108008
ttttgactaataaaaacacatgtattcattcagtttggaatcaccgtgcatctatacaaaaacttatctctgatctagcaagcagtgcattatatccattgtacaaaaatcaatccgatctgcaatttgtcatggtacatgatatgcatttgcacaaatatctcaaaccgtaacaatcaatgcccctagcaaaaggggaaaaaaatttccctcgtgcaaaatttgaatcaaaatagcacagcatgcgtcattcagtacgccgggtgggcatcaccaagtccttagctaaagtgaagttctaatacaagtaaatcctccagaagcagccacatgatagtccctttgaacagtaactggtgatacccccctcaaatccagaaccaacctcctcacgacaccatctccatatcttcgagcgcacagctggggaattttaaaccatcaccgtggggggaaatctacctagcgttgcgaatcggcaaggttcctctcatgcggttggaaatatcccaccaaatcctgcttcacctctctgccttcgatttgcacttctccctacacaaatcgacggatctgggaggcatggtcacatgggagagaacttgcaacaaaagaggagaggagagagagagctataacccgagagagagagagcagcagcagaaataaaatgaaatgcttctcggtgaacccctccccttcctctgattgtgggaccgaaggcagcaggcatgacgcgcgggcctggatagtcacctcccaccgtggagcctcggagcgaaattggacgatccacgattagcagccagtatgcaggacgtccgaatcttttttttatgcagagaattccgaatcaacctggagtcttggactcacctcatgcgga

SEQ ID NO: 42035 - DNA, 1050 bp, Setaria italica
  Peptide Sequence Number=SeqID_108009
gggcctggccctccttccaacttcaaagccttggcaatctcccaccaaacctcctcaactccaaaaatctcgtcccaccaaacctcctcaactccgccgccgctctgctccttccaacttcaaagccttggcaatctccgcgccgcaaaccctagccgccgccatggccttcctcgctcccgcctccctccgcgcccccatctacgtagtcgccgccgcctccggacgccgctccgtgctccccgcggccgtcaaagccacggccagctccggctccgccacctctccgcaccccatcctctcctccctccgcatggccgcctccgctgccgtcctcctcgccgccacctccccggccctcgcgtgcaccccctccgcgcctccgcccccgcccgctcccctaacggccgcggtccaccccgacgaccccatccaggacgcctcccacccgttcgagaagctcatcgtcgagtccgccgcgctcgcgcgcgccggcagagcggaggctgcgcgcgcccgcctgtctgccgcagagggatgcgagagctatgcgcgcctcctcgcggcgcaggcgctgttcgtggagggaaaggtggacgaggcgatcgccgccttcgaggagctcgcgcgggaggaccccgccgactaccgccctctgttctgccagagcgtcctgtacctcgtcctggggagggaggcggagggcgagtccatgatcgagcgctgccgcgaggtcggcggcgacgcgctattggcggatccggtgatgatggtctcggaggccagtgcggaagcagttgacgcggaggcgggtgcggagaaggtagagccggagccggcggaggtgtgacctgactcttgagcggacgatcccaaaataagaaagcattttttgtctttttttttcgtgaagggtaactatgattggagcacatgctctggtgatacacgaattgagggaaacttgaaacggttgctgatttttaggatccgagtaaagatgttgtcaagaaacaatgttgattcactttcgtcagagtctgaatggct

SEQ ID NO: 42036 - DNA, 1086 bp, Setaria italica
  Peptide Sequence Number=SeqID_108010
ctcttcttcccccaaactgtcctctctgtccctcgctctctgtgtctctcgctctcgatccgatccgtggtgggctagtggctcacgtccctgttcctcgccggcggcagcggtgctgggcgagcggcttcgctggcgaagagcatccactaggattgtgacttgtgagctagccaatggggaggtaatttgtccggctcggcacgagatcttggttcatggtgcctggatgagcagttgagatgctactggccgtggaaggaggtaggttcttctcgtcttcagcttcagggtacagccatggcctcgccctcctgctgctcggaaggaaagcggaagagaagcccgtcaaggtctcgccgtggaaccagtaccggctagtcgaccgggaggccgagcaggtgtgccatctggcctccggcaaggatgaagcaccagggaaatgtgctcccttcgtctgcttcggttgcacggccaatggcctcgaggtggcgtcgccagcaaaagcgggatcgagcaatgccttgggtagcacacaggaagatgaagcatcttgccgagcaaacaagaagttgaccactagtggttccatcactgggaatgagagacgaggctgtcttaagagcaactccaaaagggattctttggagcattgtatagtggtgagcgagggtgaggaaccgcgcgagtcactggaagaggtgcagaccttgagagctagcatggaacggaggaaagttcagtggacagatacatgcggaaaggatcttttcgagataagggagtttgaaacaagtgatgaagggttgtcagatgatgatgctgaaaatgaaggttttaggaagtgtgagtgtgtgattcagtagattccatttctttacaacaagcttgacagaaacatttcttcatgggaaattgaagtcctgctgggcagggcatgctgcactggtaacttctctgcaatgggaacaattggtggtagttgaaacgaagcaaacagcaacgacttgatatcatgctaaattatttgttggttctatgcttagctagtctgtccagcaggtttacagttttgacggccacctg

SEQ ID NO: 42037 - DNA, 1024 bp, Setaria italica
  misc_feature (959)..(1024): n is a, c, g, or t
  Peptide Sequence Number=SeqID_108011
tagttagtactaattacttttagacttagaatttgtaactcattaattgttaaaagagctctctcctttctaactgattctttgtttgtatggtgaaagtgtctggtcacttctactatttccaaactgttaagtttacaaaacttgttagttttaagtttcatccttcatctcaacattggtgtgacaaatgcatacataccttatgtattcatgtgttctactagcgctttgttttacttgtaacatattctacatgcggaaaggatcttttcgagataagggagtttgaaacaagtgatgaagggttgtcagatgatgatgctgaaaatgaaggttttaggaagtgtgagtgtgtgattcagtagattccatttctttacaacaagcttgacagaaacatttcttcatgggaaattgaagtcctgctgggcagggcatgctgcactggtaacttctctgcaatgggaacaattggtggtagttgaaacgaagcaaacagcaacgacttgatatcatgcgacgttaaggcacgcttctatgcttagctagtctgtccagcaggtttacagttttgacggccacctgtacaatatggagatttgactcatttgtttcttttttttcctttatattttattttcctggctttccattgtgttttcatgcccgttgtaccatatgaggctgtcctgttaggctgttacgacccgctgttcttgttttgctttgcttctgacgtattgagtgatggcttgatattttcgttcaagttggtaaagttcatgtctttgttgtataaaagtggctccaagccatttgggttgtttaactcagtcatattgtgttttgatgtgggtttgttttcatgtccctaacgaatgtggtgatgatacaatgcttttcgacagttcaataagatctcttctccaacagcttcgaggagaaattgtaatttnnnnnnnnnnnnnnnnnnnnnnnnnnnnnnnnnnnnnnnnnnnnnnnnnnnnnnnnnnnnnnnnnn

SEQ ID NO: 42038 - DNA, 1550 bp, Setaria italica
  Peptide Sequence Number=SeqID_108012
taacagattgacttctcttggatcggttaaactagtttctatgcttaccctgcagtatttaaaccttcagtttaataggctctcccattcttatgtaattccctcatggatatgctgtgacatgaggggaaatggcgaaaatgctatcaagggtggcaagctgaagtactctggtgtaggaagcatgaacagtctagcagaatctagaacttcaagtcgtgcttgcgacattgcccttttatgcttgcaaccagaagcttccccaagtttaaaacaccatgccccacagaaaatgaagaagggctggaggagacgcgattgtctgcaacaacaagctcgccaggagcgtctagagtcaagcaggagcaagctcaatgaaaaatacatagatgaaatggctgtgaacatggctgaagatgaatgcccttctagtttacatgacgaagaaacttctgtacaggattcgttgaaagaaacgagttctatatctgaagatgtttcttcgatagtcgatgatgacttggatgggcatgcaaaagatagtggcatgatgttacaagaccactatggtgaggagaaacctggattcaatataagagttcaccatgatgacaattcttgtattagtgcggagcctacttgtttcagcagaggcaggatccgtagtgttgaaaatgaactagatgatactgcttcatccacccatgatgttgtggagattgctcaagggaacccttcagtggcatccaagtttgcttcaaaatctaaaaggcaccctgatgtggacaacaatcctaaaccgagcaaatgtcctcgagcaattgatgaacgctcaaaactttcatacaagtacagtgtggaatcattttgcagcatagatgaccatctaccagatgggttttatgatgcaggccgagatatgcccttcatgtcattagaggagtatgaaaggagtcttgggttgtatgcacgtgaagttattctattggacagagaacaagatgaagaattggatgcaattgcttcttcagcacagttactgctatctaatttgagaaggccaagctctttcgaaatggatgaagatccaagccatgatttactgagggcatcagtgcttgctttgtttgtttctgactgctttggtggttgtgaccgaagcgcctctcttgggagaacccggagagctattgttaggttaaggaaggaacagccttttgtttgtacttgttctgctggaaacatgtgtgacaacaatgaagcttctaagcagaccaataccctttctgggagctttgattttacagtctgtgtaatagatcaatacatatcattaaggaaagaagaaattcgggtatcgtacctataggggcactgcagtttggtgtttgtaggcaccgagctgtcctaatgaagtatttgtgcgaccgggcggatcctccaattccttgcgagcttgtgcggggtcatcttgattacaacccctcatgacttggaatgttgttcctgttaggaaaatggaaacggctgggtaagaatgattgtgatgc

SEQ ID NO: 42039 - DNA, 731 bp, Setaria italica
  Peptide Sequence Number=SeqID_108013
gcttggtaatcagcttgcatttcttcttgtctcctcttctctgctgaactttcaaaaatcttcaaaaaaggggatagatctgtatcgatgtccaagtactctttgagcctagtgccaacattttcaacttgtagcatgcttctaatctcaccagagaatatttgttgattgtatggcatggcccaattttcccgatcttcaaaaaagcttaattaaccattcattctctctaagattgtatttctccattatcatattccatgtgccaacaaactcctgttcatcctcgatatcaaaatatacagtgtctataatcatttgtgaattcttcagaagtaataagcatatgtgctatggacttaacagtactccggtatatttgccacacacagaaacggtggatagtgccaggccatgtaacacccaatgcttccttcaaaggcacagatcgatcagtcaaaattgtctttgggtgtttcccacacatagcaatcttaaaggtctcaagaagccacttgaaagactcaacagtttcatcgtataaaaaagccgcaccaaatatgaccatttgcctatgatggttcatgcctagttacaaagctaagggcctgctgcagtcaaattctttgtagatcatgtcaaagcagaccacatcgcagaagtaatgatagtccattatgaccttgcatcagcccagaagaattagttggttgtattttcatccacctgaa

SEQ ID NO: 42040 - DNA, 2093 bp, Setaria italica
  Peptide Sequence Number=SeqID_108014
gttgtctagtcggttcggagtcttcagtttttttttttttacttagtttttgtggcatctaatggttggacacctttttatttattctttccatagcaaaatcaacatccaagaggtacaagtacaatttacgcaggtcaatataaccaccagcaatgccaaaattgggcaagcatgtcaacagtttaggcttgatgcattttttcttcttgctcattgtaatttaggctctaaactgacactttattgttgaaattcctctattgcaagtacaagaatgaacactgtatagcatgtcaacgtcctccatgtgcagataagtcggcaaaatctaataatacaacagcaaagttccatgagtgcaaaaccgggaagatatctcgaaacatttttttttcactcagccctgacaaaatctttgggcgaatatttatcacagcagtctttttcaccattaaccttttaggtgtatttcactgctatctcgcgcattaggctttcaggagcttctataccaccggtgaaatgttcaaattgacccatggcttgtctaataaacatttccacaccactaacaactttaactccacattcttctgcttcccgtagaagccgagtaacctttggggcatatacagcatcaaataccacattgtagaaactcaatgatttctttggaataggagtaccatcaatatttgggtacatccccaatgatgttgcgttagcaaggatcatcccttcttcaggcctgaaagtttccaggtccgctaatctcagcgcctgaccaccaattgcgttggcaagacttactgccttttcatatgtacgatttgctaccactacccttgcacccttctcctttgcaccatatgcaattgccttaccagcacccccagcacctacaacaacaataagcctaccagctaacagtgatatagcagcatccttggaccctggacctccaatgccatcctcaatagcagatattgctccaatgtagtctgtattgtaccccactaatttgccatcaggtcttctaattatagtgtttatcgctcctattgacttagcaactggatcatgttcatcacagcactgtacagcatccactttgaaaggaagagagcaactaaatcctgaaaagtccggagatgaatatgtctcaagaaaactagcaagattatctccaagaagtggaagataaacagcattatatccaacagattgaagacatttattgtgcaaaattgggctcttgctctgctttactgggttggctataagaccaagaaccttcgtatcaggtcctatgcgccttatattgtaaatctccagcaattcttcaaccgttggctgcccagatgctgacgtctttgcagcattcagtattccaaatgtaagatatccaccaaacttgggcgctaataccctggacattaaacctttttcactcattacgagtccaatcataggcacttggcagtgaaccatcacttggaacatccgtgatacgtcaacaatgtccttagcagttgttgcaattttcactatgtcagctccaactgcttgtatgctagccacaagatttgcaagctcctcacaggatggagtatattcataattatgcgaagaaacaataagtttacatttctctggcttattgccagaaataaagttcataaatttgtcagcaaccttcaattcaacatcaacatagtctacacctagttccattgctatatgtagtgcctcgaatcttgtggtgtcatcaccttcatattggcctccttcccagttaggtcggtaggtgacgagggccgggagcgggcagccgcggagcaggagcgggaggtgctcgcgcgggcggaacccctcgatgaagtcgagccggatctcgacgaggtcaccgcctgcggccgcggcggccaccgcgtccgccaccatctcctccaccgtccgcgccaccagcggcacgcatatcagcgtcatctccgactccgtgccctgctactcctccctctcggccagctccctcgcgcggcgtgcgtggatgcagatgcgggcaatcggcaatggccgcggcctggggg

SEQ ID NO: 42041 - DNA, 597 bp, Setaria italica
  Peptide Sequence Number=SeqID_108015
tacaaatagtagtaaccctaccaagaagctaacgtatgcctgacattttggagtgtacccaggaacaacagacagatatctgcagggatgaagaagtcaccattgcgtgtacctcaccaatattttcacatcatcaacatattgctgaagtacccactcagagctggagcaagaagggggaaaagaagttaatgtgggattctttcaagacagcttcaaggaattcaccgacatcaacatatggttttcaattcagaaatagaattcgagaagttgattcaactcccattcctgcttatggagcttctaatgactatgcaactcatcagccagtaattgcagctgtagaccagtacacaaaggaagcagttaaccaggtccagccgagaagtgctccaagcacatcattaaccatggaggttggtaggccgtatgatcacagaattgctggacactcgggcctttacccaaaggagcctatgcctgcaacacatctcctgagactgatggattcatcaacctcacaaggcttcacaaactatcaaagagctaacaggcgccagatagaactcagaacacaaaatctcagttcacagt

SEQ ID NO: 42042 - DNA, 320 bp, Setaria italica
  Peptide Sequence Number=SeqID_108016
gtttaaagttccgtgagcgagtcactagaaaaggcaccgtacgcctgaacacactagccgtgccgtggtgctgtgacgaaccgagaggtgaagaaggctgaagacgcagaacaatggaggctgctagcaacaagatcgtccatagagacgagatcacggacgacgccttcaccgactcggcgcacatcccggagaagtacatccggaccgacgaggtctctgccggcgccgtcgtcggtgaagacgaggcctacgagcttcccgtcatcgacatggcgaagcttcttgacccggagctatcggcgtcggagacggccaag

SEQ ID NO: 42043 - DNA, 522 bp, Setaria italica
  Peptide Sequence Number=SeqID_108017
ctcagtattcctttcctaatggcaaccattaatagtcaacatgcaattttccataggcttttatctttgtattcaagtttttttgtttgcctccatgcgcaacgagtttgcagctgaaatttttcatgaccttcacgaagatgtgatggccactgcttctagaggacatggtttaatgctccggttgcagcagctagaggcagaatttccagcagttgagaaggcaattatatcccagactgaccactcaaattatccacatgatgatggtgtcgactggcatgctaatcttcaacttaaacagaatatgatcacacaaggagatatgcctcgcttcattttggattcatatgaagaatgccgtggtccaccacacttgttcactctggataagtttgatgttgctggtgctggagcctccttaaaacgatattcagacccctctttcttcaaggcagaacatacctccaacatgttagaaattgatgttcaattgaaaagaagccccgtcgacttaagaag

SEQ ID NO: 42044 - DNA, 1622 bp, Setaria italica
  misc_feature (1599)..(1622): n is a, c, g, or t
  Peptide Sequence Number=SeqID_108018
gcgggtcgccgccgccgttcactacccccgctgcaccgctcgcagtagcttcaacccggggcgctcccccttctccgtttgtttcagccgccgccgccggaaccctattcccgtgcaatctgcatccgctgggaccggaagccagtcgagcgttgcagatgaaccggaggctgccgaatgggccatgcaggatttctatgctttgcggaaggaggttgagttggctatagagcgcgtaagtgaagtcaggcagtctgcaggtttggaacagcttaaggaggagatcgcttcgctcgagaagaagtcagcagatagttctttgtgggatgatccttccaaggcccaggagatacttgtttctctgacggagctcaaagacagagtcaagcttctcaacgattttaaatcacaggttgaagaagctgagaccattgtgaagcttactgaggaattagattccatagatactggtcttcttgaggaggcttcaaatattgtaaagtcatttaataaggcattagataactttgagacgacacagctgctttctggaccatatgacaaggaaggtgctgtaattaatatttctgctggtgctggtggcactgacgctcaggattgggctgacatgttactaaggatgtatgtaagatggggagagaagcagcgttacaagacaagagtagttgagaaatcacctggtgaagaggctggtataaaatcagcaacagttgaactagagggaagatatgcctatggctatctctctggtgagaaagggacacacaggattgtccgccaatcaccattcaacgctaaagggcttcggcagacaagctttgctggtgttgaagttatgcctcttcttccggaagaatccatggctgtggaaatacctgaagaggacctggagataagcttcacaagagctggaggtaaaggaggccagaacgtgaacaaggtggaaacggctgttcgcatggtccatattcctactggcattgccgttcgttgctcagaggagaggagtcagctggccaacaaaataaaggctctcagccggctcaaagcgaagctgctggtgatcgcggaggagcagcgtgcatcggagatcaagcagatccgtggtgacatggtgaaggcagagtgggggcagcagatacgcaactacgtcttccacccctacaagctcgtcaaagacgtccggacagggtgcgagacttcagacatcaccggcgtcatggacggcgaactcgatccttttatccgagcgtacctcaagtacaagctcactgcagcagcttctagctgatgttgaggaactaagcaaacaagcgactgtcccctatgcagtatcatccatttttggtgcaaagaccatcgtcttttttcccttttcttgatgtagcagactttcattcatagcagtagcatcttatttatttcttgattaggaatcgtaacagataaaaccaatatagaatcgtggtttccacattcatagtagctgccgcgcctgtgaatgtcgatccaaatacagcacatttgtcagcgattttacatactgtatgttattaaagttgatatggtccttaaagnnnnnnnnnnnnnnnnnnnnnnnn

SEQ ID NO: 42045 - DNA, 613 bp, Setaria italica
  Peptide Sequence Number=SeqID_108019
aggcatggaatttgagagtgaggaaaaggcatacgaattctacaacaaatatgctggccatattggctttagtgttagaaaaagtacaatcaacataaatcttctgaaaatattaccaaagtaaggacttttgtgtgctcaagagaaggctacaacagggataaaaaatcactggaagcaaagaagccaagattggatacacgaattggttgcccagcgagattgattattaaaagctaccccggagtgcaagtatagagtgaccgatttcaaagcagaacacaatcatcagctggcccctccttctacaatgcatatgttaaggtcgcagaggatattgacagaacttcagtctggagaagcagaactatcagatgattctgtagtgacaccaacaacaaaagcaactggtgatcttgttgtgagacaagtcagtttccttcggaacatctctctccttccagctgattacaagaattatctccgttcgaagcgtatgaaggctatgcaacctggtgatggtggagcaatattgaaatatctgcagacaatgcaaatggataacccctcgttcttttacactacgcagattgatgaggaatgacaaggacaa

SEQ ID NO: 42046 - DNA, 411 bp, Setaria italica
  Peptide Sequence Number=SeqID_108020
aaagacttggaaaggtccatcttactcagctaaggccatcgtcaatctccaaaaattgagccaccggctaacccaaaatataatgctcatttggggtcgtccaagaagctctccaaactagagaaagtgctagccacttaggagatgtcccctacctccaacatctaggaagtgcagcatctggccaggcatttggccagccttcttcataatgctctgttgcacggatcccttctgatgaatcgattgggaaaaaaccacttttccggtagctcggggtctagctcaccaatttggatgtcttagttagcccgactctgggagcacactttctcctttacattgcaccctcccatgctattgtaagcgtagtgttgtcgcttgagaagccaactccaccagaactaacag

SEQ ID NO: 42047 - DNA, 932 bp, Setaria italica
  Peptide Sequence Number=SeqID_108021
agcttcttctgtcattgagctcacgggaggcttctgtcgttgtgctgacgagagcttcttctgtcgtcgcgttcggaagaacttcttctgtcccttcggtcagaagaacctcttctgtcattgcgatcaggacttctaccatgtgacttggactcttgtgattcctggaggaatctgagataataagagtggtatggattagatgacaggagaaacgggaacctcccagtagttttgtcttgctcaatgagttttgcctcgaactccttcccatttgtcagaataaattcaactattttctccatcgtgcgcttcatgaaagatggtggttcaaggatcatttcttttgtttcagacaagcctgaattggtgatttgtgacttggcagtagttgatgctgtaattgcatctttaacctcttcctgctgagcagcaacaatgatgttcccagtaagcgctggattcttctttgccaatattggtttgctcttaactgaagctgctgcttctgagaatgcattctgatttttcccaagttctttgttatcaggtatagtggatgcaggttttacatgtcccagagcatcaggtgtcatgctatttccaggatccgtgcctttcgaagcaggcagaagtgtgccttcatcctcatctcctgagtcatatgcagtcccaagcaatgataaggccccgccagatgaagcgtgctcaccctcaacaattttattgcctttatttgtgtcaaaagaatcagcaccatctttcagcagttgaggatgatcaacaaggtaccggaagtagctgtggagattatgatcaggcattaagaatccaaatgtaggattatttccctgcttcacccttaacacaatctctgactgcccccatgttcactgacaaattagccgttgtttctttgtctaatttattct

SEQ ID NO: 42048 - DNA, 567 bp, Setaria italica
  Peptide Sequence Number=SeqID_108022
cttaagagctcccctggatccccatgcgtcccagaaacccatgccctttcctcaaactgcttgccaatctcgctgttgtacaactcccgggcaaggatggtcttccccaatccgcagaacccaactatggagatcaccctcagctgcttaggttgaccctccgcttccgccaactgctccagaagctcctccaggggagcatcgatgccaaccagatcatcaggaaggacatgctgatcccaggatgattgtgccagctgggatgaggatgaatgggacactgaatacctctgctgccgctggagtgcttcctccagtctgtacctaaggtgctgcatctcttcgcctaactgggagcgtgattttctctttctcccagatttcatatatttacagtaccatggttgctgatcccaagacgcatcatacatgatgtggtctatacaatcctccatttcatgagctacatgacgcaattcttcaaccgataaacgcagtatgtgatcatcctgccccaagagctgcccgtcaatggcactagtgatcatgggaagctctctcatcgaa

SEQ ID NO: 42049 - DNA, 1249 bp, Setaria italica
  Peptide Sequence Number=SeqID_108023
cttttatgtattttataactttgcttagtttcttctatgttatcttagacttgaacaatttgtacctttatttctttgattatcggatgtcggtattgacacactgtgaactatggattttttactgtgaacttttttttgttagatgggaatacccaacttttcaaatcctggcttcaccactatcgacggcgtcctccgacgacactaccaccaccaatgtctctgacgaacacttgagtcccccgtcgtcgccttccatatccttcgactctgtttccgaatccgatgcctccacctcctcctcagtggcctcggatggctcctccgggtccgaacccgtcgtttccaagaaaccccgcctccccgtgcgctcgtggctagcctccgacgagatcgcgcttctcgaggccgtctcggagcaccgccagaagcacggccgactgccgtcgcccaaccacctcgccgcggcgctccgcagccgccttcgcgcgaaggaccgcctgagcgccgatgagatctccaggaggctgcgcgcactccgctcccggtacgataatgctgtgctccgcatgtcccgcggcaccatcccagtgaaggacgacgatgtcacgatctacaagctctccaagctcatctgggagggcacgcgcaagggaaagagggaaaagaagacccgtgcggccgacatgcgcaaggacccaagggagttcggcgagttgacagggctgtacccttgcctctcagcggaggttgaggcgattgacacagggagcggcgctgcagccgccgggttgctgaagagggcgtttgagcgcatcggcgatgacacggcggcacggctggaggcgaaggtgaagatgcagcgggtggcagaggccagggcgagcgcaaagcttgaccagctgaggacgaatgtcgccaaggtgcttctccagttgatcgaatgaatggtgatttctcaatcttctttctgttggttggtacatgaattgctgtaggaagacttaagcttggctcattggcaacattatcagattccttcttgcaaagtttgagggcaatataaaatacaaaattcagaaatgtcatgtagcgaattgagacccaaatcttgaaatttctcattttgtaccctaccattgtctgagctgagaatcagttgcctgcaggaaaaaataattttcccaaagcatcagaatttgaagtatgaaactaacatttcaagatctatcctttcattctcact

SEQ ID NO: 42050 - DNA, 489 bp, Setaria italica
  Peptide Sequence Number=SeqID_108024
ttttctattcttttaggtagggtaagtctattgtttgtagttttgtttagttgtttggactaagtaagtaaagtggggaaaaaggtaggttcctttatactgcatctattccattaaagcaggcaacagatcctgatgctgatgtattacttgcatatgaaatgaatggagagatcctcaatcgtgaccatggatacccactccgtgttgttgttcctggtgttattggtgcacgttctgtaaaatggctggacagtatcaacataagcgaggaagaatgccagggtttttttacgcaaaaagattacaaaatgtttccaccaaccgtggactgggacaatattgattggtcaactagaaggccacagatggacttccctgtacagtctgctatctgtaccaactggaaagaatgtaagaatgttaatacaaaggaaaggaaaaggactaaggaattagactaggaataatagacaacttttacaagga

SEQ ID NO: 42051 - DNA, 1622 bp, Setaria italica
  Peptide Sequence Number=SeqID_108025
gcaccacacacaaggagcccacttcgaggccgcggcgttggctgtctcggtgtcatcgtctcgtctcgtcccccccgttatttttgcggagcggcgaacccaaacgagcagggagctcggaggccacgcacgagatgccggggctcacggcgccgtcgagctacgcggaggagccgccgcgccacccggccctcaagatcaactccaaggagccatttaatgccgagcctcaccgatcggcgctagtctcatcttacatcactccggtggatttcttctacaagaggaatcatggacccattccgaaagtcgaggacctctcaagatacagtgtttccatttctggtcttgtcaacaagcctatccaactatccatggctgacatttgggctcttccaaagtacaatgtcaccgcaactttacagtgtgcgggaaacaggagaactgcaatgagtaaggtacggaaagtgagaggtgttggttgggacatatctgctcttggaaacgcaacttggggaggagcgaaactgtctgatgtccttgagttagttggaatacctaaactcagttcagtttcatctttaggagggaagcatgttgagtttgttagtgttgacaagtgtaaagaggaaaaaggtggtccttatactgcatctattccattaaagcaggcaacagatcctgatgctgatgtattacttgcatatgaaatgaatggagagatcctcaatcgtgaccatggatacccactccgtgttgttgttcctggtgttattggtgcacgttctgtaaaatggctggacagtatcaacataagcgaggaagaatgccagggtttttttacgcaaaaagattacaaaatgtttccaccaaccgtggactgggacaatattgattggtcaactagaaggccacagatggacttccctgtacagtctgctatctgtacactggaagatgtagatgttatcaaggaaggaaaggctaggattgctggatatgcactttcaggtggtggccgtggcattgagagagtagatatatctgttgatgggggtaaaacctgggttgaggctcgcagatatcagaaagacaacgtgccatacgtatctgatggaccccaaagtgataagtgggcttgggtcctctttgaggctacattagacataccagcaaatgctgagatagtagcaaaggcggtggactcagctgcgaacgtccaacctgaaaacgtggaagacatatggaacctgagaggaatcctcaacacatcttggcatcggatcaaaatacagaattcgtcgtgcgttggaagatctaagctgtgaaataagaataagctgtgaaataagaacacgctgctgatcgcttggagcaatcgtggtggtgatccttgcaagtgttaccacaagcgttaccattgtaccaaaacaataataaagtcattgcagctttcagtgtttctcgcatcggactgtaacacaagtgttggagctgtgttgttcatgggatttgagtttgaccgtaactcctatgtaccgtcataactactgctgttgatttatctgatatcaagaaaatatgattgtattctgcattggaaaagaaaaaaaaaaaaaaaa

SEQ ID NO: 42052 - DNA, 770 bp, Setaria italica
  Peptide Sequence Number=SeqID_108026
cgatgagctgggtgtcgacggcctcgcgctcgacgtcccagattgtgcaggtggtgtcgatggaggaggtgccgatgcggcgcgggtcggcgtcgttccagtcgaaggaggtgagcgggccgcagtagtcgctgttgcggttgccgttgagctcgcagcggagctcgacgcccggctgcggggcgccgttgcagcggacggagccggagttgttgttgttgttggcggcggcgtcggcgtcgtcggcggacgggatgcgccagatgcggaggtggtcggcggaggtggcgaggaggtcggggcggatcgcgtgcgggtccgggatgaacatggtcttggtgggcgggtactggtggtcgaaggcgaggacgggggcgatgtcgcccgaggcctcgtcgagctggacgacctcgacgcggttggggacctgctcgaggaggctggcgatggcgaggcggtacttcctgtcgcggcgcacgctccagttcatggcgtagatgtgccagccggcctcgtaggtgtagatctccgaccgcttggcctccccgccgccgccgccgcggctgcccccgccgttgccctgctcctgatccgcccacgcatcgccgtcaccgaccccgcccatggcgtcgccgccttcgccttcaacgcgccgctgccggcgccgctacgggaggaagggaatcgaggtggatagggcaagtgctgcggagtttggggggtttcagttctgggaaggagagagtcgagtcgagtcgactgactggtgt

SEQ ID NO: 42053 - DNA, 3054 bp, Setaria italica
  Peptide Sequence Number=SeqID_108027
cgccgcgcggtgtggcggcgggttagggtttggcggccttgtttatagaagccttgggccaccgatcgccgttggcggcgatgctctccatttgcggccgcggcggtggcgccgtggccgccgcggaggaactgcgcgggccctacccgctccctcctatacatccgcggccgcagcagctcggcgcggcgatcgatgctctgctgctgaaccccctccaagttgacgaaggcacgcgcctcgagatcgcgcaacagagttacaacgcaggggattacagagcagcgcttgagcagagcaatgcggtgtacagggagaacccgaggcgcttggagaaccttctgcttctcggcgccgtgtattatcagctgcgggagtttgacatgtgcatcgcgaagaacgaggaggctgtggcaatccagcccaatttccctgagtgcttcaacaacatggctaatgcatggagggagaaaggcgacatggatcgtgccatccagtactataagcatgcaattcagctgcgacccagctttgctgacgcattctcaaacttggcaaatgcttatactcgaaaaggaaatctcatcgaagcaaccaaatattgccatcaggcgcttgcactaaatcctcgtttggttgatgcctattgcaatcttggtgatgtgttgaaggcacaaggatcatgcagagatgcatacaattgctttagagaggctgtaagcatagcacctagttgtgcaactgcgtggcataatattgctggacttttcacgcaatggggagatttcaataaggcagttctctactataaggaagcaatcaaattcaagccggcatttcatgatgcccatatgaacttgggaaatctttacaaggctgttggaatgtgtcaggatgcaattgtatgctaccaaaatgcagcacaggcatgcccacaaaatgcaatggcttatggtaatcttggtgatgcctactatgaacaaggtcaactggacttagcaattttaagttatagacatgccactacctgcaatccgtcatatgttgaagcttataacaatctgggaaatgctttaaaaggatctggaagatgcgatgaggcaatcggttgctaccagacatgccttgctcttcaacctaatcacccacaagctctgacaaaccttgggaacgtttatatggagaggagcatgctggacatagcggcttcacatttcatggcagcgcttacagttaccactggattgtctgcaccttacaacaacttagcgatgatttacaaacaacagggaaactatgctaatgccatagcatgttataatgaagtactccgtgttgatcctttggctgccgacggtcttgtgaatagagggaatacattgaaagaagcaggcagagtcagtgaagcaattcaagactatttgcgggctgctgcaattagaccaaccatggctgaagctcatgcaaatttggcatatgcgtataaagacacgggcctaatggatttggcaattatcagttacaagcaggccttgctgttacgcccagattttccagaagttacctgcaatctcttgcacactctacagtgcgtatgtgattgggatgagagagaagagaatttcatcaaggtagaggggattatcaggcagcaaataaagatgtctcttctcccaagtgtacaaccattccatgctatggcattcccgattgatccaactcttgcactggagatcagtaaaaaatatgcagatcattactctttggttgcatcacgttttgggcttcctgcattctcacacccctcttgtgctcctatcaaggctgatgacaaaacttctcgccttaggattggatatgtgagtagtgacttcggcaatcatcctctatctcatctgatgggatctgtatttggaatgcacaataacgacattgtagaggttttctgttatgctctgagccaagatgatggcactgaatggaggcaacgtattaagggtgaagcagagcacttcattgatgtgtcagcgatgtcatctgatatgattgctaaagttatcaatgaagataagatacaaattcttataaatcttaatggatatacaaagggtgcacgcaatgaaattttcgccatgcaaccagcgccaatccaggtttcttacatgggatttcctgcaactactggtgcaagctatattgattatttgattactgatgagtttgtctctccgttaaaatattctcatatatactcagaaaagcttgtccaccttcctcactgttactttgtaaatgattataaacagaaaaatcaagacgtacttgatcctgtttgcccgcacaaacgcgctgactatggcctgccagaggacaaatttatttttgcatgcttcaaccagctctacaagatggatccagatatattcaacacctggtgcaatattctgaagcgtgtgccaaacagtgtcctttggctcttgaggtttccagctgctggagagatgagattgcgtgcatatgcgatttcaataggagtaagagcggaccaaattatatttacagatgtcgccgcaaaaaatgagcatataaggcgaagtaccttggcggatctctttcttgacaccccgctgtgtaatggccacactactggtacagatgtattatgggctggcctcccaatgattactcttcctctggagaaaatggcaacaagggttgcaggttccctctgtatagctacgggggtcggggaagaaatgatagtcgatagcctgacagaatacgaggaaagggccgtatttctagccacgaatccatcaaaacttcaagctcttacaaacaggctcaaggctgttcggatgacctgtcctttgtttgatacatctcgatgggtaaagaatctggacagggcatatttgaaaatgtggcatctatattgctctggtagccaccctcaacattttaaagtggtagaagacgataaccagtttgcctttgaccaataaacacagtttacgatcatgtgctgtaaatatcataagaggtaagtatata

SEQ ID NO: 42054 - DNA, 404 bp, Setaria italica
  misc_feature (73)..(73): n is a, c, g, or t
  Peptide Sequence Number=SeqID_108028
ggtctgtttcccggaatagtccatgctgcgcggcggtaagaacagtgccggacaggaacatggagtgcgtcanctttctacttacaagaaaacagcagacgaagtacagcgtagaaaagatccgggcacttcatcggctctgcgaacttcctcctcctgatcatcaggcgattgttacttgtacaacggaacagaaggaggccgtcctacacgactgcaaaaaattcgtcatgccgggaaatcaacatccgagaccaatcccaatcatggaacaaccctgctgcaatgcggtgaacaaggtgccaaagaaggccatcaagattgatatgcagtgcattgtggaggtacttactggtgaagagaagaaccatcacgatgtaagcaagatattgaatcttcccaaa

SEQ ID NO: 42055 - DNA, 541 bp, Setaria italica
  Peptide Sequence Number=SeqID_108029
tgaccagcggccgtccttagattcatgtccctcaggtccgtcactcagccctttgagttgtcgatgatgatccttactctcctacagaaaggtaataatacctttggcaatggagggtggcaggtcccaagggaggaagcagtgcctatggcccggcgcctccagcaactcgcgggcatccttgaaaacccctatgacccgatgtgcaggcacgtcgacgaagaagaggctcgtctgtagaaagaagcagaccacattggggttcctggggctcacgagcacgatttcagggatcatcggcagcaggtgggtgtgccggtagctggcgtcgttccagatctccttgaagctcatctcgtaagtcttgtgccacccaatggtaaggtcgccgacgttgcttccgttagcgctgccactaccgctgccgctgctgtcgccggtgccgctgccactgccgctgccactaccgctgctgctgccgctgctacagctgctgctgtccgccgccgtcgacgggccgagggtcgtgcatccacgtcca

SEQ ID NO: 42056 - DNA, 980 bp, Setaria italica
  Peptide Sequence Number=SeqID_108030
ttttttaatagactaaatactacaattacaaacaaaaaacattagaacacaccaaagatacagctattccaaactcgacgcatatcacacgccataatctaaataacacacacacacaaactaagcaacgaaacgtgcacacgttgatctcgtcgaagacctctccggttcacggggctagaagaagcatgaacccgccgagagctgctagcgacgcagtggcctctccccacgttgctcgcagcacggcatgccccgcccgacgacgttgccggcggtggcggggttgaggacatcggcgcaacctccgcgaacgggaagagattttccacggcctgcactgccgggggccgtgccggcgcaaccagggtttcgggtgggcatcctttcttcgagttcttcctgtgcttcgtcttatgccctgcatgtctcggcggtgcagccgcgggccccggcatccacggcgtaggcgccggcgacagtgccattgttggcgccattgcaggcggcttcgtcttggcgtcgtgtgccggtggtggcggcagcggcggcggcgagctgggcgtggtgggcgcggggcggtcggcgacctcgatctccatcttcatgccgcccaggcagtgccccggcgcgccgcagatgaagtagcgcgtcccgggcatggtgagcacgacggtggtactgccgctgttgtcgaaggtgatggggttggtcgtcgtgcacgcttcgaaggcgtccttggtcacctcgaggacgttgtggtacgagttgtagttgaaggtcagggtgtctcctgggccgaacgtttgggctgcagcccaggacttgtagtcggtcctcccgtcccagccgccggccgggttgccgacgacgtaatccgccgccgtcacggcgtggatcagcgacaatgccacggtgacgcataccagcagtgccttcatctccgccatcttcaccgcagagggcatgatgtgtctgag

SEQ ID NO: 42057 - DNA, 2074 bp, Setaria italica
  misc_feature (1)..(61): n is a, c, g, or t
  Peptide Sequence Number=SeqID_108031
nnnnnnnnnnnnnnnnnnnnnnnnnnnnnnnnnnnnnnnnnnnnnnnnnnnnnnnnnnnnngttagatcacggtttcatgcagcttttttctattctactagtatagttaaaagatatttacaaatatatagacccgggcagtaaaactgccaaccaatactaggtatcctatacacgcagcacgagaatagctagtatctgtttttccaggaaaaagaaagagagaaagaaagaaaccttgtttaatactaacaaagaccaagtgaatctttagctacatattgtcagtgtagtagttctgcaacctctgcccgacgagatagcgctcatcccttatcgaatcgtggagcctgacgacgagcctgcagagtactttggctatataacagagcacacacatggcaaggctccctagccatgcaaaacgaagcactacagagttcacgggagcagagtagccaagtactggggcaacgacttttgcgagcacataaggaacacagacagcagacaggagcttcacgatcattggcatcaaaatatctcgcagcacccacattgccctgagccctgaaaacccatcctcccttgcctgacttagcttcctatcccacctttcatcgatgaaataggctaggaaaggggcaacccttgtccagcgaaccaacttagtccagaatttcagcaattgcaaccccaggaaccaggtgcagaagaaatcaagaactggaacttcattgtagggtggcccaaagggtgatatcagcagataatcaaccagcaatccgatcagaaagggaatgatgacaacccataggaacaaaagcggagaactcttcaaagcagttgtaccccaattgcagacaatagaagccagaaggcgtgttcgcccagacatcacgtaagcaaaggcatctctagaggcagcaataatagttgacaagatgcaaaatccgacggcaaatgcaaaaatatcatttgacttcaaagcacctgctactggcacctgagggatggcaaacaacaatgcacgtccaactgagactggagcaacaagtagagcagcattgaatatcacaacaataagccacgctagaaccatgagtagcaccatatgaacagcagcagatctccttttgtccttagcctcagcagtcctaccgtgctgatcttttggtatgacactattcccaatctcggattgaccagagtcatcaggctgagcaatcaataaatcggacaaaccaagaacctgtccagtagtggcaaacaaataccacagtaccttctgcacaagcacaccaggctgaaggtatttcagtgcattgcaaagtagaaacttcagaagaagaacaccagatagtaactctgcatagttccgtgctgcttgccaaagtactgtgccctgagttggaggatcaaagtaggtgatgtctaacgggaacacagtaggtgccaaatgaaaagcaatttcaacagggacaaaaatgaccattgcaacatagatagcgctgagaaaaagacccggcagaatcttgaaataaaacttgcagaatggttcccctatcttgatttggcctccagtagtgtggacaaaaggggccctaactcctagcctgaacaccgggtgaagaagacttgaaagtgaggagtgcagcttcaaacagacgcatccaataagccagtgaagggcagtagaagcaaatgatgaagcaaatagaagttggagcttctgaggtactttcaccccaaacaattttgaagtgcagatatcaagcaaccagccaaagaacaatgggcatatcacaagtatcgctgcaaggttaagagaaacattggctacacttaagatcccccagaagaattgctgcaagaaactccatgtcctgtcgagcatcccatgtatgctaggcagcattctaagagggctagacagccagcacacccagtcagttaatacgccaaagtaaatggtgatggtggggcgctcgccccttgagtattgctggaaagtatgcaagccagtaaagagaagcgccaccataaggataaacccatatccaactaaaagta

SEQ ID NO: 42058 - DNA, 497 bp, Setaria italica
  Peptide Sequence Number=SeqID_108032
ttgttattgttttgttaatttgtaaaatttctagtttcttgttatgagttacttgcagcaggttgccgtattgcaaagatatccgtggagtaaaacagaggctgattggctgaaccaccaagaaaaattgattcgatcaacccctctattgccggcaactgaaagctattgatctaaaacaagaaaatgtggaaatggccctgtttccaaaataacacataaaagatgagtgcaagaattgcaacatgcagaaactagacagttactggtaaaaaagaatggcattacaggcttacagccacgagcagtcaggctttcagtttaacataatttcatttcagagtaaacattagagtaactataaatgatttagtatctgatttagagttcagtattaaaagcaagatacctggcaatggtacagacttacaattatccataagatacacgaatttgacttacctaacagtgacacggactctctcaagtgcctcttc

SEQ ID NO: 42059 - DNA, 300 bp, Setaria italica
  misc_feature (214)..(214): n is a, c, g, or t
  Peptide Sequence Number=SeqID_108033
ctcttccgggggcgcggcggcttgagcgccgaggcagcggaactccagcagctgcgcggatgcgccgccgtgctccagggaattcgatcaccttgatctcgtaaaggtccatgccgtgcaggtcttggcggtggagccccgcacgcacggagccttgcttgcagcaatttttctctcttggcggcatccacgtctgttagcagctgctgtttangtaggcaaggtagctggacctcctgagagacttcctcgcttcggcgacggcagaggaggaggacgaggagcggcacggacaccaaa

SEQ ID NO: 42060 - DNA, 334 bp, Setaria italica
  Peptide Sequence Number=SeqID_108034
tctctatctccagtccacctcctgctccggcgacggcgaggcagctgagccgaggaaaggagcccaagcagcagcagcagcacctagctgccatgccttccctggacccatccacaggatcgagcaagatgcccgctgtggctgcctacccggccaagatggcctgctgcctccagctccgcctcctccgccgccctgcccctgccccacccccacctcgtatcctcctcctcctcccgcccccgcgcctccgtcccgtccgagcgtctcccggctcgccctcgcccaactccttcgctggctggtcctccgacggcgcggacggcgacggcgg

SEQ ID NO: 42061 - DNA, 442 bp, Setaria italica
  Peptide Sequence Number=SeqID_108035
agtagaacttgccactcttcctgaaacactcagaatctgtactggaaacatgcaccctccttgtgaagcgtttgtcgttgtgatctttgcaaggccgccaaaagaacaagctctgacatcctgatccattgtctggaaatagatgttgaacgcatatgatatgttctcatcatggctgagaccattgcatgaggacccataccccagtggtgtacaatctgcatttgagcatgcatagtttacagaggctggcagatctttgtacttatcctttgcatccttgttgaatacacaccactgtgatggcaagtattgcacccctttcacttcagccagataattgtccttgccatttccactgagatccatagagaactttggtttccatcatatgtgaatagtccccagtgacgctcaaagcgtccaggcagaacactcttct

SEQ ID NO: 42062 - DNA, 389 bp, Setaria italica
  Peptide Sequence Number=SeqID_108036
tccgtcgatacacaaatcacctctcctcgttccagcgcctccacaccgccgctgccccatccagtcccgcctccatgccgccgccccgtcccgccgtccacctctccatccgcgccccggccagccctagcccgctgcccccatcgatccaagcacgtcgtcgacctctcccgcggatgaggaggcgcagggccccccctccctccctccggtctcccgccagcgccccctccctccctccggccccgagcttcaggcgcaggcaacggcacagcggcggctccgcaccgggtggccccggcaactggccctgacacggtcagtggtggcggctaccccgcgggtggtccagcctgggcctcccagcgcgggtagcggacggaatacga

SEQ ID NO: 42063 - DNA, 459 bp, Setaria italica
  Peptide Sequence Number=SeqID_108037
tctggtactcaacaagctttactgttaaaggtgatgaaccttatctaaatggcagccagtccaatctgcttgtaaactcacttggacatgttcttcaggtctacgtcaatggtaaaattgcaggtactgctagagatgatagcacaaattccttcatacctggcatttgaatttgcggggctgattttcaaattatatatcttccatacataaatcacatttgtgtcctgaaatataagtgccaaaatctaccaggaagcgcccaaggtagcgctagcagctcgctcatctcctggcagaaagcagttacacttgtacccgggatgaacaaaatagatcttctgagtgcaacagttgggctgacggtaattaaccttcactttagaaaagacgcaacatgaaatattccattccattttgcaatatttgttttggtgaaacaattatatatttttatga

SEQ ID NO: 42064 - DNA, 326 bp, Setaria italica
  Peptide Sequence Number=SeqID_108038
ctgctaatacaaatacccgggcggtgcgagccctgcctttagctagtacaccgaacgcgccacgtcccggaggaggcggtgcgctttgtttcttctcccttcattcgtcctccctcctccagcggcggacggcggcggcggcggcaatggcggccaccgcgctgctccttcccgcggcggcggtgctgctgctctgcctcgcgagcggctcgcgggcgaccaacgtgacgtacgaccaccgcgcgctggtcatcgacggcgtgcgccgcgtcctcgtctcggggtccatccactacccgcggagcacccccgatatgtggccgggg

SEQ ID NO: 42065 - DNA, 2878 bp, Setaria italica
  misc_feature (2800)..(2800): n is a, c, g, or t
  Peptide Sequence Number=SeqID_108039
aaaaattaaagaaaataaaagaactaaggaaatttaacttaacccaaagaccaccgcgcgctggtcatcgacggcgtgcgccgcgtcctcgtctcggggtccatccactacccgcggagcacccccgatatgtggccggggctgatccagaaggccaaggacggcggcctggacgtcatcgagacctacgtcttctgggacatccacgagcccgtccggggacagtacgacttcgagggccgaaaggacctggccgcgttcgtcaaggccgtcgccgacgccggcctctacgtgcacctccgcatcgggccctacgtctgcgccgagtggaactacgggggcttcccgctgtggctgcacttcatccccggcatcaagttccgcaccgacaacgagcccttcaagtcggagatgcagcgcttcaccaccaaggtggtggacaccatgaagggggcgggcctctacgcgtcgcagggcgggcccatcatcctgtcacagatcgagaacgagtacggcaacgtcgacaaggcgtacggggcgccggggaaggcgtacatgcggtgggcggccgggatggccgtctcgctcgacaccggcgtgccctgggtcatgtgccagcaggccgacgcgccggaccccctcatcaacacctgcaacggcttctactgcgaccagttcacgcccaactccgcggccaagcccaagatgtggaccgagaactggagcggctggttcctctccttcggcggcgccgtcccctaccgccccgtcgaggacctcgccttcgccgtggcgcgattctaccagcgcggcggcaccttccagaactactacatgtaccatggagggaccaacctagaccgcagcacaggggggcccttcatcgccacgagctacgactacgatgcacccatcgacgagtacggactagtcaggcggccaaagtggggccacttgagggatgtacacaaggccataaagctctgcgaaccagcgctcatagcaactgatccatcatacacttctctaggtcaaaatgctgaggcagctgtatacaaggctggttcagtttgcgctgcattccttgccaacatagacggtcaatccgacaaaactgtcaccttcaatggcaagatgtataacctccctgcgtggtccgtcagcatccttcctgactgcaagaatgtggtactgaacacggctcagatcaattctcaagtgacgaattcagaaatgagatacttggaatcgagcactatagcatcagatggctcgttcaccacgccagaactcgcagtatctggctggagctatgccatagagcctgttggtatcacaaaggacaatgcattgacaaaatctggactgatggagcagataaacaccacagcagatgccagtgacttcctctggtactcaacaagctttactgttaaaggtgatgaaccttatctaaatggcagccagtccaatctgcttgtaaactcacttggacatgttcttcaggtctacgtcaatggtaaaattgcaggaagcgcccaaggtagcgctagcagctcgctcatctcctggcagaaagcagttacacttgtacccgggatgaacaaaatagatcttctgagtgcaacagttgggctgacgaattatggtgcgttctttgacctggtaggtgctggaattactgggccagtaaagctgagtggaccaagtggtgcactcgatctctcttctgcacaatggacataccagattggactcagaggagaagatttgcacttgtatgatccttcagaggcctcaccagaatgggtctcctccaatgcttatccaatcaatcagccactgatttggtataagacaaaattcacagcccctgcaggtgatgatcctgttgccatcgacttcacgggtatggggaaaggtgaagcatgggtgaacggacagagtattggtcgatactggccaacaaatctggctccacagagcggctgtgttaactcgtgcaactacagaggatcctacagttcgagcaaatgcctgaagaagtgtgggcagccatcacagactttgtatcacgttccccgttcatttctccaaccaggcagcaatgatctagtccttttcgagcagttcggtggtgacccaagcaagatatcctttgtgacaaggcagacaggaagtgtgtgtgcacaagtgtcagaagcgcatccagcccaaattgatagctggatttcttcccaacagaagatgcagagatctggacctgaacttcgcctggaatgccccaaagaaggtcaggtcatcagcagcatcaagtttgcaagcttcgggacaccaagcggcacatgtgggagctacagccatggcgaatgcagcagcactcaggctctctcagttgttcaggaggcctgtatcggggtgagcagctgcagtgttccagtttcgtcgaattactttggagatccatgcacaggggtcacaaaaagccttgcggtggaagctgcatgttcatgacatgtctgataaatattggttcgtaggaagcaaaatcagtttggagaaggtttccaaggtgaaaccttctctgtgtaggcaagcaggcaaaaggaataaatgttcccatgctggtcaaaaggaataaatattcccaaatttgctacatccaagctattagatagtacacttagaaagggctgtccttgttaagatggcaaattcatccatcatggcaaagaaggtgatccttttgtaatccttgttaaaaatagactttgtatttcaatcaaagtttaaaaaaaanaacaaaatactaggactaccaacaagaagacggactagtagttaaactacgtagacaaactaacaagaaggaatacca

SEQ ID NO: 42066 - DNA, 461 bp, Setaria italica
  Peptide Sequence Number=SeqID_108040
cttcccaacacaagaagtcctggcacttcacagagccacatttcttctggtaaatttcgacacaaagaattacttctggatggaccacagttctgtgttcctcaggtcttgaagctttgttcttccaaggcacgccggttaatttaagagatgtcgccatttcgattttatcagatgatgacttggaacatttagacttcacagaatcaccactgaaagagtgaagccttgctgcatatttgtcttcgtcttgcttggccttgatttctacccacttgtctgctttagtaagatagcttccttgtaaaatctttgctcgaacctctctatcaaaatgtctccctctctttttgaccttctcacatgttgtttgcccattggttccctctggatcatgtggaacaattgacaaatcaacaggtgattcagagacagcattttcagcagatggattgaagtgg

SEQ ID NO: 42067 - DNA, 471 bp, Setaria italica
  Peptide Sequence Number=SeqID_108041
ggagtacataaagtctgttgccttcccatggtttggaaacttggaggttgttcagaaggaagggaatggtagtaacaagatattttcaagcatggaggaacttattgttgattacgaaagtggagatcttgattctactgatgttaagttggctctccaaaaagcaataaacaacatattagagcttgtcggcgagttcttccgtagcagcactgaagctcaagctctaattactgcccccaagtttcaggatcaaattactgcagacatacggaaaattcagatgcagaacaaagagtttgccagtctttgatactactgctccaccagtgaggaaaaatgctatatactgcaggcaaagtaagggctcctttggtagccggctatgccttctctgacttgcgggaaccttcatttgtaggagctatttatgccgtagtaaataatattcccttaaagcttctagttcgt

SEQ ID NO: 42068 - DNA, 368 bp, Setaria italica
  Peptide Sequence Number=SeqID_108042
agaaaacctaataccaacaatcactagctcgctctgatccaatccaatatcgccggttagccgtcgacgccgccgtctatgtccagactgatgaccgccatgctgctcgggggtgcgcgcgtcgccggcgccgccaagctcgccggcagcgctgccgttaagcaggctgccgtccccacgccggcgtgcttccttcctccccgcccgccgcagccggcgagctggagccgactctgcttgcagactgcgccaagatcgtctcaggcgtacaacaacgcgccggacgaccggagggacatcaaggacaagtacaaggacgcggcggcggaggcgaaggacgccaccggcgatgccaaggagcatgtgaa

SEQ ID NO: 42069 - DNA, 471 bp, Setaria italica
  Peptide Sequence Number=SeqID_108043
agggttaaatttagataataacaaacatgaacttcgtccacagattttgccagcactgccagtgccggtatagcagtatgtatgagtatgactaatactttttgttgaccaggcctagtcagaaaactttgagcactgccattgctctcacatgttacagcagcctgcctgagcgagtgcctgaactcaaggcactggcgaggtaccgaggcgcggtcaagacataaccgtcttcggggttcagatcattagatcaacagacctgccaagtagcagtcatgtgtgggcatcagctgatccagacacttgctgttgctgtcgaaaccacaacccagtctgccccatcttcagcttcacatgctgtaggaaccataaccagttctgctctatcttcacatgcaagttccttgactcaccaggaggaacacaaaaatcacgtccatgaaagaggcttccagcggttgaggacaa

SEQ ID NO: 42070 - DNA, 747 bp, Setaria italica
  misc_feature (745)..(745): n is a, c, g, or t
  Peptide Sequence Number=SeqID_108044
aagctagcattagtaataagcaacacaaaccgcattcctaatcacccaacggaatttcatttcaccggagcatgactcaaaattacaagcctccagccatgcgttgcgggccacgcttgagtacaactcaatctctgcaactctgcgtgactggctgactgcgtcgtcccccaggcccaagctccacctcatgcatgtgagcgcagcaagcaaagctatactggtcccagtccaagaacgatgtagtagagcaaggtgatcggcagggctatcaacatgccaaaaatgaccatagtgctcaggatggccgggtggacgttgtattccttggcgaacacaaatggtacaatcccttgcggtagagccgcctgcacaatggcgacctgcaagagcgacccgcggaggccgatggctagggacgcggcggccatgacggcggggccggcgaggaagcggacgcccatggagatgccggtggcgcgccacccgcaggcgatgaggttcggctgcagcgccataaacaatcccaggctaaacatggccatccccagcccggcgtccgagaggatggagatggacttggccacgaccgccggcatggagatgtgccaccggaacgcgatgagggaccaggcgaggccgatgaggctggagtacgtgttggggttgcggatcagcttgcgccacaccatgatgaggatgaggcgggtcatcacgctcgccggcggcatctggtgcgccccgngc

SEQ ID NO: 42071 - DNA, 624 bp, Setaria italica
  Peptide Sequence Number=SeqID_108045
gagaaaaagaagtttgtagtgctaatggtatctctgattctggcaatcctctgcgtgattgtatccttctcaatctttacgttccacacggagcatatgcgcaagctatttgttggcagtattggtatcgtaacttccatgtcgatgtacagtgctccgcttgtagctgtgaaacaagttatgaagacgaaaagtgtggagttcatgcctttctacttgtcgctgttttctttattaactagtttaatgtggacgatatatggaatcctaggaagggatccctatctcactgcaccaaacagcgtcgggtgtttaactggaatccttcagttggttgtgtattgcatttacagcagatgcaaggatccaccaaaaacacacgatgatattgagcaggtaataagcgagttggaagtggcaactactcttaggagacacaaatggatgtaagccttagctcgaaggcctgttcttttcttaattaagaaactgccttgttgtattcctgcaattctagcagagagattcaatggtagtatttggatacgcagcagttatctatttctggaactgctttgatgctatttctcttggtgcatttttcacagcacaaacgctgtgttt

SEQ ID NO: 42072 - DNA, 441 bp, Setaria italica
  Peptide Sequence Number=SeqID_108046
tcactagaaagaaaccgtatttatacagatcacctgaggatgatagcctaattgcacaattcacttccttggttacacatggcaatttgtctgatgtacttgatccacaaattatggaggagggaggcaaagaagtcagcgaagtagcttcattggcaacagtatgtgtgaagctaaaagcggaggatcggccaaccatgagacaggtggagatgacccttgaaagcattcaagaatcactacaagttaaactgcatagtgtgggtacaaagatatccgaggataaacaaatggcagtgacccttccgacaatgtagggtagaagcagcaaagagtcaagtaggcagtacagtcttgaagaagagtacttgttgtcatcgaggtatccccgttagcggtttctatacgatgaacatgtaaaggctttatattcatggttcc

SEQ ID NO: 42073 - DNA, 773 bp, Setaria italica
  Peptide Sequence Number=SeqID_108047
taactaacaaagtgtgacctcaaggagcatgtgctttccccagattttttgggcacaaagtttgatgttatccttgtggatcctccgtgggaggaatatgttcatcgtgctccaggtatcacagatcacattgagtattggactgctgaggagattatgaatttgaaaatcgaggccatagctgatacgccttcatttatcttcctttgggttggtgatggtgttggtcttgaacagggcagacaatgtttgaagaagtggggattccgtaggtgtgaggatgtatgttgggtaaaaaccaacaagaaaaatgcaacaccaggtctgcgccatgattctaatactctgttccagcgttcaaaggagcattgcttaatgggcataaaaggaactgtacggcgcagcactgacgggcatatcatccatgcaaacattgacaccgacataataatagctgaggaacctagtgatggttcaacgaaaaagcctgaagacatgtataggatcattgagcattttgctcttggaaggaggcgtcttgaactctttggcgaggaccataacattcgtccgggttggcttacccttggtaaaggtttgtctacatcaaactttaataaagaggcatacatcaagaacttcgcggacagagatggaaaagtatggcagggaggtggtggtcgtaacccccctcctgatgctcctcatctcgtggtgacaactccagaaatcgagagcctgcgtcccaagtccccacagaagaatcagcagtc

SEQ ID NO: 42074 - DNA, 2526 bp, Setaria italica
  Peptide Sequence Number=SeqID_108048
ttgcacgagaggctcaagactacagggatggatccggtgaaagagatgataaacataggactgccaaacgggaagagaaagatgagaagctaaggcaccgagctgagtatacatatggaagtaacgacaatttaggaactaaaggtaagttgccatatttggatgatggtggaaatgccagggaacaaagtatgaacgtgaaagagaaacctagagatgattatatatcacacagagggatggagcgcaacaaagaatctgaagaatctagagagtacatgagaaatcatcaaagggaagattctaaaggcacaaatgactatggcactactacagaatggagtcatgggcctgaaaggttagatggtggaagtttccagggccggtctgcgtacaggaaagattctaggggcagatatgagagcagcaaaggcccttcttcatatggaaatcgatatgataattctgattctatagaaataaggcctaacaggaatcttgattttggaagggagggctctgtttctgggagaagaacaagcatggctgcacatcaggatttaacagctggaacaaatgatcctgctgaagaggacaaaaggaattatagaagtgaagaagattcgaaagagagatactatgatgatgctcaaaataggaatcagaatactggcaaaggttctgttgattccccaactgcgagagcaggattgaaggggccaatgacgtccgatacaccagtagctggtcaaagtggtagcagcagtttggcttctccaattgatcagcaaggatccaaaggcagtaaactttatagaggtgtaagagggaggccaaatggaagggaccctcagagaatgggagggccggtgcccatgatgccacctccgccatttggacctcttggtctgccaccaggcccaatgcaaccaatgggcccaaacatgtcccattctccaagccctcttggacctggtattttcatgccgccttttccagggcctcttgtttgggctggagcaaggggtatggatgtgaatatgcttgctgttccacccaatcttctcatgcctcctctagcagctggacctgggttctctcctagtgtgggagctggcccaaaccataatattcaattagatcaaacaaacacgggaaggggaggtccaacagatgctccagtaccaggtttcaacccagtggctacaccaagtcatgaaatgctgcatgataaacctcctggaggctggacaccacagaggaatagcggacctgctcgaaaagctccttcaaggggtgaacagaatgattattcacagaactttgttgacactggcttgcgacctcagaatttcattagggaactagagcttacaagtgtagtggaggattatcctaagctaagagaactcatacagaggaaagatgaaatagtttctaactcagcttcggcaccaatgtactacaagtgtgacctcaaggagcatgtgctttccccagattttttgggcacaaagtttgatgttatccttgtggatcctccgtgggaggaatatgttcatcgtgctccaggtatcacagatcacattgagtattggactgctgaggagattatgaatttgaaaatcgagtcatagctgatacgccttcactttatcttctgactttcggttttaattgatggttggagcatgcaaatcggtaaaccgtcactagcttagaaggaaacgtacctagtgatggttcaacgaaaaagcctgaagacatgtataggatcattgagcattttgctcttggaaggaggcgtcttgaactctttggcgaggaccataacattcgtccgggttggcttacccttggtaaaggtttgtctacatcaaactttaataaagaggcatacatcaagaacttcgcggacagagatggaaaagtatggcagggaggtggtggtcgtaacccccctcctgatgctcctcatctcgtggtgacaactccagaaatcgagagcctgcgtcccaagtccccacagaagaatcagcagtcggtacccacgataggatctagcagttccacaaacaggcgacctggcgcaaacacgtcacagaacgtggtgactgtcgtcggttctgaaaccatgatgccggcaccgtgggcttccactccaatggcaggtttcggaatgctggagggaggagctggccctgacagcaatgatgcttttgatacttatggcttcagtgcgcctttcggaagaccaagtgcagatcatatggattttaacaccccgagattgttgtaacattatttgagctggatcgtttctatccagaaattttgtttcaaggaaactattcattgcttcctaccatcagtattgataaaactgtatccattaaaataaaaaaaaaaaacaatgtgtgggcagtgcaccagcagcaccatatctctaggactctaggtatagcggtagacaattcatcagataccttgcattgctggtaatgaggaaaaggtcacagatatagc

SEQ ID NO: 42075 - DNA, 425 bp, Setaria italica
  Peptide Sequence Number=SeqID_108049
aggtgtggttatagttttcattgcaatgtctttattttctatttgaagttcacatcaagtagactatttccatgtgtccaatatgattgtttaagtgaatgcttatgttgcttgctacaatgctctctggatgcatttagaaacgtcgatgtatactattgtatgttggttccattttcatggtattagatctgtgaatctaggcttctgttctatggcatagccaataggaaaggctagttgggtctccccaccaacatacctctagtaaccgtaaactgtcatcatgcacaatgatttattcctgacagataaatctggaggcagatctgaaccgcaaagcatgaatatgtggtatatatccatatgaatatatgatcccatactaggatgcaaattgttattgtctactaatttgtctacta

SEQ ID NO: 42076 - DNA, 451 bp, Setaria italica
  Peptide Sequence Number=SeqID_108050
cctttgtactcttttccttttccttctttaacctagcaatatatgctgaccatttctgctgaccacgtactaccttccacatatgcagcagatggaatgccttaccactattctggccagcccacatctctaatgctttgtcagtcaactggtcatcactcatcccactttgccatactctatcggcatttacccaaacaccatgaaaatcagttaatggtttcctagagcgatcccaacgtattttcagttggtttctgttcctcttacggctagtttctgtggtcttgttgtattctgtagtcacatcttcccaataccgctctaccttctggccatctccatcgactgggtcctttgaattacgcaacttggcactggccaatcgttatcttcttcaacggtccagttcaaacgcttgtcggttctagcatcgtcatcaacattaatt

SEQ ID NO: 42077 - DNA, 661 bp, Setaria italica
  misc_feature (1)..(55): n is a, c, g, or t
  Peptide Sequence Number=SeqID_108051
nnnnnnnnnnnnnnnnnnnnnnnnnnnnnnnnnnnnnnnnnnnnnnnnnnnnnnnggtcattttgtaaaattgtattttatttgagaatatttgttctggcactcactggaatattatcagttacactgttaaccgtttacaacttataccaatatactaagagagccaagccaggtaagtcttcccgagtcccgacttgaaactaaatatacaccaccagtttgtcaagtatttacaatacatatatatgtctcgaaaagggttctcgtgaaagctctttgcaagttccaccaagttagtggctatacaagaagctctctgctgatcttttcacataccgcaaaactcttctaatatacaaagattatacagtaccaaaactataagatagactgaaggcatggagtcaagaactctcctggaacgattgcgagcgcgatagtgctgctgggttcgcctgcaaaacctgagcagcgtccgctttctggcccttgctctcgaccttggactggaaaggcttaaaggtgccaggatctccaggtttgatgccaagggtggcccatatggaactctttgcagcctcatcaggatcatcgatccggagtgtctttggaacccacaatgatttctcttgcttctcatctttcaacggattagagt

SEQ ID NO: 42078 - DNA, 386 bp, Setaria italica
  Peptide Sequence Number=SeqID_108052
ttagggtacagggaccatcttctcccttcggctgatacgatcctccttgggctcatcaataacaggcttgcgtctgggtggatagcttagtctttcatgcacagattggacctgttctttgatgaggacatgacacacttagatatgaccattcatgctaaagataaggtgaactcattcctatgtatactttttagttattttgagaatagattgctacctaaagatattattataattaggaaccatggagaggatcatgaagtatttgaagagaggcacggaggcggagaggaccggacgtccaagccaagttggaggcacaaactatatcgagttcgagtccaccttggagtacaagagcaacaaactatatcgagttcgag

SEQ ID NO: 42079 - DNA, 434 bp, Setaria italica
  Peptide Sequence Number=SeqID_108053
gagatccaaggacgccaccgaagggatcgtcggcgccatgcgcaccattctgcagcagtgcgagcggtccaagacggtgaggcgtgtcatccacaccggctccgtcgtcgcggcggcgccgctcaaggaggacggccaagggttcaagcgcttcgttgatgaatcctgctggaccccgctcaatctgtcctacggctacgccagcaacgaagtcctggacgcctacgtgtcctccaagactctgtccgagaaggagttgctgcgctacaacgactcgccgggcaaggcgttcgaggtcgtgaccctgctgtgcggcctcgttggaggcgacacgctgctgccggacgtgcccggcagcatacggagcgtggtgtcgccctcaccggcgacgagacgtggcacggcgggctcaagttcatgcaggccctcctcgg

SEQ ID NO: 42080 - DNA, 1632 bp, Setaria italica
  misc_feature (47)..(47): n is a, c, g, or t
  Peptide Sequence Number=SeqID_108054
ttgtcatagtagctgatttgtgtgctggggctgggccattattgtanccttctggagagcaaactataattgtgccaagagattgatcacttcaagttttttttttttttttttacaaagaaattttggcaaatttctgattatccacagtaacagtatcacacaacacgatgatacagatgatgaatggggaaaggagaaatgcaccgggggaaagctaaggcagctcacaccccacaagttaacctagcacaaggacaccaataccggcaaattgatgccctccctacaaataagattacgttacactgcacacagggatgtggtggtggcttccgtcttctcagttgattgtcgcgagcggcgaacgagggatgagcgacggcttgggctctttgctcgattcgtacgggtggttctcgcggaactcgttcgctagggtctccatgggcatcgcccgcagcgactcgatcgcgcctttgcttggcacgcttggctcagacctaactggagtcacaccagtcggctcgtagtccttgtagctgctttggaaagccttgtcagcgtgcgtgttgatgctggcagcctggccagagtggttctcttgcagctgttgcagctctgctaagtgagcctccaccgttgacactactctcaaacttgaattgcgtgcctcgtccaggagattgtcaatgtcctgggttatgtccttgctgctattggatgcatgttcttcagccatggttcgagatgatgcaatctccacttcatgttgctcattgttctcaactgccatcctgacaagcacttcaacttcagcgacgtgttttttgctgagatcgttaacagcagcatgtgacttcttccattgctgaacagcagagtcaacagtgcacgcgcactcctgcagcatggtttccatgcgacaatgcttagctgcagaagagctggagccaactttgcagtcattctccgcctgctctgcaaatatctcccacttcctcttggcatcttttgtgacgcactccatggctgatgtgtgttcatctaaaaatgccttgtttccacgggcagcatcacccagagaattcaacctaacaccaaccagctctttttgtcgagtaatgtgtttagacactaagctgcttatgtcagccagaagcttctgttcctctgattttgattgttcctcgtaagccatctgaaaatcttcaatgcttttcatttgtgcttcatgagtgttgtttgagtggctatgcaactttgaggtttcctcaacatatttgttgaatagcccaataataaaggtagacatatcttttgtcctgtccaagctaattaggaaactctcccttaattctcgagtgaagtgtgtcagttcacttcggtgggtggtcaacaagttctggatatcactaaatatattttctgcctctccctccacacaagctagtagctggtcaagactacagcagcttgcagcagacagtgatgatatatcctcaagtgtggcatttgcacttgctttatgtagtagcacaacattttggaaggcttccatatgcgacaagtataatgattttgaagccaaaatcttctttttcagctcagaagtggccttgtcatgggaat

SEQ ID NO: 42081 - DNA, 622 bp, Setaria italica
  Peptide Sequence Number=SeqID_108055
tactaattaatttaaaccttttagtaattcttagtttaatttcttttggtctttcctacttgatgaagcttgatgtatggcatttctagtagtggtttatttgtgctaacactgtcaagggttagagtccctactcgacaattcaactgctttgtcatgggctgccaatctgcatcaccaagtatgtatgtgcttcatgtgaaggagaaacaacattttcctggatggaggacaggtttctcgtcatcaattcatgggagtttggatggtaaacgaattggattgtgcacccagcatgttaaagatctatatctgggacacatctcccttcaatcagttgattttggttccctgctcagatgacttgaagatgatacctgtggttttctaatagtcaggggctttctactgactcacagagcagtaggttcagtgcttgtaaaccaatacatggttgttgctaatcgtagtatcatttggtgagagataacttacctggtatgcttgtggactacttcaaattgaaaatgagcctacaatttgaagcggctccttttcgacttgcattggattccctgtctggattggctcactgattgtaacttgtattcagagttaacaa

SEQ ID NO: 42082 - DNA, 523 bp, Setaria italica
  Peptide Sequence Number=SeqID_108056
actgatgtggtatcattaaaattactatgctctcttagctatattcagaagtgccttcatcgctatggtctaattaatactcaaaggtttcctaggcatgtttcagccttgtcttgcaagatgatgagttaatagtaagttggtttgcaggaataattcatcgttggataagatggttttctgaggttgacaattataaagaacttcagcttatgtttgttgaatgtgtcagaaaatcctgcatcaggacattatctgcaaagtatcggatgtatgaaaaattgaccgaaaagcggtttgaacttgatgatcatggcattccaagggttgaggattttgaggcaataattaaacctttagaatctagttattctttggcttccactgatgaagctttgatgtatggcatttctagtagtggtttatttgtgctaacactgtcaagggttagagtccctactcgacaattcaactgctttgcatggctgccaatctgcatcaccaagtatgtatgtgcttcatt

SEQ ID NO: 42083 - DNA, 954 bp, Setaria italica
  Peptide Sequence Number=SeqID_108057
aatcggcagtgcttggcctaattgactacaaggcagcataccatatctggaaggttgataagttggactttttggcatgtttgggagcctttttaggagttgttttttcatcggtggattatggtcttctaattgcgattgcaatctcaattgccaagatactactccaagcgacacgaccaagaactgccttgcttggtaaccttccaagaactaccgtatataggaacattgaacaatacccagatgttaccacagtgccaggggtggtaattgttcaggtggattcagctatctacttcaccaactccaactatgttaaagaaagaatcttgaggttgctggaagaggaggaagaacgacaacgtcaacaaaactgtccccaaattgagtttctgattgttgagctatctccggtggttgacatcgacactagcggaatccacgccttggaggagctgtgcagagcgctcgtaaagtgcaaaattcagctggtccttgccaaccctgggccagcagtaattcagaagctgcgctcagccaaattcatagaactcatcggcgaagacaagatgtgcctgacggttggagatgcagtgaagagattcgctccaaaggcggtggatggcgtctgaagaagatgcccaagtcatctatatgtggagcacagacaggttggatttccgcgtctatcagtggctcggtgtgtgttgcgttgcaagcactttggtttgacggaggagggatgcttggtgatttgacgtatcaccattcacctgttcatcacccaccataacagaaaaggagtgctttggtagttttgtgataagtaaataattaaaaaaacacctatcatcattagttttgtaaaaaatatgccaattgatgtacagtacagtgtcatcttcgtctctctgttcaagatgagcaatcttcatatctgaaaaaaaaaaa

SEQ ID NO: 42084 - DNA, 627 bp, Setaria italica
  Peptide Sequence Number=SeqID_108058
ctaaggctcttatacttttccgtgaagttggattgaggcatcttttggttctgccaaaatcctctacgagggcacctgttgttggcatactcatcatgtgcgaaacacggcttctgcactgaatacttcaaagcatttcgcacatgatgagtttgctaaacgtggatcaggaaaacaagacaggattgaggacattgaattaagtgcagaagaactggaaatgtttgtagacttgcatccattcacaaacacgtctccttatactgtccttgagactatgtctttggctaaggctcttatacttttccgtgaagttggattgaggcatcttttggttctgccaaaatcctctacgagggcacctgttgttggcatactgacaaggcacgatttcatgcctgaacatgtactgggtctgcatcctttcctcttcaagagccgatggaagaaggtgcgacttggcggttcacacgttggtgcaggaaatgacatgttgtaaagcgctaaaaagaggatggaacatggctattaacaagttattttcgcatgaacaagaggatagaacaacatgttgatgtaaattcgttcctgcgcagcagctgaactgaatgagtttgtttaccgggt

SEQ ID NO: 42085 - DNA, 654 bp, Setaria italica
  Peptide Sequence Number=SeqID_108059
aacaagcaggtggtctcgaagaattagaccatataacgtaggactatctgcttgttctattgagaagaaaagattttgtcagtagttgcacggcttctgcactgaatacttcaaagcatttcgcacatgatgagtttgctaaacgtggatcaggaaaacaagacaggattgaggacattgaattaagtgcagaagaactggaaatgtttgtagacttgcatccattcacaaacacgtctccttatactgtccttgagactatgtctttggctaaggctcttatacttttccgtgaagttggattgaggcatcttttggttctgccaaaatcctctacggttagtggtgctatttgcacttcagttactttattgttatgccacttcaggattttagtctgtatttccttcttatgcttgtcttgataagtctcagctccattgcaattctgagcccccttgttagcaacaaatgttgtctctaaccataatgacaacttatttagattaacttaactatgatgtgtgactgcacgaatcacacaatttgcatttgtattccgcactagtagcattgtcctttattaggaattacagatactctcataattattactgataaatttgggctgcttaatttgtcaaatgcagaggg

SEQ ID NO: 42086 - DNA, 3197 bp, Setaria italica
  Peptide Sequence Number=SeqID_108060
gcctcctccagctcgtccttcttcctgaccggcgggcgaggacggcgacgatggcgccgacgagcggcgccggcggcggaggcggctcctcctcggcagccacacgcagtccaacaccacctcccaggtcgcgctcgtcggcgccgacgtctgccccatccagagcctcgactacgagctgatcgagaacgacgtgttcaagcaggactggagggcgcggggccggggccacatcctgcgctacgtggcgctcaagtgggccctctgcttcctagtcggggcgctcgccgccgccgccggcttcgtcgccaacatcggcgtcgagaacgtcgccggcgccaagtttgtcgtcacctccaacctcatgcttgagggcgaacacgggtcggcgtttgcggtgttcctggcgtccaactttgcgctcaccatgttagcggcggtgctgacggtgtatgtggcgccggcggccgccggatcaggcattccggaggtcaaggcttacttgaacggcgtcgacgccccaaacatattctctctgaaaactctgatagtgaaggttgtgggatgcattgctgcagtatcgtcatcgctgaatgtgggaaaagcaggtccaatggtacatacaggtgcatgcattgcatcaatacttgggcaaggcgggtcacagaaatatcacatgacatgtaaatggctaaagtacttcaagaatgatagggatcggagggaccttgttacttgtggttctgctgctggtattgccgctgctttccgggcaccagttggtggagtcctttttgccctggaaacagtatcttcatggtggaggagtgccctgctatggagagcctttttcacaacagcaatggtcgctgttgtccttagggcattgatagacttctgtaaaagtggaaggtgtggcttatttgggaaaggtggccttataatgtttgatgtggcagcagattatgtcacctaccaattggtcgatttacctccagtaatcactctaggggtttttggaggaatactggggagtttgtacaactttttcctggacaaggttctccgtctctacaatcttatcaacgagaaaggaaaaacatacaaactgctcctggctgcaacagtcactgtttgtacatcctgttgtctctttggcttgccatgggttgcatcttgcaaaccttgtccaactaatacagaagaagcttgcccgtcaatagggagatctggtaattttaaaaagttccagtgtggaatgaatgaatacaatgacctggctagcctgttcttcaacaccaatgatgacactattagaaacctttacagtgctggcactgatgatgaatttcacatctcttcgatacttgtgttctttgctgcgtcatattttcttggcattttcagctatggccttgccctaccatctggcctttttgtgcctgttattttgactggcgcagcttatggtcgtctggtaggcatgttgattgggtcacaatcaactttggatcatggtctttttgcggttcttggctctgctgctcttctaggtggatcgatgagaatgaccgtctcagtttgtgttattatcctggaactgactaataatctgcgtatgcttcctctagttatgcttgtccttctgatatccaaggtggtggcagatgctttcaacgaaaatgtctatgatttgcttgttagattgaaaggatttcctcatcttgaaggatatgctgaaccctacatgaggcaattgtcagtcagtgatgttgtaactggccctctacaaacattcagtggtatagagaaggttggccatatagtgcatgtcttgaagacaactggtcataatggtttccctgtagttgatgagccaccgttttcagatagtcctacgttatatggtctaattcttcgagaccacctgcttgttctattgagaagaaaagattttgtcagtagttgcacggcttctgcactgaatacttcaaagcatttcgcacatgatgagtttgctaaacgtggatcaggaaaacaagacaggattgaggacattgaattaagtgcagaagaactggaaatgtttgtagacttgcatccattcacaaacacgtctccttatactgtccttgagactatgtctttggctaaggctcttatacttttccgtgaagttggattgaggcatcttttggttctgccaaaatcctctacgagggcacctgttgttggcatactgacaaggcacgatttcatgcctgaacatgtactgggtctgcatcctttcctcttcaagagccgatggaagaaggtgcgacttggtaagttataagtcaccagcatattatgatgcccccaagtaactgatgattgcgttactgctgttggggatcatggatttttcagagaataactcacttgaatagtagtgctgattctttttcgttttttttgctttggtggtggtggggaggcggttcacacgttggtgcaggaaatgacatgttgtaaagcgctaaaaagaggatggaacatggctattaacaagttattttcgcatgaacaagaggatagaacaacatgttgatgtaaattcgttcctgcgcagcagctgaactgatgagtttgttaccgggtcgattggtggtgttgtgctcaatctcgtttattcctcatgatttcacactcgcatagctacttgtatcacatggctacttgatgccacaccttgagatgtgcgcaccggctgtgagttgtgagtttgtgacttgctttggctgatgttgttgttgaacaaagcgtacttgatggggtccttgcgggttgcggaggcgcgggatgatatcgcggcggccattcccatcggcggcggtatagttgataccggtggctgcccggcactggtgtcgccgtttgaatcgagtttcgccatggatggcaacgaatccaacctctgatagtctgatggatcggccattgctcatgggcgcacaagcaagagagctccagcctccggccaaggcatccagcctgccctgccgcgcgaaaggacgggacgggaactccggcccggctcgaacgagcatccgtccggggggacggtaaatcaaataacgaccacccctggttgcggcgtctggtggccaacggcaccggctggtgagccgctcctcggctcctcctcttcacgggga

SEQ ID NO: 42087 - DNA, 329 bp, Setaria italica
  Peptide Sequence Number=SeqID_108061
aacaagtagcagcaaagacagctggttccaacccagttctggaaggcattgatgaacatcatcatctcctcaccagtcagaccagaaaatatgcatatccttggcagtgattctgcaatcttcacagcttctaaattaggctgctcggtgtgcattgcatcccacaaggtttgctttgtcatctcctctgtacaatgaatcaccttgaggaattcaccttcaagctctttcaggaaggcctgaatcgtgtcagtttcgcctttctcaaatccgatgagcaatagtgccggtgggccgtacatgggatcatccgctttcaacggcacgaa

SEQ ID NO: 42088 - DNA, 476 bp, Setaria italica
  Peptide Sequence Number=SeqID_108062
taccttatactcagtacccctgcgtcgagggcgccgagtactatggccgcggcgcgatccccgtctactggtaatgctgtccccgctgttcatgctcgcattgagcttccagttaaccattcaagttctcttgtttgccatggctcgccggatagcagtagaaattcgcagccatgctctggattttcggtagtctgatgtggttggttaccttaactctgtcaggaactacaactatggcgcagcgggcgacgggatcaaggcggacctgttgcaccaccccgagtacttggaacagaatgcgacgctcgcattcatggcggcaatgtggcgatggatgacgccgatcaagaagagtcagccatcggcacacgaggcctttgtgggtacatggaagcccaccaagaatgacacgctcagcaagcgcctgcctgggttcggcgccaccatgaacatactctacggcgaatcaatct

SEQ ID NO: 42089 - DNA, 1622 bp, Setaria italica
  Peptide Sequence Number=SeqID_108063
caccacttccccgtcggcgcatgtgctgttgccacttcgctttcccccatcccttacctcacactccttgccaccgattaatctcctcccctccaaccaccgcgagatctccagctaccgcgccctccaactacatcgcgcgcgcattcgtcagatccagaatcgagcccccggcctgagatccagctaactctctagcgagcttccgaccgagcagcggggatcagagagagaggtagagaaggatgaagcggaagatgaggaacaagatcatcctgtggtcgctggccgtgacggcggtggcggtgctggtgggcggcacgattgcgctggtgctgacggcggggacatggaaggccaagataaagaagtcgcaggagaagatctgcaacaaggggtgggagtgctccgggagcaagtactgctgcaacgacaccatcaccgacttcttcaaggtgtaccagttcgagaacctcttcgccaagcgcaacacccccgtcgcgcacgccgtcggcttctgggactaccaggccttcatcaccgccgccgcgctcttcgagccgcaggggttctgcaccaccggcggcaagcagatgcagatgatggagctctgcgccttcctcgggcacgtcggcgccaagacctcctgtgggtatggcgtggcgaccggcgggccgacggcgtgggggctgtgctacaaccacgagatgagtcccgaccagacctactgtgacaagacctatactcagtacccctgcgtcgagggcgccgagtactatggccgcggcgcgatccccgtctactggaactacaactatggcgcagcgggcgacgggatcaaggcggacctgttgcaccaccccgagtacttggaacagaatgcgacgctcgcattcatggcggcaatgtggcgatggatgacgccgatcaagaagagtcagccatcggcacacgaggcctttgtgggtacatggaagcccaccaagaatgacacgctcagcaagcgcctgcctgggttcggcgccaccatgaacatactctacggcgaatcaatctgtggcaggggattcctcgacgccatgaacgtcatcatctcgcactaccagtactaccttgacctcatgggggttggccgtgagcactctggtgacaaccgcgactgcgctgagcaggcaccgttcaatccctccagcaagccggatgaccaacagcagcagcagcaatcaggaagctagaagggacccattactgcggccacacgtgttgtacacctgttcttgccattgccactgatcaagcttcctgtgctactgtgagctactgattcttcagaatgtgtggagctgctttggattgatgttgctttgagtggctgatcagaagactttatgtgctgtctatgggaattgagatatttgtagtcgttgtaccatggtgtccatagatagtctgttttcatttccttgattttgtcagatacaacatacatgtgttaaaagaggatggttcagactgaaacatacaaggcttttctgaacttctgtattcctgctacgaaacatgtttaaagaggattcaattgaacataaataaagttagaaccatactacccaaaaaaaaaa

SEQ ID NO: 42090 - DNA, 472 bp, Setaria italica
  Peptide Sequence Number=SeqID_108064
ccaaaggaacattgttaaaaaagtaagtatttctgtacttttccactacttttacttttatattatagcttgaactttcaccaaaatctgtagcctgaacttagaaatgccttctcatttatgtgaaattcgaaataaacagagaaaaaactacctttcgacaagagcgtgttgagatcagcaatggacatgcctgaaccatgacttaggctatcagtccccatttcctattcatttctaattccccattttgcttcttttactctgttggatttcatctctatcctatgccaacttgctcaggaataattgactgtatagatgttctactagatatcagtccttccctgaatttaggagtaaccatagcaaatcacgaacatggcactacagtaaatagatagcgccacatttggatctcaccatatgcttatgctattcaggatctaatcatggttccacaggtggaatt

SEQ ID NO: 42091 - DNA, 430 bp, Setaria italica
  Peptide Sequence Number=SeqID_108065
ctcgttaacaacatcaaatggaccatttggcgtgcatcaactattgtcttctacaaggaatggtcacagaatctaaattatgaccccatatgatttggactccccttggattctgtaactattccttgtagttgaaacctcctacgcccccagtagtctagttcaggcagtgtcatagacactagtgtttggcaagccctgctagcattgaagagcaatcctttgtgtactttggcaagttgaaatgtgcatttccctcaggaaagtctggtggtcgctcgtatacaactgaagcagcatggataaggattcgggcagtcagaccccagattaagtacttctggttcccttttgtgtaagtgaagtaatgaactgtgaatgcctgccccatcttttcccgctcctcggatgtcctgttctcatccttgag

SEQ ID NO: 42092 - DNA, 610 bp, Setaria italica
  Peptide Sequence Number=SeqID_108066
tcggtctttggtcggtctttccggtcgggtctttcgtagtcggtcgtcgcgcttggctcatccggtggcccccgcgcgcccccagccgcttgaatgcgccgtcctggcgagtcacctacgcgtgtggcgtccgtccgggcaggggaatcccgtgtcgaaaacgcgtgcacgggcagcgggagcgcaggcaggccgcaggccgcagcagcagcgcgcccacgccatgtgcacgacatggcttcagaggcctgcagcgacggccgacgaggcgacatgcccgttgctggctgctgctgctgctgctgctcgtgcgctgcgggacgaaacgtgggcgtctcgtgcgggtgcggcggcgaatagaaaaacggcgccggatcgcgctcgtgacgggtgcctgagcctgacgcgcagttgtttaggcgcccgatctcaggacggagagccccccaattatgggatgatgatgatggatgatggcgggcgcgccggtagtacggtgtcgcatgacaagtccgtgcgactccccaagtgcccgaacgtgcctgtccctgccccatgtacagagcatgttcccgcgacgagccggaaccccgggcatgcccatgttcct

SEQ ID NO: 42093 - DNA, 1570 bp, Setaria italica
  Peptide Sequence Number=SeqID_108067
taaatcttaacgaaaaaaactctctactcctaatagataacttgccgaacttgaccagaggtgcagccagcctgccgcattccatgaccatacctcaaatcaaacccaaaacacagattttatttgtacaaggcatgcatcggctgttattgcctacatccaccccggcagcagtggggcagggattgaattctccccacggggacccctctccgagattaaagaatcaggaatcatggtggtgtagcatcgctcaaatcaggtttgacataaaccacagaagatgaaggcgtgaatcaagctctgtgccttcttggtttgctccgggtccccaacaataacaattgttgaatttgcatcaccaggtttcggatcgtgaactgtaattgaagcccctgacatcttttttatctctgcaatatcactgccattggttccacaaacaaagcctatatacttgcaaggaatagcaacttcagtcgttgtactagttggcgtagccacttgattttcacctgccactggtccctttctaaaatctttggatcgcaccgcatcaggcatatttcttggagcttcactgtttgtatttggtgcctcagaagcccaggatcttggtgacggctgttccaaaaaggacgaggacctccttgttcacaaccatatgagtatggcatcctatcagcacccatatgttccatcgaatgcgcaggaggtggccgatgaccacccgtttcaaagggacccataggagcatcaggtctgaaagaatgcataggatatggaggcatgctcccactgtgatgtgggtgttgcggaggtggttcttgtcttggttggtgaagagagatgtttccagcaggtggatatggaggcatgcctccactgggggtgtggcttgggaatgatgacgtccctaatccttccagtgatatgaagtaatgcatcatggatggattggaagctaccagtgacctgaaccatctcatcatttcgctgtgcacatcttggaatttgttcattcccaaaaattcgaatgctagctcctgttagctttctcatctctgtaataatggatccacctttccctagcaggcaaccaatatgttgtgacggaacaagaagccttgcaggtgtaggtgaatttctatcaatagatgactctgagatcctagagtagacccggacaactgcatcttgagctggagaatgcatcatgtcagaattctcgcgtgcagatatggaaacgatacgctcctctgaatcagcaacaggctctaaaatctttatagaagcaccagtttcactctgtaatgcgcggatagtggaaccgcccttccaattatgctgcccaccatttcattcagaattatcatcctgaacactatctcttgttcaaataagaatctaggtccaggggcaccagcattacttggataattccttgtgtggtaatcaggaatgtgcggtggtaaatagtttctttgagaatgaggatccatgccagggggacaaccagtaacactaactggaggcccaaatggtctagacattggaatattgcttgtgt

SEQ ID NO: 42094 - DNA, 1467 bp, Setaria italica
  Peptide Sequence Number=SeqID_108068
tcttcctctaagataacgcagtaagcggaaagtctgtaagtttcctgatcctgccattaccagggatagagatagaacaataagatgcaagcagagctcaagggttccacggtcaacatattgtagtaatccctttggcagtatatttgctgttcgaacaggtatgtgcttaatctcatttagaaaatgggcagcgtaggcgtagagtagttcttgggcatcaccatttctgctgccagcatacttgagtccaagtgcaatgcatgctccagtaactatattaacataagcttgaaaaagagcctcggcatcaaattcatcaatgtcgatagccccttcactcatgttggaaacaccagactttacagtttcaggtatttgagaatcaatccattctttggtaggttgtattctgctccacaatattaaattcctggctataatgcgaagcataacaaaatcaggtctcacatactgcaaatcgaagtaagtattggggatactgagtctagccgcaatctcttcagactcagccttcagaaatatcaaagctaaagcaattattgctccaggtgcagtaacatcaacatttatttgtgctccatccatcatctgcccagtgttgccactttgatcatcagcagttgttgcatttaggtgcttttcatggtagacttctttactgccaatatattcgaaaagtcgatctaggaaagtatccatgaatccaaatgcatcgctgccatgacccagggcaacaaatcctaatgcagaacctgcagcaacagcatacccttccctttctagcacattatcaccaccacttcttcgaccaatctcacccagaagtatcttcatggtgagtgcatgtgctgagccttcatatagaagtccaattcccattactgctgctgactgtagaagagttggtaattccaactctggcgtagaagatggatgtcgagaaggaacatgaaagtagagcatcttagatattgcaggatccattgttcccctatgagatgctgccaaaccaagtaataaaccaagtgttgttatatcatgctcctgtgagagagaataatacgcatcaggccaatttaaaactcttagatgctcatgcaagccaaatgctagaagtagaccagcatgagtaaaatttggttcagaaggtctattgtactgtatccaagttctcaacatcttctcctgaaaaggggcaagcctcaggccagcagctacaccattatgaaactcagcccaagatttgaattctgagacacttctattacttagatcaaggttaactgtagcattctgttgtgcaggcaatcgaccagccaacacaagctttgggaacaccagaacctctgtcaacaaagtgtaagttgtagctaaagtaaaagccccacgcccaaaaggtaaagcagtagtcctttgagcaaaattccataatttatgctgttg

SEQ ID NO: 42095 - DNA, 764 bp, Setaria italica
  Peptide Sequence Number=SeqID_108069
ggctcaaaatacaattcatttttgatttttttcacgtatctaacttttgctatatatagacataatatatagagtaaatacatcgggtgagtatagcttgcttcaacaacttgtaaaaatactcaaacttaagttttttttaaagttgttggactaatctgcaaccacctatcaagttaatatattaaattgagcattttacaagttgttggattaaattgcacccatcttacaagttattgtactagattaagcattttataagttgtttgaccaatctgtacccacctgacaagttgctctaatatcgctatctaggtgaatatcaaaagttatgcgtctagaaaatctaatatgtgaatataaaaaattatgcgtctagaaaagccaaaacaaatgagaacagaggcattgccacgtacactacacgtcatatctgtatgttttgtcttgtacgtatatgcaccagaacatgtgtactgattctagagaaaagcaatagtgagctagcttagtgttttaaggctgcctttggttgggtttttcaacctgcttttgcttttgcaaaagtcaaaagccaatcaaagggtctaaaagctctacgtgcttttgcccaaaagctacttttactctagtacaaaatgaaaagcactttccccctgctttcaagtgcttttggggtaaaaattaccacctgccactgattatgaaggtacgattcgtttttgcccgtatctatttctcccgacgcgtccgtccgctcc

SEQ ID NO: 42096 - DNA, 534 bp, Setaria italica
  Peptide Sequence Number=SeqID_108070
aaataaggaactagaagaatggaaataaagaaaaaaaatcctgggtatagctggattgaagctggaaaggaatttcgtctgttccatgccgggaggtaccacttgatgttagagaagaaattactggttttcttgaggaattggtctcagagatgcgcaagaggggttatgtccctgatactagctctgtgatgcatgacttggatgagcatgaaaaaggagcagcaatctgttcttgcacagcgagaggctggcagtagcttttggaatactcaagtctcctccaggagtcggtgatccggattgtaaaagaatcttcgggtctgtggggactgccatacagtaatgaagttcatcagtgaaatctcacagaggaagatcatcgtgagagatgctagtcgtttccaccattttgagggtgggaagtgttcttgtagtgaattctggtagctcatctgctgatgttcagttgtgcttaagtcctctaggtatggtggaagctcttaccttgcttcgggggcatattttcgcgta

SEQ ID NO: 42097 - DNA, 1485 bp, Setaria italica
  Peptide Sequence Number=SeqID_108071
aacaatttgaagtgtaatttactctgttaatacatgcaatgtaaaataggaaggtagcgagataccacgtgttttgcgagcctctaaggtgcatgaggggcacttcggagtgcagtaagggcagttggctttgcattcttctggtgtgaggaaacatctttgctgatctggcagttggttctcgcaacaatagcagagctcaaacaagccaggcaaacaatgcaatttccggtcagtgcaaaactgcattgttaacttgctctcatctaatgagctggagttggctgcagtagcattagtagtcatgctggtaaaactgttcgtgtagctccttgcagctgtagcatcgagtagccgaggaggatgacctatcaattgcatatcatgtcagtagatatgtcttgacaagcttaggttagccaggtgagaaaaaaaagtttatgtagactcacattctgcaggcaatgcaagacatcccaaaaccacaagaaacaatatggtaatcatgtacgtgagaccaacaccgccgctctctcatcttggaacttattttacttactggtcacaatatctgaattgtatatgattgtcagcaatgcctcgaatttgatatttatacagagaggctggtcctcatagttgagcttgaggtaagtccatgggggcaaatgggatctgcaactatgaaattgaggtgtttgttattctgattgtagaaaacaaaacggtcaacatttataaatagctatcttatgtgatttattagtggattcactggatacatatccaataagatctactatatacagtccctcatgatttagcaaaattaatttgattcattgctgacatgatttttaggatcactttgcttggtgccaaaaaaaaggaatttttttcaccacatatcagtattatacaggattgattgagggctaatattacacatttctcacttgagtaaacaattaaaacaatccttgtatgtactcctaacagttcattttatattatattccaggtacctggaaaccttttactcaagatacatgtttaggtgtcactaaaggaagattcaggcttaatttgagcgattaggccgaaagcagagcgacatcagacccagcgtgctcgcctcgtgggaatgtctgttgactgctgtactataatacacatcatccggcacccaaatcaatgtcagtctcaggttgactgctatctgaatcaaaggaggttggaatgtctgtttggctgccgtcctagcatacaccatccaatggctccatatcaatgtcattctcatcttgattttattggagctgaggtagtagtcgagcagagaggacctaaaccttgttattactcaaaaaaatttaaaagttaggaactcttgtttcatcacagcattaaggaaccaagactgatgcagatcatcattaaaattgtatcttgtacatcaaagcaataacattattgtttagatcc

SEQ ID NO: 42098 - DNA, 547 bp, Setaria italica
  Peptide Sequence Number=SeqID_108072
ttcagattctttcttaagactttagactacaaagaactttttacaagaaagattggatagtttacttctttcagcaacaagctcctcctgcaaaaagctcttctctgtttccatggacttcagtccgtccatcaactcgttttccttgcttaaaaggttagccaaacgttcatctgctttctttccctgtagctggacagctttcttctcacgcctagaatgtgaaaccttatctgtaagctcctgaacacaagaattaacacgattgagctcatcagaagtactgtctagtgccctttgtgtctcctcaagcttctttctgttaaatacatcaggctcttcaacatctgccttatccttttttaagagatagaaggatggacctttcatttaccagcctatttgttgactgcatcaccctctcattagcccaatctgtccaaactttcacctccagctttagctcgcccagacgctgcactagttctagagcaagcctcctcttcctctcttttggaacccaagtggtctgcatgccgtcacgtga

SEQ ID NO: 42099 - DNA, 732 bp, Setaria italica
  Peptide Sequence Number=SeqID_108073
tttttttttttttaggtttgtttgcaatgcagatgtttttttcacatgaatcggttccattttgtatacctacaaatccaggaagtgatatatatacaagtactatctaatagtcggagccacacagaatatggcctacacgctgcaggagtatttatgttattgtgtacactacaagtctacaatacatctgtgcatcatgctattccactgccgagtgggacaggtctcccaaggatcacagtccacagagaaaccagcaaaaatctactgaactacctggctgagactggcatcccccttggttgtgcttcaggatcagatcacatccaatcaacataatcagatgatgattttgctcctcttttgggcttcgtgtacctgttattctcaaactttgctttcgtaaggagggaatccagaactgctgcttcggcgagatcgtaaggtgccatcaacacgctggcaagaacatcctccaaaatagtgcgttggcaaggcgtaacatagtatatgcactttcttggacactgcccaacagcaagctgaacaaggtcatcttcaccattaccttgagatactgcacgggctgtaccaatatcatctgaaaatgaaaatacatgaggtgcccttttaacacaagaatatgggcatcctgcagtagacatcaacaattgtaatttgtcagatgaagttgataaaacatgtccacatggttgatattgaacaaat

SEQ ID NO: 42100 - DNA, 733 bp, Setaria italica
  misc_feature (561)..(561): n is a, c, g, or t
  Peptide Sequence Number=SeqID_108074
acgaagaaagctatcactcactctctcgagtgattcgcagctctccctcgctcgatttttcttccttcccatctgggcaggatttcccatttcatctctgtcgaactccggtgaaattagaaattcataggctagaggttcgttgaaaccgcccaggatcgatcaggtcgagcagcaactactctcacgaactctccggacaagagaagtttttgcggcaaccgaggcccttttttctatgtattcaactcaatcaaaaaacaaactattacacgatgctcagtgcattgctacacctcagtagttttatacatcatcttatacagtaccacataaaatttttgctgatgtggaagagagagaatgatgagaaaagaaggttgttgtttcgcgaaacaaccacctcataggttagattttagaactatgagaccactactccaccgttatatgagttatggttgacatgcaacttataatatttttttttctctatgcacaattaagaaaatagaattactataagacaacatcctattgtacagattgtttgtttaattnttttaaaattacatgtcaatgcatgagaccacctattagacaacatcgtgctgagccatgtgacgacttgacacaacgcccgagcaacttcctgtggccggcttctcacgcacaggcccacacaatatccacatgcacagccactagctcttgcatgccacacctgtgtgac

SEQ ID NO: 42101 - DNA, 844 bp, Setaria italica
  Peptide Sequence Number=SeqID_108075
tgaagaacaaagcggtggcggaaaaatggatcggagacggggaaatggagctgcggcagcttgaatctccgctcacctgcagatccgggtcatcgctcctcgatttgccgcaggtgctgcctccccacctgcttgcacctgtagatctggccggcttgaccttcgcagagctcgccaaggccaccaatggcttcgcggagcgcaatctcgtcagctgcggcgggttcggggccgtctaccgcggcgtgctggcggatgggtccgtggtcgccgtcaagaagatgctggactcggacccggaccggaacctggtgccactccgcggctgctgcatcgccaccgacgacatcgaggaagggaagcagaggttcctcgtctacgacttcatgcccaacggcgcactcgaggacttcatctacagggacaaggacctgcattacggcgtgccaccgttgacctgggcgcagcggcggagcatcatcctggacgtggcgaggggcttggagtacctgcattacggcgtcaagccggcgatctaccaccgggacatcaaggcgaccaacatcctgctcgacggcgagatgcgcgcgcgcgtggcggacttcggcctcgcccggcggagccgcgacgggcagtcccacctgacgacgcgcgtcgccgggacgcacggctacctggcgccggagtacgcgctctacgggcagctcacggagaagagcgacgtgtacagcttcggcgtcctgctcctcgagatcatgagcgcgcggcgcgtgcttgacatgacgtcgcccgcggggcccgtgctgatcaccgactgggcgtggacgctcgtcaaggccgggca

SEQ ID NO: 42102 - DNA, 459 bp, Setaria italica
  Peptide Sequence Number=SeqID_108076
ttacgttagacttcttgcttctctggaggaagaggcgtgggataccaagatgaggagcatccaaatctcggagtcgtcgcggggtcgcgcccgcggccaaacacaggctccgtgatgttcgacgtccgcgagctggcgaaggcgaccaacggcttcgccgagcgcaacctcatcggccgcggcgggttcggggccgtgtaccgcggcgtgctcgcggacggcacggtggtcgccgtcaagaagatgctggaccctgacgtcgagggcggggacgaggagttcaccaacgaggtggagatcatcagcctcctccggcaccggaacctggtgccgctgcgcgggtgctgcattgccgacgacgaccccgacgaaggcaagcagatgttcctcgtctacgactacatgcccaagggctcgctggaccagtacatcttcgaggacggcggcgacggccggcgg

SEQ ID NO: 42103 - DNA, 654 bp, Setaria italica
  Peptide Sequence Number=SeqID_108077
gctaggaattcataaaggaggagccgttcaacccaagagcctcctcctccatggccgccaccacctaccccctcctgctgctgctgctcctcgcggccacggccgtcgcggccaaggcggcggcggccgccgctgccggcaccggcggcaacgggacgacgccgacggcgtacgagatgctggagcggtacaacttcccgcggggcatcctgccggcgggcgtgcaggggtacgcgctccacccggacggcaccttcgaggtgtacttcccgcggccgtgcgagttcctgctggcgaggcggtggctggtccgctacgaggcgcgtgtctccggctcggtggccgccggctcgcttacggcgctgcaggggatcagcgtcaaggtggtgttcctctggctcggcgtcggcgaggtcgaccgcgccggcgataacctcagcttctacatcggacccgtcgccacctcgttcccgctccgcgacttcgccgagagcccgcgctgccgcggctacgacgtcgccggcgcggcctcctcgtgatgcgtgacgcgccggcgattattcttagcgattggtatttgtatctgccttgatgattcagctggctatatagctctcgattgagtacgagcccggctattagctcttcctccct

SEQ ID NO: 42104 - DNA, 347 bp, Setaria italica
  Peptide Sequence Number=SeqID_108078
tttttttttttttagtaataaaatagttccagtcttataaaatagaaatgatggcagaaatgcaggttcgatcaagcggattacatgcacggattcaacagcaaacgaaatacaagcacaacatcaatggcagcattgttcaattcgacatggcagattgcccagttctgtattcactttgttgctgtcactgttacggtggacatggcgggtaggtgacgcatggtgagcactcagtcctgctccggccagtctccgtagatgccgcgcgtctttacgcggctcagaatctccagtcggctgagcttgcgaccgtcctccccgaccggcgcgggaggaggaagagc

SEQ ID NO: 42105 - DNA, 357 bp, Setaria italica
  Peptide Sequence Number=SeqID_108079
gatctgaccacttcaggacggttcaagcaacaccgttagtccacccattgcaggagtcatcaccactggcacgaggagggacatcaatgtcgaccccaaacaaccgcaaacgcttctgtgctcttcccatgctattgtcaagtgacatcgattcaggaaacattgttggctgtggcatcagagttattggaggagtcaaccctccagatccaaaggacaaatgcttccatgttggctcaaatctatagccactgcccaaaccaaggccctcacatacacatttgtcagtctcattcagcaagccagatggatgaacattggaaccgcgctgtgatgtggcacagaggagataccaac

SEQ ID NO: 42106 - DNA, 477 bp, Setaria italica
  Peptide Sequence Number=SeqID_108080
tattttcccaaagaaaggggaaatatgggcaatgtacaaaaattggaagatcaccttgaatagcactgatattgacaaatgtgaacctcgcatggttgagatcctctcagactactctgatgaaaatggagtcaatgtttgcagcttggttcgggtaaaaggttgcttaaccttttttcatagggtagtaatggaagatttccatttgacaaggtggattccaaggtctgaaatgctcagcttttcccatcgtgttcctgctttcattgttgttgaaatcaaagatcttgctataccaaaagggtcctggcatttggaaccaagtgcccttcctacaaggatcatacactaacgcatgtatagtagcagatgtagtcaatagcccaattgtaatgactccacccgtctttatcaccccattttaagtacttttcctacctcggttaatgatcttccattcattgtcttttagtaaag

SEQ ID NO: 42107 - DNA, 859 bp, Setaria italica
  Peptide Sequence Number=SeqID_108081
aatgttcgagcttgaacattctgcagttccggaaaacctgcgccaagaaactgcattggcatgtatttctcctttgttgctttccggtttacatgatgacacaaacagctttcatgaagctgctgttgcacaatcctcaaatccttcaacaagcaaaatggattcaggtgctccattgcaagccatgatgagctgcgataacaagttgtcacccaagaattttctggagggccagatatgggctgtatttgattctcgagatcgaatgcctaggtcttatgtcagaataatccgtgtggtttcatcaacttcagtttttgtgttgaagttggagcctcaccctatgcttaatgaagagatacggtgggttgaagatagtctacccgttgcttctggggtatttcgggctggtactgaaaccacttacaaggatgtctgggaattctctcaccctgtagagtgtgattggagtgcaaagagatctttctaccgtattttcccaaagaaaggggaaatatgggcaatgtacaaaaattggaagatcaccttgaatagcactgatattgacaaatgtgaacctcgcatggttgagatcctctcagactactctgatgaaaatggagtcaatgtttgcagcttggttcgggtaaaaggttgcttaaccttttttcatagggtagtaatggaagatttccatttgacaaggtggattccaagggtgtccaaaatatcgttgtcagtgctagataattctattgagatgatttgtctcgatatcagaatgatgtttgcagacgtagaaacaagagaatgatgtcttctgtagtcaccctcttagctgtttgaaggtccatatcag

SEQ ID NO: 42108 - DNA, 285 bp, Setaria italica
  Peptide Sequence Number=SeqID_108082
ggtcgtttgggtctttttgttgaaaggattggggaggccatcgttgttagttctgctagagggcttgtttcgagttctatagtttgcccaggctgtgttgtcactcttgcggatgaggattttattgctaacttagtggtgattccgttggagccttttgatgtgattcttggcatggactggctctcccagtataaggccgttatctcttgtttctggaagacaatcactttgcaagcaccatcaggacgagagatgatctttcaagggagtggtttggagtta

SEQ ID NO: 42109 - DNA, 556 bp, Setaria italica
  Peptide Sequence Number=SeqID_108083
ggttgtagccggcgctggcgaggttcctgaccgtggcctccctcttgtcctcgcgccgccccgtgaggatcaccggcttgatgcccagcgcctgcagcctcttgtacagccgcagcgtctccggtagcgccggcgcgttcgcctgcttggcgtacgcgccgaacgtcgtccagttgtacggctcagccccgaagccgtgcttggcgtagtaggggaggttggagagcgcggtctcgtcgatgtcgaacacccacacctcgttgcccttgccggagagctcgaggccctcggcgtaggcgatggcctcgttgacgacggcgcgggagtcgctccggtagtgcccgcccatcatgtagttgccgacgtacctctcgcagcgggccgggatggtcttccagccgcgcttgttgttggtctccacggcgaaccgccagctgtcgcacggcacgcggccgcgccggcccaggtggccgccggagctcagcagcggccgcagcatgtggatcagcggcatgccgtcgtcgatcacctcggacgatggcatctcgaagttcag

SEQ ID NO: 42110 - DNA, 329 bp, Setaria italica
  misc_feature (308)..(308): n is a, c, g, or t
  Peptide Sequence Number=SeqID_108084
taaactcatgtcctccgttggcatactttcagtttcagatgacaagaaatcgtcttcgaagaaagcgtcaatgcaaggaccacgtacgtcataactgatctgatgtgatatgtcgatccctgagattaagaaatcaagcaagtacttttgacgcagtcgaggacttgaggtcaagggtgcactagtacttggaaacagctgttatatacaaatatgaaagcatacttcaagacctgacatcacctgaaagacttcttacagccacagctcgattctatgaacattagctgatgctactctttgaattntgacgttgacatgcagctacc

SEQ ID NO: 42111 - DNA, 252 bp, Setaria italica
  Peptide Sequence Number=SeqID_108085
tccgccggtaacaaaccaaaaaagttgtaaggggaaaaaagaactcgcagaacacagttgtcacgaaattacaacacccagacgctgacgcagcgtctcagccacggcatgcaggattcttcttgtgtattacgctgagatgcagtagagttacattattttccgagcaagattgaagacccccaacttttcacctggatcggagtctctagaatgtgcacttttgctctggatgatataccattcgattct

SEQ ID NO: 42112 - DNA, 321 bp, Setaria italica
  Peptide Sequence Number=SeqID_108086
aggggaggagatatggacccacaggccacggtgcctcagctccaacatattcacaacagtgatacaagcgtcgcttttgccagattaagattacagggtacagaatgccgtctgtcagtctctcaccagagacatctgaggggtccctccaaatcatatcttaaataggaaccgaaggtcttccacagtgagccgagtcgcgtggccacctgatttgtcttcgccgaaagcagagctgaccatagctctcttttcctcctgcagagctaaaatacgatcttccactgtatctttgacagtcaagcgtgatacagtaacagg

SEQ ID NO: 42113 - DNA, 272 bp, Setaria italica
  Peptide Sequence Number=SeqID_108087
aagcactgaagttcatattactttggtataattctggaagccccttacatgttacataatgccagaagcatcaaattaggagactaatgcagttactagttaggatacaatttgtgcagctatacaatatactttgatcatgcatgcatatttatactaatcaaaatggtgtaccatttctgcaggtttcaccaaaaagatttgaccccaaaagaaaagtcactatgtggtggacaaagctatgcttcctgcctctctctcttcctcttcct

SEQ ID NO: 42114 - DNA, 268 bp, Setaria italica
  Peptide Sequence Number=SeqID_108088
gccagcgcgcaagaggaaggccccggacgacgagagctccggcgcggcggcggcgcccgcgcccgcgcctaagagaagcagcggctcccccggcgctccggctcctccgtcgaccgagttgcagtgccctcactgcggcacccacctggttgtcacactgaagaggccggagaccaaatcggagacggagatcgcgaaggacgagccggcccccggcgcgtccgacgcgcccccgacgcgaggcgatgcgcgtggctcaccagaaaag

SEQ ID NO: 42115 - DNA, 411 bp, Setaria italica
  Peptide Sequence Number=SeqID_108089
cctggctactacttcactctccccaactatataaacaacgccattgtccacctctcgctggatgatcttttgatcttcctcaatttttaacatctcctctaggttcattttccctgtctggaaatgtgccaatctactgctcatggagactggatgcattgtgagctccgagaaggattgggctggtgtaagcatctcctcagcatatatggcatgtcctgagggtttcctctcccaagtgaagctgtcatcaccgcgagcactatggaagataatcttcaatggctcatcacctactccatagaggtttaagtctctaacatagtactgaaggtactcaactaggactttaacaaaatcgttggccatctcaagtgtgtcacggtacccatatcttgccacacaacggaa

SEQ ID NO: 42116 - DNA, 380 bp, Setaria italica
  Peptide Sequence Number=SeqID_108090
ccctttcattttcatcctttacagtttacacagcttacctaatccaatcatcaataaaaccatgtcggccatgtccccagctccccacacttatagatcaacagaaaaatatctcaggttgcacgcgactggaggccttgtataattgtatagaaacaatggccgggtaatggtggccagagaaatactttccgagtccttggcttcttcctgagtacaaggaaatctggctccatgttcaggaattacatcaacaccatgactagccgcttctccccgcgttgtgtaaatttgggatcaccattgttcagtaactgtttgtaagacgacaaaggatcaaaaacgaatactccctgtctcggatcagaacacactggttc

SEQ ID NO: 42117 - DNA, 816 bp, Setaria italica
  Peptide Sequence Number=SeqID_108091
gagagcgaagacttccatcccgtttgaacaaggaccttaacaattaagtacttagacaagtagactactagcctcatcgtctcttatattgacaaacacatcatacaagttatctattttaggcctcctagaacatggaactcttgctgtctgaaactcatcaaataagtaaaggtcctcgttcaggtaatagtttagagctgcctctggagctggtagtcttttcaactcctcttcatggagcttgagaaacttgtcataagttgaatacgcatgtctctccacacattcagaaaaatgatatgccattcttgggctcagcatgtacatcccaacagtcatgaagtagtaaaaatatgccatgaaccgagcaaggaaacgatcaaaaataaagcgttgccacccaattcttccatgatcaagaggtgatggaactcgttccagctttcagcgaagtgaacctttatataatcagctctcctcgaccagccaaaggtctcatacaagtgaagcaccgatataaatgctgttcacaaccaagcagacaaaatacggcaccctagcaatcgtctccagcacaaaaaatctggcgtagctccggtcacggtaaacaccattgagtaccatgatcaccgaatcctgcagcagaatgagtagcatgtaaaagtaaaaccatcgagatatatggacacagcatatgaagcagcgctacaggacttcgagggggaaaaatgagctcagttatgctggaaatctgggtgctgacttgtattaccgtgagcaaaatgttgaccgactgctcgagcttcaccaccc

SEQ ID NO: 42118 - DNA, 1283 bp, Setaria italica
  Peptide Sequence Number=SeqID_108092
tttttggcccgaattgaaatcttttcaaacgtaagatatttgatgatgtcgtgtaattgcatctacactgacttctgtagtatgacacaaaggtaaaaacaaataatagaaggacgactatttcctagtttaaaggggaaatggaaaacaaaaggaatatcatcaaaaatttgtatacaggtctcggtctttactttgtaagggattttttgacacaatccacaataccttcacaatcatttttcgggtattacaccttccgtatcagcttctaagcagttctgtgttgagtgaggagagcgaagacttccatccgtttgacaggccttcattgtcttgcagtgctctgcctcatcgtctcttatattgacaaacacatcatacaagttatctattttaggcctcctagaacatggaactcttgctgtctgaaactcatcaaataagtaaaggtcctcgttcaggtaatagtttagagctgcctctggagctggtagtcttttcaactcctcttcatggagcttgagaaacttgtcataagttgaatacgcatgtctctccacacattcagaaaaatgatatgccattcttgggctcagcatgtacatcccaacagtcatgaagtagtaaaaaaatgccatgaaccgagcaaggaaacgatcaaaaaataaagcgttgccacccaattcttccatgatcaagaggtgatggaactcgttccagctttcagcgaagtgaacctttatataatcagctctcctcgaccagccaaaggtctcatacaagtgaagcaccgatataaatgcaaaatacggcaccctagcaatcgtctccagcacaaaaaatctggcgtagctccggtcacggtaaacaccattgagtaccatgatcaccgaatccgtgagcaaaatgttgaccgactgctcgagcttcaccacccagccctcatccgatggaaccatcgggtcgtccgctccgtccagcggcgcggcctccctcgcggggaaggactcctcgacgggcacctccgtctgctgtttctcccgctgcgtcttaatcgcctccgcgcggaacctcctccacgtggcgacgggaccgaggcgcgggtctgcggcgcggcggccgcggagcgggaggaagcgggcggcggcggcgggcagcgccacggggaggggcgggatggaggtggaggccaccgccatgctcgcgcccgcgattccgtgtgggttttgggaggtttggtttgggggagtggaaatgggatgtgtgagccgcgcggcgcg

SEQ ID NO: 42119 - DNA, 743 bp, Setaria italica
  Peptide Sequence Number=SeqID_108093
tttgggatttagtatggacaagatttatgttttcgatcgctgtactttcatgtctcctggtaagaaatatgttatgaaagggttaattgactcaaatcttgtcttgactctttaactcttgtaagtattggatgatggtatgccacgtaaactgagcagttgagttaggatccttttccactttctgttatttgtaagtgattcctggtatcaggacatgatctacttccctgttggtgtttatggaagttcttcatgagttttcattttgccatttattcaacttggtgaaacactcatggtagcgactgcagcacccagtggtctgaggaccattaatagctgcattatttgggtagtgtgcatctttgaatggatgccttctataaatttttggtcatcccattctgtcttgttacatgcaatcttgttgtagttgtcttgtttctttgtgctgctggtgtttccatttgtttctgttgctgacactgctcaagcattgttttcgtgtgaaggactaaaatactgaagccactatttatactggattgcaattattgtattcccattttgcgcagcttaatccatgtacagccctccaactgcctgttcactcttgtaccacttcaatccaaaccaggctgccagtgccctttttggtagtagaggaagttatagaaaccgtaatctaaacctagtcttctccagttgaattaaatgtttagttgtaccaaaaaagggaa

SEQ ID NO: 42120 - DNA, 413 bp, Setaria italica
  Peptide Sequence Number=SeqID_108094
gcaaaaaaaacagagatcaggctctactacaatagaagcgtggcacaataacataagcctttcccaacaaataacagagttgtcatcttaaaaattactaactaaatcacaactatactacagcaaagcctacaaataagattttaatttacatcgtttcattcccatcaactgtgtaagtagtaaatctttttttatcaaaaagcctaagtggagaggtacgaaaaacatcctcttcaccgataaaaaggttgcgtattctacatcagtaatgtatatgtttagagttcagaccatatatacagcctcgtccgggtcttcgttcccaattagtatgagcccctcgatgaggatggggaacatgaaccgcattggctggcagccggtaaggtgaccacgccggctgggtgcat

SEQ ID NO: 42121 - DNA, 720 bp, Setaria italica
  Peptide Sequence Number=SeqID_108095
aagagaagctagtgttggggaacaacaattcccgtgctgatgctaatgtgggcagtcgagttggtaccagttcccgcagatttggtactgatagtaaaggaaaggggaagatggctgcggaagatagtttatcatctctgaactcaagtgaggatgagtttgattcgtaaccagtgaattctaaagagagggttgtagaagatagttcatcatctctgagctctagtgaggatgagccagattcgaaaccagtggattctaaggagattgagaacaactcaggatcggtttctgcttctgcttctgcttctatggagccacttcgcaggcaagcagcaagagagcgagctatcaggctggcccctaagtttgcattcttcaaagcagataaagatgaacatagtgaagatgacgaggaagaagagttagagcctggtgctgcccctcaggactggcctggtccatttgcaactgctgccaggatatatgaagaaagggaagctaagttgagagctcgagaattgaattcttcaaaggtcgacaagtctgctaataaggccatcgtttggtcgccttcaaaggataagagaaatccatttccagctcgggctgccccatcacttacaagcttatgcttaaatactcttgcagaacattctgaaggtattgaatcacttggaggtatcccagaggagctaaagcacaagctgttaaagattc

SEQ ID NO: 42122 - DNA, 345 bp, Setaria italica
  Peptide Sequence Number=SeqID_108096
ttgatacagtcacagttcaaacacgtcttagtggagtccaggatgaaaggacagcgtattcctaaatctataaaacactttggtggatgctggtccactattccagctacttccatgatgcatatcatcatatagtgcacatcagtttcaatgtctgtgagagaaaacatccgacacgctcaattttaatgacctatgagaacatatgccatacttggatttgagaaaatcacacgcaacatatatgtctcatcataaacaatcaaacatcaataaaccataagttcctaaaagttaacacatgaaatcggtagtgcagattgatgtacagaagatttcattatt

SEQ ID NO: 42123 - DNA, 487 bp, Setaria italica
  Peptide Sequence Number=SeqID_108097
cgggagcggacatgggcggcgccgcgggaatggacgaggacgcgcctgcgggaagcggcggcccggccccaagatcgaggaggtcgactaagcgactcgtttctgagtcgtctgcggtggcgccaggtggaggttgctgccgcgagttatctttgctctgttttaccaccacaaagtgccaaccgaaccgaccatagattaagtgcgataaaacagagcaaagataactcgcggcagcaacctccacctggcgccaccgcagacgactcagaaacgagtcgcttagtcgacctcctcgatcttggggccgggggccgccgcttcccgcaggcgcgtcctcgtccattcccgcggcgccgcccatgtccgctcccgcgccctggtacatcttggcgatgatggggttgcactaggtcttcttcctagttctttcctttttctttattttctttttgttttccttttcgtttaacttttcgtttccttt

SEQ ID NO: 42124 - DNA, 505 bp, Setaria italica
  Peptide Sequence Number=SeqID_108098
agaataatatcgtatcacttagacggctcgactggtacaacacaatcgagccaccgagagacatagttcaccatccaacagacgctactaaccaaccgaccgaccgaccgaccatcacgaggtccaaaaatttaccaccacaaagtgccaaccgaaccgaccatagattaagtgcgataaaacagagcaaagataactcgcggcagcaacctccacctggcgccaccgcagacgactcagaaacgagtcgcttagtcgacctcctcgatcttggggccggggccgccgcttcccgcaggcgcgtcctcgtccattcccgcggcgccgcccatgtccgctcccgcgccctggtacatcttggcgatgatggggttgcacaggctctccagctccttcatcttgtcctcgaactcgtccgcctcggcgagctggttggcgtccagccagctgaatgcagcgttcgtacgggtcggtccttcctatgctttctttctttgttcgttcc

SEQ ID NO: 42125 - DNA, 733 bp, Setaria italica
  misc_feature (1)..(45): n is a, c, g, or t
  Peptide Sequence Number=SeqID_108099
nnnnnnnnnnnnnnnnnnnnnnnnnnnnnnnnnnnnnnnnnnnnntttttgtttttagttttttttttttgtacaaaggtaaacaacgagataacgaaccagaataatatcgtatcacttagacggctcgactggtacaacacaatcgagccaccgagagacatagttcaccatccaacagacgctactaaccaaccgaccgaccgaccgaccatcacgaggtccaaaaatttaccaccacaaagtgccaaccgaaccgaccatagattaagtgcgataaaacagagcaaagataactcgcggcagcaacctccacctggcgccaccgcagacgactcagaaacgagtcgcttagtcgacctcctcgatcttggggccggggccgccgcttcccgcaggcgcgtcctcgtccattcccgcggcgccgcccatgtccgctcccgcgccctggtacatcttggcgatgatggggttgcacaggctctccagctccttcatcttgtcctcgaactcgtccgcctcggcgagctggttggcgtccagccagctgatggcagcgtcgatggcgtcctcgatcttcttcttgtcgtccgccgccagcttggacgcgatcttctcgtcgcggatcgtgttgcgcatgttgtaggcgtagttctccagagagttcttggactccaccttcttcttgtgctccgtacttctcacgtattggtctagtcgttcgtattggtct

SEQ ID NO: 42126 - DNA, 366 bp, Setaria italica
  Peptide Sequence Number=SeqID_108100
tacgcgccaacaactgccgtcgccgcttcttctgtatcaggcagctgcatcgcggccgagagagatgcgctaatctccttcaaggcaaaaaaaaagataagaagcaaagtttccccttcattcgattcttataaatcgatccatatgctctaaatggataagacccaggcagattgctgagatcttggcgaggacaagactgctgcctgtggtacggcgtgaggtgcagcaccaggacaggccacgtcgtgaaactcgacctctacaataagtttgtcacagagaattattatggtcctattgacaatcttctcgggttgagtggtcagataagttcatctcttcttgcccttatgccatctcact

SEQ ID NO: 42127 - DNA, 488 bp, Setaria italica
  Peptide Sequence Number=SeqID_108101
ttagattctgcagctgtgatcacccttatgatgtagtccttctccacatccctcccgtggacttctcgaggaacacagcttgatgttgttgtccgtgtatctgagttgttgctctgactttgaattgaacacgcgatagaatccttgagaaaatcgcacacattccctcgcgagtcttgtaactcaaaaactatttggcgtatcctattaggaagtccggccttgttccaagggcgtgtgttagatgcagcgctgtgtgttgatgcctcattgactctcatccttttttctctgatgaacgaatcccgagttgcattggtggtatcatttggtgcaccatcagtggaactgcacgaggaaaatgatccctctgtttatttttataaggcgtgatatgacatagcatggtcttccaaattatactttgatcatgaatctattttatattatattatttatggttataaacacaaatccaaccatttcgt

SEQ ID NO: 42128 - DNA, 518 bp, Setaria italica
  Peptide Sequence Number=SeqID_108102
cctacaatgcctacaataggcagtacagttatgacattagattctgcagctgtgatcacccttatgatgtagtccttctccacatccctcccgtggacttctcgaggaacacagcttgatgttgttgtccgtgtatctgagttgttgctctgactttgaattgaacacgcgatagaatccttgagaaaatcgcacacattccctcgcgagtcttgtaactcaaaaactatttggcgtatcctattaggaagtccggccttgttccaagggcgtgtgttagatgcagcgctgtgtgttgatgcctcattgactctcatccttttttctctgatgaacgaatcccgagttgcattggtggtatcatttggtgcaccatcagtggaacttgtagtatttgtcggttcttcagctgctggacgtttgctcagacattttttactcctgatatgcttgttcaaaccgtttgtcccggtcgtaccaccgcatttaacttccttaccacagtatttacatttttg

SEQ ID NO: 42129 - DNA, 280 bp, Setaria italica
  Peptide Sequence Number=SeqID_108103
atattcaatcacattgcagcaaacaaggatatggtgttgccagaaagaacagaacaggatcctaccacttgacttgaattattttctcccccatttcccctctaccagtatagactaccctgaacccattgctggttaagttacaatccgacattcacaacaggtgaaaatgcgattgaaatggaatgcttcgtttcccaggtaaacacgggtgctggcatcccaacacgtcgtcgaactcatcgattcggaagattcccatggcaatgagaggaagagc

SEQ ID NO: 42130 - DNA, 516 bp, Setaria italica
  Peptide Sequence Number=SeqID_108104
aaaagtaggcaattcagaattctgtagaaaatgctgcagttcttgtttttttagtaaacttgtatttctagtaactgtagtatcgtaagaattgatctgtactactgttggaggaaaaataccagattttatgaatttcttaaatgaactgcccactttagttccttgtaggaggccttttatcatttagatgaaaataatttagaattggcagacattttttccacattcaaaaaacccatgggccttttgggaggccaaggcgggcggattgcctgagctcaggagtttgcgaccaacctgggcagcatggtgaaaccccatctctactaaaatacaaaaaaaaattagaccggcgtggcggcgtgcgcctgtagtcccagctgcttgggaggctgaggcaggagaattgcttgagcccaggaggcagaggttgcagtgagccgagatcgtgccactgcactctagcctgggcatcaagagtgagactccgtctcaaagaaaacaaacaaagaa

SEQ ID NO: 42131 - DNA, 512 bp, Setaria italica
  Peptide Sequence Number=SeqID_108105
ggatggcggcggcggcggcgtgctgtggtacggccgacgggtgtcggcgtactttttttattttttcaaaaaaaggtttgccgagtgttttcggggcactcggcgaaagctgtgccgagtgcccgacctaaaacactcggcgaatattactttgccgacacaaaatttcccgagtgccagatgccgagtgtaacactcggcgaagtcgttgccgagagtatttcgggttttgccgagtgcccctggcactcggcataaaacctgtgtccggtagtgaccccaagtggacgcggcgtcatcctacgccagagcgtcctcgcgctctggccacgggaacggcagctcgacgccgctggggaatggattccctactttggcccgccgccaccaccaccaccgctgccgacgcacgcccccggaacgactcgccaccacctcccgcccatgcgcgccacgctccacagcccaacgctcctgctcgcgcaccgtcgtctacgtcctagtcccgttct

SEQ ID NO: 42132 - DNA, 328 bp, Setaria italica
  Peptide Sequence Number=SeqID_108106
tcttttcctcttcagcaagacgaaactcataatatttgtagtctggacagtgcttatcaaacagaaacttgaatggtgtatctccaggattcctctgccgtgtgatattctcaaactgtctcccatttttggcaacaaagcttgctaatttgtcagcaacttgcctcactgttatatcatttggtagtggggcaacagcccccgtcggggcagccaccgcaggagtatcagctttcacagatttctgacgcttggcgggctcctccctctccacatccgctgcaccctcctcatcgtcatcctcgggcgcaaaaacaggcgcaattgc

SEQ ID NO: 42133 - DNA, 715 bp, Setaria italica
  Peptide Sequence Number=SeqID_108107
attcaaaggttaaaaggcctcgttacttgaaaagaaaaggttaatatatcactgatgttcaagagcataacaacattgaattgaatgtcttatcacacagttgtattcaatcattggatgccaagtacaacccacagaatgccaataaaaccaagtaaggtagtgctgcaacactaaaaaaataacactataacagcaagaaatgaataaatgattaccaacagcccccgtcggggcagccaccgcaggagtatcagctttcacagatttctgacgcttggcgggctcctccctctccacatccgctgcaccctcctcatcgtcatcctcgggcgcaaaaacaggcgcaattgcaaccttggccttcttgaggctgaaggcaagcttcccacccgtggcgaccggtccggccttcttcagctcaaagggcctcttgttcgccgccacagtgaacccctgtttggggttcgcaggcttgggcggtgccgatgaggctgccgctgcggcagccttctccttttcctgctcctgctgcatctgcttgaacctctccatgaaggagccgtcgttggcgaagagccccttgtccatggcttggcagatgctccccactgcagcactggctggtataggcagtcgagaggaaagtttcgtctacggcgagtcggcgatggatggggatcgatcgggaaaggagaacgagagagaatatgac

SEQ ID NO: 42134 - DNA, 600 bp, Setaria italica
  misc_feature (1)..(35): n is a, c, g, or t
  Peptide Sequence Number=SeqID_108108
nnnnnnnnnnnnnnnnnnnnnnnnnnnnnnnnnnnaccttagcaccaaaataataacaataataatgaggaaaatatagtcatccataaagaaagcaatacatcgctgttccaaacactcttgatttcagcgccaacaatgtatgtgtattgaaaaatacactgatcaacactacacaaagaacaaagctactgtagaacccccggaagcctcagatctgtggcattccaagtttgtcctgaataaatgacttcttggcttttctgttgatgaacaaaaactttcaatgctgttagtgatatcacctaacctattagttctgtgaacaaaaaatggtgccttacatctcccctcggatgaactcccttgcatcagtagtatgctttccttggattgttcagtgggtttggcctataacggtagcctagcatcattcgcttcttgtattgctcatagatgtcatcttcagatgtgacttcaccaggctggacagcaccaacaccaagatgatccttcttcacatctccagccataacaggatctgcacggcccctcctctcgctaccaagaccctcaccttccctccagccctattcttta

SEQ ID NO: 42135 - DNA, 567 bp, Setaria italica
  Peptide Sequence Number=SeqID_108109
tttttttagttattatgcctcccagtatggaaatatgatattgcggcaataaatcccaacaaaaagaatgaataatcaggaaagatatgttgtcatccaagaaggcaatacatcacattatgaaactatgctccacgtttcaacacatcaccatggaagtgaatttaaagcaacaaagatcaacactacacaaagaacaaagctacggttgaaccccccgtaagcctcagatctgtggcattccaagatatatgctgactaaatgagcttcttagtttttctgatcttagatgaactaacctgtatcagtaatattgtttccttggattgttcagagggtttggcctatagcggtatccaagcatcattctcttcttgtattgctcgtagatgtcatcttcagatgtgacctcaccaggcttgacagcaccaacaccaagatgatccttcttcacatctccagccataatgggatccgcacggcctcttctctcactaccaagaccctcaccttccctccaacccatcttagatagaagtttgtggccaatattgtctgcctgaatc

SEQ ID NO: 42136 - DNA, 530 bp, Setaria italica
  Peptide Sequence Number=SeqID_108110
taactagatgagcttccttgggaagaactaccctcatatgccccatacaaagctgatgcaggtgtctgatagttggacttttgttcaaatgagcttttatacagaccacttggtgctttgaagcttgcagtgctagaactagcattttttgatgcttcagcatcctttgactgaccaagagccttttcctcttcagcaagctgaaactcataatatttgtagtctggacagtgtttgtcaaatagaaatttgaatggtgtatctccaggattcctctgccgtgtgatattctcaaattgtctcccattttttgcaacaaaacttgccaatttgtcagcaacttgcttcactgtcatatcatttggtgggggtggggcaacagcccctgccggggtagctgccacaggagcatcagcttgcacagacttgtggcgcttggcaggctcctccctctccacatcctcttcctcttcgtcggccgcaaaaataggggcgaccgcgaccttggccttcttcaggctaaaggccag

SEQ ID NO: 42137 - DNA, 2286 bp, Setaria italica
  misc_feature (22)..(22): n is a, c, g, or t
  Peptide Sequence Number=SeqID_108111
aaaataataacaataataatgnggaaaatatagtcatccataaagaaagcaatacatcgctgttccaaacactcttgatttcagcgccaacaatgtatgtgtattgaaaaatacactgatcaacactacacaaagaacaaagctactgtaggaccccccggaagcctcagatctgtggcattccaagtttgtcctgaataaatgacttcttggcttttatctcccctcggatgaactcccttgcatcagtagtatgctttccttggattgttcagtgggtttggcctataacggtagcctagcatcattcgcttcttgtattgctcatagatgtcatcttcagatgtgacttcaccaggctggacagcaccaacaccaagatgatccttcttcacatctccagccataacaggatctgcacggcccctcctctcgctaccaagaccctcaccttccctccagcccatcttagacagaagtttgtgcccaatattgtctgcttgaatcttagccttttcagcagcttctttggtagctttttgtgcttcagcatcattacaacgtgccatgaacttttcaagttcttctggaggaataaagtcacccatgtggtgtccctttttaggagaaccttgaagagaaggaggtggtggcatttcatctttcgactgccttggtggtctcttcctttcttcctgtgcagccttcttcatgtagaattccatcaatgctacaggatccgagggtgcagacgtatcaccataactagagcttccttgggaagaactgccctcatatgccccatacaacgctgatgcaggtgtttgatagttggacttttgttcaaatgagcttctatgcagaccaaccagtgctttggagctagcaatgttagcattttttgctgcttcagcctccttggattgagcaagaatcttttcctcttcagcaagacgaaactcataatatttgtagtctggacagtgcttatcaaacagaaacttgaatggtgtatctccaggattcctctgccgtgtgatattctcaaactgtctcccatttttggcaacaaagcttgctaatttgtcagcaacttgcctcactgttatatcatttggtagtggggctgcatgtcacttaaagaactgattaatatcaagccacatgacaaggcaatgcaaattgctgcagtagactgccacacttcaactctttcaatcaacattcgtccccgcaatgtcgatacagttaatctataagctgcagcaataagaaagaaaaaccaaaaccttcacaactttctgcttccagtagcaactgatacgaatgcagacacagaaaagatgtttctttgtaaacctaacaatgtattcatgaagcataataggaaagttcaatcacagcaccctggtgcaatgtcaagaaaatgattattaaaaaattattattcggtaaatttcaccatcgttatgtatcgcaatctgttgctatcaagactcattttcattgtttgtaaatctgcattcaatacttttagggcctttttggatgtgaagcattttaaaaaatcattgttcctaaaaaccgcagtttttaaaatatggaaataaactgtggtctatttaggaaaagcattataagtttgatggtttacagggtatagtgttcttcctttatgaacagatatattgtaatctgtcccacatgaaaattaaataaatcttgatgcatacatactatttggttgtagatagctttgatatataacagtattttacatatatgtggtagatcagaataggctaaagttttaacaacccaaatagaacagcacagcactgtacagtgcaccgtattaagaatcaatttactggtaatactttgcgtgatatggcgggccaatggttcacaacttgaatgccaacagagattgaggcatgcttcatttttagaaaaaagaagaggtgataattggttttctaaaagctacaaaataacatggttgcaatactacagttgtaaaacttgtatccaaacacctaaaagttttgtatgctatggtatactttagaaaccatatgaaactttgaaaaatatttgatattctagcaggcccttagttgcttaattccactagaaataaatatgcaatgcagaactagtttctagtttcatcagaatgttaatttcactatcaatatgcattcgatgccgtttgcagctagatgccaggataaccagcctcaaaggcatggaaaaccatatggtgaggttataaagtgtgca

SEQ ID NO: 42138 - DNA, 1650 bp, Setaria italica
  Peptide Sequence Number=SeqID_108112
ttagtcatatccctagctgttagttatgtgaaaaacaaaaataaaattggtgtcttacatcttagatgaactaacctgtatcagtaatattgtttccttggattgttcagagggtttggcctatagcggtatccaagcatcattctcttcttgtattgctcgtagatgtcatcttcagatgtgacctcaccaggcttgacagcaccaacaccaagatgatccttcttcacatctccagccataatgggatccgcacggcctcttctctcactaccaagaccctcaccttccctccaacccatcttagatagaagtttgtggccaatattgtctgcctgaatcttagccttctcggcagcttctttcgtagccttttgtgcttcagcatcattacagcgtgccatgaacttttcaagttcttcttgaggaatgaagtcacccatgtggtgtcccttcttaggaggaccttgaagagaaggaggtggcggcatttcatcttttgactgtcttagtggcctcttccgttcttcctgtgcagcctttttcgcatagaattccatcaaagctacaggatctgacggtgcagatgtattgtgatcaccataactagatgagcttccttgggaagaactaccctcatatgccccatacaaagctgatgcaggtgtctgatagttggacttttgttcaaatgagcttttatacagaccacttggtgctttgaagcttgcagtgctagaactagcatttttgatgcttcagcatcctttgactgaccaagagccttttcctcttcagcaagctgaaactcataatatttgtagtctggacagtgtttgtcaaatagaaatttgaatggtgtatctccaggattcctctgccgtgtgatattctcaaattgtctcccattttttgcaacaaaacttgccaatttgtcagcaacttgcttcactgtcatatcatttggtgggggtggggctgcatgtcacttaaagaactattaatatcaagcatatgacaaggcaatgcaaattactgcagtagagtctccaactctttcaatcatatccttcctggcaatgccaatacagttcatctataagctgcagttatcggaaaaaaaaaacaaaaccttcacgactttctgctgcctgacttataatgaatccaaacactgagagaaagatgtttcttttgtaaacctaacaacgtatgagccaagcataaacggagggtttaaatcatgtggtgcaacagcaagcaattttcttggatagttttaaaaaattattaaacactgttagatggtcgattccaacaccaatgtgcattgcaatttgttgctttctagatccatttttatcatttgtaaatgcatgaaatcaatactataaggatgtgttttgatgtcaggaacatttcaaagcagagtttttgaaaaccatctttttaatacatgggaactgaaataacataaattgcgaaaaccaccattttctacagtatataaaagaactataatgcgtttggtggttttggtatagtatgtttcctttataaacatatacactgtataattatccaacagaggaaaactaaataaagcatgatacatacatacatactatttgcctatttgaatgcagttag

SEQ ID NO: 42139 - DNA, 1683 bp, Setaria italica
  Peptide Sequence Number=SeqID_108113
tgtaaaacctattcaaaacaatcactattgggtaacttgtaaattataacataaattgcgaaaaccaccattttctacagtatataaaagaactataatgcgtttggtggttttggtatagtatgtttcctttataaacatatacactgtataattatccaacagaggaaaactaaataaagcatgatacatacatacatactatttgcctatttgaatgcagttagctttgattataacaataacaacaacaacaacaacaacaacaacaacaacaacaacatagcctttcagtcccaagcaagttggggtaggctaattataacaatactttatatatatggagataaaaaaaggctaaagtaatactgtgaacaatccaaaatgaatgtatgcaatacagattagtcacattaggaatgtgtttactgatagtactgcatgaaattagacaggaatgctaaatacttcgcatgtggtgagaaagggaaatcgtagcatgcctcgtgtttactttttaggaaaaagaggtgtttaatgggtttccttcataaactccaaaataacatggtggttggaatactacatttgtacactgttagttgtataccaacacctaaaagtttttatgctatgacatattatagaaaccatacgaaaccaaaatatacttgacatccaagcagtcctataagtaataatttcactaaaaatgcatatgcaacgcaatgctactttctagttaaatcagtatgtgacaaatgaaataaaaagtatctagttagttcgtttcactatcaatatgaatgcaatactgtcaggactcaggataacaccctcaaatgcatggaacagaaaaatgtattaaaaaaatgacaatataaccatatgtgtcggtggtattaattggggtatgggattccaaattagaagtcatctcaagagtaaaacctatgatatgtcacatatatggggaatgaattcaaaaacaaaaaagataagaggcaatatatagctgatgttctaggacaattattgaattaaaattcttgtcgcatatttctatcttatcatttgatagcaactacacccacagaacgccaacaaaaaatccaaagaatgggaaaccactaataattttgtatattataacagcaataaatgaatgaattaattaataaataaatgattaccaacagcccctgccggggtagctgccacaggagcatcagcttgcacagacttgtggcgcttggcaggctcctccctctccacatcctcttcctcttcgtcggccgcaaaaataggggcgaccgcgaccttggccttcttcaggctaaaggccagcttcccgcccgtggcgactggaccagccttcttcagctcgaacggcctcttgttcgccgcaacagcaaaccccggcttggagctcccgtgcttgggagccgatgaggcttcagtagcagcggccttctccttctcctgcatctcctgctgcatctgcttgaacctctccatgaaggagccgtcgttggcgaagagctccttatccatgcctcggcgcagatgtgatgcttctgcagcactcgcttgccgcctcaaaacagctgtacggtcgagactcgaaggggagtaggggggaaccctagagagaggaaagttccgtgctggagccgggtgggg

SEQ ID NO: 42140 - DNA, 567 bp, Setaria italica
  misc_feature (21)..(21): n is a, c, g, or t
  Peptide Sequence Number=SeqID_108114
gtgtacgaggatctatgttanatttttagtagttggtctagttatatttagctaatctgcttttttttgcatacttaaaaagagacagaattgtgagatattaacaaggtgacgcagctcttctgcgtgttcggaaaaataacaaggttttgcagataataggcacataatggataaatccccattatgtatgggttgtctcttaagtcattctaatagcattattgcacaccctaataaatccatgacaagcaatgttatatattcagtatcagcacacatcatgtaagccggttctgcatgcatacatttctaattaatttacatgtgtctacaaatgtacgtgcaaagcttatctcttttctgcacgcatgcatttctatacttgtgagttcatacaccaatatggcttcgaaaattgttcacgatctcccagaataattaaagctagtgttgatctgggtagaaggatgaacaaacggcttaaaaacaaatgttcaatctaattatttattgcatggcttaattatatttatgtgggcgggagtagaggttgttggacctccc

SEQ ID NO: 42141 - DNA, 474 bp, Setaria italica
  Peptide Sequence Number=SeqID_108115
ttgagccacctcgtccggccggctgtggagtcttctgcttccagatgtgccactgactttctaactggcccgagtgaggtcacttaccccgaagcctgattgacagcccctcccctggagtgcgttgtgaacactgaaagtagtgtcagtgaagggcttggtttctctccagcaagaaaacttgctgtgcacagtgcaaagtccaaagacttgaagatacttcagaggtgacactccccccgccaaagacttccatgaagtgggacctgctagatgttatggttctttccatgaagtcccaggaagtcctcctgctttgattttcaaagctgctatcatgctgttttagaaatattgcttttcacgggtcttctccagttgacagtagatgccctgtggttcatttgttctcatgctggccttagctcttttaggatagcctccagtctctgtgttgaataaggcaaggtcaaa

SEQ ID NO: 42142 - DNA, 419 bp, Setaria italica
  Peptide Sequence Number=SeqID_108116
cttttatcttatcaaggcctcttttggccaaatcttatgctggatttaaatcatacaaccatgtcatcctctctgatgacatatcataagttatatctattattcatttcttcacccttagctaggggcaagatgatcattcttcatgattcgagttacattattgcaacagatcaagcattgtaattttgtcaagcaaacccaatcatagaatgtatttgtacacctctcttatgtgcacattttcaattcatggaatccattttctgctgaacaggaacacaactgattaatgtatttttctatttgaattgtaacattagaacacccatccctcatatgctaaaaaaataatcttacgaacttacaatacagaaaaagcgtgtctttctgaaattttggcgcaaggcaactttttc

SEQ ID NO: 42143 - DNA, 298 bp, Setaria italica
  Peptide Sequence Number=SeqID_108117
acagcaatggcacataggggagtggaaaattaaaaatttagatggcatagaagggatcactatattctcaatggcatagaagggatgggtataagtttggatggcatagaaggaatttactcattttttttaatatgcagtaacaagaatattatgaatgcaataataccaaattcccttttaatgatgataaaatccatttcattccgttgatctaactactcagccaatctgatatccactcttaggaaagttgtggcacgaaattagtttcaggggctggattcacagtaatcta

SEQ ID NO: 42144 - DNA, 554 bp, Setaria italica
  misc_feature (26)..(26): n is a, c, g, or t
  Peptide Sequence Number=SeqID_108118
ttattaaacaaaagtatgaatcaagnttaaaatacagaagaacaaaatgcgatagtgttccttccttttatcatttccattatcaactaatcgaataaagctaaaatacataaattaacaaacgtgaacagattaaaatacagaagaccaaaatgtgatagtgttccttccttttctaatttccattatcaactaatcgaataaagctcagataaataaattaacaaacgtgaactaaatgtccaagagttcaaatgagaaatctcaaaccatcaattttacctagctttctttcgcttcctcttgcagttccttgtagggtccctgatttaaagtctcaccactcaaggttttcctctgaggtaagtactccccaggaaggttctcaattccttttttgatgatagcctttttcatacttgtttctcctgcacaaaattttggaaggttcttttttgcattttctgggactagagttttctgagagtgaatactgagatatgatctggaaacagcggtagcagtagcacaatatttaacagcgtcttcaccgc

SEQ ID NO: 42145 - DNA, 532 bp, Setaria italica
  Peptide Sequence Number=SeqID_108119
gatttacttctttgtcaataaatacttgtaagacacaggtttgttgaacctataatgctagctttctttcgcttcctcttgcagttccttgtagggtccctgatttaaagtctcaccactcaaggttttcctctgaggtaagtactccccaggaaggttctcaattccttttttgatgatagcctttttcatacttgtttctcctgcacaaaattttggaaggttcttttttgcattttctgggactagagttttctgagagtgaatactgagatatgatctggaaacagcggtagcagtagcacaatatttaacagcgtcttcaccgccagcacattcttccaaagcaagcgaatcaaactgctcatgatgtagctgctgagagtttcccttgccctcaccaatgttcttctcttcctcctcattttgctgctcctcatctgactgatctgcaaggataacaaaatcctcctccaaatcctcatccccggactcaacagccggcaaatcactcccgtcaagcagctttcgc

SEQ ID NO: 42146 - DNA, 690 bp, Setaria italica
  Peptide Sequence Number=SeqID_108120
cttggcggatgtgttcacaatggttggcttgcaagaattcttctatgatcaagtaccagatggtttgcgcagtttaggccttgctttatacttgagcatctttggaatcgggagcttcatcagcagctttcttttgtatgcaatcgacaaggtgaccagtagaggaggagacagttggttctctaacaatctaaatcgagggcaccttgattacttctattggcttctggctgtgctcaatgtttttggtttggctgcgtacctatacttttcacaggtatatgcccacaagaaaaagggacaggggcttttggtacagtgattgtctgtcaataccataaaatatgcctgagcaacgtcttcatagtcgtccttaccctttccattgcatgtatgcctgcacattcttctcctctctgcacagaatctgcaagccatctcaagctcacgtgctcaaggcacaagcatagagaagccctggctgactagacaaatgacgggttgtgaagatcagttcatataaaatagcatagctgtataatagttttaagacatagctaaaagtatattatgtactagaatatgttgtaatttttttggatatgatctttgtcgttcctgtataatgtaccacttgccatgcttaagttgtactactctgatgtgagtcattattcactaaatcaacag

SEQ ID NO: 42147 - DNA, 430 bp, Setaria italica
  Peptide Sequence Number=SeqID_108121
ttttttttttttttaggaaaccaagaggtaaggtgagacccagcagcgtatccatatatatacacctggctcgcatttctttaatttcctcgtgggcaaatacacacacacacaccaattttcaatcgtagctgatagctgcttttttgaacccactaatggcaccctttttttttcttgctaatcttcgtctcggatgctattccagcaagcgtagttcaccttttgtttactttttttcttggacaacaatggactttgctaccttgcttgttgggttaagcacatcgaccgactcatcgacctccgtccgtaacattttagaccgttaccggccaagcagttaccatgtccaccctgctgcagtgctgcttgcgtcatcacgcacacatatagctgctggtgttcgccttcctcttcttcttcgcca

SEQ ID NO: 42148 - DNA, 431 bp, Setaria italica
  Peptide Sequence Number=SeqID_108122
ttagtgtaagttttgaagattttggggttaaagatctgccatgtgcaaactcagttgggtagcttactcttatccaattgtttaattccagaagaagcatgcatggaacaacccaagttttgattatagtagatagctactgcttctacttttagtggtatacttgttgaattggtagatatatatgtggataactgaatgcgtgttataggattatgtggtgttgtgaaattgtttgcacactgcacctggtaatctacaatggcagtgtgcttaaacacattaagctcgtgaaatagactctgtaatcactgtttcttttaggatcaatatggaagtcttctgtagcactgagagaaaaattgtactctgtttcttatggcaaatttcacagaacatagagcccaatatgttgaaagagaaatctatca

SEQ ID NO: 42149 - DNA, 1711 bp, Setaria italica
  Peptide Sequence Number=SeqID_108123
accggagagatggcatataacgtacgggttggtcacagaagcgcccctttggtgcttgactgggccatcgatgtttccagggatggagcctgcgtcagttccaacagctatcgcgtcaccgtgagagatgaccaggggtatctctgcaattgctccaagggatacaaagggaatccatacgtcaaggatggctgcaagaatatcgacgaatgcgaatctccagaattatatccttgtccaagtggctccaattgcaaggacacagaaggtagctacatgtgtccatgcaaatttggcctaagaggaaaggactgtcgtcccatatttcccgcgcctgctgctgcagtactagcaaccactgtcgcaagcctatttctggcgctcctactctggtccattcacaaggatcgaaagcggcgaatcaagacagttttcttcgaccaaaacgggggtaaaatactgaagggtgcagctggcatcaacatattcacagaaaagcagctgatcaagttcacaaaccactacgacaccctcatcggaagaggtgccttcggcatggtgttcatgggaaccactgacgaagagcagcgagttgcggttaaacggtccatcatagaagacaaggaacttcatggaagagggaaccttcagcacggggaggacattgtgaacgagatcaccttccagttccggaacagccacccaaacctggtccggcttgtcgggtgttgcttggagacaaatatccctgtgttggtcttcgagttcatcagtaacgggaacctctataacctgctgcatgtttcaacgcataaggttgtcccgctacggacacgcatcaagattgccatcggatctgcagaagctctggcctatatccactcgcatggtgatcacgactgcgtcgtccacggtgatgtcaagtctgccaacatcctcctagatgataacctcatgcccaaggtctccgatttcggatcgtccaagcttttgtcgattgataggtatgccagagctgtggccgcagatatgagctacgtggatccagtgtatatgaagacggaacgttttgtgaagaagagtgacgtctacagctttggcatggttctccttgagctgatcacccggaagactgtcaagtatggcaaaagtaaaataaatagcctccccatggactttgtcaggtgttgtaaggagatgggcagcggacgggagatgtacgacatagccatttcatctcatggcgacactcaatgtcatcactgcatagattgccttgacaagatcggcgctctggcggttcggtgtctcaaggaagatgtggatgagagaccgacaatggcagaggttgtggatgaattgaagctagcgtcagaggcagtggagaaatgcaagcatcatgtgaacttaatagcatacgatcgctcatgttatttggaggtatgttaaagtcatgtacatattggtgaagacagcaatgcaagcatgcttggaaggctcaagctatagctactttttagtactatcttgaaccgtagattacatcactatatataaaactacttgtccagcttgtatggatttatgcacgcaagtgtactatattttctgtattggaaagggtgagatagttagtcagctactttattgtatcccgtaatttcataattcagaaaatatattatgtttggcctatgtttttttaaaaaaa

SEQ ID NO: 42150 - DNA, 478 bp, Setaria italica
  Peptide Sequence Number=SeqID_108124
ttgagcaatataataaaaggagcacacagcaaattgggctttaaatggagtttacaacatgacatatacatatactgcaaagagatgacaactaatgtagtgtaattattgaccaaacagtgtttgcattagttgtcagctcaactgatggcaaaataccactgctgacatggaaccaaactaagagctgagacaacatggggagaggataacctattgcaatcaatccgcttttcttgtttgttagctcaagtgatggcaaatattattaccaaacagttggcataatatgagttctccatatgaattgaatttgtattcaatgcactaaccactaagtgaactatcttaactctcttaaggattttaccaaattggtcaatattgctcctgaaatccattagttttagaaactttagtaacaagtattggagtcagtcggaatcaggtagcatatcagagtcctcacatcaaggac

SEQ ID NO: 42151 - DNA, 794 bp, Setaria italica
  misc_feature (720)..(794): n is a, c, g, or t
  Peptide Sequence Number=SeqID_108125
ggactgcagcccctccgtcctcgcccccagccgcgaccgcttcgactccctcaccgacgaaggcgacaacggatacggcccgcagcgctctattgaaggatggacaattcttgtctgtggagttaaagaagatgcagaagaagaagatctgcacaacgttttcggtgaatttggtcgtgtcaaggacttgcatttgaatctagaacgccgcactggatatgccaagggatatgcgctgattgaatatgaaagctttgaggaagcacaggctgcgatcagagcaatgaatgggactcagctgttgacaaagactgtctatgttgattgggcattcagcagaggtcctataaagaacgccatgagcacaaggccaccacgcccaagatccaggactccaccgcgcaggcttaatgccttgatgctgacgccatattgagtggggagtggtggctagggttatgtgtcagttctaactggttatgtttgggcgatgagcagcagctaaacaatgtgaaagtgtcttttgtaacctgaacctcgactctgttaggcttcttgtatctgtgcttagcttgttcagctttagctctgaaacttggggaggctgctagactctgctgacttaaccatgcgcccatgccaaaggttgtctggtgtgtaagatcagtgtcacgacggtaaggaggtttgttgggtgtgctttaggaaaacgtaaaaacnnnnnnnnnnnnnnnnnnnnnnnnnnnnnnnnnnnnnnnnnnnnnnnnnnnnnnnnnnnnnnnnnnnnnnnnnnn

SEQ ID NO: 42152 - DNA, 497 bp, Setaria italica
  Peptide Sequence Number=SeqID_108126
ttattcttctgttattgcataacataaatagtgcccagaaagtgccgcgtgcaaattctggaacacacttcttactttgtagctatttttgaagttactctattgtgtaaggtgacattgttcccttgaagtgtgataaattatggttatgaggttcgacctaatcagtttcttatgtttttcacaggccaccacgcccaagatccaggactccaccgcgcaggcttaatgccttgatgctgacgccatattgagtggggagtggtggctagggttatgtgtcagttctaactggttatgtttgggcgatgagcagcagctaaacaatgtgaaagtgtcttttgtaacctgaacctcgactctgttaggcttcttgtatctgtgcttagcttgttcagctttagctctgaaacttggggaggctgctagactctgctgacttaaccatgcgcccatgccaaaggttgtacagaaaacttaaaaaaaaaaaaaaaaaa

SEQ ID NO: 42153 - DNA, 709 bp, Setaria italica
  Peptide Sequence Number=SeqID_108127
gttcactgtcactttacctcttgttctaattgagaattttttattaactcttagctaaggaaggatggacaattcttgtctgtggagttaaagaagatgcagaagaagaagatctgcacaacgttttcggtgaatttggtcgtgtcaaggacttgcatttgaatctagaacgccgcactggatatgccaaggtaaattttgtagctttactctgagtctaaaaagctcgttcaatttgttaaaattctataccatcatctaacacacatcaaagataaaatttgtattagtaatgctagacatgatagcagaattgtttttcttagggtacctttaacggagtcgaataataattggaatcaaagttatgtttgcttcgtccttcaggatcttggtttttactttcgagatatttatacgaaacaatgctcattaagtattaagtgttcattagcatcctttaaccatgtaagtttaggctttgttaacttgtcagggttggctttttttcttgttttactttgatctgaagacatgttttgcattggaaatattttacttcactatctggcttgattgaaatactattattgccttgcatacttctgaaaaatcatttgcttattcattttggcaaattttaaacagaacccatgtaagctaagcctagcgctaaattgtattattttccttcttccttgttgtactt

SEQ ID NO: 42154 - DNA, 619 bp, Setaria italica
  Peptide Sequence Number=SeqID_108128
atttcatcaatacaaactaaaatagaatacgattttccatgatctgaagggtaaaatatatgcaatgctgctgtgctatggagagcatagggtgcagttaattattgtactgaaaagtaaacatgggtcaagaggtttgtggaaacataacataaagagcacatatctgacattcatgacctgttatcttatataacttctgtatccttgattttatggatatgaagttctcaagttatgtttacagtgttggcgctttttgtttctgtattaatttccataagaaattatgagtgtactaatagacatgtgcatggtatttttctgcaatctgcagttctttttttcaggcattactcatataggagagttcttattatttattcttgtcaatcaatcatcttaaatcaacttgaacccacactagcatggaattttttgttcctgttgcaccaaaggtagcacctcagattaggccttcctatgccttgcttttgtggattgggactggcaatagtctgctttttttcccagttctactgtgtctcttcttttatgttggtaataccaaatccgtaccgtaaagaaaataaaactaaaagaaaaagtaaaaataaaa

SEQ ID NO: 42155 - DNA, 451 bp, Setaria italica
  Peptide Sequence Number=SeqID_108129
aagcacttgtctgtccgcttgactcaatggctgtaacttggtattgctcgaaatggaaaggtatatcgattgtgacctctattgtagtatctgatgtaagctgttgaagggtcgaaccttgcaaagtgctactgcagaaaaccctattcaccatagaagctgcatcccacagcaaatcatgtcaatgatatcctgagaacttatcattctgcgcctccacaagtggcgatccctccagcttacaggagaggaggcgaatacagcagccgttgggctcctcgtcgacgcggacgagcaggacggggcagacctcaagcgcgaagaagcggaagcggtatacgtagcatcggaaggtagagtcgtcgacgcgctcgatgcgctccgcgtccagcaccgagtactggctcgccggcaagctcatgtactccgcgagggggcgggctagctgctg

SEQ ID NO: 42156 - DNA, 847 bp, Setaria italica
  Peptide Sequence Number=SeqID_108130
tgcctactggaggcactgtgcagcttcatatttcgccagtgccaagtggtttccttgaagaatcaccagaagcccaagcttggtagtctttaacaagctgattcagaaaccttggaagcatgactccgagcaactgctcaagcacttgtctgccgcttgactcaatggctgtaactggtattgctcgaaatggaaaaggtatatcgattgtgacctctattgtagtatctgatgtaagctgttgaagggtcgaaccttgcaaagtgctactgcagaaaaccctattcaccatagaagctgagaacttatcattctgcgcctccacaagtggcgatccctccagcttacaggagaggaggcgaatacagcagccgttgggctcctcgtcgacgcggacgagcaggacggggcagacctcaagcgcgaagaagcggaagcggtatacgtagcatcggaaggtagagtcgtcgacgcgctcgatgcgctccgcgtccagcaccgagtactggctcgccggcaagctcatgtactccgcgagggggcgggctagctgctggacggagacggactctgagcggcgggcgacgaaccgcgccttgggggcggacgaagaggaggagacggcggatgacgacgacgacgacgactgcgaggaggcgcggacgacggcgcgggagcggcggaacgcggcggggaccgggggcggcgagcggagggacgcagccatttgggcgcgcgctgtgtgactgtgtcgcgtgcgtggccggcgtcggtcgccggtgagtggctgcgggcggttgcttcccccgggggacctgctgagctaggaaatggaggtctcgatctt

SEQ ID NO: 42157 - DNA, 666 bp, Setaria italica
  Peptide Sequence Number=SeqID_108131
taagaacactaaatagttcattcgatgatacaggcagctgcattgaaacctttgtttgaatcaaatccagaagctcaactgccaagctcttgcatatgccattggcaacgaggcgtaccctggcttacacatccatgatgatagtgctgttaaaattgatgaaccagtgacaccctccacaacaacatcggacaaagacaaaattgtgctggcatcatccacagtcagtttattccagaatgcggcgagatggtctctattcttgggaaaatccttgtctactttcagggttcggcgatgaacacgtgtatgccgccgaaagttgattgaagaacagaattctcttgaacacttggtacacttgtccaactgcaccttcggaggtgagaacaacggccaccctggaagatcatttgcctttgcagcagcctgagcaatcgcagcgacggcgtccgggaccttcatggattggatttggctggacgtggagatgatgtccctcgctgtttctgcattgtccttggtggtgacatgactggattttctagatgcattcatctccaactgtcggatgctcgtcaccggcgaagcgcccgacgaagaactggccaagggcggccgctcgacctgtcgtcgccggctcgccgctaggaaagggaggccgag

SEQ ID NO: 42158 - DNA, 1338 bp, Setaria italica
  Peptide Sequence Number=SeqID_108132
gccaccgtgtccctgcgcctcgcgcgcccctcgtcctcgtcccgccgccgcctcgaggcctcgttccgggcgctctcggccggccaccgcttcgccgggaggccccgccgcgtcgtcgccgccttcgcgggggaggaaaccgagggttcaggggtgggtgatgagaaagataacagcaaggaggaaataaagccagaggaggctcaggaagcttggaaggtaatgctggagcagttcaaggccgaggccctgcggatgcaggccctgtcagtgcaggcctatgatgtctactccaagaggacaagggaggtgctgttggaggcctctgagaagctgaagatacaggccgacaaagcacagaaggacctgagcgtgatcgcgtcggaggttggtcaggagggacaagaatatctaacgatggcagcccagaactccccggactcgatcaaggacatcacgacgacgttcagggctcttggaaagttgaattggccatcagagtatgaggattatcatgtgggcattcccttcggtacctttcttactgttgggggtttccttaacttcatgttgactggaagtacctctgcaattcgctttggtattgttcttggctttgcattgttggctctgggtatctcaagtttgagatcacaaagacaaggaggacgtcggcctcgtcttctgttgaaagggcaagctgcaattgctactatcatcttcttcagggagttttcagttctactccagtatggctggttcccaaaaattttcatggtcctcctcagtggggtggtggcagccttttacttttatcgcatggcgactggtgcccccaaagatctaagcagcaagagtgattctgtgaactaatgaactgggatgaatcagatgatcacccggaaacttgggcttggaagattatggccctctgctttcgatttccctcagcgttcaattcaggcaagctcggtttgtctctagtgtcttaggtgtcactgcacagtgacacatggattcagaagaactgcctgcttactcggcctctctgccacaaatcgttgctttactcatgtaatatagatgataagcctgagcaacattaataaacgacctccaaaggtcatgatgtagctagctgttcagtttgtctgttgtttattgcatggggaaatagttgtgctgtaacgcgttcaatgttttagaggaaactatcaagccgtattctttttgtttcttgcactcagttatatctggtggatgatatggaacccttcctgctactaaaaattccctttcaaaaacctaaaaaacgaagactagaccaacggacgacac

SEQ ID NO: 42159 - DNA, 1594 bp, Setaria italica
  Peptide Sequence Number=SeqID_108133
tttaataagtaattctagttttacgatccaaaaaggttactaatgcttcaaccaacaatttaacaaggctcagctgtgtgcatcctagttgatacatatgtcgggagttaatacttctatcatctaaagactacacaactttgaaattgaaatggcaaaacaaaacatacgggtcgagaaaacagggccaaaacatgcgtctattagccaaagcatagcacggatgtccaattacgtctagaaacaacaaggactagcattctacaattacgtctgcaaggtaggctgcagactagtcgggatgccaatcaggcgcccagcaaagctgagcaagggctctctgtggcagggaactgaaactcttctacccagtcagctgccgatctatcactgccgtagcatgtcccgtagctgaagcacctgttgccgttgttctggagggagcatgttgatctgctcagcagacatgcccaggacttgctggacgagcatcttctccatctcgggcgtcagaggtgcttgtcctgcctggataccaccaattccttgggccatttgtccgggcaacccgggtaactgtccagggaaatgggagcctgcagcaggcgcttctgggccccgtccccacggagctgacctatcaacttgcatgggcgttgtgctttgagtattgtaatgtgaactagccgggtatagctgtggtggtggctggctaggcaatggtggttggccagcaaggaaagaagtttgagggttcccgcctggctgcaaagtttgagggttcccgcctggatgaaacatctgttgttgtaaaatgtgctgaggagcatttccatgagtcaaaccaaatgaatttggcacttgcggatgcatctgatgtgaaaaggactgcatggactgtggcctaggcatctggggcaaaggaggttggaactgttgattaaacattccaggattttgcaaaggttgctgtggctgactatgaactataggcatatgtgatggaagattagaatactgcggaggagcatgaggtagggtcattggatgctgagatgactgaggaatcgatgaaggcatctgatgaataggatatccttttgcttgtgctgcttgtggtggatttgctgacatagtaggaaggtccatggttgatcccacattagatggaccagatggaaatggggtagaatgttgagcaacactctgctggttagcaggtaatagtggtggaggcaagctgacatgatctggcgctgtagctttaactgacgaaggtgctgtcggcgctgctgtgggttggactgtgtctgaaggttgtgcagttttaggcgttttcaccattccaagtactacttgtgcccgaaagagcgcacgggtgacgtccgggttgtcgacgagcatgcggcgcaccgtctcctggtcgtggtcgatcaaggtcttcatctttgacatcatgtcgtacatctcggaacgggacatggcgttgacttgggcccaagtaccttcgcccgccgccgcctgcttggccgccatggagggtgggagcgcggcagcggccggagattacgcgacggcgacggagatggggcgg

SEQ ID NO: 42160 - DNA, 513 bp, Setaria italica
  Peptide Sequence Number=SeqID_108134
cttaagatcagatataaactccaaagcaaccaaccagccgttccatcactccagcaactattagccttagtctcctatgaatttcagaagcaagagcatcaccaccgtgcttgagcctttccaagttgctatataatttgtgcaagaccttgtctggagcttcatcaagcagatcaaacacctgagcatggttgagaagcttacggtatgtgacaattaagttacgtcccagctggccaccgctttttgtgttgataaaaacaataacagggcaagtgggtatctgagaaacatgctccactggagactctggcacgaaaatataagttgggatgtagaattctttcagcatgttatttctgtcaacgttgttctccattgaaatctgcaacctgggggtggcagggagaatccgaatcgcttggggggacggcgcggcgcggaggccctaaaagcgagcgccggctttgggggcttcggtttcgggggtcgtagtccgtcgtagtcggtaaa

SEQ ID NO: 42161 - DNA, 496 bp, Setaria italica
  misc_feature (432)..(432): n is a, c, g, or t
  Peptide Sequence Number=SeqID_108135
atgcaaactcatgaataggccaagatgaaaactgttaagtggattcatattaataatttttaatccttatccatgcaaccatgctactaggttttcttttcagaacacatggaagtagcagtactattcatgagctatggaattattgtgtttatttcatcatggtaattagaatggctattgatgatctacatgactggctggttgtggttgttttgtcctggtgctgttgggccatgcatatttctagatttgaactatactgctatatttgaagtaatacagttggcacttggcacgtgaccaagttaatcgaatgtggattgtcaaattgcaatttctaaagcactatagctcaaatagtgccgaaagaacacttgaggcagttagtgaaaggaggcggttaactggtaagaggcgataagtcccctntgtattttattgtgttaggctgggtggaggtgaggctaggtcaccttctgttttcacattttca

SEQ ID NO: 42162 - DNA, 432 bp, Setaria italica
  misc_feature (408)..(408): n is a, c, g, or t
  Peptide Sequence Number=SeqID_108136
aaccgggaacaataggaggcaagcatggctgacaaattacttgctctgatatgacgtcaaatgctaaactttctgtagcatatttatgtacgtgtaacttgagaacatgacaaacaatcttctaaaccatgttaaacaagattccctattgtttcccaatacagccattgatagatgccaacttatatattggcagcaaccagcaagattccctgtggagtcatataaattaaatacatgataaaatcaggagcttcatctttttcgacaaaaaaaaagaagagaggaacttcatcttgaacttacagagccacagttgaccaccaacgttctatttaagttgagtctctaaacccagatggcagaaagaacgctttctctgtggaaatgtgaatatcattggaaatntgaagtgttatacttaccaaaccc

SEQ ID NO: 42163 - DNA, 719 bp, Setaria italica
  Peptide Sequence Number=SeqID_108137
aaccgggaacaataggaggcaagcatggctgacaaattacttgctctgatatgacgtcaaatgctaaactttctgtagcatatttatgtacgtggaagttgcaatagtgaaaaacaatcttctaaaccaaacccactgacttctgtgtgcagccattgcttcataacttctggacggactactgttaactagtgtatagattggttgctttgaacttgaggagatcaacgaagatagccaaatgtcaaccggaccactgtacttgcgaagaatattcaggcttgcaagttcccatgcttcaatgtttccttgcccgttcacatggagcaacttgcatatgccttgatgaacatcttggtggtttgggtggcctgatactccgtatgaatcaaatgtcacgatcgtgtcgatggcccaaagttggacatgctccatagtaagttctgctagcagtccatggtcccatttctcatgaaatccatcctgcaattttgggtggtccaagactttaacttgttcacgtggaatcttaagggtatcacaggcatggtacaattcttcttttcgagtaactccaagaccatcagcgttaccttgagacatgcacaaaacgtgaatattgtgaccttttgacttgaggaacagaatagttggagtgaagaacatggactcgtcgtcggggtgggcgacgacgagcagccgcccacggctcctctgtc

SEQ ID NO: 42164 - DNA, 657 bp, Setaria italica
  Peptide Sequence Number=SeqID_108138
ttttttttagtcgtactgcagtactgaccgactgtattacaactttaagaacctacgcaaacagtacaaagtttgggctcaaaagttctatggacatcaacctatgaacactggctatggataatgtacagtaaaatcaattgacacaaataataacagacacgaaatcaccaggattcctaagttcttgtgtatcgtccatagtgttcctgaaatccctgctcaggtggcaccaaacgttgttcttcagaagcagctttgcttatagttgcatgtgcagaaccgggaacaataggaggcaagcatggctgacaaattacttgctctgatatgacgtcaaatgctaaactttctgtagcatatttatgtacgtgtaacttgagaacatgacaaacaatcttctaaaccatgttaaacaagattccctattgtttcccaatacagccattgatagatgccaacttatatattggcagcaaccagcaagattccagagccacagttgaccaccaacgttctatttaagttgagtctctaaacccagatggcagaaagaacgctttctctgtggaaatgtgaatatcattggaaatatgaagtgtttatacttaccaaacccactgacttcttgttgttgtactaagtaccaattagaca

SEQ ID NO: 42165 - DNA, 525 bp, Setaria italica
  Peptide Sequence Number=SeqID_108139
cgcgcaccaggtttggataaaatctgtattgcgatctttaacttaccaaaaatgaagtgcaatgcttgctggcgggaattggttgctggaagcaattggaagggcaagctataaccaccacttgcggtcatcttttatgtactgaggatgccaagaaaatattgagtaatgatggtgcatgtccaatatgtgatcaagttctgtcgaaaagccatatgaaaccaatggatgtagatcccagtgatgattggacaaatatggcaatggctgggatttctccacaaatactcatgaaaagtgcatacagaagtgtcatgttttacattggacaaaaggaactggagatgcagtacaagatgaaccatatttgttggtcaatgcagacagaagattgaacttatgcagggaaagtttacggagaagctagaagaactgcacgctgcataccaaaagatgggtaaaaaagtgccagttgatggaacaggaaattgaaaagcctcaccaaggataagcaagagcttcaag

SEQ ID NO: 42166 - DNA, 409 bp, Setaria italica
  Peptide Sequence Number=SeqID_108140
gctttgcaattcccaatttgattgcctcatgtttgactccagtaacaagcccagcaagtcatcattatttgtttcgccatttttcatagccttctctcttttcccaattatttcacgcagaattttgtggatctctcgattaatttctctcatccttctgttatttttggtgggcaagaacctgcatatgttcaacagtgttataacagaacaaattcttgatttctaccgcataacttttgccccaccttttataccctacttagcttgaataatggggttagaaataaaaatgtaaatgtagttcaaaaatattcttgaactgggaaaggtcgtctctgtatctcttcctttactagaaataattcaggtcattcccttaaaatatggtcaagtaattaataaaaat

SEQ ID NO: 42167 - DNA, 430 bp, Setaria italica
  Peptide Sequence Number=SeqID_108141
atctgtttcatatgagagagcaaatttggcgagaggaccttgctcatatgctggatattcatgttgtgggacagaatcttgagacctttcatcttaccctgatttaatctagccgctcatactcttctagcatgtcaatgacatccttgacaggccagccagccagacaacatagagaagaggtaacgtaagcttgagaataaagcttcattcagacagtctgcagaagctcaggctatagataggtaggcaatagctcagtttctgcaggagcttcattcatgaatcttgtccataaagcctgacacatattccatgcctgctttagagtgaccatccatttttgtaccaatcacaacaccaacagaaatactttagttaaagcttgtgctagttgtgcctgctcaaatgcagcctggttaatactgtt

SEQ ID NO: 42168 - DNA, 412 bp, Setaria italica
  Peptide Sequence Number=SeqID_108142
agaccctaggtgtttggtagcgttggagatgccgtcagagaaccttgcaggattgaactcgctcgcgtcttttccccaaatgtccggatcatggtgaatgaagagaatgggcagcagaaggttcactcctgcagggtatctgatgccgccgagctccatgtccttgtatgttcttcttgttagaaaggttgccggcgggtacaacctaaggacctcgtacaaaatcatggttacctgcgcatacatggcacaagcaggattattgttgcttcagttatacagtatggaaacatgctttgtccacttctcctcctaaaaggttccagtttaacaccgatctgatttcttaccacagcatgctagcatattcacggattctgtcatggattcacggtaacaatgcatcattcat

SEQ ID NO: 42169 - DNA, 328 bp, Setaria italica
  Peptide Sequence Number=SeqID_108143
ttagtgataagcatagcaggacgtcagtgttgcaagcatgaggtggtcttggagtcgccgcgcttggagccgcagagggaatcactgcgctcagagccacaacggatcggagatcagcgacgctgtggtcacgctccaaactatctgcgtagctgctaaatttgaaggctctacagtatataaaaacaccaatataacatctcattgggaaaaacaagtgtacatcagcaaatcaatgatcatattagtaaccattaaattccttactcaaaatctcacttgaagatatgcaattgtatgaccatagcttccttcaagatcttaaaca

SEQ ID NO: 42170 - DNA, 662 bp, Setaria italica
  misc_feature (494)..(494): n is a, c, g, or t
  Peptide Sequence Number=SeqID_108144
taaagtacaactttgacattaaaaagcttcagtcatttctgattttccttcttcgcaggcatttaccaacaaagtccttgctgatagtgataactggatatgcgacttgattagaatcactaattaagaaactgtgcttatgacctgttagtagtaataagaatggaactataacttcatgacaagaacaaaagcattcaaaggctgggtggggggctacatacgcatagcaggacgtcagtgttgcaagcatgaggtggtcttggagtcgccgcgcttggagccgcagagggaatcactgcgctcagagccacaacggatcggagatcagcgacgctgtggtcacgctccaaactatctgcgtagctgctaaatttgaaggctctacagtatataaaaacacctgcagatgttgcattgtactattcagtaccacaactaaaagcaggagcttttgaaaagaacctgagatcaagaccggagctttttaaccngattaccaatataacatctcattgggaaaaacagtgtacatcagcaaatcaatgatcatatagtaagcaataaattccttaactcaaaaatctacagaggagttgaatatctaaagttaacttccagaaatttagaaaacacaataagaaaaatgatagctagacaac

SEQ ID NO: 42171 - DNA, 458 bp, Setaria italica
  Peptide Sequence Number=SeqID_108145
tcttggtttggactcagtcgcactagtagtcgcactagttcgcactagtctcttgcccgctcttgccattccgggtgcatgcttagcacaacgagagtccaagtaagcaggactgatgttgtctccataccggcaaagtaaatagcttgcattcctcaatcacatcttctgttgtcaatcccaactttgcattcccatttgattgcttcatgttagactccagcaataagcccagcaagtcatcattatttgtttcgccatttttcatggccttctctcttttcccaattatctcatgcagaattgtgcggatctcccgatcaatttctctcatccttctgttatttttggtgggcaaaaaccatagcctgggataaatattgtttggaaagactgtacaaggcgttcagctagctctccttgcagctggaaattttcctccctcctgatagctgcta

SEQ ID NO: 42172 - DNA, 1040 bp, Setaria italica
  Peptide Sequence Number=SeqID_108146
tttaacgaagaaccaagtatatgctcatcaagtactgaagtatacggtaatactacaatcaaagtaaggaagaaccaagcggcactatgtatttatttctggtgaatcaaaaaatgaagttctagaagatgcagatgaagaggcacaccgatagaaattcctttgcagctacttctttatcgttaaagtacaactttgacattaaaaaagcttcagtcatttctgattttccttcttcgcaggcatttaccaacaaagtccttgctgatagtgataactggatatgcgacttgattagaatccctaattaagaaactgtgcttatgacgcatagcaggacgtcagtgttgcaagcatgaggtggtcttggagtcgccgcgcttggagccgcagagggaatcactgcgctcagagccacaacggatcggagatcagcgacgctgtggtcacgctccaaactatctgcgtagctgctaaatttgaaggctctacagtatataaaaacacctcacttgaagatatgcaattgtatgaccatagcttccttcaagatcttaaacaatccagggaaaccaatagttagaggacatttatgagcaggacaaatacgaaaaaaagggcaatgcaattctctcgcttgcctgttgtgatttgccaatgtatagaagatactataagcacaaaggaagcatacactaaaatattggtttttcttgcagccctagaaaaatataggttcattctaatttgagaggatacgagtatggagaaaaatggcattttttcatatggataacaatgcccccctagctgtatcaaataccatgttaaatcgactaaaatcaaccatggaatgagccaattgccaccacatgtacgttcttttcaagtggcagagatttgcacatcataattcttttaaatgctgcacttcacaccttgttacctttgacttctgtgagtcctaagtcatgcctgcacaagacatttggcacgccatgtgctgttgtgatggcagaaaattccaaattgtcttagta

SEQ ID NO: 42173 - DNA, 980 bp, Setaria italica
  misc_feature (234)..(234): n is a, c, g, or t
  Peptide Sequence Number=SeqID_108147
tcctaacgtatttgtagtacttttgtcctattcctagtctattgtattctaccgttggttcaaagcttcttcagcctgattggagcaccatgctgagggtgcaaagttatcacagtgtacggcgcgtgagtgtaggacggcgagagctcaaatgagaagcgctggagtatggtgcacagcgccatcttcgcttccagcaacgcgaagttctggccaatgcagatccggggaccncctccaaatgggaagaaggcggcttggtgcttggtggcattggaaatgccgtcggcgaacctctctggattgaacatgcctgcgtcttttccccagatgttgggatcatggtgaatgaagattatgggcaggagaaggttcacgcctgctggatatttgatgccaccgagctccattcccttgtaagttcttctgcttaataggactacaggtgggtacaatctgaggacctcgtacaaaatcatggttacaatcttcaagcggttcaagctctcaaagtctggtctagctcttccgaagtggttcaatacttcttctcttgcttgctcttgccattctgggtgcatgcttagcacaacgagagtccaagtaagcaggactgatgttgtctccataccagcaaagtaaaagagcttgcattcctcaatcacatgttctgttgtcaatcctagctttgcattcccatttgattgcctcatgtttgactccagtaacaagcccagcaagtcatcattatttgtttcgccatttttcatagccttctctcttttcccaattatttcacgcagaattttgtggatctctcgattaatttctctcatccttctgttatttttggtgggcaagaaccagtagcctgggataaatattgcttgaaatgattgtataaggcgttcagctagctctccttgaagctggaaaattctcctgccctacctagaataagactagactagaccaaaata

SEQ ID NO: 42174 - DNA, 1760 bp, Setaria italica
  Peptide Sequence Number=SeqID_108148
ttaatttaagggttacttaagttacttaagttaaaggttttacttaacttaccttgtctagggttattcttgtattgtccgtccgtagtcttcctattgttccttgtatgttcttcttgttagaaaggttgccggcgggtacaacctaaggacctcgtacaaaatcatggttacctgcgcatacatggcacaagcaggattattgttgcttcagttatacagtatggaaacatgctttgtccacttctcctcctaaaaggttccagtttaacaccgatctgatttcttaccacagcatgctagcatattcacggattctgtcatggattcacggtaacaatgcatcattcatatttaagatttattttctactttctagaagtaaaaccgtactctcttaatgaaatgacacacagctctcctatgttgttcgagaaaaaaaactgtagttctctatcataatttctgaagtttattagctagcatcagatagaaggaaataaacatctcagaacacgtataataaatccttaatctcctttcgataaagaatgaaatggatatcagtaatctcttaaatcatctacaattttatatttttacgataaaatagagggcaacattgattgtacttacagtcttcaggcggctcaagctatcaaaatctggtttggctcttccaaagtggctcagtacttcttctcttgcccgctcttgccattccgggtgcatgcttagcacaacgagagtccaagtaagcaggactgatgttgtctccataccggcaaagtaaaatagcttgcattcctcaatcacatcttctgttgtcaatcccaactttgcattcccatttgattgcttcatgttagactccagcaataagcccagcaagtcatcattatttgtttcgccatttttcatggccttctctcttttcccaattatctcatgcagaattgtgcggatctcccgatcaatttctctcatccttctgttatttttggtgggcaaaaacctgcatatgttcaaaagtattatgtaatgacaatttctcggttgctactgtaaaatttgaacatgaaaaataaaggagaattctgttatgcagtccttttgttgtcttttctttcctatggaacttgagcaatttaggagcggtagaaacgttaatatttcttaaaatattcttgtataaagaaacatcattatgtacctcatccttaatataaagtgataaacattgcatggacatgagtaattactaaaatattcatatgaagaaacatgtaagcagctttcaaatgctcggatgtgcaacttcaaataaataaaagcttgctgcagtttaggggaaaagaagaacagaccaatagcctgggataaatattgtttggaaagactgtacaaggcgttcagctagctctccttgcagctggaaaattttcctcccctcctgatagctgctaccaaatgcggtttttgagataacatctcccgtaagattctggaactctggccagacgtctatctctgaagatccctcagaaggcattgaattctcccatctagtaatggtttcgtcgcaacacgtagaaaatacaggcagcatcctctgcaaataagacatcaatgacactttattttctcatgatgaaatgcaggattgagaattctcctgtgctttgcccacttctcgccttcatggtttacaaccccattggctagcaacttcccaatacgggtactccttggtttaccga

SEQ ID NO: 42175 - DNA, 3631 bp, Setaria italica
  Peptide Sequence Number=SeqID_108149
taacaaaataacgtaataacgaaagaataaccttaattaaagacaacaaagggaacgcatacactaaaatattggttttcttgcagccctagaaaaatataggttcattctaatttgagaggatacgagtatggagaaaaatggcattttttcatatggataacaatgcccccctagctgtatcaaataccatgttaaatcgactaaaatcaaccatggaatgagccaattgccaccacatgtacgttcttttcaagtggcagagatttgcacatcataattcttttaaatgctgcacttcacaccttgttacctttgacttctgtgagtcctaagtcatgcctgcacaagacatttggaattttctgccatcacacagcacatggcgtgccaaaatcaggaactcataggagtcaggctagctagccagccactgcttcattttcttatattcttactacttgatccatcttgggtgtcgtgtaagaaatcgtctcataatgtgagtgctagcaatatgaacttaggaaagtgaagtatccatccggtgatcaatggagtaattgtcagttagctagaccaacctagcacacatatcacaatgcatcctaaactctaatcttgacatctgcaactaatatatagaaaacaaagaaaatagtgggaaacaggactcaccaacgtcaatttggctgtagtgcttgcttggcaatttcttcaaccatagattaaaaatcttcaaaatcataagcctctaaaaaggtaaatgactatgaaaaaaattgcaagagagtgaatccaactgtccatccgtaagaaatacaagtgcattataattttattttagctgttctacagttaatggcttcttttggttgaataaaatgtacatagcaggcacccttttagtgaattctggcagctatgggatagtggtatcttacagtgatgaagacagactacaattcacttggatgataactgaagcatacaaggggcggcatttgatgttttattgtgcccacagctgggctagacctcttgaatctaacagtgtgaaaatgtgcaaatacattgaaagaagagaatagattagagcccattgttcaggaggtgttcaccattgcaacgaagattgcaccgaactggcaggcctacaggctgcagtgaattaacaaaaaatgaaattaccctcaaacataacaatctaccctcaaacctagctgctcaccaattggccggcggagcaagttctagatgaaatgtgcaggttcattgcatcacaacatcatccatcagagccgtaatgaggaggtacagttgtccctgactaatagaaccgaagagggctagtgttagttctactcaatttacagtagctgacatcactctgcaatatgccagtccctgttagatatatgggcttggcccatataaatgataattctgaaaaatctcaaaggcccattagcgtaagaggggtacaccatctattagtcccatattgctaatagatgagggtgttggggcttttcctccctatatatatatggaccacctccctcataaaaaagatgcgatatagactactatacgggaaggcccctaggttagggtatccctaaagtggtctgtactagttaggtttttgcttcctctcgctgctgcgccgccaccgtagtctactccatcccgattgtcggcgtgcaccggcgattgggagagcaggtctccggaaccgtcgtcttcagcgatcctgcaccgggagagggcgaataaggtttttgggaagcgctctgcgcgactactcgatcgcttcctccgcttcgtcaagttcttcgtcgactccttcaccacggctcgtctacctcttcgtcgctcgggcgtcactcatcgtcgcgaacaacgtcaggctgctgatcgtcgtcgcctgctgtacccggtagtcgtctagtagccggtcttcatcaagaaagaaacgtacgatctcttatctcaaattatatcttccatactagctattatgtgcagtctgatagcactgaatagtatggtagaatgtgtgattctatttgcaataatagacttgtctagatcttgcgtagacatgtctagtttaatctgctgtctgttcatcgtattcatgatttatttctggattaaattaaaactaaaagtgcttatatatccaacaattcatgatttatttctgaattaaattaaaactaaaagtgcttatatatccaacgattgagactttgccatccagcatgatcaccgtggtcaaagcttcttcagcctgattggagcaccatgctgagggtgcaaagttatcacagtgtacggcgcgtgagtgtaggacggcgagagctcaaatgagaagcgctggagtatggtgcacagcgccatcttcgcttccagcaacgcgaagttctggccaatgcagatccggggaccgcctccaaatgggaagaaggcggcttggtgcttggtggcattggaaatgccgtcggcgaacctctctggattgaacatgcctgcgtcttttccccagatgttgggatcatggtgaatgaagattatgggcaggagaaggttcacgcctgctggatatttgatgccaccgagctccattcccttgtaagttcttctgcttaataggactacaggtgggtacaatctgaggacctcgtacaaaatcatggttacaatcttcaagcggttcaagctctcaaagtctggtctagctcttccgaagtggttcaatacttcttctcttgcttgctcttgccattctgggtgcatgcttagcacaaaaaggaagaagtaccaaagtaaagacaaggaactagaatagttagtacaaaagagacttagacaattcctcaatcacatgttctgttgtcaatcctagctttgcattcccatttgattgcctcatgtttgactccagtaacaagcccagcaagtcatcattatttgtttcgccatttttcatagccttctctcttttcccaattatttcacgcagaattttgtggatctctcgattaatttctctcatccttctgttatttttggtgggcaagaaccagtagcctgggataaatattgcttgaaatgattgtataaggcgttcagctagctctccttgaagctggaaaattctcctgccctcctgatagctgctgccaaatgcggttcgtgagataacatcgccggtaagattctggaactcaggccagatgtctatctcagaagatccctcggaagacattgaattttcccatctgttaatcacatcgacgcaacaggtagcaaatacaggcagcatcttctttattttctcatggtggaatgcaggattgagaattctcctgtgctttgcccatttctcgccttcatgattcgcgaccccgtctcctagtaacttgccagcacggctaaactgttgtttgccaaagtggccaaacttgttagacaaaacctcttttactgattctgggtctggaatcatcaccctcggggttgggccaaaccaagtgaatgacacagtcccgttctcctttacgaccttgtggagcatcggcagcacgcgggggatgatgtcgtgacatccaagcgggagcgg

SEQ ID NO: 42176 - DNA, 923 bp, Setaria italica
  Peptide Sequence Number=SeqID_108150
cgttacagatctgaattctagaagacgtataattctacaaagaaaaaagcaagaatgttcatcataaataaaaatataaaactaactcatgttgatgacacaattcatggtggcgtatgatcaggcgaggtattggaggagatggttgtagccgccgtaatggtcctccgtcgtggccgcggccgccggtgcctgcacatcgacgccgccatcgagcttcacgtcgacgcagtcgagcttgacgtcgatgctgccgctgctcccaccaccggcgccggcgccgaccagacgccgtaggactcccgcgtcacctccagcagcgagtccctcaccctgtccgcctgcaccgccacctcgttgtcccgcctgacgacgcggaggacgttgaggacgagggtcttgtaggaggtgacgttgacgttggtgacgtcgaggccgagggcgttgacggcgtccatgaggcggacgaagcgaccgggcttgtgctcgcacagcacctgcaggaagaactcgttcgcctccacctgccgcacctccacctgcggctccatgtcgtgccccttatcctcctccgtcggcgctgctgcgggtacccgggccctcttgctcgccggcggctgctggaggctcgtgcgcggtgagtcgtcgttctccagccctaccaggctcgccggcggcgggtggtccaggagcacgtcgggggcgccgtccgccgggtcctccagctcgtcctgcaacgccttcacctggttctgcagccccacgatgtagtcgatcgcatctccgaggatcgaagcgcggtccatcttggtgatcttggggacgagcgacctgagcttgtagagcgcgttgttgagctttttgcctccgctttcgctccgccaccaggttcttgcagtgctgccgcttgccgtcgcccttgc

SEQ ID NO: 42177 - DNA, 466 bp, Setaria italica
  Peptide Sequence Number=SeqID_108151
gtagcaggcgccggcgccgaccccggcgccggatctcctcccgccgccccagctgccgccgtagctgcggccgccaccgccagatccggccccgccgcgggagccgaagcctcccccgccgccgccggaaccgcccttgacgaaggatccgtcggggccggtgacgtcgacggccttggtgcggccgtcgtcgccctccgtgacggagaactcgacctcctcgccctcggcgagggagcggaagccctcggacttgatcgacgactggtggacgaagaggtcctcgctgccgtcctcgggggagatgaagccgaagcccttggtgtcattgaaccacttcaccgtcccacgctgcctcgccgccgccgccatctccgcccgatcgctcgaaaccctaactgcctggtgctagggttagtttgatgggaggagaattttttttcccccgagctcgatcttatctgct

SEQ ID NO: 42178 - DNA, 578 bp, Setaria italica
  Peptide Sequence Number=SeqID_108152
ttttttttttggttcaatagctaatttcacattagctggcataaacaggtctcgaattaagtaacatacagcgaccgaggtgttacaactggtgtgcaggtcttatacataacacatttccacaaacagagcggttataacaatcataacacaggtcttataccatgcaaaccgaatccacatcaaccaacataaatattaatagataaacactgacaagctgttatcaaagacttagttttacttgccataaactgaaagcacttgtgttaacacattgccatagccagaccaacgctaacaaccccagggtacatggtcaatgatctcattgttctcacaaacatcatctgcaatagcaagtagtccaaggccaataccagcaatagagcagacgccatcaacaccgcctctggagcttctggtgtctcatggccccactcacagcttgaactctagcttcgacctgatctatcccttctcccgcacccgtttgccgccaatctttgagattccttggctctattggccattgctgtggttgcatctgctttgtgatcttttcgctgaatgcttgg

SEQ ID NO: 42179 - DNA, 500 bp, Setaria italica
  Peptide Sequence Number=SeqID_108153
ctcagccttgagaacttcttcaccacgctgggccataaccatggctctcttctcttcaccccgcctatggatgattgccttcttgttcttcatcttctcagcatattcagccttcttcttttcaagttcttcttccttctttttgagctgagcttctacgactgacttctttgtgttctcccatgaaagaataatggattgtttcttagcagccttgtgctctgctttcgccttctcgttctcttcccatgctttaatcaaagaggtcttcttttccgtttccaccttcgcgagagcaatgtctctgtcatttgagttccttggtgcgttcttctcagcagaagttttatcagccatcttgtcgacgacgacaagggccttggagtcaccagccggcggcccgggcgccgggacgacggccttcccctccgccacgtccttcgcggccggcgcctccgccttcttcgggccctccgctgccatcgcccagctctctctct

SEQ ID NO: 42180 - DNA, 284 bp, Setaria italica
  Peptide Sequence Number=SeqID_108154
cctgctcccacccccgccctcgccggaggccggagcacgccgccgcgcgcgagcctgcgcctgcgcttgccgcacacgggcggaagatggacaccgtggctccccgcctgagccgctcgtcgacacggtacgggcccgtcagcagcagcgccgcctccttcagcgggcccgtccggaagtggcgcaaggcctgggtgcccctcgccggcgccggcgccgccgggcccgggggaggggcttcacggggtggacaacaaggtggtgctgtttaggtggacgccggt

SEQ ID NO: 42181 - DNA, 723 bp, Setaria italica
  Peptide Sequence Number=SeqID_108155
cactcttagcttgatgatggtgatgcgctccgtgaagattgtagcgcttcgcacccagtatctttctctagatgtggttataaacctcatgacatgctttccctgcctgacgagtctgtacatctcgtcagttaacagaggggacgaggacaacaatatgtggcatgctgaacaactgggtcgcatggaatgcatcaaccagcatctgaagaaaataatactatcaggttatgtaatgaactgtatgtcacaggttaactttatccagttcttcgtattgaatgctagagtgcttcaattgatgaggttggagataccaccagtcatgcccgcagaatggattgagatgcagcctgagctactccagctcaacgatagagcttcaagtgatgctcagcttgatttttccactgacagtgccagatggttgtgttgccctgtaaatcttaagtgggtcagtgatttgtcaagagctgatcccttcttatcgagttctcggaactgggcatgatagccttctgaaagttattattgccaaacatcctttccaacttgagcatgtactcttctcttctgatcgtgttatcgagtttggatgcatgtactcttctcttcaagagatattgtgatttttgagcaaactatgttgtatctttgtgttggaatgtgataatgcttagtctattaagacactaaaaaaaaaaaaacttagagtacttgtct

SEQ ID NO: 42182 - DNA, 303 bp, Setaria italica
  Peptide Sequence Number=SeqID_108156
gcagcagcggggcacccctcctgcagtccgtccacagctctccaccgcgtggcgaggcaggcagcgagcgactcccctgtccctgaccccctctctgctcccccgtccgttccgcccgccgccgggcgcgcttgtgtcggtgtggttctcggttgatgcagcagcggggcctcgcccacaaccgccgctcccgcggcttctcccgctcccgcctcgccgtcgagggcgcctaaacgcacgaaccccccacgccaaccaacacacacacacaacacaagacacacacccgataggaaatccaga

SEQ ID NO: 42183 - DNA, 411 bp, Setaria italica
  misc_feature (282)..(282): n is a, c, g, or t
  Peptide Sequence Number=SeqID_108157
ttaagtaactaaaattaaccttttaactaaactaaagtaagtactaactaagagcacaataggctggcatacttggtatccagttttccttcatcatggagttgtagcatgagcaggcctcttcaacatttccttcatccacaaaacattggatcatatgactatatgtacaagagtctggcttgaagtgaactgaactttgcatttcttcaaacaataaaagtgctttcttcctgtcctggatcttcagcagattttcataacaatgttataaatgcccanactacaatactgtttttgtctcaaggcatcaaacacttccagagcctttactccctaccatccttgcctgcaaatgcttcataagtccactaagaattcaacaacaggcaagtccagctcagccagttt

SEQ ID NO: 42184 - DNA, 393 bp, Setaria italica
  Peptide Sequence Number=SeqID_108158
aaagatgttcctgtagttcagacaaaggaaactaaatccctttgcagaggaatgggctgagtctgactattactatgatgacatggatgagcttgaaaactccctgccttcagactttgtatctctaatcgatgtatggtataaagaccatgcactctactcgaaggtcatatggggaattccgaactcagacggtgccaatggatggttctataactgcccattccgggtagacttgtttcatcactcagctgaaaacaacgagaacaataatggagaggtattcctatcaaccatcagtgacttaccatcggtgccctcaatggagcaagaaaggaagatggaaaaactttggagggagctaaatgatggtataagttgagttggatcatt

SEQ ID NO: 42185 - DNA, 878 bp, Setaria italica
  Peptide Sequence Number=SeqID_108159
tacaaacaatttaagagaatgtgtatcccacagctgaaattttccagcagagaatattagtgtaggtaaaaactcgcatatatgactctccaagcaatgcatcgattcattaacaatccagcctgcattttactgcttggatacattcttacctgagcacagggcgttcattattgaggctgctgcatcatgctatcttcaactagcaagggatcgtcatggctgttgtgtccttcagaaatgtattgaacattcaaatgacgaacagaggaacgatttgttgagcaagattacatccagtgcccttaggctttcagaagatcagtatgggaactatgttattcagtttattcttggcctcaaaattgaatgggcaacagccagagtagtggatgagctggcgggtcacattggacatttgtctatgcaaaagagcggtagccacgttgtggagcattgcataatgcaggcaccacagctgatgtctgataggattgtcaacgaactcaagaatgatcctcgattgctgcagatcataattcatgagtatgggaactatgtgattcaaacagtacttagacattgccagggtgaacggcatgttgcctttgtcgaagctatcagaccgtacgctgctacactgcggagcaacatgtatgggaagagggttctctcaacgacatacttgaagaacaagcaccaccgatttggcttctgttaacctgccatttttgccaaatgtatcctcagggacagccagaatcttacagatataatgtatcttcgcaaaaaaattgcttggggggagcattcaccctctttagtgtgtcccaatatgtagaactagtagggtttcatctggctgtaatggtgattcg

SEQ ID NO: 42186 - DNA, 397 bp, Setaria italica
  Peptide Sequence Number=SeqID_108160
catacactacgcaatgctacaatacaccactgcatatgtatatatcttattaagctgcatgaatgaagcaacacacgattgatcatatactacataggattggagcacatatattcgctacccttattgcagcagccgcagcctaactaaaccaatagtacgaatgcattcgctccgggtagcactcagaccgacttcaccattccctggaaagtaggatctatcactcattgagcttcttctagtttcagagtcgatctgtttcagaacattgctctgatatcttgcatgctgacttgtccattcagggctcttaacctgcatgtttaacagtcatcggatgtcagtacggtctttcagatctggatttctgaatgctcatagatcaaattgatat

SEQ ID NO: 42187 - DNA, 1717 bp, Setaria italica
  Peptide Sequence Number=SeqID_108161
gtagcattgcgtagtgtatgtgcgtattgtacataggattggagcacatatattcgctacccttattgcagcagccgcagcctaactgtacaatacgcacatacactacgcaatgctacaatacaccactgcatatgtatatatcttattaagctgcatgaatgaagcaacacacgattgatcatatactacataggattggagcacatatattcgctacccttattgcagcagccgcagcctaactaaaccaatagtacgaatgcattcgctccgggtagcactcagaccgacttcaccattcccctggaaagtaggatctatcactcattgagcttcttctagtttcagagtcgatctgtttcagaacattgctctgatatcttgcatgctgacttgtccattcagggctcttaaccttttatgacacctgtgcgttccaagtaccggtcggtacagccagcccgcctccgttgccgtttgcatgacttgcaggttgcctcgtgacgaaaaagcatgcgccaatgacaatgtagcacagaaggagaaggatccccttcagatagtgtgacgctccatcctggagggtgaaggctgttactattactgagacgaacagagtgccggtctctagcagcttgaagtccagatccatttgaatacccgcgatccaagctacaatgacactcagtggcaccacaaacatggagatctgggtcgccgaccccaaagctactccaagagtaatgtccagcttgttcttgagagcaaaaatgatggccccagcgtgctctgccgcgttcccgacgattgggagcaggatgatgctgatgaagctcactgacaagccccaagattgtgaggtaggctcaatcgtgccgacgacgtactcggacagaatggcgatgagcacggtcttgaacgccagccagaagaacccactggcaaacccgatgacagcctcttcctgatcaacctcaccatcgtcgtcgatctcctgcggctcgaagagctgggtgtgcgtcttgagctggaagaagaggtaggcggcgtatgcgagcagcatgacgatgctgcaggcgcgtgagagctcgaggcccgtggtgtccgcggccacggagtgctcgccggcgcccaccgcgtagcgcagcatgagcggcagggactggcacagcgcgccgaggatgaggaggcccgtgctcacgtccgcttgtttcctgtcatatggctggtcgacgttgaggttgacgatgcccccgcagaagagggaggtgccgagcacgagcagcagattggagaggacggagccgaggagggagcacttgacgacctcgatcttgccctgcatgagcgcgaagagcgcgatgatgagctccgtggcgttgccgcacgtcgcattcaggaggccgcccacagtggggccagtgtatatcgcgatctgctcggtgaggaagctgacacgctcggcgagagggatgaggccgagtaagctgagcgcgaacacccacacctggccgaagtgcgcgtaccgcgcggcgatggcgagcggcacggcggggaagagcacggcgagcttggtgccgaggaagacctcctgcaggttggccagcaccggccgcagcggcgcgaacggcaccttgcgcaccagcgacgcgtccgacttcttgcgcagcgccgacgccgacatgctgtgcgccgtgcgggcgctcgccgagtg

SEQ ID NO: 42188 - DNA, 905 bp, Setaria italica
  Peptide Sequence Number=SeqID_108162
ttcgtcctactcccctccgttgtcgtgtctcagttttttaaccttatcacagttttaaacaatgctacattcagagtcaacaagcacttgtaaatatgtcaacatctgaaacacctttagcataaaaagtctggattcagtccagaaaatacagcaaggatatccattcttttctggttctagcagtcccactaagaaagataacgtaaatttatgagtatgaccacttgtccgaacgtaacatgcaagatcactcctccattgcgtcgctgccctcagcgacctcaaccttctgtttcagctgtgtgatctttgtggacagtacctcagtctgccccttggtgaagctgtatcccttcgaactaacataagttcttggattcggcaactggtggtttctcaagtattctgtcttccccttagttatcacacagacatccacgttgctgccactacccaagtcattgaagataccgccacggattgcatcgcatacaagttgtattccctcctcccttgtaagcccttctttgtacttcgattcaaacaccgacattgcagcaagcgatccagaacccatcgtggcaaaaggaagagtatctgtggagccatgcggataaacagtgtgtaggtgtggtccagtacaatccactccaccaagaacaagagcagcactgacatggccttgatacctaaacataattgcataagtaggtcaggtgtcacagaatgacaggaagttgtaattatgcctgtgcgataggagctcacttgaaaaggtgcgacttcagcagtgtaagagctgtcacgactcttgattcacgaccagttgcatatcggtgaagctgtagctgggagctcaccatatctgtaacagcctctgtgtcagcagcagttcctgctcc

SEQ ID NO: 42189 - DNA, 409 bp, Setaria italica
  Peptide Sequence Number=SeqID_108163
tagttgtggtacgatgtggttttctgggattaggatggttcagttttaatgttgggtgtgggggctgtcatataactgaggcaatttaacagcatttcttcctgatcgaatctgggtgtgcaacggctgtactgtttgacatcttgcggattttaacatgaggatccatggttgtgttgtgcgatttagatccatctatgaattgtttgtgcttctccatttaggaattgtgggaatttagggatttttatgtatgatgtcttaattttggttcgtagttggagttctgctgaatgtatcacttcgtaagaagatttggtttagatctagttttgagtttattaaagttggattgctgtattcacactaattgtttaagtttcatatcaatgatgtctgatacatcttg

SEQ ID NO: 42190 - DNA, 411 bp, Setaria italica
  Peptide Sequence Number=SeqID_108164
ttcttattctatattaacatattcgtagcccaacttcgccagaccagtgttgaccaatgcatcagctgaataaaagtgaagcagtttgagcagtattaggggtgccacatactttctctgagacaaatatgtacggaacagtggcaagtttataaatagtgttgaaagtagagtttacagtgtaactactcctttgcattatcctaatacgacagtgtgatcacgggccatttgtcctgcatcgactacccataataagtggttcaagcactactcacagttataggtcaatagatatagtccaagaggaacaggttgcaggcacatgatctgtatctgctctcctcctgcttgaactggtcagttaggctgcacctatcgttgcctgacccaacttgttggcccaagcgt

SEQ ID NO: 42191 - DNA, 495 bp, Setaria italica
  Peptide Sequence Number=SeqID_108165
ttaggttgtatgttcctagcattgacaaactttgttccatggtttcctattatgtcttccaacaagtctttccagctgtgggtcaagctggagaccatatttttcaaggtagttatagaaatcttctgtgccaagaacctcagttattttcactaactggtcataattatcctggccactaaagaaagggtccacccggaatatctgttaagagtatcataatgcacatcaacagaggtctgatagtgaagataatttcttggggcttgccacctaccattgatgcaaacatgcaaccaaggctccacaaatccaatgagtaatcataatctaacaaatccacaagaagttcaggacccttgtagcatcttgaggcaactctagcattgtattccatcttgggatgatagaactctgcaagaccccaatcaataagacgaagctggcgtttttcatggtcaatcatgatattgtgaggtttgacatctcggtgca

SEQ ID NO: 42192 - DNA, 871 bp, Setaria italica
  Peptide Sequence Number=SeqID_108166
accggagctaactaggtgtatgttcctagcattgacaaactttgtccatggtttcctattatgtcttccaacaagtctttccagctgtgggtcaagctggagaccatatttttcaaggtagttatagaaatcttctgtgccaagaacctcagttattttcactaactggtcataattatcctggccactaaagaaagggtccacccggaatatcattgatgcaaacatgcaaccaaggctccacaaatccaatgagtaatcataatctaacaaatccacaagaagttcaggacccttgtagcatcttgaggcaactctagcattgtattccatcttgggatgatagaactctgcaagaccccaatcaataagacgaagctggcgtttttcatggtcaatcatgatattgtgaggtttgacatctcggtgcatgataccccgtgaatgacaataatctagtgcctttaataattcaaaaatataatatctgatatcataatcagatagtgcagggtagagcactttgaagtcagtgttattgacatattcaaagatcagactgggcgtctttgattcctcatctctgacaacatcaagtagctttacaatatttggtcctccatataagttctgaagtatttttatttccctctttatcttcttcttcttcacgggcttgaggatcttaatgatgcatctatcatcgcttccaggccggaagccttcaaacacctcgctgtacttccccctccccaccttccgcagcacctcgtacccatcctgctccccccactggatgtcgagcgactcgtaatcccagtactccttgggccgctgcgcgttggcgtccgcgtagacgcgcggccctaaa

SEQ ID NO: 42193 - DNA, 866 bp, Setaria italica
  Peptide Sequence Number=SeqID_108167
ttttgtggatatggtactattgagatatctttggatattgaggaaagtgatcctgaattttctctccacgtgatgcggtattcaaggtcactggtgatataaattcatcccagtacaacagtcagcagatgaaaataattaactcacacacaaattgtgacacttacatgccgaccaagacattatgctggacaaaccatacacctgccttaatagtcatttctctacatatttcgcaccagttcaaaagaattgtcaaatatgccatttgcctcgcatcacagtatcgagccacatgacaaaaaaagaaagtgcacctttgcacatcctgtagctattgtgaatttgtcctgctgctttcggaacttcttattggattgaaatatggatgagccatggtttcctttgctgtaggcctttcctggtgatcgtaccggaggagcttatctaccaaatcgatagcctcggagctaactaggtgtatgttcctagcattgacaaactttgtccatggtttcctattatgtcttccaacaagtctttccagctgtgggtcaagctggagaccatatttttcaaggtagttatagaaatcttctgtgccaagaacctcagttattttcactaactggtcataattatcctggccactaaagaaagggtccacccggaatatcattgatgcaaacatgcaaccaaggctccacaaatccaatgagtaatcataatctaacaaatccacaagaagttcaggacccttgtagcatcttgaggcaactctagcattgtattccaacttgggatgaattgtattaggaagaaccaataatttttacaaaggtaagttaataagaaaatacttacta

SEQ ID NO: 42194 - DNA, 442 bp, Setaria italica
  Peptide Sequence Number=SeqID_108168
ccaacgagatgtttgatttcctgatggatgtcactccgacggagcagcagacaaacggggatggagttctgccgccaccgccaccgctgcagacgacagccggccaggtcccctttccagtgcacgtcccctttccaatgtatgcgaaccaccagcctccattcatgtggccgacgccggagtatcagcagcagcagaatcctggtggtgggaatgagtaagatcgagtggtgtgactagtttcctataagataccggtcttgcctttaagctaggtggtttggatgaaactttgtgtaaaactgggcgtgcccctttgatctttactgcatttcgtgagtacttttagggatgtgaactcaattgcaccttcttttagctgaacctttatcaggtttgatgtgtttctttttttttctggaatacgcaggagagctgcgta

SEQ ID NO: 42195 - DNA, 340 bp, Setaria italica
  Peptide Sequence Number=SeqID_108169
tactccgatatcaaacgggactagatcaagacgctgcagtggggagctgatctggaagaagcagagtggtttcgtcgtcagttttgttcggtgcatccaaataaggttactacgttagagcgaaatcgaatgtaaatggtggccccgtgatcatatcatcggctgagtggaaaacttgtaacgttcgtatcaagggcctgtttgcttgcagtcctggctcaggcagctagcgccacgctggggcatccaaccgcaggcagtcaaaatcgacggcctggtccaactgcctgcaccagacagcaagatgcaggcagcaagcaagcaaacaagccccaagtgc

SEQ ID NO: 42196 - DNA, 265 bp, Setaria italica
  Peptide Sequence Number=SeqID_108170
cagcgacatggttaccgacggcgacgatggcacggaggaaaacgtgttcgaggaggatgaggaggcggtggggaggaagaggacggcagctcgtgcgacgaggagctcttcgagctggcgacgaagccggggccggaggtcgacgacgaggaggaggtggaggacgaggtggacaggaaggccgacgagttcatagccaagttcagggagcagatcaggaagcagagggtcgagccggccaccaggaggtgaccagacaggttcc

SEQ ID NO: 42197 - DNA, 350 bp, Setaria italica
  Peptide Sequence Number=SeqID_108171
ccacttcattaccacttgctgactcttgtaaaaccggggtgtccaaggtaagtgaaacgactggctcctgcttgtcagtagcagcaaagcatataggatgcttaatatgcaaccttccatcatagttgcttatgctgcttaaaacttggccttttagagcaccaaaattctgcgtcgtgcttccgttgactctctgaattggaaatggcctcgcaaacttggagcaggagtaagcaacggcgccgaatcggcagcgtggagagccggaggaggccggcgccgacgggtaggcggccctcgggtggaaccggagggcggggcttgccacggcggccatcggcgtccgcctt

SEQ ID NO: 42198 - DNA, 925 bp, Setaria italica
  Peptide Sequence Number=SeqID_108172
acctagaaaaccgactactacgaattccaccggagggagaggggaggagacaccgggaggcatggcggcggcggcgtcgccgacgtgggtgttcgggtacggctcgctgatctggaaccccggcttcgcctacgacgcgcgcgtcgtcggcttcgtccgggactaccgccgtgtcttctaccaggggagcacggaccacagaggcacgccgcagttccccgggaggaccgtcacgctcgagcaccagtccggggcgacttgctggggaattgcctacaaaataagggaggaagataagcagacagctttggagttttgaattgcagtatctagaagtcagagagaagcagtatgatgagaaggtttaccttgacttgtatacagattcgtcgcccaaagtaccagcagtagcaaatgtgatggtatacttcgccacaacgaataaggagagcaacaaaaactatcttggtcctgcacctctggaagaaatgaccaggcaaatttaccttgctgaaggcccatctggacctaacaaagagtatctgttcaaacttgaggatgccttaaacaaactaggagttgtagacccacatgtccaggaactggcgaatgctgtgcgtgagtattccgacgccaaattgtctgagtgaataactgaataacggcatttcccccttctttcgggggtaaagatttccaaagaaagttagaattcattcatgcccaaacattgctataatcttgtgtaaataagctgctttttaatatggctgtcttgtgattatattcctgtggcatcctgttcatccatgaatggtattttgaaaacttactttagagatttacagaggtaaccttggggtttccctcctctttgttctttctaagctggaatgaaaaattaacgttttcttgctaacttaaa

SEQ ID NO: 42199 - DNA, 275 bp, Setaria italica
  Peptide Sequence Number=SeqID_108173
gtccggccaatcgctccgtggttgaccgaccatccctctaaaagtagagctgcgctgagttgagccgagcagggggggaaggcaggcgagcgcatggaggagacggcggcggcggcgaggagcacggtgtgcgtgaccggtgccggcggcttcctcgcgtcgtggctcgtgaagctcctcctgtccagcggccgctacgccgtccgcggcacggcgcgcgatcctggtgatggcaagaatgctcacctcatgccgctggaaacgctggggagagg

SEQ ID NO: 42200 - DNA, 564 bp, Setaria italica
  Peptide Sequence Number=SeqID_108174
ctcctgcaagcatattgtgcgaagggttcttactatcagaaacaccttgaagctactgaggttctaaacatgagaggttgtggggtttggagcttgctgaaggatttcagttactagcatcactaagaaaactgcgactatcccagtgcaacatggatggtgaacagctgagtttgtgtttggagtacttaaatggtcttgcctcgttagacatagttgactgccagaatatcacatctttactcttgccagtaggttcaaggcattttaaaacactccaggctttgtgctttcaggattgccagatgctttcctccttggctaacctggaaagctttgttgacctaaaaagtttgatcattgagaggtgcataagagttacaacagcgtccttaccagctgagctgaagggaatggaatctcttaacaaactgagcatctcgcactgcccagggcttcaatcactaccaaacaacatgccattgtccctggaatttcttcattttgtatttgggttgtcctattcctagttctttgttactttcttagtttggtttctttctt

SEQ ID NO: 42201 - DNA, 627 bp, Setaria italica
  Peptide Sequence Number=SeqID_108175
atctcgcactgcccagggcttcaatcactaccaaacaacatgccattgtccctggaatttcttcatttgattgggtgccatccagtcttgactcagtggctccatgagaaacaaggtccagagtgggagagattacctttgtctcaaatcacaatatactaaagttataccttcccttttttgtggtacctgtcttgctaaatggaagtaagatggcggaaaaaagatttggattttggacatgaagctgatgcttaggatcctctacacagttgaaataggttgtcagcaaacataattgcagtgccttaaatctgacgtctggagatttcacttcaaagcttcattaggaaacaatcatgaagaagtttcaggacatggacaagttcccttgatatgttcaccccactcgcttcaatgcatcatctgccagctcaaggaggatgtgatatccactgcatcattcaagtgaggaacgagggaaaccaaaatatctctgtcttcatctgttcatctgttacgtcacttttcttaaggtcgctttgcttcagcgttacagttaatccagacatgcagacatttaggaaggtatactccaggcagctgcagtatatcttctaattgagg

SEQ ID NO: 42202 - DNA, 429 bp, Setaria italica
  Peptide Sequence Number=SeqID_108176
tcaccgctttatcaggtgagtcaggtggagaaaccacgtattgcgtaggctcccaataggtaccgtacgacgttttcacccatgatgcggggaaaggctgtattgcccatcctgacggtgtttccgctgactcataaacaaaccaatacgcgcgattatgcagtgccaggttaccaaccaggtcataaatcaactcgaaggtagtcatgtgcatgttaggctgagacattagagccgcaagcaccgatttacggtcgcgtaccctatcatccgtcgatgtatcgaacacatgcaagcctagatgtgcgatattccgagcgaggaaatcaacaacagtacgcaaatgcggctgtgtacgccacatctgttctggtgtgagattcagaggttcagactcgatacccacgccggggaggttaccgacaacct

SEQ ID NO: 42203 - DNA, 248 bp, Setaria italica
  Peptide Sequence Number=SeqID_108177
tttaccatgtgctcgtggaagtaacccacattgagaattaatgggtcttcagttatgatggcattcactctccggattgcttggctatcacagctgctggtatagccgtggctctctctgaaattccaaataaacaaacaattgctgggtaagagttggcctgattaacggccagtttgttattaacccaactactgaacaaatggagaattcagagttggatttgatgatggctgggactgatagtg

SEQ ID NO: 42204 - DNA, 1074 bp, Setaria italica
  Peptide Sequence Number=SeqID_108178
ttgttcatccatcggtagtccattcttctttaacttttcggtttgcgcaacatttcctcccttgttttcataatgcttccgagttcatttttgcaaacctacacctaagtaataccttcttccttgtataccacacaggaataatcaacccaccactcgccacctaaactaatccccattgatccagcataacacgtagagggagaaccagtcggagaacgtcatcacgagagcccaagaagaggaagaaaaagaatggcgtcggtcgatcgctctgagggcttgccgggatcagaccttgccgttgttgtgctcgtcgatgttcctgacggggcccttgaaccacttcctggcgtcgagcgcccaccagagcatgatgaggccgaggcagactcccagcgcgatgggcgcgtagttgaaggtgtccatcctgatcgggtacgacgtcgggagcaggaacacggcgcaggtgtagcagatccacaggaacgccacgaggcagacgggcctgctggcggcgcccaggtagaatggccccggccggaagtcctcctcccgcatcaccatgcgcgcgaagatgggcaccgcgtacccgcccacccacccgatggtggccacggaggtgatggccgtgaacaccacgttgatgcgcaggatcggcaggcccagcagcgcgcacaccgccgcgcacagccacaccgcgttcgccggaaccttgcgccgcgggtggatgcggcgccacaccgaggagaaggggatgcccctgtcccgggacagcgcgtacaccacgcgggcggcgctcgtcgtgatggagagcccgccgaagaagaaggagccccagatgacgaagagcagcacgatggcgcccgccgagttatggtaccgcccgtggaacgcgtcgtacagtatctgcgccggcacgaacgcgcccgccgtctcgttgttcgggtcgtacaggtagctgaagtcctggatgctgaaggtgagcgcgaggatgtacgcccacccgaacacggagatgatgccgatgctggagaggatggcgatgggcccgttcttgtccgcacccttggt

SEQ ID NO: 42205 - DNA, 1745 bp, Setaria italica
  Peptide Sequence Number=SeqID_108179
ttttttgtttttaaagtcaacaatgagaatagctaaggaaaagaacagtctaggagcctaggacgactcatacaattttcagaggagacagtcataagatacaacacagagcagcaccccgggcagcacaaatgttaatagaacctaatggctaaatatcaggctaataacatttggtttttacaactgtgatgccataaaactgggcaaatcataaataggatagcataaagcatggggtgcagtaacagtaacaccactgtacaacagtctttcctgaagctcctagacatcagaccagatttgcaaaccatgaatctgccttgactctttgggatgacaatcttagttggtcacgaaatggtacctggagtccacaaagctctcaacatcccagaggaaggatccgaaagtaacagcctctaggatcagccttctcagcccggcgaagctgatcctaatatgttcgtccttggaagaatcaactgtgccttcaggtgtaatcacaacctctggtttcccaaagagtgcctctgtgtgcttctcgataatgccaaaggcctcctttgacctaaccgttgcatacctctgtagtgtgtctgaatcaaatgacatgacatacgatctaaggcggcaaggcttgatagattggctaggccctcctgtgctgaagttaggtgaggtccatgaggccatctccggatgagagctagaagcctgagttgagggcattgagtccgtcgtcataacttgattcaaagcatcgtcttcctcttctgatccccaagggaggctcttcatcgacttctcgagctgaaatctctgatcgactctcttgaggaaataaccatacatcacagatgcagcatagacttggccaactcgaagcttacttatggccgcaatggtggcatcaccttgacgctgccccagaatgagatcaagatggttctcaatcatttcataggcctcgggcgagtgcaaacgctgaagcctttcttccacagtttctgcccactggtcaactcttccagaagaatcaatggagtgcgagagagctggaaccaaagaaacaccagcttcaacaaacttctgaacaaccagtgcgtagagtatctcctccaaggcccttctccgctccttttcctttacttcagcaatccgcctgtacagcaccaggtcgccacttgctggagccggcttctcacctgcaccgctctccttgtccttgtctttctcagcctcgcggtcggtctggagctgctggagctgctgctcggcggcggcgggcaggaggtgcgggtgcgtgtgcaggatctgcgagaggagctgccccgccggcgattccatcctgagcggcgcgatcgacgaggacggcggcagggactccaaccaggaggccctgaccacactacttcgcctcttggtcctagagttgagcttggagccgaaggccgaagaaaccagaggttgtgattacacctgaaggcacagttgattcttccaaggacgaacatattaggatcagcttcgccgggctgagaaggctgatcctagaggctgttactttcggatccttcctctgggatgttgagagctttgtggactccaggtaccatttcgtgaccaactaagattgtcatcccaaagagtcaaggcagattcatggtttacaactgtgatgccataaaactgggcaaatcataaataggatagcataaagcatggggtgcagtaacttaact

SEQ ID NO: 42206 - DNA, 1261 bp, Setaria italica
  Peptide Sequence Number=SeqID_108180
tggtgttttccagcgctatggagaagatgcgccaagatatcatggtggcactgggacatacttgccaactcctaaggtttcattcaaagatagacattcaagttcaagaaactacagagggagttataatagtgagcaagtggaccataatgataaagagggaaactgggcaaattcaaaacaaagaaatatgggatgtagctatgggcgtggccaatcagaaaaatctggtggtaggcatgacagacagatatctgatgaaaaccaatctgaaaggcactggcaaccttatagaagtgattcatacaggagggaagccggtggttcatctagtgtacagagccagtcatttgaaaatacaacctctacccacgatcctgtaaacaaggcatacggggttccttcacaatcttctactgttgctagtggaactagggcttcaacagaaccagttatggtgtattcctatgatcagtctgtagattacggtgctcctagtaaaccaatcgaattcggttcatttggggctatccctatggattctagtgagatacaacaagcacatgaagtacatacaaatggattttataagcagaggcatgccctatacaaaggtacttcctcgcgttcatcccctgatcaaccttcgatgcctcacctacgaaggagttgatgcccagatttgctgtggtctatttccttgatgctgactggcacagcaccatgagctctactgtctggctgttgtccggaagttcagatgtacatcagtacatgtaccatacttttattctgagacttgaattcatcagcccaccagatgcatgtgcttcatgtgcccaagctaggacaaagctgggatgaccaatcaggaatcgatctcatgtgctcccagcatccaagctagcaccaagataggattatcatcttcatcaagaattgatctgaagattagaagcacggattactggaggtatgtggcccatgcacatccatatatcaagatattaggctagtattctacttgcagggtcttttctgctgtaatatgctgctttggcgtaatctaaactaatagtggattcctgatgataggtagaaaacgaaatgtgtaccattactttacatacacaagaggtgttactctagatgtagttggtaggagtaaccttgatggtaaatctctcacaaaaaggagaaaaccggatgggaaatctttgataccagaacttggccaagttgaataaaagtggtccatgat

SEQ ID NO: 42207 - DNA, 414 bp, Setaria italica
  Peptide Sequence Number=SeqID_108181
ttgccctcctggctaagatatatagatcttagacaacaacctgattttaaggatacaatgcgtaatcattattcttgatgatatacaaacataactgcttctgcaaggtgaaacaggcagaatttggaacaaatcaacaaactatggtaaatatcttatttcaaatttagttttatacctttgtttaaacattgaaacttttaggaaacatagcaagatagattagtgaaaattatttatgccttttcatttcccattggaacttcctaaaaaaggtttcagtgcaaagttactcagaaggatatataaaattctgaagggtgagcaagttcttattttactatgtaatttgcttttcatgggtgttcgaggtaaaaaaattgacttatcatggtgctacgaatgatagtcagt

SEQ ID NO: 42208 - DNA, 1643 bp, Setaria italica
  misc_feature (1603)..(1603): n is a, c, g, or t
  Peptide Sequence Number=SeqID_108182
tctgctcttgcacaagcatttgatcaaattggaaatgattgcccggatgttgatgatgttgggtacttgaagaaagtattcgaggccattcaggaattgatcactcaacgtcttatttcagcaggccatgacataagtgatggtggccttattgtgagtgttcttgaaatggcatttgctggtaattgtggttttaagctggacatagacttggaaggtaggagccttcttgaaggactttttgcagaggagcttggccttgttattgaagtgcactcagaatatctcgatatcgtgaagcaaaagcttgaagcagctggagtttccgctaatgtaattggagaagttactagctcaccagaaataaaagtttttgttgatggcaatctgcatctcaaggaaaaaacttcggatctcagggatctctgggaggaaacgagtttccagctggaggagttacaacgcctgaaagcttgtgtcaaacttgagaaagaaggactgaaaatcagaacatcgccgtcgtggtctctgtctttcactcctaaattcactgatgagaaactgttgattgcatcctcgaaaccaaaggtcgctatcattcgtgaagaagggagcaatggggacagggaaatggctgctgcattccatgctgctggattcgaaccatgggatatcacgatgtcagacctcttggctgggaagtcttctctaacagagttccgtgggattgcatttgttggtggtttcagctatgcggatgtgctggattcagcgaaaggttgggctgcatcaatcaggtttaaccaacccctcattcagcaatttcaggatttctaccataggccagacactttcagccttggagtatgcaacggttgccagcttatggctctgcttggctgggtgccaggatcagatgttggaggttctcttggtataggtggagatatgtcccagccgaggtttattcacaatgaatccggtcgttttgagtgtcggttcaccagcgtgtccattgggaattctcctgctatcatgttcaaagggatggaaggttctaccttgggtgtttggagtgctcatggcgagggaagagctttcttcccagatgaaaacgttcttgctactgttgtgcagtctaatctggctcctgtgcgatattgcgatgatgctaacaatataactgaaacctatcccttcaatcccaatggttctccactaggcattgcagccctctgctcccctgatggaaggcacctcgccatgatgccacacccagagcgttgcttcatgatgtggcaatacccatggtatccaaaggaatggcaggttgaggagagtggccccagcccttggctgcggatgttccagaatgctcgggaatggtgttcatagtgcagcttgccggaattcggttacaagttggactagtatttcaggagtccagacgtgcaatgtctggctgcagagatttggcgtcactggctattgttggtttatggctatctggtctcatttgaggacctcttttggcgaaataatgtaatttgactgatcaataatcaattgttgaatagcgaattcgaaatacgtcgccaaaagnggtcctcaaatgagaccagatagccataaaccaacaatag

SEQ ID NO: 42209 - DNA, 442 bp, Setaria italica
  Peptide Sequence Number=SeqID_108183
cgcgacgacgtcggcacgccggtgcgggagctctcggtggtcggcggcacggggcagttcaggatggcgcgtggctatgtgctgtggaagacggtcacccctgagatcctcgacctcgagatcttcgtcaatccttgatcaagactgctgtgttcctgcttggatggtgagattgcctagaatcagttggcaggattgaatcaaccattggacccatcagcttggtcgcctcagtggccatcgtggcctcctcagtgacttgttggaaactttacttgtgttgtggttaaactagaacttatacttgtgggttacttgtcttaagcatatacttgtggttgtgaacggatcttctgatgatgacgcttatttgtgtgttgtgaatgttatttatatgcttgtgatgcttaatatatgtatgtgatatttgtttgagaggggc

SEQ ID NO: 42210 - DNA, 826 bp, Setaria italica
  misc_feature (789)..(826): n is a, c, g, or t
  Peptide Sequence Number=SeqID_108184
acccgctgctgttgcttctgctatctttatatgcgtacacactgcctggccacatcggtgcaccgcaactctgtcccagcctcccctcatggcttgctgcaagctcttctccatcatgttgctggccgcagtcctcgccgccggcccggcggtggcggctgcgacgtcggcacacctgcacttttacatgcacgacgtgacgggcgggccgtcaccgacggctgtgcgggtggtcaacggcccgcgtggctacttcggcaacacggtggtcatcgacgacaagctgaccgagggcacatcgcaatcgtcggccaccgtgggccgcgcgcagggctactacatggtggcgtcggtggccaacctggagctcttggtgagcatgaacgtggtgctcacgtcggggccgtacgccggcagctcgctcacggtcgtggggcgcgacgacgtcggcacgccggtgcgggagctctcggtggtcggcggcacggggcagttcaggatggcgcgtggctacgtgctgtggaagacgatcacccctgagattctggacctcgagatcttcgtcaatccttgatcaagactgctaggcaaagcaatgctgtgatcctgcttggacgatggtgaaattgcctaggcgtgtcaggtgcaaggtgtatttggttggttgtaccatttgaattgatttatgtatgaaataattcaaaataataatgtggttggttgtatcatttaaattgatttatgtatgaaatgattcaaaataataatgatcattttgtttggttgacnnnnnnnnnnnnnnnnnnnnnnnnnnnnnnnnnnnnnn

SEQ ID NO: 42211 - DNA, 1475 bp, Setaria italica
  Peptide Sequence Number=SeqID_108185
tatttaataggcaaagattaaaatggttaatggtgtggaacaaattttgctaaacaattgaatgacataactatctcttatttgaaagctagtcctggatcaagttcctatgatgtgctccaccagttcttctgttatccatttttttagttttttataccctgggggcttatccattccttggaatgctgaaaatagctcatgtgctcctgttatgcaagacctagaggtggaattagccattgaagtttatagatccctctgtacaagctcctgtaattcaaaggctgcacccaaggttttctttgagggtttttatgactatttggttaacattattgatgaacacacggcattgttccaagccaaccttgagcattgcccagaaaagtttgaaaatactgctatcctttcagctcttggtgaagtagttattggactattagagaatgatcaaattttggcatatgctaactatttgtaatatgaagcaaatgaagactttactggatccaggcatcttaaccttttcttgagctgcttgaacctcgctaacaggtttattgaagttttcaagatttggtttcaaagcaaatccagctggacagcaccaagttacaagcaggttttttttcgtctttatccaattttgttaggcatgttgtattaaagaaagatattcttcttcttttcgagattattggagatcaacttactgagtggctctctttatctgccacattgtactgcgaaatgcaacaagggaaaatcatttaccagcttgagaaactttggctcaagatactcaagtgcctgaacatgagccagctcattagtgatggacccttgagtcagaagcagcaacttcttcaagtggcacttagtcacccgcatgatgccatttcagttgcaacagcatcagcgtgcagagcagaagcaaatatcaagataagcctgcactctggttgcttggtttctaagttggatggattgttgatggatagaagaaaggatcataatagctgctccagcagtgctgacaaagcccttgcacgtgaagaaattgacatttcaagcaggcttgcattggcaacgtcgaagaaagtaaccaagcacacagatagggatgctggatctctgaagatctctgcgggtctggggcggaaaaggctgaagatcatgaagtattcaaccaagccaaaggaactcaacaaaaatgcagttcgtatcggcgaccttagcgctagggtagatggtgtcttctcaccgcgttgcatggaaagtaaagaatgtaggaaaccagaactaatactggaaatgctcaagagaaagagatagctttttgaactggtttagtggtgtattatcttggtgctgccacatgtgcaggagtctgaacagaattattgatcatactaccatgtggccgcgatatctatactggacatcataaacatggaccgtccagaatgaag

SEQ ID NO: 42212 - DNA, 346 bp, Setaria italica
  Peptide Sequence Number=SeqID_108186
cttactggtcctcattgctgttattgtttgacgcagctactaacgccaacactgatggtggtacatctgtaacacatactcagaaaccaggcactgaaggttttatcttgttatctgtattttcacttagttttctaaggatcagtcttctagcgctccactaccagtatatctgccatggtgccattacattttcattctgagctatctgagtatttgcattgtcatgcagccaataatgtatgtggtattccatctgttcaaaacctggacaataatgcagccgataaaggtgctgaagtgagtgttgacggtgatacagctggagcaattgttcaaaggcaga

SEQ ID NO: 42213 - DNA, 481 bp, Setaria italica
  Peptide Sequence Number=SeqID_108187
aatacctggataagaaacagctcttacgcaaaccatcagaacaacaacgtttacttgaagaggtcccacgagttatccggagatggaagatagtaaagatactgaagttcaagttacaacaagagaccggtctactaagaagagtactgtcgcttttcaaggtaccaatgggacaagagcatcattttttaagagtactgcagaagaaaaattcaaaggtactggtggggagagagagctttccttgaaaagtttgtcagaagaaaaatctgaagctactaacgccaacactgatggtggtacatctgtaacacatactcagaaaccagccaataatgtatgtggtattccatctgttcaaaacctggacaataatgcagccgataaaggtgctgaagtgagtgttgacggtgatacagctggagcaattgttcaaaggcagagcattgaagctactgaacttaacttagaattagtttaa

SEQ ID NO: 42214 - DNA, 1985 bp, Setaria italica
  Peptide Sequence Number=SeqID_108188
acttcctgatgaagagcgtaattcagatgctgagtttgtgggccacagtgatgatagtgatgaagagctgtcttcccgagccaaattaaatggaatgacaatgaaaataaaatctttccggaagggagctaagtcaatgaggaatggctttgtaggctggggttcgaaagaactcattgaattcctttcgtcaatcgggaaagatacatcagaaactctagatcaatatggtgttgctgatgttgtgaagaactacattcgacaaaatgatctattgcaaaaagataagaaaaaacttgtcatatgtgatgaaaagctccagcctttgtttaggaaatcaaaagtgaggtacaacaagatacattacttgctagaaaggcatattgctgcgaacatgatattggaggatgaagcccttgctagttctgaggataaccgtgattcagttatgacaaagaaagcacgtattgcaagctatcagcccagtgccccgaagtgtactccagaaataaacaagagatgttttgcttctcttgtttgtgataacattaatctaatctatttgaggagatcattagttgtgcacctacttaaggagccagatacatttgaaagtaaagttattggctgttttgttagaataaagaatgaccgcaaagattatagtttccacatgcataaaaagttgtaccagcttggacaagtaacaggcattaggaaaaccactgaagaagacaagataaaagacatttcaaatgttcttttatgtattttcaacatgcctgacatcagcatttcgatgttgtcagatgaagactttgatgaggaagaatgtcaagatcttcatttgctggcccagaataaatcctttaaaaggtatactgtgggtgatcttgaggagaaagcaaggagtttacgcagggacataatgagtcattggattaatcgagagcttcagagactggatagattgattgacatggcgaacgagaaaggttggagaaaggctaaggatgaatacctggataagaaacagctcttacgcaaaccatcagaacaacaacgtttacttgaagaggtcccacgagttattccggagatggaagatagtaaagatactgaagttcaagttacaacaagagaccggtctactaagaagagtactgtcgcttttcaaggtaccaatgctgggagcaccgtttctttgaaaagatgctcggaagaaaaatataaaggtaccaatgggacaagagcatcattttttaagagtactgcagaagaaaaattcaaaggtactggtggggagagagagctttccttgaaaagtttgtcagaagaaaaatctgaagctactaacgccaacactgatggtggtacatctgtaacacatactcagaaaccaggcactgaagccaataatgtatgtggtattccatctgttcaaaacctggacaataatgcagccgataaaggtgctgaagtgagtgttgacggtgatacagctggagcaattgttcaaaggcagagcattgaagctactgatgttattaccattgatgatgatgatgatgatcacccgtgtgagaaaagtggacaagcaacagttgatctagatgctgatgacgctggggatactcatcatgcggaacacaagacaaataacatatcacgcagaggccacagaaacgtgaaggtgaagcggggagcctcactgcacatgcgcatgtggcattacatcgatcctcagggcgatgagcaagggccttttacgatggagcacctgcgcaattggtggaacaatggctacttccgcgatgatttcagagtctggaggacaggccaaactagcgacactgccatcaagctcatagatgctctgcagttgattgacgaggtagtggcagttacggtgcctcatgttgtagatgactagatgtacttatggatatatcggcgggaaaaggggggggggggggggggggcaa

SEQ ID NO: 42215 - DNA, 925 bp, Setaria italica
  Peptide Sequence Number=SeqID_108189
gagggcgccgccgcgctctggcgcggcaaccaggccaacgtcatccgctacttccccacccaggcttttaactttgcattcaagggctactttaaaagcttctttggctacgacagggagaaaaatggaaattggaagtggttggctggtaatgtagcctctggcagtgctgcaggagctacaacgtcattactgctataccatctagattatgcacgaacaaggctagctactgatgcaattgaatcccgaggcaacaaacgccagttcagggggctgctggatgtgtacaagaagacacttacaaccgacggcatatctggactataccgaggtttcagtgtgtctattgtgggcatcaccctgtaccggggtttatattttggcatctatgacaccatgaaacctcttgttctagtaggaccattggaggggaatttctttgccagcttcgccttgggctgggcaataactactttctcgggggcctgcgcctatccattcgacacggtccgtcgtagaatgatgttaacttcaggacagccattcaaatacaggaacggcttccatgcagtaaaacagatagtttttaactgaagggttcttcacattattcagaggagttggtgcgaatattctatcaggaatggcaggagctggagttctttccggctacgaccagctccaacagtttgcaagtcggcatggtcacaattttgagcgcaagatgaaaggggtattgaaatgatgtgtatatggatatgaatatatttgaatccttggttcaaggtttgatcattcaaaggggatgcacaagcaagatatcccgggtctgaagaacttcacaaaagttaatggtggaaaaaggacaaaaaattaccaaggaaggtagaaatactaccttagactagactacggaacgaca

SEQ ID NO: 42216 - DNA, 1512 bp, Setaria italica
  Peptide Sequence Number=SeqID_108190
ttgcaattttataaaagtatattgtttccaatatagatggttatatataacgaaagtatttctatgatgaatctaatgacatcaacagtgtggtgtcagtctatataacttttcatatttggtgtatcaagttaaagaagtttgactgactagaattcttaaacggcctacactggaaatctggaataggaggaagtatttggtatagtttaaaaaagaggaagtatttggtaaccatgtgtgcacaactgcacattattgttgtttctttttttgtaaagaagattattgttgtttctaatatcacgtgttaatggctaccggtttacatttttgttatttttgttccatgtgttaatgcctatgtaccagtgtctatcgcacatcaatgagaagaattgagataatgactgttcacttttccttccctatcactgattgtgctgacttactagccctgtttcagattgccataatttatagacccaactaccgtggaccacattcaatccggtccagtatggaagatccatttgattgttgtgtgctcctggattatcattgcacttgatagtactgtgtgtctgtactacagtgatcatcttttattgccagtctaacatgtgtccctgtgttcctggtagctggtgctctgatattcttgttctagatgttctgtgtagaagttcaaaattttagttgcttcgtctattattctactgtgacatagatgtgaataatgtgcttcggctggttaacacatatctatttccccctatcatagacctactaatgtttgcagtgtgctctctcagaattttgtcctgcagcatttgtattttatataatcatcacacttcatgttgcggattgccccttttctgttaaccaatacttgcgcacatgggattattagccccacttctttgtgatgcgcttgtaatagctggccagggaactcacagtagggtcaatggtgataaatgctggcctatgattttttttttgaagatcaatgctggcctatgaattattatgtgatctatatcaatctggaagaggtactgctttgtgtcagaattgatacattctgcagctgtcaaataaagagactttccaactgagtgctctgacagactaatgccatcctctgaaaggctgtgggttacatagttgcttgctgctgaataatgaccaatgaaattgggggcactcactctgttgttgatctgggaccagattctaaacgggaggagaaggctttagcaatgggtcatgccaaccccgcaacaggctaataataggcacatgtttggatccttttcatacctccttcaatatcttgagtttgtttcgatatctcagtaccaaagtggctgtccacaatccaatccacatggaatgccttggtggagatgcattactgatgttctcagacttcactgcaacgctaaaccaagctttcagtggatccgttggaataatcagatgaacatatgcccagtaaagttc

SEQ ID NO: 42217 - DNA, 417 bp, Setaria italica
  Peptide Sequence Number=SeqID_108191
ccgatgatgtggccgacggcgccgcaggccagcgtgtcggcgagcgtgaacccggcggggtcgccggtctgcagcccggagtcgcgggactccagcttcagccccgccgtcgccttccggttcgccgacggcgccagcccgaaccgccccgcgaacagcatcagcgtcgtcgacagcaccatgatctggttggtggccgagccgatgtagtcgcaccggatgccctgcgcccgcttccggccgccggccctcaccggcggcagcgccgccacggaccggagcgaggcgtagccgtggaaccgcggcacggcggcggacatggacgcggcggcggagagctgggaggccatggcgacacctgttgtctctcgtctgcgtgctgctgctctgttcaccgaactgaacgtgtgggtattt

SEQ ID NO: 42218 - DNA, 333 bp, Setaria italica
  Peptide Sequence Number=SeqID_108192
ccggcgaccatgccggcgaggatgagcctgccgaggctgatcggcaccggggcgtcagccgccgcgccgccgcccccggcgccgcggacgcccaccgtgagctccagctcgccgtcgccgcgagccatggcgttcgttcggccgccgagatcaccagacagcacaggttgcccggccgggagatcggaattgaatcgaagggaccaaaggggaagcgagctttggaaggcgctggagtcccgggaggagggggagacgaaaatggaaagtgcgagaggtaggggaggaggagagcgaggtgcgctgagagcgcgtggagtgaggagggacgag

SEQ ID NO: 42219 - DNA, 448 bp, Setaria italica
  misc_feature (401)..(401): n is a, c, g, or t
  misc_feature (433)..(433): n is a, c, g, or t
  Peptide Sequence Number=SeqID_108193
tagaagaaggttggcacttgctccctaaggcctcatttagaagtctcaaactcctcaaggatcccagacctttcccggggaagggaggccacaggggcagaagccgcgggccagcaaaccagcagatctatctaggaccacacttgctgcaggatgtcccagtgaacagggaaacaagcaagtgaaattgtttaggtaggtaatcaagatgtttgattttcctatctactcgctagttatttagagctatagcctacagttcatcctgaggtcctcatgccctttatagcttgctccaaaatgactttactcatctcgattgaaccagtacatttcttgagatcgaaatgcagaatgtgtaaatacagtaatatccttgtcttgctttcttgttgaaaagntcacataaaccttttctcaataacatgaaatntagtgatagaatcac

SEQ ID NO: 42220 - DNA, 343 bp, Setaria italica
  Peptide Sequence Number=SeqID_108194
actcagttgagtagtccgccatgctcccgctcacgtcaagcacggtcaccaggtccagcggcgcgcgggtgccaatcgacgccgacgcaggcggagccttcaggtggatcaagatggcaaagttctcctgtgccacggtctcttgaacggctgggaattcagtgtgtgtcgtgatctcaagtgaagcaggagtctcatccccatcatggaattcagactgtggatttaactgctcatcgtcatcaaaaactgcagactccggagtgcggaagactgggagctcgtccagcggattggcagataacatgcccgcctggcccacctggatgggtttactctggct

SEQ ID NO: 42221 - DNA, 253 bp, Setaria italica
  Peptide Sequence Number=SeqID_108195
taatggagcttcctggagaatcagaagggccaacggtcagagaatacattgttggggatcccagctaccctcttcttccatggctgatgactccatatcaagagcttggtctatcttcagagaaagtggagttcaacaagcgtcacgccgcgacgagaacggtggtgcaaggtgccctggccaatctgaaggaacggtggcaggtccttaagggagaggtgtggaggccggacaagcaccggctgccaaggat

SEQ ID NO: 42222 - DNA, 453 bp, Setaria italica
  Peptide Sequence Number=SeqID_108196
cgcggtggaacgagcagtacgcgtgggacgtgttcgacccctgcaccgtgcttaccatcgccgtcttcgacaacgtccggtacaaggccgccgatgccggcggcgaccccggtaagctgcccaaggactcccgcatcggtaagctccggatccgcctctcgacgctcgacaccaaccgggtgtacgccaacaccttcgcgctgacggcggtgcaccccgtcggcgtccgcaagatgggggagctggagctggcgatccggttcacctgcccgtcgtggctgacgctgatgcaggcgtacggcagcccgctgctgccgcggatgcactacgtgaagccgctgggcccggcgcagcaggacgtgctgcggcacacggcgatgcgcatcgtgtcggggcggctggcgcggtcggagccgccgctggggccggaggtggtgcagtacctgctggaca

SEQ ID NO: 42223 - DNA, 677 bp, Setaria italica
  Peptide Sequence Number=SeqID_108197
gactatgataactatagcttttgaattatgataatggaacatcatgtggttgtgtcacccactttatgaaattgaaggagagaaataaggggtgaagtaaaaaaaaggtaaaaatgggaactttattgcctggctgcttgctaattagtagaccactttgtatattgattcatgctgatgggattgcggagacagggagaaccacttaagaaaaatgcttgcaatgaagacaacatcagcattcttaatcttgcggaacaagagctttccagggctctttaaagtgatgaaaaacagcagacaagtggggcttgaccttttcctattcctttcagcatttcactatcgcccttccttatatttccaatagggacaggatattagagatacaagaccgacatatcagtacagttgtttagccttgatgtcatcgccaacctcgattatctctaggaaaagcattttgattcaaacaagtgaaaatctatactgtatctttttattctgtacaaagcagatagattaatcacatcttcattaactggtactaccatctagaatcactccacatgagcgaaatttcattgtctttattcctttagcggtaatcctacgtcgttatcattgtacaaagactttatacctgtttcacttgtttatctgtccaattccaacgc

SEQ ID NO: 42224 - DNA, 186 bp, Setaria italica
  Peptide Sequence Number=SeqID_108198
tctcgggcattcccacagtacccaattcctcccggtaggacagcttcttcgcgtaacccaatgacatcgctcaacccatacaccaagccctcttcacttcctccaccaccaccaatccaccgagcccaatccaaagccataatcgcccacaaacacgcacaccatctccggtgaggtctgagcgag

SEQ ID NO: 42225 - DNA, 917 bp, Setaria italica
  misc_feature (403)..(403): n is a, c, g, or t
  Peptide Sequence Number=SeqID_108199
acaaagctgtcttttgcttctgaaaatcaacaggccatccaattgatgagctcaagcagctgcagccatcactgaagttcaatttcaacatcatgaaaaatgatctattcattgatgtttccctctgcaaagaaatggttgctccttaagcactacaggcttcatgtcaggtctttctggaaaggaaacctcaattgactgaataaatggtaatggtgctcggaggccatgagtactggttactcggagagtccatctaacacatttcttttttagtgaatgccggagagtaagctgaacgaggtcagtacgtatgtatggaggaattcgcagattcaacttggtcatgactccagcaatgaccttatctacaagaccatggatgacaaggcttgccttttancctttggagttgcctagttcctagacataggacaagatcagctgatcgacaatgctccttggcagaattcatctcctcaggaggtaaagcatcctgtaaaaaggtgtttacccatccaatataattgatgaaattacaaaacttcaaagaatatacaagatggcattcagcaaaccatcactaaactgatgaaagccaacctactactgggtggaacatacaagttcttataaaacacgtagctaagggaacatgtatggagttcacagaaaataaattgacacttctcaaataaatataatgctaagcatgccactattctagaattctgatccttacgaagcaacagagtggtccactgtaactacaagtaaaacttagtggtaatgcataatattttttatcacaagaaaacacaagtactgctgctatgcacacctgaacccaaaaacacaatccctgaagaagtatttagagtatttgcagcagtgacttttgcaacttaagtcatcaa

SEQ ID NO: 42226 - DNA, 1024 bp, Setaria italica
  Peptide Sequence Number=SeqID_108200
caaaagctgtctttttgcttctgaaaatcaacaggccatccaattgatgagctcaagcagctgcagccatcactgaagttcaatttcaacatcatgaaaaatgatctattcattgatgtttccctctgcaaagaaaatggttgctccttaagcactacaggcttcatgtcaggtctttctggaaaggaaacctgttgatagagtagaaaattttaatcagttaaacacagatatatgctgggatcctatagtgccaggtttccataaacttcataggctatatctgcttactcaagcttttaatgtcaacaaagtgcacaaagaacactgcaacataagatgataagaatgtttataaattacaggtgtcatgatgccacaacctcaattgactgaataaatggtaatggtgctcggaggccatgagtactggttactcggagagtccatctaacacatttctctgcaaaacatagaaatgataatgcaatatatgggggaatgcaactggtacgcatttgcataagataaagaagttaaaacgtttaattctcggagtaggttagtcaaatggtgttgataaatgaacagaaatatcttgcagacaaaaaaatcattttcaaatcacgggtgaaaaaataatacaagttactaccacaatttgtagtgcctttcaaatgtgctccaagactacagagtttccaaaagaaaatatcgaaatctcctcttgctcaaaatcatgtcagtagatcactttggccatgtggagtcacctatccaggtccatcaggtcaaggcatcggatcatgggatgcgcgccgacacttcatttgcaatgtggtacgcgacactaaggaatccgagtcgacaacccagtacaaagagcggggttgatgcacatatatatgtgtaatcagattaacaagtaatttatagcatatttaaaaggaaagagaaggaaggggaaccatatcggctcatccagcccactacaacccataacgttcgcccgtaacccaacact

SEQ ID NO: 42227 - DNA, 471 bp, Setaria italica
  Peptide Sequence Number=SeqID_108201
aggaaagaattggtttctcagatttagattagccttagatgttgatgggtaaggcaatgtttcgcagcctgaaattaatttttattgtaccgataccatgttgcaattttctgactctgtgtggaattttcagactggtattcgcaggattcttagtacattagaattggatacatgcatcaagtttacgaataagtttgtatgaaagatttatgagaaaaaggctaacctctgacataatacaaactacagacacaggtttctaatagcaagatggaatgccacaacactgcgattctttaccttttgtcttatgagtagatagctgtattggtaaaattgtgcttcagaagaggcgcagaagaaatggtctcaggaatcgatttctactgtggggtttgttctgtaaaaagtggccgagtaaaattgatggttccctcgcaggagattgattttatatcaatatttgac

SEQ ID NO: 42228 - DNA, 686 bp, Setaria italica
  Peptide Sequence Number=SeqID_108202
tttttcagtgtgaaatgattcatgaataataactattttcctatcctatcatgggattctgagttttgaatccctgatggagtcatggtagaaacttcgtgtgtaaataaacctgtctcacctaccgactaccgtgactccttacaatgctcattgtaactcgtatagagtacaaatcaacgcagatgattgctgctgtagtgatgtatgccacgagccacgaggggcagcgtgctatcggcgctccttctggacgatgaccacatggctatatgcatgtgaacaaaggattgcgtgtgcaagtcgaaagagacacggtcaatttcttggacgacattctgtacacggatgcagttgacaacgttgcatgccacctcgctgttgcacccaacataactaatgcgacttaacagagacactagcaatgattacattcggatgttagcttctaacaaatctatcggccgcaacacagacgggtaggatccttctttttgctgcgtgtggaaggtttcacgccacggcatccgaggatggcaaggtccatggtccgagaagtaaaattcttctgtaccagcagcatcacgacgcaaaataacagggttatgctgcagctctcctcctttctgtacacatctcgcccattcaggttccagtctgtacatcttacagcagaatctggtgga

SEQ ID NO: 42229 - DNA, 585 bp, Setaria italica
  Peptide Sequence Number=SeqID_108203
aagacaatagacaagctgttaacttgttgtgtgaggtatctgttcaatgaccggggtggccgatcttagaaaggtctcaatgtcagcaactggatggccacaactcatgtacatatcagatgcagcttgaatttgataggcattgttaacggccttaataatcttatccaatacagattcatgactagtcaatccgttctcttctttcttctgttcttctgctctggaatctgtatccttggcatcaccatctgcaggagcctaaagctttcagctctccttgcaagtagaagacatcctgaagaacaggtttcctcgataacctctagggccacatgatgatgagaagttgaactcagcgccatctgattactctgaagaacaggtttcctcgataacctctagggccacatgatgatgagaagttgaactcagcgccatctgattactctcaagatttcctgggtgcactgttttaagaagcatcctgctgttaccaggaacatttccttcattagtaaaaccagttttcagcacactacccaaactctggcccttcttgtattcaccctttttatggtttgg

SEQ ID NO: 42230 - DNA, 282 bp, Setaria italica
  Peptide Sequence Number=SeqID_108204
ctctggaaaatcatttcaccatggcgatcaaagtttggctgttcctgatgatagctgcagactggtccttggactcgggccaacaccaaatctatattctgctgatagtcactcatttggtgggaagagagcttatgaatctggaactttgctcactcaacattgtgccacaaccaattctggtttaatgttggatctttcaagatgcagctcaagaaatttacaacctgcagcagtgaatggcagcaggaatttttcacatgcaagaaaaactggtatcgc

SEQ ID NO: 42231 - DNA, 934 bp, Setaria italica
  Peptide Sequence Number=SeqID_108205
cgtccccatcgcctcctcgccggcctggtctcctccaccctttcgcttcgccgcctccgggttccccgcgccgatcttggaggatatgaagtccgtttgtggtttggacgtataagatagtgtgcatatgatttgtccgtagtcctgcaacctcatcctttgccatttgggatcagtaagctccatgctcatggacagagctgatacatcaggttttgtcagtggtggtatacattacatcaacatccatgtgtattttcatttcgtgtatactatgtgcttcctcagtggtgaagttgtaaagctgggatcctgagttctgttggttggattgaagcatctggtctctaaacagcacttaaatatttttctatcataatcctactgtaataatattaagcaggatggacctcaatatgacaaatctttggtttcatgggaaagaaagtatagctgctgcttcattctcccaggctcaaccagctgcaataaattgcaggaatgaagaaccacctgcgtcagctatgaacttgggttgtatcgggagctcagaaatagcacaaaactctggaaaatcatttcaccatggcgatcaaagtttggctgttcctgatgatagctgcagactggtccttggactcgggccaacaccaaatctatattctgctgatagtcactcatttggtgggaagagagcttatgagtgactatctgcagactggtccttggactcaacaccaaatctatattctgctgatagtcactcatttggtgggaagagagcttatgaatctggcacaatgttgagtgagcaaagttccagaaccaattctggtttaatgttggatctttcaagatgcagctctaagaaatttacaacctgcagcagtgaatggcagcaggaatttttcacatgcaagaaaaactggtatcg

SEQ ID NO: 42232 - DNA, 826 bp, Setaria italica
  Peptide Sequence Number=SeqID_108206
actctctacatttcaagcattcggagaattacagagcagaaagattaagagaaaaaggtctagctaggccaccatcagctaggattctaaacagtatatgaaaaggccctaaccattgcgtgctaagagttagccactagaatttaagaaggtgcagcagaaaaactgaatacatcttcagaggagagaaaggaaactccaactctacactcttctgtttatgctttgaacatttctcaagcaactgatttgtgtttggagaccactccaggtaggtggagctcctgcaccttatagctaccatcattttcattagtaattatgcatccttgcagcaatctgattgctttgagcaggtctccgggagacggcaggctatatctttcccacccaacagtgacactccatctgcttcggcttttgagacacattattttcttctttgatttgaagctgaatgatttcctccaatgtggtgagcagcaatttggaatgaccagcttgcaacgtggaatgagcagaagcaggagcaaagcctcacagttcatgcacaagcacaaagaaagttgccccaagcctcaattgcctttcagcaggaaatgctgtacttgtacgtaccaaccatactaagcacacgtccacaagagaatatgtcctcttacttccctaggatctttgtagagcttattctgctagggctagttcgttgtcactgggcaaagtacatccagatcactcgccttgacgtcaagtttggtcctatggttctgctgatctgcgtcattagtattggccaggtcttcagattggcttagttgtccttgta

SEQ ID NO: 42233 - DNA, 1563 bp, Setaria italica
  Peptide Sequence Number=SeqID_108207
tttacttactttagaatttagaaagacgaagctgaatgatttcctccaatgtggtgagcagcaatttggaatgaccagcttgcaacgtggaatgagcagaagcaggagcaaagccaaccatactaagcacacgtccacaagagaatatgtcctcttacttccctaggatctttgtagagcttattctgctgctagggctagttcgttgtcactgggcaaagacatccagatcactcgcctgacgtcaagtttggtcctatggttctgctgatagtattggccaggtcttcagattggctagtgcctgatgcgggtagagtatgcataggatttgatttttcttcacaatagatggcatcaatgagattgttgattctatgcatatcatggttgctgtcaggcaatctagaagacgatgatatatgatctgaaaaataaatttcatgaatacagcgtgaagcgaaaacagagatgactcctaaacaattaaaggctgtgcatatggatgacaaccctcacaactgcagattctaatgtaagccgagaggggtgagataaatataataaggatattaagaactcttgcaatcaattataaaaagaaagcaaactataaaggaaacatattcaaatgctaaacatgttggttgtgccgatatttacgaggtagctaattcaatgcagatactagagatctaatcttgacacttgctctgccacagaaatgaccaaacagcaagcaaacagaaagaagctccagttccaacaataattgttcagataaacaacgtcagttcagattttctctattagcaagaacaaaagaagcaccatcttttcttggttttgatccaaaaaaaattgggatgcaccagatggaagtccaaaatgagggagttgcagatcaaggttcagaaggaggaaggactaatctctgagtctgcataaaataaagatgagggcatagacggtgcagtgaagaagcttgactacaggagatcaatagcatgattaccaacaaaactaaataagagaatgcagcttggaatttgagatcaatctagattataactggaatttgagacagaaatgaatcagtaagggggactaaaggttataccaaatcaggaaccatattacgttagtacagatcctaatgaaggacattattaattagaccgtaaacaaagatatgtaccgctatgttaaatatggagaaacattcacaattatttcaaaaatatgaagtttgcaagataaattagtcaggttggaaatgtagatattagaaggaagtctgcaaatgtagtctgtgcacctttagcttgaagttgcaaaatgaacggggccaacatctagctgagaccttactcaaaatagatttaacttccaccaacggatgggcatgtagggtgactgaaccaaatcaagcttgtgcaaagcattgtatattactggatggaagaacccacagatgaaatcggctagaactcagaatgtacttaagaagaaaccaaccaaacagccatcaacttaaatatggatccaaaatagtagtagtaa

SEQ ID NO: 42234 - DNA, 5147 bp, Setaria italica
  misc_feature (1)..(1): n is a, c, g, or t
  Peptide Sequence Number=SeqID_108208
ntttttttttttttttttttggaccaaaaaggaaagttcaagtagtccaaatcaatagcaaagttagtctataagcatgcatacactcagctacatttatttgtacagattatccaacagatcacaggtggcaagctggcaactcaagtccagtagaagtactagtcctcccagcttccagactatatcataactagcaatccaaaatcagaaaaaatgtaattgttattgactaatcacaatttcatgatgatggtattcttcattttagcatcctcatttctcagctccaataggtgcaaataatgcaatcatagtaagaagtctgcacactttagtcctcacctatgttgtattgttgttgcttggatcatttgcgcaaggagatcggttgatcaaatgcaagctggaccatcctagtttgtagctaacctaagatcactattttacatagaagttgaacacactaatttgtccatgaccaaacagaagcaaccccatctttacaaacaatacgtacaactgacaaatcgaaaccaagcacagaatttaggttcacaaggcaaaggtggacaaacccagttgattactgaaaagagtcaaagcaaacactgaaacttccgtttggctataaagatatcccacttcaaacacgggcaaatcaacacatatagcttgaatgatctcaaccagataacttcaacccaaattcttgaaactgaaatccaggtggttagctcaatgcagatattagagatctaatctgacactcgttttgccacagaaatgaccaaacagcaagctaacagaaagaagactccagttccaacaattgttcagtgaaacgacgtgtcagttcagacatttttctttggagagaacaaaagaagcatcatcttctcttggttttgatccacaaaattagaatgctgacggaagtccaaaatgagggaattgcataacaaggttcgggaggaagggctactccctcagtctgtagattgaatcagatagcttcagcccaaattcttgaaattgaaatccaggtagctaattcaatgcagatactagagatctagtctgacacttgctctgccacagaaatgaccaaacagcaagcaaacagaaagaagctccagttccaacaataattgttcagataaacaacgtaagttcagattctctattagcaagaacaaaagaagcactatcttttcctggttttgatccaaaaaaaagggaatgcaccagatggaagtccaaaatgagggagttgcagatcaaggttcaggaggaaggactaatctctcgattctgcataaaataaagatgagggcataaacggtgcagtgaagaagcttaactccaggagatcaatagcacgattaccaacaaaactaaataagagaatgcagcttggctattcacagaagctagggtttgaataatcgtgatatgatgattatctggattataactggaatttgagacagaaataaatcagtgaggggactaaagattataccaaatcaggaaccatattacgttagtacagatcctaatgaaggacattattaattagactgtaaacaaagatatgtgccactatattaaatatgcaattatttcaaaaatatgaatgagtttgcaagataaattagtcaggttgaaaatgtagatattagaaggtagtctgcaaatgtagcctgtgcacctttagcttgaagttgcaaaatgaatggggccaacatctagctgagaccttactcaaaatagattgaacttccaccaacggatgggcatgtagggtgactgccaaatcgagcttgtgcaaagcattgtatattactggatggaagaacccacagatgaaatcgggtaaaactcagaatgtagttaagatagaaccaaccaaacagccatcaacttaaatatggatccaaaatagtagtagtaatcaggatattagcaagagtaagtgtgagctcttgttaggaggaaaaatcttacaagtcactccgaacgtctaagcatggtactctccaaataactggagaccaaccaaccaaccatcaaccaaaattgaacaagtgaactggaagtaatgttgtagacaataataagaactaagggcaaactctgggaaaagagcatcttcttgtggatgtgaatcacgagactgcattggagcatccaaacagcttcagaatgtcctatgcaggtcagtccaagtaattaagctgtacatcagtatctgctatcgtaagttctctggtcagcaagtgaaggtgccagaattttgaagatgtatcagactgaacttatcaaggtaaattaaatggagaatgggatagggataggcctggcttaggggagagcatgcacataggagcaccaacaatggttggaaattgtatctcagcacaactgcaagaactgttgttgataagtagacataggagcaccaacaatggttggaaattgtatctcagcacaactgcaagaactgttgttgataagtagacagtactagaagcctccttataatttcaattgttggagctcaaaagatttcctaggcatccatatataaatttaagtggctggaaaacagaaggaactgatcagaacagatggaggcagatattaaactgtgcagaccaaacaaatcaggagtcaaatcaggagtcaagaggctaagcatcataaatttttgcagtctgctaattccgaaaatatccacttgaccacttccaatagcatccttatatatttgaacattgaatccaatcaaatctcgcatctacccataatatcatgatggcattacaatcacgtaaaggataataatgaaactactgtcagccataaccaaacctctacactgctcgatctccacaaccaatgcccatctgcattcttaagaacacaaacaccacagccgagattagcttatgcaataaatccagggtctcaaaccttgttccgcaatcatcattatccattggtgagccaggacagcaaaccattcagatctgaaaccattgaaagtaatggaaccagaataaccaaaatgaccatgcactagactctaacctgccccccaatttcgagtgctggttcttggatacaggtaagtcccaacgccaaactaaccctgcaacaaccacatgacaaaccgagcacaaaaacatagacggaagccaaatgaagtgaagcaaaaaaaaaatcaaaccacagatagaaatcccaaaccagactttatcaccagatcagacggacaaccaattagttgagctaaatgatctgcgaacataggaatgcaagcagcaccggaattaaagctacgctcaaagcatataacagataaaaacagaaacaagttaagtgttaaaggtgtaaacgagttgtagttataaaattccccacgctgcttgaatctcccaggtatgctcccaaccttttaccactgcgtaacggggtatccaagattttcaactcagtaaagttatcataattccataaactagcatgttgtctcaaaattaggagcaggttagaagtactcccaacacattccgcttccgcttcccactatcagttctttcaaatggaataggagaagctggtgacctgcaatgatgactatactgtgatcattatctactttgaggtagccactttaacaaactcaaatggaataggagaaggtggttagttttgaagagatgcggagatttcaaatcggcttcctattgctcctgtgcaacacctagcgatctgcaatcagtgagagaccactctattgtaaccatctatttgacacttataaacagcagaaacattcatcaaacaatgcaggcacagggataagatagggataaagcctggtcaattggtgacaattccagctgcaagtcctatctctgcagtgatgcctccccaaactgcacaattactaacgaagcatcagaggtagcccttgaggaaagtcaaatgtcgaagtatgttggaaggagagaggcttattagtgaacaaacacacggaaccccacacggttccgattgctcaagcagaatcaaactccccctccaatccatccatccatataaaatccgactgctggagaagaaccaccagcccgaatatcagaattgcagcggacagaaatttaagagtaatggaccaataagaaaggagctgagaggtagagatatccaaacgatggggttctcccggcgctatgaactcagtccagtcaacgtctcaatcgacctccaaaacaccaccctgctgcctctgcagatccagctaacaggaatggccatactgtcaagcttctaattagtctggtggcgatcctcacaccaccacgatatgatatcaaaaggaccataacaacaaataaaaaaggacagataatccataagcaaacctccaccgctcaactactctccttaaccagcaaggacccttccttaaatttctgcatctaagagggagatgacaaacacccacaagcgtgatcagccgttaaaagaaatcgaccaagtatcgaatccacctcatcgacccatgatccggctatcggagaagaccgctcgataatacgaggccagagggcgagatcacaccgggatgatttgagcctgaaaccaccgattccgagtgacaaaaccaatataccgccggatctgacgagagactgacctgcctcgacctccttggtacttggcacacgacggcatgacgaactccgtctcccaagtcccaactcccaatcggtacaatcctgcaacccacacgctgagaaggcgaaacgaggatcgaaacgagaatactggagaaatcgaatcgaatcacaggaaaaataaaccgtaaaccgaacaagtcgaccaaaccgactcgctcccccgcgccacacccacacggaggcgcgcacgcggatcgcccccaaggaatctgcgaggacgcaagggcaagagcggcgaaacaaatcaaccggaggagaagaaacgacccggctcgaaatcgaaacggagagaagcgaagcgagaagcgagaaacgaaaaacgcaaacgcgacgaggcgacgaagacggggacaggcaaggcgccgaacaccggacggagagaagaagcaaacc

SEQ ID NO: 42235 - DNA, 623 bp, Setaria italica
  misc_feature (134)..(134): n is a, c, g, or t
  Peptide Sequence Number=SeqID_108209
tttagtttaggtttatttttcctttagttctttgttatttcggttagttattatttagggttcgaccgttaaaaggcaagagtcttgatcggcgaagatattgcgagacaatggatgtagagttggtcaagggnggtcaaattcatttccgactcttgtacgagtcattttatttagaaaagtttgtttctttacttacagatattgtattgcgtcataatcaattaggacagatattgtattgcgtcctaatcaattaggactagaagtcttgagtttaggatataaatagaaacccactagaagtcttgagtttaggatataaatagaaaccctgtaaggtctgaaaaaataggtacgcacaaacaaacaaatctattttaatcgtaatttactttcaagttggtgacttcgccaaagattctttttcttcacgagttctccaagctagcagggctgtatcatcttgatctccagctggactgtaagttccgttttaacgagtaatttctagactttaacttccagtgcatcactgttgtttcgtctagatttattcatcaagttatcgatattcactagatctgcaagttttattttattattaaattctttgtttgtct

SEQ ID NO: 42236 - DNA, 318 bp, Setaria italica
  Peptide Sequence Number=SeqID_108210
gcaaacaaaaaggaaatgacgccttgtctgatttgaacaataaaatttgacaagttcattgaagcaagcaacaaaaacagggcagagagagagaagatgatagaaattcagcaaagtttggctgataagaagattgaagcagctaagattagtcatgaagcagctcatgaacaaactaagtgcaaaatgctggaaacttacacacagctactgcttacacctcatgatcagcttaatgcagatgctttggctgagagaatttggcactagagagcatgagacttgctttatttcctaatgtatgccactgtccaaccc

SEQ ID NO: 42237 - DNA, 557 bp, Setaria italica
  Peptide Sequence Number=SeqID_108211
tagacttgctgtatctgtaagtacaaaatccagtatactatgagttccttagaggtctggtgtgtgtgttatgttggtgtgcatgcctgtgtttttgatatactgaaggctccagcggcttccaggtggtgactgactgactgttgacaacgatcaacaggggtgctactcttgagctaaatcaaccttctgctggagataagaaaggcagcttaggctttgcccaggctcgatttaatccttgggtcctccactgggtagggcaatcagtagcactgtattctgttcccttatacagtgtattcagaataaaaacaacaatatatagtgtaattactaaatagataccagcagtgaatgttcattgtgaaaggaggcggtgtcacttattgatgcaatgatggaggacggcattgcactgtacaggggaaatttcaactcaattacttgtttgtattgccggatagaatttaatccaacaaacaagacaaggtttgattagcctatgatcatgatttggcaatgtaggcttgaagttgaaaaacatagatatacca

SEQ ID NO: 42238 - DNA, 991 bp, Setaria italica
  Peptide Sequence Number=SeqID_108212
gctatatatttgtagataagaatgaaaaggtttctcaaaagggtggattcaagactaatggtttgctatttaaattgccatcacatatttaccatacatgtagtttcgacaatttgccactcgatcgaaacattggcttcaccaaaataatacttaaaaggttggttctttcatattttgacaaataagtccttttgtatatacttagatgtctcgctctcaattttctcagcatcactgaaaattagcatcacctcctgcagtggtaggagtgatgcccaaatcttttctcttctctttgggcatcactctggcaacacactgtggaggacctttagctgcagctggagccccggcgaatcagctgatcaaccggagaaggagcaggggcgtcggcgttgctgccattgaagcagtaagccggcgcctgccacttgccggagtccggcagcactgcccctgcctcaaagctcagcacatgccgctccatcccgttgaagttccatccgacggggcggccggtggcgacgtcctcgtagtagcgtgcgaagaggaagttggaccagacgtggcagtcgaagccgtcgaggcggccgcggcccaggtaggcggcgccgcgggccttcttccagtcgggcggcaggaggcccacggcgaagtggaaggtccagcaggacgcggcgtcgaagaggaaggaggtgccgttggcccactcgacgttccggagcggcggctcgccggcggcggagagctggtcgcggatgacgttcacggagcgcccccgcggccagtcgtagtagctgtcgatcacctgcagcctgccgctttttgacgtcaggttggtgatcaccaccgcgtggaactgctccggccacggcgtcgttggcgacggggcaggcggcggcggcggcgtgatcttggcgctggccgcggcggcgaggaggggtaggagcagaggccacatcatcggcgtctgtgcgttccgaccggc

SEQ ID NO: 42239 - DNA, 393 bp, Setaria italica
  Peptide Sequence Number=SeqID_108213
tatagtagacgagcagctaagagagcgcgtgctggccgacgagcccttcggagagttgcagcgcgcgggggccgacgggtcgctcgccttgcagactgcctctgcggccaaagcagctgcagataagaaggctcgcaggaaagaaggctcacgatgcccagctgctggagatggagataagcacgaaaatgcggctaccgaaactcagggaggtgatccagattatggagatgagttcctagttagcattgagatgagatgagcagctacacaggtttattgttgatatctgagataaggtggccaagctgttaaacatgtatggttatggttcttgttcatgaatcatgagatgcctgtcattgtgcatctgagatgcctgtcattgtgcat

SEQ ID NO: 42240 - DNA, 1852 bp, Setaria italica
  Peptide Sequence Number=SeqID_108214
tctggaaagcaaggagcctgttgtgcaggttgcatctgggtcatcggcatcggcattgccacaaagtggtgcagggagtggcgtgccagatggtgatcgtggctgctggtgtcttttccgcatttcgatccttaatcagaagtctggtgggagccatatccacaaggattcatatggtcggttcggggcggacaatgccagccttgggtggggtgattacatcaaaatggatgagtttttggctgctgatagtggatacctggttgatggagctgtggtgttcagtgcctcagtgcacgtgataaaggagtcaaactcattcactcgtagcttgccgttggttctgggaatgggtggtgctggtggtgggcgtgctggagctaggaagtcagatggacactttgggaagtttgtgtggaggattgagagtttcacaagactgaaggagcttctcaagaagcgcaaggtcacaggtctttgtatcaaaagcagacggtttcaagttgggaatcgagattgccgtcttattgtttatccacgggggcagtctcaaccaccatgccacctatcagtatttctggaagtgacagatccccgaaatacaactactgaatggagctgctttgtgagccatcgtctctctgtcatcaaccagaaagtggaggagaagtcgatcatgaaagagtctcagaatcgttactctaagtcagcaaaggattggggctggcgcgaatttgtgacactaactagcctctttgatcaggatgcaggttttcttgtacaggataccgttgtgttttcagcagaggttctcattctgaaggaaacagcaactatgcaagagctaattgatgaagattctgaaatatgcaattcaacttctggatgtcagattgaagctttaccaaagcggccatcatttacatggaaagtggaaaatttcttgtcctttaaggagattatggagaccagaaagatttttagcaagttttttcaggctgggggttgtgagctgcggataggtgtatatgagtcgtttgatacgatatgcatatacttggagagtgaccagtcatctgggtatgatcctgataagaacttctgggtgcactataagatggctatagttaaccagaagaattctgcaaaaactgtgtgcaaggaatcttcaatctgcacgaaaacatggaacaattcagttctccagtttatgaagatttcagacatgcttgatactgatgctggcttccttgttcgggacactgttatttttacttgtgaaatcatagattgttgcccatggtttgatttctctgatcttgaggtttgggcttcagatgacgatcaggatgaattgtcgacagatcctgatgaactcattgattctgaagatagcgaagatatgagtggtgatgaggaagatatgttccggaacctcctcttaagagctggattttctcttacatacggagataactatactcaaccgcaggttactttaaaggagaaaattctaacagatgctagtgcgattgctgggttccttactggcctgcgtgtttatctggataacccagcaaaagttaagcgtatgcttcttccgaccaaagtatccaccaagaatggtggaaagaaagatgcttcgaagtgtgattcaagctccacaagtctcattagtctgctgatgggggttagtgccttgaagcaggctatcatagatttgcttctagatataatggttgagtgttgccagccttcagaagaaagtggttcatcagcaagctctccaccagagcttagtgttgaaggtgaactaacagaaagtgcatgtagtaatgtctgtgcgattacg

SEQ ID NO: 42241 - DNA, 444 bp, Setaria italica
  Peptide Sequence Number=SeqID_108215
ttagtttacctttaattttacgttttaaggtttatgccatcgtaggcgccgagcccttccaccatgtgctagcactatcgttgcaaccttttgtcaacgaggtgcacacctcatcagcaccaacagtactgggcatgaaatcagcagtaggcttcccaccgcaggcgacggccgaggcagctccagagcagcccaacggcagtgccggcagctgatataggccacaatggtcggaggagagcatcacgccatggttctcggactcttcctggtcaaacggcatctggagaagcttgtttggttggctcggtagttgaagtgggagaggaagagggaaggcgtagtgatccggcacgaggaagctaggaaggcaagcccccagctggcctgcctccatatatgcctgcatatgtgctagtgatcgatggatggatcaaagtggtt

SEQ ID NO: 42242 - DNA, 176 bp, Setaria italica
  Peptide Sequence Number=SeqID_108216
cctatcccctgtgtgccttgcctatccactgttgcgtgtctcagctggctggcacatggcaacgtgtgctctcctagaatctgaattctggatcaacgtccatcgcccacccaaacttcgcaacaagtgatttgttgaaaatcttctctatagggacttcatggcgtttgcaccat

SEQ ID NO: 42243 - DNA, 516 bp, Setaria italica
  misc_feature (12)..(12): n is a, c, g, or t
  misc_feature (516)..(516): n is a, c, g, or t
  Peptide Sequence Number=SeqID_108217
tttttttttttnttttttttttttttttttttttcttacgagtccagcgagatccgccactcaacaagtcactaattgcagctaggaaaggaagagcaggggggctttgaaaatcaaacaccgagctcttcctttcctagctgcaattagtgtctggtagaagggcgggaagctggatcaaactggctggcacatggcaacgtgtgctctcctagaatctgaattctggatcaacgtccatcgcccacccaaacttcgcaacaagtgatttgttgaaaatcttctctatagggacttcatggcgtttgcaccatgccacagtaattctaggatcaaggtagttgatctttgacgttccaagtgcaactgtcttcagatcctcttttgtcttcttctccatctccatcttctcaatcttggtttcaattgctgcaatcttcttttcaatcctgcaagtggattttgtgatattgtcgacctgctcttcatttatatatacaaaataaataaaaggtn

SEQ ID NO: 42244 - DNA, 477 bp, Setaria italica
  Peptide Sequence Number=SeqID_108218
tgcaaaatgccatccaatgtaatagaagcattatatgtacggaacacttttgcagtaagcccaggcattaggtccttcaggtgagcgtttagcctagttgtatcaagctggtcaaagagatcttttcctggtttcttacctacaagaccagaagtatgagggcagagatagcggaggtttaaaacaaatgaaaaagaagaggagaatagtagagagataccagcacggaaaccctcaattgccttgtacacaagctcttcaacctctacggtgttaaaatatcttatagaatctttacccagaaagtcaaactggatcttatttgggggcaaacaagtaacattatcaaccttcagcgtacagcaaccaacagtatcagcttcatcttcatccttttcattgcctgccctaagggctagtttatctataaggtatgttgccacagcaatttgcctctttgccacatctttgcttctg

SEQ ID NO: 42245 - DNA, 3159 bp, Setaria italica
  Peptide Sequence Number=SeqID_108219
acgtttacgttttccttttttcacgtcgttgtcctagtttttagtacttctttttttgttatctaagatctttgatcaaaatttacacctcagcatttcttcaattaccatcgaacggttctcaggtacaccatacattcatcgattcctgggtgaaatgaaaccacatgacccaacacgattcacgagtccagcgagatccgccactcaacaagtcatctatatttgagattaactcggtataaattgaatgtccatccgttctcaaacaaagctcaaattcctcagcaaaatgcatacagaacttaacgcaacggaacggtggcaagtacaccaagaaccaacaaaataggggcctacaaagaaaatgccgggtgcttccttcgttccaggagcaggggggctttgaaaatcaaacaccgagctcttcctttcctagctgcaattagtgtctggtagaagggcgggaagctggatcaaactggctggcacatggcaacgtgtgctctcctagaatctgaattctggatcaacgtccatcgcccacccaaacttcgcaacaagtgatttgttgaaaatcttctctatagggacttcatggcgtttgcaccatgccacagtaattctaggatcaaggtagttgatctttgacgttccaagtgcaactgtcttcagatcctcttttgtcttcttctccatctccatcttctcaatcttggtttcaattgctgcaatcttcttttcaatcgcatcaggggccaagttcctcttttgcttcccttctttatcatagcccagaggctttcctttcttcgctttgctcaagtcaacttttaactcatctctctgggcctttagatcatcaatcctttcattcagtctggtcatctgggactcatgtgattttgacacactacgttgatggttacagattatggcaacctctttgtttgctcgctgatatacagcgattttttcaagaagagttccatcttctgtttccttgtgcaaaatgccatccaatgtaatagaagcattatatgtacggaacacttttgcagtaagcccaggcattaggtccttcaggtgagcgtttagcctagttgtatcaagctggtcaaagagatcttttcctggtttcttaccagcacggaaaccctcaattgccttgtacacaagctcttcaacctctacggtgttaaaatatcttatagaatctttacccagaaagtcaaactggatcttatttgggggcaaacaagtaacattatcaaccttcagcgtacagcaaccaacagtatcagcttcatcttcatccttttcattgcctgccctaagggctagtttatctataaggtatgttgccacagcaatttgcctctttgccacatctttgcttctgaaatccttcgtgtagttgtcacgaatgtcctgtatgtaaccctttaattttctggacttttcatatttctctttgtcactttgccccttaagtgagctacttgctgccaggaaaacatacttgaagtctttttggctaattggatcgttccaaaaggccaaccatgttacagtattgtcatgtttgacttctttccatctttctccaggtatcggacactcagggactggagcatcttctccgatatttattgtaatatcgcttggtttaatgcgccgtttcagtttccccatctttggatgttctccacgtcccctgaataacccaggtggttctactctaaaattgccaaccttctccttaacaccatctacaacagcccacatgtacttctcctcttgcttcaatttctcttctcgcaatgcttttttctcctctgtcgtcatctgcttcttcttctccttctctctaagatgccattcatatatcggggtgaaatcacaaagctcgaatttcttaataacatggtttttaccaaggagtgttctccagtcagtgaaaaagttctcaatgaatgttggcttgcccgcgtagtctgtgtctttcatcacagcaaacattgttgcaacctcctcttgctctggtgtaagatcaacaggttgcccattgtaaagcattttgacaccatgaggcttgtatggtggagggaaaataacaccattgtgctccaaggtagtccatttctttccaccaccagatccaggagggaccttcattgtctttgagaactgagaatttttcatcatctttgttttcactttccctttcatcttcttgatgcccttcttcatagaagcaggactcttcttgacgacattctttgcagatggcttgcctttcgaagactcgccaattttcagcctttgtgcaagaggggtgttgtcattgtcatctgccttgatttctcttttaacacttgctgaagctgatacattggaaggctttgccttcttgagagctaaacttgtttgattactgttatctagaggccttttacccaaatttcgcgggccgtttgaatcattatttaaccccttgctggaagaagtcaattttaggtttccacttccagaaacttttgagaatcgggccgccaatggcttttcgtcctctgaatcttcagaggcattacctccactttttggagcagcattagtaggcaacctacttgccaatggcttatcatcgtctgaatcttcatcaggctgctcaacttttgcaacagctttctgcaaaacaggcctactcgcacagttggaagacattttggatgagttgatcttgagactcaatggcttatcatcatctgaatcatctgctttctcatcaactctctttaacttcttctcctcaaccttcttccttaacccaatcggcacatcatcatccgaatcatcagagttctcttctttcacaagaggtcttttcagtttgctcttatcgttgctgttactcttcgaactatgcgctgccgaactgtttggctggccagacccagaagggcgctggttggggctggacggcggcggcttcatatgcatcggcctcgacacgctggcactcaccccgttcttctgctggttcggagccacatgcttctggctcctgacaggcaccccagcaccccctgacgatccctcctgcttggagggggtaggcctgctgctcttcacggagttgctagtcgtaccttcctt

SEQ ID NO: 42246 - DNA, 1506 bp, Setaria italica
  Peptide Sequence Number=SeqID_108220
ttttttttttgagagagactgcccacctaatttcattcatccagagcttcttgcaagcccgagaaaacttcaggttcagcaccttttagtacaaagcaggggaagcaaagagcacttctcatggcagaatttgggagtcgggaaatttgggatggcgtgttattgacggacgaccacgctacacccaaagcgtgtcaaatgctaaatcttatctcctcctacggacctaagagcttgagcacgacggggagcccgtgccggggctgaagcgtcaggaagtcggccggcgcgtgcacgtactccggcgccacctcgaacgcgaaccgctgcaggatcagcgccagcgtgatcttcgcctctagcatcgcgaagtcctgcccgatgcacgaccgcgggccgagcgagaaggacagcagcgccctcgggtgcgcggcggccctgccgacgccgtccaggaaccggtgcgggttgaactcgccggcgtcgcagccccacacctcctcgtcgcggtgtagcatcgcgaacgggagagacacgagggtgcccttgggcaccttcacgccgcagaggtccacatccgctgtcgcctgcctcatggttaaattaaccgcgccgtacagcctcagcgtctcgtacaacaccatcatcaccagcttgagcttgctgagtgcgtctccgttgaggggtgtccccggcgccgccgcactctcggagcacctcctccctgagacgccgttgccactcggggtgcgtgccgaggaggaacatggcccaggtgaggaggtgcgcggtcgtgtcgtgcccggcgaagaagaacgtcttgcactcgtcgattatctcgtccatgttcatgaccctctggccgccgccgaagccggcgttggcctcgagcatgaggcccagcagatcggtcccgtaccccctcgcctccttggcggcggccaggcgctcgtcgatgatgaccatgagcgtgccccgcaccttgcgctcgagctgccaccggcggacgttgtttttggtgggcaggtactccatccccgggacgcggaccttgttgaaggaggcgaacgcgatgtgctgcagctcccgctgcgccaggaacacctccttcccctgccggaagctgctgccgaacgccgtgtgcgagattacgtcggcggtgagctccttgaactggtgacccacctccaccgtcgcctccccgcctgccgcctccgcggcgcgcgcctcccacgaccggaccacctcccccgcgcacgcctccatcgcgcgggccatcgtcttgagcttgtccatggcgaacgccgggtgcacgacgctgcggtggcgcgcccagtcctcgccctcggtcaagacgaggcccctgcccatcagcgccaccaaggcggggcccggctccggcttgcggtacagccccgccttgtcggagaggacccgcttcaccatgtcgtagttgcccacgcacagcaccggcctcgagccggaccaccagaagaacaccttgcc

SEQ ID NO: 42247 - DNA, 256 bp, Setaria italica
  Peptide Sequence Number=SeqID_108221
gtgtgcaacaactgccttgacatctacctgtaccggcggaatcccgacttccaccgcccgaggaggggcctcaagcgctacctctggtgggggtgggctttctggtggctgcgcgagatggtcgcacggcaccgtgcagccagccagctgcgtgagctcaaggaccgggcgcgggacgttggggagcggcggttgaggtatggcgtgaaggtctccgatgggacaccgaggcgttcgtcatctcctggagctgtgg

SEQ ID NO: 42248 - DNA, 566 bp, Setaria italica
  Peptide Sequence Number=SeqID_108222
tacttcgtaactaagtcttttgtcttagttagtctaaaggtaaattttttaatttgtcttgtaaaactaaggggtctatttctagttaaggtttccacgatgttcatgtagtctctccttgtctcccgatgacattttttgtacagatatgagccatgaggctggaatcaatgaactggtgcagtgctgttaagacgtaggtcaagtttccagaataacatattgcttttccttcagagaagttcttccaaactgcgtttgtatgttgcaacagaaccttgcaaacaaactccaaagaatccaaatatgccatgagagatatattatcacgtgactgagaatcgttgtgcttctttttcgaatgaccctggtgcgccaatgaactttccatcccaaagccatctagtggaatggatctgccattgataatgtaaaaaaactgtgccagagtgcaaagtgcttcgtttaaagcttctaggtacttttcatcattgagaaaatgttcagatatacaaaggtgcacatcacttccatttgctgggtgctgaagtataatccagtggcat

SEQ ID NO: 42249 - DNA, 461 bp, Setaria italica
  Peptide Sequence Number=SeqID_108223
taaactactcatggctatcttcgtgttgtccactcccaaatcgaggacagaccatgcaggtatgtttgaaaaggtcacttgggtcaagtaaaccttgtgcagagttcaaagcacctgtctcaataaacagctgctgcaaaggctcagaaagggaccctctccaaacatcatgtgctagcagcttgcagcgcagtgtatcaagaccaagcaggctttggagcatcacattaaaaaagcatgagttagtaagatttggcaagccccttatgacattaccatttgtactcatgcggtgagatccctcaaccgtctccaaggctagaggctgcggggtcttcaccttcagctcagggttgattacaatatgatcgagtatagcttccttgcagggcatctccttttgtgctgcctgtccctgcttattattgtttgcctcttcaatcaccttcatatctctttaa

SEQ ID NO: 42250 - DNA, 1483 bp, Setaria italica
  Peptide Sequence Number=SeqID_108224
aataaaaggtcgcagctttttctggcatataatacacgacgcagtgacacagtagccccctagcattcagaggagttccgctcctctgatgcttaaatggctacatgatatagttcatcataaacttaaaatgaagtagctacaactaacagcacagccaacagacactgaaacactacgttctctaactaccaaaaggttacagccataatactcacagcatggcacagttaaggagcagtattagcagatggctcactgagtatcttgtcaacctttgccaaaaggccctgcatatcccccagaagcttatccgtgacagaatttaacccgtccgatggggttgccttgtttagagctgaaagacgggctgcaatcatattctcaaggttcttcctgatatctgtcagtggaggcttggaagcaagagatggtgaaggtgaaaggcgaaggagatggagaaggcacactcaacttgatcggaggaagatactggagacttagtgttgcaaatggagccccaaaatgaccaagaagttctcggttacggtatgccgcctcagcttcggtgtttttcccaaacacaacacgagcactgcggtcagcttttacaatttctgtctgagactctatcaagtagccatacttgccaaatgcggagagtagctcctctctggaagggacaatgacaccaggtgtgaactccaccagaatggctgctggattctcaaagtgctgtgcagttttcttcttccttttattaggagtaggattagcaggatcagggcaagtgccgttcacagcttcaccagaggaatgatttgatgcagctccagcaggtagcttcaccttctggacaggtgcttcatcctttggacactcctctttgagtgcgtgattcatagcgattacatctgtgccattagtgttctctttcttaagcatttctggcaccagggcttgtagagaagcataagattgctggaccgtacacacttctacacttccaggctctttattttcatctataggctggggctgggccatgtcatcatgcataggagatggtccactgctgatgggcgcatctgcaacagcacctagcagattctcaactatgtgaatatttgcttctgactttgttgcttccttcgaaacacttctgtcaggcacacctgcaaaagcactttgcacattctcatctatgctggtatcaactcctgactctgttgcttccttggaaacaattcttttcggaacacctgtaacattaccttgcacattcttgttgctgtgtaaactagcttctagctctgttgcttccttcgaaacacatccgacagggacatctgcactgacactttgtgcattcacatctatgtgaatattagcttctgattccattgtttctgtctgaacatttctgacaggcacacctacagcaacattttgcacatttgtttctgactttgttgtccccaat

SEQ ID NO: 42251 - DNA, 373 bp, Setaria italica
  Peptide Sequence Number=SeqID_108225
cgcgcagtcgccggcggcgaactcgggaaccgtgccgcccaccgagatcgcgctccagcccgtcgtcttcttcaccccgcgcagcttcatggcgcgccgaacgcgcgccacgtcctcccagcggccggcggccgcgtagatgttggacagcacgacgtagtagccgtcgttccccgggtccagcacggcgagccgccgggtcgcctcctcgcccacctcgacgttcctgtgcagccgcgcgcctcccaggagcgctccccataccacgctgttgggctccacgggcatgccgttgatgaactcgagcgcttcctggaggtggccggcgcggctgaggaggtcgaccatgcagccgcagtgctcgatctccgga

SEQ ID NO: 42252 - DNA, 928 bp, Setaria italica
  Peptide Sequence Number=SeqID_108226
cagatttggtcaagtaaattatgaagacccaaacttcaatgttggcctgcctgtgttcactatccatggaaatcacgatgaccctgctggagtggataatctctctgccatcgatattctttcggcttgcaatcttgtaaattaatttttggaaagatggatcttggtggctctggtgtcggacaaatagcagtttatcctgtactcctaaaaaagggcatgacttctgttgcgctgtatggtcttggcaatattagagatgaacgactgaatagaatgtttcagacgcctcattcagtacagtggatgcgtcctggaactcaagatggagagtcagtgtctgactggttcaatatattagttcttcatcagaacaggataaagacaaccctaaaagtgccatcaacgagcatttcttaccacgttttctggactttgttgtgtggggccatgagcatgaatgtcttgttgatcctcaggaggtccctgggatgggtttccacatcactcaaccaggctcatcagttgcgacctccctgattgatggtgaagcaaaaccaaagcatgtccttttgttagaaatcaagggaaatcagtataggccaacgaaaatacctttgaaatctgtcagaccttttgaatatgctgaggttgtgttaaaagatgaagcagatgttgaccccaatgatcaggcctctgtgcttgaacatttagataaaactgtgagaaatctgattgagaagagtagccaaccaacagccagcagatcagagcccaaaacttccgttagttagaatcaaggtagattactctgggttttcaacaataaacccacaaacgttttggtcagaaatacgtaggcaaggtggcaaacctcaagatattctcattttctctaaatcagcaaagaagcgtcaggctacgagga

SEQ ID NO: 42253 - DNA, 1567 bp, Setaria italica
  misc_feature (1469)..(1469): n is a, c, g, or t
  misc_feature (1473)..(1473): n is a, c, g, or t
  Peptide Sequence Number=SeqID_108227
cctgattgatggtgaagcaaaaccaaagcatgtccttttgttagaaatcaagggaaatcagtataggccaacgaaaatacctttgaaatctgtcagaccttttgaatatgctgaggtatgtctcttgtattttatgcttcttatgtagttaatgaatctcagaatttatatttgtaggttgtgttaaaagatgaagcagatgttgaccccaatgatcaggcctctgtgcttgaacatttagataaaactgtgagaaatctgattgagaagagtagccaaccaacagccagcagatcagagcccaaacttccgttagttagaatcaaggtagattactctgggttttcaacaataaacccacaacgtttttggtcagaaatacgtaggcaaggtggcaaaccctcaagatattctcattttctctaaatcagcaaagaagcgtcaggctacaggagaccatattgacgattccgagaaacttcgtcctgaagaactaaaccaacaaactattgaagctttggttgcagagagcaacttgaaaatggagattcttcctgtggacgacttggacattgcattgcatgattttgtgaacaaggatgacaagatggcattctattcatgtttgcagcgaaatcttgaagaaaccaggaataaattgagttctgaagcagataaatctaaaatcgaggaagaagatataattgtcaaaattagcgagtgtatgcaggaccgtgtaaaggaaaggtcccttcgctccaaggatggtgcacggttcctatcaagctctcaaaatttggatactggaggaaaatctgttgcagcccaaagcagcctgaactccttcagtgatgatgaagacaccagggagatgcttcttggtgcaagatcaactgaagttggaagaaaatcatctggatttactagaccttccaaagatactactgatgttgctaaacgtggtgcttccaaaaggggcaggggaagaggcactagctcaatgaagcagaccactcttagtttcagtcagtcgaggtcaagtactgttatccgcagtgaggaggtggcatcatcctcagaggaggaagcagatgcaaatgaagttgttgaaaattcagaagaagagagtgcgcagcaagttgggcgtaaaagagcagctcctagaggtagaggcagaggcagaggttctactgctaagagggggagaaaaacagatattgcttccatccaaagtatgatgagcaaagatgatgatgattcagaagatgagccacccaagaaagctcctcctcgggcccccaggaactatggggctgtcaggaggagatgatctttaggaagttcccttgagagtagaggctagggatttgtcttagaagagccggctaccttgcatcaacaccgacgacggtttgttctgccggtgaactgagaacgactgtaccttgtacacgctcgagtgcaacggnttanatacatgcttgtgtagatactaaatcacaaccgttggattgtacctgtcatgcatgtaacatgaatttttgaccgttcgatgagggttttcgtc

SEQ ID NO: 42254 - DNA, 258 bp, Setaria italica
  Peptide Sequence Number=SeqID_108228
ttattgttttaatagttattgatatttaattttagatgatgaatttacatatagagtttaattattatggagctcagcatcttattattcaaatgaatatcatcaacaacaacaacatcatcatcatactagcactgaacacttaacaagaagctgccaatgctagcacaattgagtactgagtgtgtgtgtgcgcgcgtgcatgagagcgatatatcccccagagagagagagagagagagagagagagagaggacg

SEQ ID NO: 42255 - DNA, 523 bp, Setaria italica
  Peptide Sequence Number=SeqID_108229
tcggattttctctgctgaagccgtgaactgtagagcagatgccttcgaaccagcagtagcaaacccatgaggcagaatcttgcttaatacaatggcagcatgtctttgcagctgcattagtccatactttagaactactggacttttgtacggagccagcttaaggaaggcagaagcctgaacagtttttgacaatgatgaaaagcccaaaattgctgtacctcctgcaccaacagcgaccacaggcttctcagatatccaactttttttatcagtactgcctggtgaaggtagctcaatattgtcatcattttcatcaccataatggttgaagcacctgctagctaattgagtaatctctgaaggaacaggagtgttccaatgtctccttattccagctaagcagcttgcatcaacaatagccaccacagaatcaaactcttttagttggctcctgagagcttgcacaagaagaatgtggcacttctcatcagattggagttctgaaaactccagcttttct

SEQ ID NO: 42256 - DNA, 708 bp, Setaria italica
  Peptide Sequence Number=SeqID_108230
attattcttttatttatgatcagttattcagttcagtaatgaacttttacatgagcatcacatcaaaagaacggcgcacgttggggaatcccctttcggcgatgacgagcaacccttttttgctggcggttcttcttcattgttttcattgtatatctctttctcactcctagtatttgaatcactaccattgccagaagccacatcttctattcgtttatattcagaaccatttgcaacatcacttggcgtcttcatgtccttttctatgcccgtaagattgcaaccaagagagcagaagcgaaattcgttaagaagggcacggccacaggtctcacagttgtatgatgatgatgacaatggaccacaagtgcgcatttgtggtcgctcgttcaaaaacacaacctttgcactattgatcacataagtttgcacatcactaatatcaaggatatcctctagttcagatacttttatgacatcatggtacgatgaacgcctaatctggattacatgatgattagaatggtggtccaaatgacaatgatagcagaaagcatcaggtggtgcctcgcactcaatgcaaaataggttacactcactacgactagaaaggggatggtttttgcaggggagaaagaattgtgttgtgagcaatagcgatagccatgaaggcaatgtctctcttttcatgtaaactatagtcta

SEQ ID NO: 42257 - DNA, 372 bp, Setaria italica
  Peptide Sequence Number=SeqID_108231
cgttggaagcagttgttatttcggaaaggagcatttccaccaacgatctataatgttgtgaaaggtgaaaagtactgtggggaaatcaaagttggtctcacattcactcccgagaatactcgccagaggggtctcccagatgactgcggcggatggaagcaatctcactgaaaagagcaagattttttgagattccaccagagcacagcgacaattcatgtgcttgaggcattcatccctcgtacacgttcatgctaatgtaacatgaaattcagttgatttggcttctttaattgtttcaaaagatgcatcattagcgagtttaatctaaaaaacagctgcatttgatgtattttataacaaaaaaaaaac

SEQ ID NO: 42258 - DNA, 543 bp, Setaria italica
  Peptide Sequence Number=SeqID_108232
tgcctaaggacctttggtatgatgacggcttcgtcaccaggaatttgtccctgatgagcgccttgaacttgctaaaaatagaaaccctgccactaactttggtcgtaacactaatggggaaatggaacttctcgatcgctctgctgacgtcgcttgctaggggattcaagtggaagctgaccttcttcgatggctcaacgcggtggaagaatgtcttggccgcgccgaccctcgagacgaagagtccatgcttgacgtcaaccttctcgtataggtcgaaggatgcattagggttgacgtcatcgaagccaatagcaaagtcgtcaggttgagattgcgagaagatgggagcagtgtctaggcctcctgcgtcagtgggatcggtcaggtgaccggcttctcctgaattgtcagcagtctctgatatggggtattgtgtgatgcactctgttggattgccactttcatctccttctacaacaatctctcctaggtcgttgttgtgcagcctcactcctctaaggttctccacttgctttttct

SEQ ID NO: 42259 - DNA, 1103 bp, Setaria italica
  Peptide Sequence Number=SeqID_108233
ctacgagaccaaattgctcttcagatgtgggctacccgtaataaatagccatgtcaacggaaagggctacgtggagccagccatgtcaacggaaagggctacatggagctacgcgtatgagaagggacttgtggatattctgaaagagcttgtcaacatcccaatatttaagagatagaatgggtagacaaaagaaagttggaggaatgggtagacagcagaaggttggaggaatatcacaaacaaattcaatgatatatttccaatggcatatttcacgaagtagcaagtgcaagaaaaggagaaagagctaaaaggaaactataaaataataaaagaagtgaggaaaagtggtgttagctagaacgataccttgggtatgatcattgcagaaccaaaaggttgggaaaaattgattaaggataaccataaagttgtcaagttccacaagaagtcatttcctttatataatagcttggaattattgtatgaaggaagtgcgaccacatgggatttaaattttacatcaattgaacccactccacaaagaactaaacccactccacaaagaactgagctgcgagctgaatccaattcacaaagaagtgagttgcgagctgaacccactccacaaagaagtatctcagagcaaagcaatcatagcatggcttatatagatagaaatccactcaattttggtcttggtggtgtagaaagcatagaagttcaatgtgctccagctagtcgtaattcagaggaccaagatgttacaggtggaaagaaatgcaaacaaagttagatggcaacaaaacttgggattacattgactttagaaaggatcagattgaaaaaattctagaaaattagaagagacgtgaagaagactactcaatcgagaaatgtattgacattgtgaatgccatggaaaggctatcggatgaacaaaaggttgatgcaaatgaagttttccaaagtgaaacgatcagaaaaatattggtgggagccaaaaatcaagtgtccggctaatttggttgaagaaaaagattgctcggatatgttccctttctcagttttgtaccctgctcaagtatcggttgaatcct

SEQ ID NO: 42260 - DNA, 698 bp, Setaria italica
  Peptide Sequence Number=SeqID_108234
gaaaattgattaaggataaccataaagttgtcaagttccacaagaagtcatttcctttatataatagcttggaattattgtatgaaggtaatgctttcattgccgtgaaattagaactgatttttttctaaatgtcctctgataaagtagtgattaagctgtcagtctaatcatatgaaggtaatgctttcatctaatcatatgctttcagtctgtcagctaacttaggctaatttggtcaagtttgttagactattagcattgagttaaggccttacaattctaatgttgcagttgtcaaggtcaagactgtgacaaataatatcgagtcaaaactgattttgttgtttttcaacttaagtggtcgaaacaaataatatcctataagactatgttgcttattaggtaatgcacaactgttttctgaatttaattataacctgttgatgctaacccgatgaagttgctatcctataagatcatgttcctagtttcaactctcgctattgtagatgctaagatgttgatattgttaccttgatttttatttaataggaagtgcgaccacatgggatttaaattttacatcaattgaacccactccacaaagaactaaacccactccacaaagaactgagctgcgagctgaatccaattcacaaagaagttgagtttgtcgtagtcttgtaaccctacta

SEQ ID NO: 42261 - DNA, 657 bp, Setaria italica
  Peptide Sequence Number=SeqID_108235
catgtgtgagaaatggagagtccacatgatgttctttctcaagaaatcaacatggaagcataggcgtgagttgtgtccttagagtttataatggtaaatgggttcagatgaagaaagagcacggagagcaaacaggagcagctgctgtcatcatttaaccgttttgtttgacctttcagaatttattcaacaacaaaaatttggtcaaggattggctgcttcaggcacatccttgttgtgaattgggatttgacatttgctacagcactttctaagttcacaccatggtgatagtgtacattggtacggctgatttccatgtgagaaacgacagaatttgaacggaggaggcacaattctgaaggacgaatttcacagattaccacaatataattcaaagcatccattgatgtagcgattggcatggttggagaagggcaagtggattgcaggaagattcttgctgaatgctgaccgaagcttttactttctagccaacgacataattcaaggtccaaggctgtggttgacgcacgtgtttacaaaactgcaattttccgttgcgtcgacacactgcagacaacgacttgcatgatagcaagtgatcttcagagtacaagtgtacgtcggactcaactagtgattgcaggccggctt

SEQ ID NO: 42262 - DNA, 418 bp, Setaria italica
  Peptide Sequence Number=SeqID_108236
atcaggagatcaagcatcaagagggtgaacgtcaaatgactaacgtgccaagcaacactgaaatggttaaagaggaacagaaaaatcaggagggtgaaatcgcagtgacccatgtgcaaggaaacactgaaatagctgagaaggagcctaaccaccatgagactgaactatccaaggccaatattccagatagccttctgatggctgaacaaactgagcaggagcacaagcaaccgagtggtgagtttgccaagacccatgtctctggaagtcctgtcactattccagtcaccatggccacaactgatgggaattctagcaacattcccaagaagcctgaatctgcccagggatttctgtaatgcgttattgtaaatacagattggagtgactacgatagtttctttcagtacttgtt

SEQ ID NO: 42263 - DNA, 411 bp, Setaria italica
  Peptide Sequence Number=SeqID_108237
taagttacaagaagaaactagtagaattaggttactttctaataattttaattatggctggtgtagtatcgtaatggcacacttcgatctaaaaactttgcatcagagtgtaagttcatggtaatgttgtgtggttagtttgaacatgtttgctactagcatctggcagtcataaggcatacccaatcttatgctgtgccagtcatacttggactcttacgcaaacacaactctagaaatgaaggaaaggcactgtaaaacagtcaaaattgagtaaagacaaagtaaagggtcatcgataagtaaattttaagacaaaaatgatgtcacaacctagtccgtggttcttttgcgaatagcatgatgcgtgtacaggtgcacaactgtagccatgcaatatgcattgtttag

SEQ ID NO: 42264 - DNA, 475 bp, Setaria italica
  Peptide Sequence Number=SeqID_108238
tagttactagttcaaaatgaacaaacagaagccttaagctaaaacacagagctctatataataagcaatagtgctagtgcttttttagcatttggcggagccaggccctttttgtgctgtcatatgacagcaatgatcttctgcaatttccactgtaaaatagtgtttataggtgaagggaaaccatagtttagtagagatgacaacaatcactttgcagcctggatccgcctctggtttataagggactcttgctgtgtaattacatgatgatccaataggaacttgtatgttatgctgtactctgtgacttaacatgcaagtttgtgcctaattttctatttttacattacagtcagaagctgcgaagaagatacctttcattttggttataaatttgcaggttcccgcaaaaaccaaattataacttggttatgtactacgcggcagagagaccagttaacaaagattcttt

SEQ ID NO: 42265 - DNA, 1998 bp, Setaria italica
  misc_feature (1887)..(1998): n is a, c, g, or t
  Peptide Sequence Number=SeqID_108239
aaagggaaccaaagaaaatagactccttcgtcagtcttcagatcttcgaaaccaggaaagggttaatacaaatttgggaggtgatactggagatgcatttgaagcacatgaatggagatatgttcgaacatttaatggtatcagaatttttgaagatattgcaaacccaaagggtggaaagggaatacttctgaagtctgttggggtggttggcgcaaatcctgatactgtgtttgaagtggtgctcaatcttgataagcataagcgatacgagtgggatatgttgacagctgatttggagttggtggaaacaattgatggatactgcgatgtggtttatggtacctatgaacccaaatatttaaattggtggaaaggaaagaaggattttgttttctccagacaatggtttcgtggacaagatggagcatataccattttgcagagtcctgttggtcacaacgaaagacctccaaagcatggttatgaacgtacaaaaatcaacccattaacatgggaaataaggaggttgaacacatcaggatcaagtccaaactgtgttgttactcttatgttggagatttctccaagtttttggggcagatggaagagaaggcactcctcaaattttgacaaaagtatcccttttgctttgctcagccaagtagcaggtctaagagagtactttgcagccaatccagccttgacatctgatttgccttcaacagtagtgaagtcaaaggcatctgaacctttgatgatacagagtgaacttgaagattccgaacctggtgatgaattttatgatgcacttgctagaggtgaatcctttgaagatgaggatagtgatgatgatgatgatgccgcaactcccaaggctggaaaagtgaagttgaagaatgtgtcatgggctattgcaggtttagcattaaagacaaccaaagctttggctgaaaccagcgaattggttactagttctagtccagtaactgttgaccccagccagttccatggcacccttcgtagagcaaaaagtgaaaatgatccaaattcttggagtgcgcctggtggggagaagtttatgatcagaggaaagacttacttgacagattacaccaaggttgttggtggagatccacttctaaagctaattgcagtcgattggttcaaggttaatgagcgctttgattcagttgccttgcatcccaaaagccttgtgcagtcagaagctgcgaagaagatacctttcatattggttataaatttgcaggttcccgcaaaaccaaattataacttggttatgtactacgcggcagagagaccagttaacaaagattctttgttgggtagattcattgatggaaatgatgcattccgagatgccagatttaaacttataccaagcattgttgagggttattggatggtaaagcgtgccgttggaacgaaagcttgccttctgggtaaagcagtaacgtgcaattatcttcgccaggataattttctggagatagatgttgacattggttcatcgtctgttgcacggagcattattggtctagtattgggatatgtcacaagcattgttgttgatctcgctattcttattgaggcaaaggaagagaaagagctgcctgagtacatcctcggcactgtccgtctgaaccgcgtgaatcccgacagtgccgtatcaatctaatctaattaagttaattccatttcttctcgcaattttcctcttgtcccaccgaagaggtatatagtttttggcagacccgaagaggtagggttgtacagagtacaggtataagtacatgacgccttccgtaaatagaagaaatgaaaggttatgttatagtagtattactaaaaaaaaaaaaaaaaaannnnnnnnnnnnnnnnnnnnnnnnnnnnnnnnnnnnnnnnnnnnnnnnnnnnnnnnnnnnnnnnnnnnnnnnnnnnnnnnnnnnnnnnnnnnnnnnnnnnnnnnnnnnnnnn

SEQ ID NO: 42266 - DNA, 390 bp, Setaria italica
  Peptide Sequence Number=SeqID_108240
tcctcttagcaaggttatcctttgttagaatcacacctttttttcaaataccataagaagattttgatttttagtggtagtttaagtttccaagtcacacacatggatggtactccttcagcttgcattatcttcatgtacattaattttactgtgaactttgtttttattcagattccatataaatttgtcctcctgttcatctataccgtgagtagcaatctctgtcactaattctagccatttatttaatctatgacctgttaatgctcttctaaaagagacactcaaagggactgatccacaaattttggccacagtatcatccttccttctggctatattatacaaagatgtatatctttccctcaatgttacctttccaattcc

SEQ ID NO: 42267 - DNA, 583 bp, Setaria italica
  Peptide Sequence Number=SeqID_108241
catgcagagaaactgagagggggcaaataacagaggagattagcatacatagaatgtttaagtagttaaattagctgttcctttaagaaatttaggaggataggggggggcatggcccaccttggccacaatgaagctctgccagtgacgcagaggatgcatctcctatgtcaagagggaatgagcagcgcagggctcccacaacggcaccaacagggattattggcttggtggtcacaccgatcagggcgcctcttcagcccctcctgcgcttggttatcatctccatttgtccatacaggtagagaacctccttcatcgtcgccttccggcctttcctgaagttccagaacacaggcaccacgtgccgctcactggggttgtactcgtttatctccatcagcgcagtcttcaccgcattgcacacatcatcgccgtactcaaaccgcaggagcttcagttttgcatcatcttcgtctaaaacttccttatgctctccattaacctgaacagccacaaaaggatgccaggatggcttcttcagttcaccctgccaactttcaaccagctttgcagcttttgt

SEQ ID NO: 42268 - DNA, 262 bp, Setaria italica
  Peptide Sequence Number=SeqID_108242
ccaggatgaatcccccgcacgccagccgcgtcacctggaagaggaggagcggcgagccgaggacctcggacgagccggggacgtcgaagatgagctcgtcgaggcacgggaacggcggctgcagcgcgtccccgaagtggtcgagccggacgtcggcgtcggcctcgatgaacagcacgccctcgccggtgcagtccacggcgagcttgcgcccctcgagctccctgagccggccggcgaacgggtagtagtgcacgagccg

SEQ ID NO: 42269 - DNA, 830 bp, Setaria italica
  Peptide Sequence Number=SeqID_108243
ttggatttcaactgattccgacggacttcatgtatttaatgagatgctcttcagatggggtgttcacaaagggtgaattggtgccatatgggccaattgagctgaatccagcagctgcagtgttgaattatggtcagggattgcttgaaggtctaagagcacatagaaaagaggatggatcgatccttctttttcgcccacatgaaaatgcattgcggatgagaattggcgcagatcggttatgcatgcctgcaccaagcgtagagcaattcgtagaagctgtgaagctaactgttctggcaaacaagcgttgggtacctcctaccggtaaaggttctttgtatatcagaccgcagctaattggaagtggggctatccttggtgtagcacctgctccacaatatacatttattgtgtttgtttgtccagttgggcattatttcaaggatggtttatctccaatcagcttgttaactgaggaagaataccaccgtgctgcgcctggtggaactggtgatataaagactattgggaattatgcttcggttgttagtgctcagagaagagccaaggagaaaggccactctgatgttctatacttggattctgtccataacaagttcgtggaggaagtttcttcttgtaatatattcatggtgaaggataatgttatttctacgccactgttaacgggaacgattcttcccggaatcacaagaaaaagtgtaattggaattgctcaaagtcttggatttcaggtagatcaaattggaatattcatctatctgcaattcttgtcgtgttgaactcatctgaatgacaggagatat

SEQ ID NO: 42270 - DNA, 600 bp, Setaria italica
  Peptide Sequence Number=SeqID_108244
ccaagtccgtcgaattgatgaaatcctatcaatgccatactcagctgaagaatttaaaggcgttgatcttcctcccagtgatgatgaatcatggttatatggtggggagggggagttaaatgcagaactccgtgaaaggcagaaagaactggaagagtatgaagctgcaaagaaacacagaaaaagtcaaaagcaaagtgtctctggcagttctaaatcccaagcggaccagtttaagcttggagagattacagagtccatgcaagattttgttcgcaatatgtccagcttcgagggagctgaagttcctgcaaacaggagagagatggaatcagttgacctagatgtcaaccagttcttcaaagccatggagtcggtttttggtggaagttcacgagagcaagctggcagtgatgacgggtttgatgaaaatcctcatcatctgacatggactttgatgattctgatgaagaaaacgcttttgatgaggaattagatgacaaggatatgggtgattcttttatggattcatattcagatgctttaaataaagaactaagcagcaccacacttgagaaaagctttgctcgcgcaccacgc

SEQ ID NO: 42271 - DNA, 416 bp, Setaria italica
  Peptide Sequence Number=SeqID_108245
gtttttagcgcggtcattgttttccaatagtaatgcgtgcactcttcgtttatattacttatttttccagatggatcatgagtcatgtagtaatctgatactaccttttcaatcacatatatgggcacacaatcacttgttactccattatattgggttctattctcataaacaattggaaacttgcgccgtggatatattattttatgcctcttcattttcaaatcatctcgctgatgagtgagtacgctggcaacattatggatggcctagtctggtcgttatttctgtgggcagtgctaaattattttgaaggatcgggacgggtgaccagagggggtgaatgggagactttgaaaaattctcagtgaacaaagtctgtatctcaattgccacctcaaacatacctcgcttct

SEQ ID NO: 42272 - DNA, 524 bp, Setaria italica
  Peptide Sequence Number=SeqID_108246
gtatcttagtgagtggggattaattcctttatttgctctagaaggcatagtattgcttggagctaggaaccatttagggaaggtgggatgcccaagcgatcttgcttgctgccgtcatgcctagaatatgttcaaatttattgggggtgaatccaattcaggacacgtctcaatagttctattccttaagaaacctagcataccgaacagttatattcttttttttttttgctatgctaaaatcacagtttatcggtggcagagactttgtttggataatgttttttgggattatatgacaggctctgaaatatgatatataactttgtatttttttgtgcttaaattgtaagtaactgttgttcttactttgctagctttttgtacttttttctgcacagcagtacaagccttgtagctatactgtgattccgccgttggttgcggcttggcatgcatgatcttgttactctcttaagttttttaacctaggttcaacttttgcacaccgaagttgtctcatg

SEQ ID NO: 42273 - DNA, 795 bp, Setaria italica
  misc_feature (766)..(795): n is a, c, g, or t
  Peptide Sequence Number=SeqID_108247
cccgatctgttccccaacctcgctcgcggccgctccaccaccaccaccaccccgccctccgctccggccgccgaacccgcccgcccccgatccagatccaggacctgagagatggacgcgagcaggcgccagagcgggattcagcagcttctggccgcggagcaggaggctcagcagatcgtcaacgcggctagggctgctaagtcggcaaggcttaggcaagctaaagaggaggctgagagggaaataactgaataccgtaagcagctggagaccgagcaccagaggaaggttgcagagagcagcggtgactctggtgcaaatgtcaagcgtctcgagcaagagacagacgcgaagatcgaacagctcaagcaacaggctgcaagcatctccccagaagtcattcagatgctcctgaggcatgtcaccaccgtgaagaactgagtgcttctgtgcccaaaaatatgattgcagcttgtatcatctgtctatttattatatcagagagtcgtggtgagaaataatttgtggcttgtggctgtaattcctttgttcttgaccacggaataagctgctccagtagagcagcaaccgtgcctggtactatcagaacttgcccattgtttggtatattggtaaatattttcttcatgttggaattttgaacacactactgctaatttccgactatattgtatgagatctgcaaaatattcatcgagtgcaacctctgttaacactgggagtggttttgggataaaaaaannnnnnnnnnnnnnnnnnnnnnnnnnnnnn

SEQ ID NO: 42274 - DNA, 561 bp, Setaria italica
  Peptide Sequence Number=SeqID_108248
ctaggttgtggtcggattcagcaaagaagtacagcctccgcagcatcaagccgttcagagccgggcctcaactgttcaagtacccagtagtctgtactcaccttggtccggacgcctccattgatttgttgaaaactcggttgtacagcactgaagtacccttttcgaccagcaataaccgcacggaaaagatccagttccagtcagatcaagcaagtgcagtcatgtacttgaaaggccttgacgatcacgccgatcgatccgttcaatcagctgaccaaccggccactaatcttttctctcacgagtcaatggagatggccctcgttttcccaactgttaggagcgacgggaaggacgacgaagtgaccagctcgtatcatccaagcgtcgcatcacaagttcagagctcgtaacctcagctgatcacactttccatgcatgtatctgcttgagcatggctgctgacggtcgttagcccgcaggattcaaaaggaggccgcagaagcggttggaaaacggtgccgtacactggctgcacgccattgaatccaggcattg

SEQ ID NO: 42275 - DNA, 647 bp, Setaria italica
  Peptide Sequence Number=SeqID_108249
ttatggagaggagcttacttagcagtcaaaggcagccaaggaaagcaacttacttgctggcttgcaagtcaaggaaagaagtttacttagcgggtgtaccctttccttaacgcattgaaaattttaacatcgtcctagttaccttgatggccaattagcgggtgtaccctttccttaacgcattgaaaattttaacatcgtcctagttaccttgatggccaaacgaccaagaaaataattcttgacaatcagctgcagtatgattctctatacttggcggccttggtggcctttgcttgacggtcggctggctcgtcttgtgcgttcattgaaagtagaagtgctgccacccagtctgttggtaggtaatccagcaaaacaagctcgaacatgcgcagaacctaaacagaaaccagacagcgccaacttagcagccggctgctgcgtacaatatcagagtctaaaaagctagattaagctcaacttatattaaactgttactcggcagtccagccaccggtatccagctccaaataccttgcatgccaatccaaaggtttatgttcaaagcacgtttcatatcttaattagttttggttttcagttctacaaagtggcagtagttgtgagttgtgaccacgtcaagc

SEQ ID NO: 42276 - DNA, 392 bp, Setaria italica
  misc_feature (281)..(392): n is a, c, g, or t
  Peptide Sequence Number=SeqID_108250
gacatctgaattcttattcctctctttgcattattgcagtatgcacatattcattcttgagcatctacatttttggtgcccaggtgtattcattctctacagacgtctctttgtaagcgtgaccgtaggatacccaacacgtgctgttttccctaaaaaccatagggagcggcgttcaattttacttgtattttgtaaaactactaaatgaaagagtcattcctatttaaaaaaaaaaaaaaaatttcttgtgattgctgtactattttacagttggaaannnnnnnnnnnnnnnnnnnnnnnnnnnnnnnnnnnnnnnnnnnnnnnnnnnnnnnnnnnnnnnnnnnnnnnnnnnnnnnnnnnnnnnnnnnnnnnnnnnnnnnnnnnnnnnn

SEQ ID NO: 42277 - DNA, 500 bp, Setaria italica
  Peptide Sequence Number=SeqID_108251
cgaaagggccatagctcaagcgaagcttggaagctcagcgatattttccctcgctgttcagcaggtccgctctcgctgcctgtcaggagcgctgggccgctgttggccttcaacaccctgtgtgctcatgttaagcgttgaggctccagcgtattacttgactgcaagacctagatggaaattacgtgcttgtagaaatgtcatgcaagaagctgcctcacaagatgcaaaggcaaatttctacaggagtgagaggaaaaaccggaaaaaggagggcacttacattgacaaagatggcatagcaaggacctttgatcgaaagaaaatatccagaaagaggggggtgctatgaaaggccgtggttggaagtacggctctgggtttgtggatggagtcttccctgtgctcagtccaatggcacaggatatcctagaacttgtgcagaaggggaccgatgttgccaaagtctgccagtcactggacaacattcctacaataga

SEQ ID NO: 42278 - DNA, 897 bp, Setaria italica
  Peptide Sequence Number=SeqID_108252
gtgcgctcaagagcagcaagctcctctgccatcgcgtgctgccattccggtctggagggtgaaccaagagacgatcacgaagagcataccatggagaagacaaatcagaaggtggctcatcaagaggagaagacacaccagaggaagatggctcaacaggaggagaagaaacattagaggaagacaccagaggaagatggctcggcaagaggagaagaaacatcaaaggaagatggctcaagaacccaccgagttcatacatagaaacgtgtgacaggtggtttggtgtcataaatagtacccataggaacatgtggagtggaatcggaagaagaaggctccacagatgaaggggacgcagaagaaggcaccataagaggctcatcaggagccgcagaagcaggcactaggtgtggaaaatgcataggagcaataggagtatcaggaattgtcagaaaagaaaggggctcaacgaaagatgaatgagaagcatcaggaggaggacaagagtagaaaggacgagactcatcaaaagtaacatcccgagatatcctcatccaacggccaacaagatcccaacaacgatatcccttatgctcagcactatatcctagaaaaacactcaacagattgagcagtcagcttggtgcgctcacgcagtgcaagaagcacatagaacacacatccaaagagacgaaggctagtatagttaggcagcttgccacacagacgctcatatggaatcccaccctgaagagcagaagaaggctgaatgttaatcaaataagtagctgtagaaaactagtctttctagtcctgcagtggagtacttgagacaatcatcagagcacgagtagtctcaagcaaatgacgatgcttgcgctccacaacaccatt

SEQ ID NO: 42279 - DNA, 1392 bp, Setaria italica
  Peptide Sequence Number=SeqID_108253
tttttttacatgcgagatcaacgcacctgttatgatttatacctgtccaagagagaacgttgtacaagaacaggatatctcgtacaagatcagtcttattgctggtgcgctgtcaacagaggaacttattcgaataaagtacatgcttggatcacatgctgatacagtcgcttattcagatcgacgtacaagtgagcgcaggcagagagcaggaaaacaggctctgtgcatcgctcggtgaacatggctaaactgaaactgttagctatggctgctgccactcttcaacacctgatgggagaacttcagctacgacctcccatcagcttcgctgggagttttgccgttagtttgcagctcttgatcctctcaggcagctgcgctatgctggtcaaggatctgcgtccactcagctggccaccagtccggtttgaacgcctgaaccctcacgtccctgttatcgctgatgcgaagggacgagccttgtttcagtgcttcttcaagtctcaacaggcccattccgcgggagcccagggcggtgcttactgtgcctattttcttgcctgaagcctcgtccacgacttctgaacctggagccacagcctgctcgagttcttgccccttttcgtcaacaaacttcattggcatcaggcgtttccgaatgacaccacgatggtgcgtccgtgcaataaactcctgcccaatgtagcaccccttctcaaatgaaatggcgcccaggccagcaaaattgtactccagtgggattgcttcaccttttgggatctcagttgaaccttctgcaattccattttctatccgccaaagctgataatgccgttcatccgcttctttgtcagactcaactagtggtggtattgtgtccgctgggaaaattcctctgtaaccaaggtagtccaacctaggatctttgagccattgccaaccatgaccattcccttgtgcagctgactcaccagcatgatcaacaccttgtccccatccaatggattgagcctcaggttcttgagtagatggttcagtatgcaccacattgcgtccaaatctttgccaacatgcaaagttctcactcacattatctatttcaaccttggatctcaaccgatatctcttgaagcacgcgacgagctcgtcgacctccgcggcgtcgacatcagcgagcacctcctctggctccccctccccctcctcctcctggggcttctccccggtctccgggcgcggacccggtgcggtcgagcatctgcgaccgcgggggcgggcggtagaggaagaggtcgtagaggaaccttccctggggcgtgagcagcgcggcgtaggcgggcggcgctggcccccgcgcgggcgcgttgggcgtgggcgcgtaccgctgtg

SEQ ID NO: 42280 - DNA, 794 bp, Setaria italica
  Peptide Sequence Number=SeqID_108254
aagtctccgcgcatgaaactcaacatcgtcgctggaggattctgctgaaagctgatcaactatcctgggtacaacatcagctcgagtaactcccccgacagcatcaatatctgcaagggcatcccagtttggtgtgggtatgccaccagcagcacttaaaccctgggaaccattatctgacagtatgcgggccagataatagtatacatagcgcagaacatttctgtcctcgcattgttgatggagcatgagaagagatggagccaccgaaggatccacagaattgtacacggcaagcttggggaatacgctgtttacaagctgcctctgggaacttttctggtcacacgtcgcggcgagctcgtggatgctccgcgccagctgagcgtacgagacgggcttcttcttcctgttccgctggggcaggaccttgacggggttgagcgccttggcagcggagatggtctcgttctggatctgcgtcagcgtccccctcttcgacttgcgatccgccgccgacgccgcgggcttccctagcagggagccgacaccgctgccgccgccgccgccgcccgacgaggactgctgctgcgacgacgcccctgctcccgaggctgccgacggatccgaggtgatgagatccatcagcgtcgtgcccgaggagtcctgcccggaggccatggccgcgggaaaggggccgggcgagtgggagatctccggcgagcaagaggcttgtctgtctcgtgggacttttcgggtcgggtggggcggtgcagtgaggagatgatgcgtag

SEQ ID NO: 42281 - DNA, 516 bp, Setaria italica
  Peptide Sequence Number=SeqID_108255
tgcacaaaccatggaggcacatggggcaactcatattcaacagtaccaagtattgcattcgacaaaccgttatcatggataacagatattttggaggctgccggcgtatacgtggcctgcagagaactattagtcatatctttagaataggcaccacccttcaactcagcaactgaatagaggtaaccaacagacagtggatttgatacgattaacttgtccattgaaccagaaaactgcgaactatgacttatgcatagacccaaacaatcaaagaaacgagtagcgataacaggagaatggtgaagatgatttatcagaaactgaggtcctgcataaaatgtcagagccaacagcctcttagcatgtgacaatgcagttgtctcctcacttccaagtaccacttgtggcaacctttcaactagcctggtaaaaatatcagaaatctcattttctgtaataaaattgtgaccctggttgaaaagataaaggagagcatcttgtgcagcctcagaa

SEQ ID NO: 42282 - DNA, 264 bp, Setaria italica
  Peptide Sequence Number=SeqID_108256
aagtggccttagtgcttgtcttgcagctacagcattggctagtttagttactgtctcagctgatccatcatcagagggcaaattgccaaacacaaacctcagatgccggaacactgccatgcaagctatccgagcaagatcactaccaggaaccataaggttgatatagcgtgaaagtagtttccgacccttgggtagagaaacaatgcgaagaaataccaaccttatggttcctggtagtgatcttgccggaacactgccatg

SEQ ID NO: 42283 - DNA, 802 bp, Setaria italica
  Peptide Sequence Number=SeqID_108257
agctacagcattggctagtttagttactgtctcagctgatccatcatcagagggcaaattgccaaacacaaacctcagatgccggaacactgccatgcaagctatccgagcaagatcactaccaggaaccataaggttgatatagcgtgaaagtagtttccgacccttgggtagagaaacaatgcgaagaaataccaaatcatcatttgctgacagatgtgtattcttatttggacctagcggatcaaccaactgcagggattctgccagctgaccaagcagagactgccttctgtttctaagttgtaaaccaccatcttgctgctgattaatttgaagcaagcgatcaatatcatctatatcaagtagtaaggagaggccatcctcaattgtgatcctagcagctagcataggttcctgatcaagagactttgaaacaagagtgttatcgtcagttgtcgaagctggttcaacatcaagaagtggacgtggcctccggatggaagaaaatggcagtctcccaagggcatcgaccttaagatatgcatgtggctcatccttaccgcgtgcacgagaagatggatccaatatcaaggttgggcagaagtggtgcttcaaccttgcatcgacagatcttctggccagacaagcttgatggtaataatcatcaatgtatggatcatttatgtgagtggcagcatgctgtattcttgaaatgttttcaagttcttcggtggacatatacttggatctaaaccttggcctcccattacccatcctcatgataccaaattcaggcctt

SEQ ID NO: 42284 - DNA, 545 bp, Setaria italica
  Peptide Sequence Number=SeqID_108258
ccagtaatccattgcgatcttaaaccaagcaacgtccttcttgctgaagacatgagtgctcgagttggagactttggcatatcaaaattcctgccggaaaatacaagcaggaggatgcaaaattcatatagcataactggaataagaggctccattggctatgttgctccaggtgactcaagttctatataagttcttttgtattttgcaaacaaatatgacatgctaaccaacattttattttgctcatctgtagagtatggtgaaggctctgcaatctcaacagctggtgatatctatagtcttggcgtattgctgcttgagatattcactggaaggagcccaacagatgacatgttcagagattcactaggtctgcataagtttaccgaggatgctcttcctgatagaaccttggagatagtggactcaacaatctggatgcacgtagaacccaaggatagcattacaagacgtggagtccaggagtgcttgatctctgtcttcaggctgggcctatcctgctcgaagcaacagcctcggga

SEQ ID NO: 42285 - DNA, 995 bp, Setaria italica
  Peptide Sequence Number=SeqID_108259
aaaaataactccatgataagccatatccttcagaattatcccttcagccgtaaatcagggttgcatgcaccatccagtggaggctttgatgggtgcttgctatagtcaaagacatatacttctgcactaactgttttagtagcaattataaatgaattttggggcatatagcgagcccgattgacctctccatcatgatttatctgctgaacaatttgcaccttcttggatccatcgcagtgctcaacgaaggaaccttcacagggcacatacacttctgcaatcatcagaaagttagggtagtccttgcatgtatgcgtgccaaggacaaccttctggacagtatgatcctgtccaggggcctcagctctttcagggagccattgtacagtcaaagatggccaatccattgagtgattaataatcaaatcatatagataaggtgcgttagccttccacatagagtattcttccacaatctgcgcattcatggccccatctgtgtcctccgtgatctgtactccatccaacctcccttcaaaactttccgccgaatacccggccatcacctccagcggaatctttcacccttttcgagcgaggactaaggggattaaggtttgtagagattggatctagagagtttggttcgggaaaggtggcggtggaggcggcgtcggcggcgggttgtcctttggactaatctggcagcggataaggtcgagaagtagggttgggaaggtttataggttcactgcattgttgggctgtgattgacatgagttatgccgtgtaggcccaaagcccagatttgaagaggtagtcaaaaatcatttattccagtaaagcaacgaattgcacaatcactatccaagcacctagaaagtgcaaatactggcacaaaatggcatttattttataagggccataccctatacaacagggtagggtatggcccttataaaataaatgccattttattccagtaaagcaac

SEQ ID NO: 42286 - DNA, 1659 bp, Setaria italica
  Peptide Sequence Number=SeqID_108260
tttttttttttttaagtatatacgactacaacaagacccaactgcgacgacagatctagccaactggcatatgtataacgctaaggttcgactaacatacaaacagtcgaaggaacggccaacccggccagcatgcagttacaaccacgggagcacctatgatcaacacacttaaattcttcttggccaacacagccagcagggttccaatcaagagcacctacagtcaacggagtttaagattccgtttgccttgtcgggcttcaagatgtctttggtggttcgtcacttatcggcagatcatcttcatcatggtagatgttctcagccatctgccatatctggaggatgttgtcttcagcgacgctagcaatcacccagtcctcgcaggggttccaggagaaatcagagatcttgctggtatggcctccatggatgaacatgagctcaggagggccgtcttctgcatcctctggtgtttgttcttggtcaatcctgctcaggtcccagaccatgagtcttctgcccaggcaacaggatgcaagtatagtctcattcttcgggctccatccaacttgaaatacttcctctttgtgacagtcaaaggtgtgtagagacttatcgatcttcctaagatcaaataatttgacagtcttgtcagtagaaccagttgcaacaacccattcattgaacggattgaaagccaggcagttcacctcaccctggtgtgccaccactgactgaacaggcttagtaggggcaggagaccgcaggtcccaaatcagaagatgatgatcatcaccaactgacccaaataagtactcatgcctcaaatgccaagcaacatcttcaacgacgccatcatgatgcttaaaaatctgcagggcatcaagacttttgtttttactatttgctttaatgtcccataagcaaatttgagcatcatcggacccactcaacaaatgtccctctttaaaaatactccatgataagccatatccttcagaattatgtcccttcagccgtaaatcagggttgcatgcaccatccagtggaggctttgatgggtgcttgctatagtcaaagacatatacttctgcactaactgttttagtagcaattataaatgaattttggggcatatagcgagcccgattgacctctccatcatgatttatctgctgaacaatttgcaccttgccggaggcggcgccgaaccccccgatgtcggcgtggtcgtcgtcgtagtggcgcgcgtcggcctcggcgtcgtcgaggggcagctggacctgcgcgagcatgaggtagttgggctcgttgtcggaggtgtgcgttccgaggatcatcttctggacggagtggtccttccccggcggctcggcgcggtcgggcagccactgcacggtgagggagggccattcgagcgcgtgcgtgatgacgaggtcgtagaggaagggggtgttcttcttccagatcttgtactcctcgttgatgaggcgctcctccacctcggcgcggaactcctcctcgtccgccgcgccgccgccggccttcggcatcgtcggtccgacggggcgccggctagggttagggtttcggagcggagggggtttcggccggggagcggggagtgaaatggcgggagggggcggttgggcg

SEQ ID NO: 42287 - DNA, 345 bp, Setaria italica
  Peptide Sequence Number=SeqID_108261
tggttttaatggtttggtttatataataagttcatttgaattggtttataatgagttggcctgctagatggtttggtttggtttgggttttacaaataaatagtttggaaggtgtttggggtgtgtggtattatttttggatctaaaagactctcaacccgtgggttgagacccattaagaacccaaaagcctggagcctcatctatcaagagtcggaccctaaaaataaaacctcgcgttcacaccttaaaatttggataaattgatcgaaacttgttacagatgaattagtttaacagtccgctactgtatgcaaagtagtacggctggacttacatgaggga

SEQ ID NO: 42288 - DNA, 551 bp, Setaria italica
  Peptide Sequence Number=SeqID_108262
tcgaagtccaccaaccccgtcgacacccactaccacgcgacggcgaaccggctcgtctccgccaccgggtgggtgaagtcatcgtacgggaacataacgaccaacgccacgcggacgttcgccctcgagtacctcctcaccttcgagacgctggacctgaccatcgttgcggacaccggcgtcgtcgccacggacggcgccggcggcgtcctgtactcggcgcagacgcacgggaacttcccgcttggctgggtctatcaacagaatagtctaaccatcacgcacgggttggaggagacgacggtggccgccggccggtggtcgtcggcgccgccgtaccggtcgctgcgcaccacgcagagcagcctcgtggaggacgaggagggaggcggcaagtcgtggggcgtccggcagacgtacaggtacaacgccaccgacgggtgctacttcaggaacgtgaccagcagcaactacagcgtcgtgtcggaccactccaatgaggtctgcgtgaaggggcggcatccgccggagtaggcgctgtcacggccgcg

SEQ ID NO: 42289 - DNA, 420 bp, Setaria italica
  Peptide Sequence Number=SeqID_108263
tagtaaaactaattaagtaactttgccttagttaggaacagtactttgcctaattgaaaacggtaattttgcataacagaccatcctatgcctcacttccactgggttgtccattatatgtgcattcaaacttgatctttatcgatgtacagagtcctcctgtcagtgatgactacaacagaaccaatggattatatatgtggcctttactgattaagttcgggctgatcaagtaacacacacatagatttgctctattggctagcaaagctacttcactctaggtacaaagcaaaaaatcttctcccaatttactttgaacaacaatagtagctacagtccaaacatatcaataatgagcatcaaaacaaatcactttcttcaccttatgctcaattggatgtcaagccaatcactttt

SEQ ID NO: 42290 - DNA, 420 bp, Setaria italica
  Peptide Sequence Number=SeqID_108264
gaccataaaatcccccaaacctgaacacttttatagctcaaattagagaccaacagcccataaatccccaaatgagctcaaaagccgcacaatattaaccacaaataactaaagtgcattgcagtcaaagtacctgaaaatttgagtggatatatcagaaacaaacctcaaagcgcctgcttttgcccaacaatgaatcattttctcaacaaagggcgagggtgtttctcggagaaagcgatgccgccgccagggacaccgataggccgaccggttgtcgtcgccgagctggagaaggaggctgatgccgccgtggaccaatcgccttccgctccatctgctactctccccaaggcgcctccctcctcccgagcggcagagacgaagatgtcggggcgcggatggtcgtcgacaagcagt

SEQ ID NO: 42291 - DNA, 639 bp, Setaria italica
  Peptide Sequence Number=SeqID_108265
aggagaacatgtactaaggcagggcagaggttggaggtgatctgggcagggcagcaggtaccgatcactaggaggtgctggtgcatgtcggttttgatcagctgagatccattccctcccagcttccctgttgaaaaaaaaaacacatgtagatcaggaatttgttttggagggaaagatgcaaagcttgattatgtgaaaataaaaatgtgcctgaaacaaagtgtcttgaacaattgtgtgaaaaacacacacagatgtttagcttttgagctgggatgtagatctagcatatgtgctgtgaaaacatgtatatgaaaaaaagtgcgcagattgaatatctttggtcatttcagtttctaaaacaaatggtaatctcatcttactcagacatggttactgtaaaacgatcttggtgatcttcttgaaaaattatagatcttaggctgttttctttttgtgcagtgtgtgtttgcaaaacttaatcttctcaatatgtctatgttattaaactcagtgaggatcaatgtgtttcatatgaaacactaaaaagaattatagaaacttgtcactttaggtggtgcaattgtttctgatatagaacaaaataacaaatatatttcagggtgtggataggat

SEQ ID NO: 42292 - DNA, 743 bp, Setaria italica
  Peptide Sequence Number=SeqID_108266
aaaacaaaaacaagttgtacccataaaaaaaagagagaaaaattacatattgtttttgcccccaccttctcctgaccattggacctctctgcctatttagagccgtgcggcaccctgatttgttttacaacacaagaaaaacgcatctgatttctcccgtcagaaaaactgaaaaaggacgatggaggagaacatcacgaaaagcaaggcagaggttggaggtgatctgggcagggcagcaggtaccgatcactaggaggtgctggtgcatgtcggttttgatcagctgagatccattccctcccagcttccctcaaagcgcctgcttttgcccaacaatgaatcattttctcaacaaagggcgagggtgtttctcggagaaagcgatgccgccgccagggacaccgataggccgaccggttgtcgtcgccgagctggagaaggaggctgatgccgccgtggaccaatcgccttccgctccatctgctactctccccaaggcgcctccctcctcccgagcggcagagacgaagatgtcggggcgcggatggtcgtcgacaagcagtaagtgatgtcgcaatgttccccctcgtcctcgcgttcccccttcttctccccttgaatcaccctctccggccaggcggaggagacgacgtctctcgaaatcgccctctccggccgggcggaggagatgagtggacggaaaggaacgcggagaagcatccgaggggggacattgcgac

SEQ ID NO: 42293 - DNA, 278 bp, Setaria italica
  Peptide Sequence Number=SeqID_108267
tctgtttggtcactacctcatatttattagaacaggcaagagcagttgatgattataccatttcccagattattacgaaagaacttaatgatggagatctttcacggttgctaattgttgtcacgggtgcaagccatgttatgtacggaccacgaggaagtggtgttcctggtagaatatccaaaaaggtgccaaagaaagaccaagttgtggtactgcttgatcctgaaagtcaggttataaggagggaaggtgaactccctattgctgatttctta

SEQ ID NO: 42294 - DNA, 258 bp, Setaria italica
  Peptide Sequence Number=SeqID_108268
gggcttttctttcctggcggcgacgactgggcgagcggcgccgcccttcgccgggtcttcgccgggcccttcgccgctgacgagcacccaccaggtcatccatgatttcagcctacagaaggtgattgcaaagggggatgatggaagaggagggacaccatggagttgttttggcatgcagcatctgtgggtttctctttgctgtccttagcgctctcagcttttgggtcctatgggctgtgaattggaggccatggg

SEQ ID NO: 42295 - DNA, 507 bp, Setaria italica
  Peptide Sequence Number=SeqID_108269
gcccccttttccacttattggcaagtacgattacacccaatgcaataattatggagccaatgccacaactgattccaattgcaatacccaaaagaagattccgttgcttagttgatgtaacacaccgcctctttgacgagtcaaattctttattatgagggcatggtgtgcatttatagcttccaggcgtgttacggcatataccattgcagttgtttggcagtgagcattcatcaatatctgtgcagccttccagtatgtacgggtttcctttgaagccacgagaacacttgcaacgatatcccataaatattttcccatgggtcacgtttaggcaataactattttcactgcggcatgcatacttagtaatattctgcgaagcttgttgacaagttgaatcgataaccgcccatctaatgacaatgtcatataccatagaaaaatcaaatagatcttccaccgggccgctgccttccatacctccgccctcgtcagtcgaaacta

SEQ ID NO: 42296 - DNA, 258 bp, Setaria italica
  Peptide Sequence Number=SeqID_108270
tcggtcggggggcgcagccggcggccgagctgcggaggctgtcgtaccagcagctgcggcgcgccacggggggattcgcggcggggagcaagctggggcagggcgggttcggcccggtcttccgcggcgcgctgccccggtcgggccagcccgtggccgtcaaggtcatggacgccgcggggtccctccagggcgagcgcgagttccacaacgagctctccctggcctcccacctcctcggctgcgccgtccctgggg

SEQ ID NO: 42297 - DNA, 984 bp, Setaria italica
  misc_feature (229)..(229): n is a, c, g, or t
  Peptide Sequence Number=SeqID_108271
tttgttttcactcttgtgattttaatgtagtgcaggcactagaagtaatccttgtgattagtcacaaacaattttcacataaaaggatacctcacccaacaaatacagccctccgttgattgatttggcaaatatgtggagtgtggtacaaggaatcacacaccagtgctgtacaaaatccatcataagaaaataagcccagcaggcaaaatcttcaaacatcatttgngttcaactttgaacttgatatctcaacatatgccatctgggtgtaaccgttgaacactgatgcatccaatctttctagaccggttcttctgaaaagggcatagcgaccatcttcgatgatagggtcagctgcacgtgctgggtcataccttgtttgatgtgttaaggatggaccagcaacaggaggaagctcccaatacaaatccaccatagattcaacaaacctactgttctggaaatgctcttcatatgaaatggccttattgctatggttgaaattgtctcgcatgtaacctcgaacaccccaccatgcatcaccctctccacatagatcatctatctccacggccttctcccaaagcttcttccgtttcgaccttaatcttgcttcatcactatcccaaaagcagctatgtccaccacctctgatgtatggttgatcacatatctgcctcaaggaataatggtcacctgtaccagtatcatagttgtcctcaaatatgagatgctgaaatccagcttttagtgcctgctttaaccttttcaactcgctttggtggtcatcaaagaaaacaagcaccctactggaatcagaaatgccatgatttctcaatagtttttcccaatcaacgcttccaaaatcgacaaaattcttcccagcaagataagtacagttctcatcaacatatgcaggtcccttcttcatatatttctcagggtgcctaggagagagtgatataatcctagtatttggca

SEQ ID NO: 42298 - DNA, 240 bp, Setaria italica
  misc_feature (2)..(2): n is a, c, g, or t
  misc_feature (4)..(5): n is a, c, g, or t
  Peptide Sequence Number=SeqID_108272
gngnnggggggggggggtatgatggcagggaggtgcttaggtacagtttttttcagtttaacgggcacccatcatcagagcagttaaactatgcccagattgacaaagaggtgatctcattgatcatgtatttatgagcaaatcatgcatggattcatagatgtctttctttgagatgtttgttgtaatctttcaatatctttgtcaatagtcatccttgatctcaaaaaaaaaaaaaaa

SEQ ID NO: 42299 - DNA, 297 bp, Setaria italica
  Peptide Sequence Number=SeqID_108273
ttaaaacagccaagatctggggcaacccgagcggcttcgccaactgggatggtgtgcacacgacggagaaggcgtacgaggtcatctctcagggagtgcttaacggaccgttcgccaacccgccgttgctgagaacctgctagaattccgactgcagaaaagaaccgataagatgctcgggcaaattgcgcgggggattttagtttttgttgcagctgagacttgtaaagcttttggcattttcaaagactatatgcaccgataaacttacagaaataaaagttgccgattttttgg

SEQ ID NO: 42300 - DNA, 1346 bp, Setaria italica
  misc_feature (38)..(38): n is a, c, g, or t
  misc_feature (1344)..(1346): n is a, c, g, or t
  Peptide Sequence Number=SeqID_108274
cttctcgcctccgtctcagctgctgctccctcgaccgngaccccatccccatccccatccgcatccccatggcggccaaggccaaggccatcagggtccatgagctcggcggccccgaggtgatgagatgggaggaggtggaggtcggggaccccaaggaaggcgagatccgcatcaggaccaccgccatcggcgtcaacttcatcgacgtctacttccggaagggggtctacgccgcgcccgccatgcccttcacaccaggcatggaagctgttggcgtcgtcactgcagttgggcctggcctcactggcagaaaagttggggatgttgttgcctacgctggcaaccccatgggatcctatgcccaggagcaaatccttccagccagtgtcgccgtccccgtgccgccttcagttgatcacaagcaagcagcctcggtgatgctcaagggaatgaccgcacatgtcctgcttcgccgcgtgttcaaggttcaaagtggccacactgtcctggtacacgctgctgctggtggagttggctcactcctttgtcaatgggcaaacgcgctcggtgccaccgtcatcggcactgtctctaatgaagagaaagcggctcaggcaactcaggatggatgccaccatgtcataatctacaccaacgaggatgtcgccacaagagtcaaggagattacatccggaaaaggtgtcaacgtggtctatgattctgttggcaaggatacatacaaggcttctgttgagtgcctggcatcgcgcggcttcatggtgtcctttgggcaatcgtccggcaagcctgacccgattccaatgagcgaccttgcttccaagtccctgttcctcactcggcccagcctgatgcattacactgctacccgcgatgagctgctggagtctgctggcgaggtgtttgccaatgttgccaatggggtgctgcgcgtccgcgtcaaccacacctatccgttatcggaagcggcccgagcccatgcagatctggaggccaggaagacatcggggtccatagtactcatcccggattcggatagctaggcctacagaaatggtgatgtttgtatgctgctggtttgatctgttgatgcataggttcaagtctgttaatttctcccaacgaataagttagccgtgcctttgtgttgttgtgccatgagaagagagactttctgttgatggtgctcgctagtaacaaggtgatacagtacagttgttggtgctgttgccatctctggcatcattttggaatgtttttttttttaagatcaagctggctcattcatttaacaataaaaaaaaaaaaaaaaaacaaaaaaannn

SEQ ID NO: 42301 - DNA, 451 bp, Setaria italica
  Peptide Sequence Number=SeqID_108275
tgggtaaccccgccgccaccggaaaaatccgcccgcgccgagctgccgatggcctccgactcctccccgccggcggcggagggtccgggggataagctggcggtgttctggcacgagggcatgctggcccacgacgccggccgcggcgtcttcgactcaggtcgcgacccgggtttcctggacgtgctcgaccagcacccggagaacgccgaccgcgtccgcaacatggtctccatcctccgccgcgggcccatcgcgccctttctctcctggcactccggccgccccgcccacgcctccgagctcctctccttccactcctcaggtcaatccccaaatcccctcacgaaccttcttgtaaccaattattactgcctttcccatcgcattcttgaatcttgatcgaacaaatcattaaccatcaacggtatattctactaaatctcgtgtt

SEQ ID NO: 42302 - DNA, 462 bp, Setaria italica
  misc_feature (420)..(462): n is a, c, g, or t
  Peptide Sequence Number=SeqID_108276
tctggtacccagaaactggccaggcactccagcatactggatgactcagccgatcccagcaggcctggtgacatggaagattaagttccggtaaaccgctgtgctatatatggctcctctaccaacacattatgctggaatgcactactgaataaaggccaagctagagcaagtgttttgtgaatttttcatctgttttaacatttatcttattttctttgcttatcctttatgatcgaataaggtcaaattctgtgaccatccttgggttgatgtcagtgtaactctacatgtatgctcttttgttgtgcctgtccaagcacattttttaccctgattttctgaacaatggcaatgcgacgatgtattcttttctgtcagcatttctgttttcaacagtccaataatcagccagtagtnnnnnnnnnnnnnnnnnnnnnnnnnnnnnnnnnnnnnnnnnnn

SEQ ID NO: 42303 - DNA, 1284 bp, Setaria italica
  misc_feature (1)..(25): n is a, c, g, or t
  Peptide Sequence Number=SeqID_108277
nnnnnnnnnnnnnnnnnnnnnnnnncccttattccccttcgttgttgtccaaccttattacactaccagtatgcttcatcatgagtatgtgcagatcaggatattgttgccttaaaactggcatcaatgtacatgaccttattggcttattcataggcaagcaagcatagagtacataggagtgcatcaggtcactcgctggtcgctatatacacatacatcatcacagatcctagtacaacttagccgtgcttgccacacatgaggccatctggcttggcatcgacggtgagccagtggcaatcccggaacttgcacgtcccggaggcctgcagcgtctcgccgacgtcctccggctccaggtagtacggtgtccacgacggcgtcccgtcctcgaacgagttgtgcgtgagccgccggatccccgtcccgtcgatgttgacggtgaagatctcaccgtagggctggtagtggtgcgggttcgagatgggctccgcggacacggcggcgtagtccgacgtgaacaccagcgtcttggagtccgggctgaaccaggggtggttggtgcggccgccgtcggcactgtgcacgacccggcgcaggccggtgccgttggggtggatcatgtagatggcgaagctgccgccgccggggttgtgccggtcggaggagaacgcaatccactcgccgtccggggaccagttgcacatggtgtcggaccagggcccctcggtcaggcggtggatgccgccggcctcgccgtcctcggcgtccatgatgtagaggttcttgtgcccggacctccccgaccggaacaccacccacttgccgtccggcgagggggacgggaacgcgttgttctcgctgcccgtggtgagcttcttgatcgagatgctggagtcgtcatcgtcatcgccaagagacacggcgatcacgtccacctcagtcctctcgctcgcgaaggttggcccgatgctggtgtagatgacccccttcctcttccagtcccatgccgtggggaaggcctcgccagagaggatttgccggcgtccaccggagccgtccgcgttgaccacgaacagccccggcaatccgacaaaggcgatcctcttgccgtcgtgcgagaacgaggggtacgacccgtcgatcctgaacagcgagaacgtgtccggcgcggggctcttgatgttctccagcagcagaggcgagtccccgttcccgctcccccggcaccggtggtacgcaacgcgctcgccgtccggcgagatgaacgggttgaagtgg

SEQ ID NO: 42304 - DNA, 417 bp, Setaria italica
  Peptide Sequence Number=SeqID_108278
tgttggtcggtcttctagtcttctcggggctgccggcaccggtggaccttgtacatgtagatccagaaggcgtccggcatggctgcccagagacggtgcccgcggtgcgcccacgcgtaccacgtcgtggggtcgctcgagtccgcgccaccgctcgccgccgcccaccttcggtacctacccgtagccatggaggatatgtcatccatcgagaattccttcctcttatactagcacacactatatctaagtacctagctagtgcactactacgatcgctggattagctagctataggcttggaggccagcacaggctctccacgagcatgcagaggatgagatgatcatgaagctatgatgtttttgggcttggagcgatgctacttgttggcttatctgtctcatgttcttgtgg

SEQ ID NO: 42305 - DNA, 1068 bp, Setaria italica
  Peptide Sequence Number=SeqID_108279
tttggaaataaaagcaatgataatggaatatattgatgaagaacagaccaaatgggaagtgttatgccatcaatatattaaaaataagagaaccaaaagacctgctacttgacaagaacaagggtaggttacaaaatgttgagcaaaattttcacagaccaagttgaacagtgaactatcgtgcctacgtacggtttcaaaatacactttcaaatatcatgatacaagatagatgcctttaacaactcacaaatactcaataaaaaggatggaaaataaatagtaccccataatctaaaaatctgcgcattgggattatttcagtgggcaatacttcatatcagacaaccatcatttgattacagattagcactgaaattttgcgcgtacgttgcatacagaagcaactcatggttggcaaaagctaaaaggggaaaacagtcagtatcggtaaagataaattaggcaatggtccccttttttaacaacccaaccaaatactatagctgaagaagattctagttcacaactcccaatccatacatgcaacccaaccacatacaccagatcccaggccctaaatgaaacgatccaaccacgagcgaggaggaaacggatcagcaggcttacctcccgaggggcagcggccggaagctggcggaacctacagggcgtacgggaggtaagggggtaaggtgaagaggtggaaatatagatacgcggagggggttaagtggctaaaaattggccagagaaatgtaacggaacaaagatattcgggggccacaattaaaaacgactggcgaggcgagctgggtttgggagagcgaggacggcagccctcggcccgtcgctctcactgaatcttgtgcaagatgggcctgttggctgttgtgtttatggcccatgaatggtgggaatccgtccgagcgatgaaatatatctctcccgcattcatccactttcacagtttatctgagcaccgaaatgttctaaaaatcttttcaaaaaaatgttctaaaaaaatctgagcactgaaatatatattttaacacacatcgcagagtg

SEQ ID NO: 42306 - DNA, 338 bp, Setaria italica
  Peptide Sequence Number=SeqID_108280
tctgcacatcctcgtgaagcttcaatatgctgccgccgctgcctgtgttgcgcgcgcggacgcgggtggacacggcggcccacgcgcggcgcgccggggtgaccaccttcttccgccaccacgccatgacagcgcgcacgggcgccgggatcctcgcggcggccagcctcgacgcccgacgacgacgctcccccgctccgttctcctcctgtgcccgcctcgctcgctccggcctctgccgacgatgacctcacgcgctcctctcctcttctccggccccgcgcggctgccgctggtgatgacctggtgacgtactagacaaactagttacgtacgac

SEQ ID NO: 42307 - DNA, 306 bp, Setaria italica
  Peptide Sequence Number=SeqID_108281
gaccttggacccaatggccttgaggtcggcctgcacctgcgcccggaactcagggacggtgaagggacggtacctgctaccgtcgcagctgacgacggcgtcgtctcgcgggaacgcgaagtagcagagcgacagcctctcgtcgtctcccatgctcgccaccacccggtgcggcacgctccggtacgcgtcggcgctgatggccttggccatgtcgcccaggttgaccagcagcgcgccgtcgtcgggtacccccggcgcggcgaggtcgcgccacgcgccgtcgtggtgcacctgcaggccgcc

SEQ ID NO: 42308 - DNA, 374 bp, Setaria italica
  Peptide Sequence Number=SeqID_108282
gacgtcggggagaaaaacagaggaggaaaaaaccaagaaaaaaaataatatcacgctcctcttcctccgttcccctgctcgattccccgcgaggaattcgcccccaaatctatcgatctgctccgcccagtccaccgatccgtggatcgatccgcgcgcgggtccggtttgctggggggttccgatctggtcttcgcctcgtcaggggaggagccggaggaggagatgaacggcgccgggggcagccaccagcaacagcagcagaggctccggcagcagcagcagcagcagcagcaggctctcctgatgcagcaggcactgcagcagcagcagcagtaccggtgtccggccgtcctcggccggccggcggccga

SEQ ID NO: 42309 - DNA, 388 bp, Setaria italica
  Peptide Sequence Number=SeqID_108283
agttgatatagtttttgtcaagggcttctttgttagcaaaaccttgcataagaatggctccagtatccacatgttgtgcaatagcaacagccaaccctttgctgtcccactttacactgtctagtaatgtgtcaaccttagggtcgacggctacagttccaggcgcagactgcccggagcccgccgccacggaaaccgccgggtacggctccctgcgccgccaccccggggccgaagacaccgcggcggcgcgaaggttggggcgggatgtcctgccgctgaagacgacgtcgctggaggaggaggatacgggggcgcgagtgggtgcggccgccgccatctgtgccgtcggtcagtcacgcgaggctcggcggctcgagtgtgagtg

SEQ ID NO: 42310 - DNA, 697 bp, Setaria italica
  Peptide Sequence Number=SeqID_108284
ttttaaaaagaaataaaggttaaactaaagttaactaagtacgaaagtaggtaaagaagaagctgctcaattgttctgaaaactttgtttattcttccatgagaaattattgatatataggcaccacaaccttaacaaattacaataaatatgtcgcaagagcgtacttgatcagaatgcaaggtaacaatcaatcatcataactagctatataatcctgttgtatattcaattatagctactgcagctgcacttggaccccagaatcgtacgtggctcctgctgtccagttctgtggtattgtgcttgtggaaaccagccatttctggtcgccgcgatgtgcggctagactgctaaatgcatccttatgttcagagggccatttggtggggagatagcagcccatactgcaccatgagttcggcccagaagctggcatgtcaggttcacagtctcacaaagctggactgcaataatatcctggttgccttgttggtaccatatctcaaaattcaagatagtaagggaaatggctgctctcagtaatcttgaatataatattcttgcctgggtagatacatggaaccctcctgtactcaattccaacataaccaaggttcagcagtgttgcaccagcgtccttgttctgccccatcccagcgaaggctgctggctcaggatgaagtcagtcccgttg

SEQ ID NO: 42311 - DNA, 479 bp, Setaria italica
  Peptide Sequence Number=SeqID_108285
ttgcgtgtctcaggtctgccatcgactttgaggtgtgctcgagagcagatgtgtttgttggcaatagcttctcgacattctccaaccttgtagtgctttccagaacagaaaagttatataacctgggaaaggtgagctcatgtggtgagaacatcgggctttcatcatatgcatacaatgtcatgggcgatgatggtgggccgcagagatggatgacagatatgtccgatacaaaccttcagaggctaagttacggaacaaataacgtctcgtgccactgacttttgacgcataacacttgactcaacatgattgtacacgggaggatgatccttgtttgaatttcattttatcttcgaacaggagaatatgtcagctagtctgtggtgcttctatgtttgaagctggaatcgtcatgtcacacttgtggaagactacggcagagttgtctatatactttgtgagtgtctatagatgtg

SEQ ID NO: 42312 - DNA, 596 bp, Setaria italica
  misc_feature (533)..(533): n is a, c, g, or t
  misc_feature (571)..(571): n is a, c, g, or t
  misc_feature (581)..(581): n is a, c, g, or t
  misc_feature (589)..(589): n is a, c, g, or t
  Peptide Sequence Number=SeqID_108286
attaatatcaaaaaacactaacatttgtggtttgaatatctatcgtgttgatcaatgccatcaaatctctgtggaaactgaacgtaacaaatttttctctcccaaaactgggtccattaggaaacacattgcctcccgtagtgctttgctattgttcatgtagtggtcacaatccacattcaggacaaaaggtgcatttgagagaactgctgacgttcgcagcaatgcattcaaggcaccagcctttttatggtgatcatatccaggccttttctctcgagaaacataaatcaaccaaggcaacttatttccagcatcatccatgacacaatcatggccagtgatgacctgaaccattccggcatggtctcgaacattatttccatgccacggacctccttctggcagggaccatcctccctcgggaactttatgtgaatttagtcccaccgcatttctacgaaatttcgtttcttcatattctctcttcattgcccgacgttctcgaacaaactccggatgaacttttttcncttagatagtcaatttctgagcaaaatccattcaggancccgaggctnaattttgngtcttct

SEQ ID NO: 42313 - DNA, 403 bp, Setaria italica
  Peptide Sequence Number=SeqID_108287
caaccaccttgaactctgtcccagctttgtgcaaccccgatttcacggtggttgttcgtgggaagtcctatgatgctattgtcaccaagatgcccttcgtgccaacaaagtactacaagccctcatagattgtacaaatggatgttccttcagctacagttctcttttgcatctctcttgtcctgtccatgacaggctgctgcagtgctcccactgtaacttctgtaagagggactcttagagctcaacattttacctctccccgtctaataacgctttattttccaaaacaaaggtgtgcatctgtctggaatttgatgtgcgttaattttctgatcaaatttctgggctgctgaatgctgcagttgtgcttgttttattgtctttattcttcgtaaaaaaa

SEQ ID NO: 42314 - DNA, 583 bp, Setaria italica
  Peptide Sequence Number=SeqID_108288
tgtgctgcaccaactcttcagttgctgacgaaagaagatttgagcaaaatgtacttcagtgacttcaagatgattgacattaatggatatgagtgctttctcacgagaactgggtattactttgctttcttacctccattaattaaaaaaatgcaccttgttagattctgatctttcttgaaaactagatgaagtccgcccaagtactatcttctttacattgattagctatcactcttccatcatacataaagaatatatatcatttcctatttgttccagcatccaaggtgatgacttcggtggttattgctcaaccaactgtaggacagttgatcaaatgccatcttatgttagtttttcatgatccttcagtgtaggattttacatcggccagtatgtgaattccacattttattggcatggctgttcttttcatcttcccaacatctggagttcatatcttttgataacgaggagtccctgtaaagtttctatatgtggccttggagcttttcattcctttaattattctaaatatatcttatttcttatttcagttacactggtgaagatggctttg

SEQ ID NO: 42315 - DNA, 1503 bp, Setaria italica
  Peptide Sequence Number=SeqID_108289
gcgcacccggcggcgacgatgagaggcctcctcgcgtgcgccaccctcgcccgtcgcgccgccgccggctcctacggtgcggcgcccgcgcgcgttcgccatctggcgggcgcagcggaggcggcggaggccgagctcaagaagacggcgctctacgacttccacgtcgccaacggcggcaagatggtgccgttcgccggctggagcatgcccatccagtacaaggactccatcatggactccaccgtcaactgccgcaccaacggcagcctcttcgacgtcgcacacatgtgcggcctcagcctcaagggccgcggcgccatccccttcctcgagtccctcgtcatcgccgacgtcgcgggcctcagagacggcaccggcacgctcaccgtattcaccaacgagaaaggcggcgccatcgacgactccgtcgtcaccaaggtcaccgaccagcacatctacctcgtcgtcaacgccggctgcagggacaaggacctggcacacatcggggcgcacatggaggcattcaacaagaagggtggggaagtcaagtggcacatccacgatgagcgctcgctgctcgcattgcagggtcctcttgctgcaccaactcttcagttgctgacgaaagaagatttgagcaaaatgtacttcagtgacttcaagatgattgacattaatggatatgagtgctttctcacgagaactggttacactggtgaagatggctttgaaatctctgttccatcagagaatgcagtcgatcttgcaaaggctatcctggagaaatctgagggcaaggtgcggctgactggtttgggcgcccgtgacagtctccgcctggaggctggcctctgcctttatggcaacgacatggagcagcacatcacgcccgttgaggctggactctcatgggcaatcggcaagaggaggagagctgaaggcggcttcctgggtgcagatgtgatcctcaaacagcttcaagaaggcccaaagatcaggcgtgtcggcatgttcacacaagggccgcctgcacggagtcacagcgagctcgttagcaactctggggagaacatcggtgaggtgaccagcggagggttcagcccgtgcctgaagaagaacatcgccatgggttacgtgaaatcggggttgcacaaagctgggacagagttcaaggtggttgttcgtgggaagtcctatgatgctattgtcaccaagatgcccttcgtgccaacaaagtactacaagccctcatagattgtacaaatggatgttccttcagctacagttctcttttgcatctctcttgtcctgtccatgacaggctgctgcagtgctcccactgtaacttctgtaagagtccctcttagagctcaacattttacctctccccgtctaataacgctttattttccaaaacaaaggtgtgcatctgtctggaatttgatgtgcgttaattttctgatcaaaaaactgggctgctaagaaaaaaaaaaacaaaaa

SEQ ID NO: 42316 - DNA, 415 bp, Setaria italica
  Peptide Sequence Number=SeqID_108290
gtaagaagagagcggcggtatggggggaggtagcgaagagaagtttcgccgctcgccagtgagtgggcaatccttcaccaccatggcggctccggcggccagcacctccgtgtccgaatccgacgactccgactccgactcctcccagtgcagcgaggcaagcacatgggattctcaagtgttacaaaggcacgctgaatgtctggagctggaggagttggcagcaatctcagtcaatcctgctctgcttcgaactctcaatcatttgcttcttgaggtgtatgccattctgcgtccgaagccacttgactatggccagcgcaacaccttgattgatgccttcaggaagattacgaaacgaatatttgatagcaacgatgggtttccagttgtggaaccatttggatcattcacg

SEQ ID NO: 42317 - DNA, 508 bp, Setaria italica
  Peptide Sequence Number=SeqID_108291
ttttttttcactcaacaattcagaatcatatactctttcttttcttttcttttcttttgtttccgatggattcacacatcatgtacttatcatacaatcagtgcagctggatgttaagacgagctgcaggttcgcatcatttcactcttcatttgcagtaggatcggagatcgcattcaggcgtggtggatggagttggctccgatggcgatgaggtcgctggcgagcttctggagctcctggtcgtggtccgtcatcaccgacggcgtcccgcgctcgttgaagccgtcgtcgcaggtggtcacgtccgtctccaccgagtcaaggttggtgcgcgccgtggcgaggtcgccgcgcttcagcgcgtcgtccaccgtctccaggttcgacttgatgtcgctgtacgacgacgtgcagtcgtccagcgcctccttcaccgtcgcgtccgtccccggcgcgttcatccggtccgtcgccgcgttcattcgccttcgtacctacctttctt

SEQ ID NO: 42318 - DNA, 1479 bp, Setaria italica
  misc_feature (1420)..(1479): n is a, c, g, or t
  Peptide Sequence Number=SeqID_108292
agtgtcctcctcctctgctttgctcctgcttacttgtcgagactgcaaccgcctctccctcccctaccctcccctcctcgccatcggtcaccgtctccgccacctccccgcctgcctataataagaagaaggggcggagacgacaactagcaccgaggaggaagaaagcgatcgaaggaggggagagagcggtcgatcggagtacgagatggaggccagcaacgggcagatccaccaccacgacgagcagccgagggcggagcagaagatcatcatcgacacggatccaggcatcgatgacagcgtggcgattatgatggcgttccagtcgccgggcgttcaagtcctagggctcaccaccatttttggcaactgcacaacggagcacgcgacacgcaacgccttgatcctgtgcgagaaggcaggccatcctgaagttccagtagcagaaggaagccatgagcctctaaagggaggaaaaccaaaagttgccgcctttgttcacggatctgatggccttgggaacatagagcttcctgatcccactatcaagaaagttgagcaaagcgctgcagagttcttggttgataaggtctcgcagtttcctggagaggtctctgtacttgccttgggtcctctgacgaacttagcattggccatcaagaaggatccctcctttgtgaaaaatgttagaaagattgttgtgctgggtggagccttcttttcagctggaaatgccaccccttctgctgaagcaaatatccacagtgacccggaggcagctgatatagttttcacttctggggcagacatctacgtggtcggcctcaacatcacaacccaagtcagcttcacagataaggacctcttggagctgaggaactcgaaagggaagcacgcgcagttcctctgcgacgtatgcaagttctacctggactggcacatcgagtcttacggcgctcctgtgattttcctccatgacccggtgagctttgccgcgctggttcgcccggacctgttcacgttcaggaagggcgtggtgagggtggagacccagggcatctgcgccgggcatacctccatggacatgttgctgaagaagtggaactcggagaacccgtggactggctactcgccgatctcggtggcgtggacggtggacgtgcccaagatggtcgcgttcgtgaaggagctcgtcaccggagagtgacgaaactagctgacatgagtcgtcgtaccatgtcagatccgagcattcaattccttccgcattgcgttgtcgctgcgcacaaatctgagatgcagaaacatttgacgtactgcaaacgctatttccagagtcattggttctggttctgcaaaccaattctctcattcatgcaccctaattgcatatgctttctgccattgtccaaactannnnnnnnnnnnnnnnnnnnnnnnnnnnnnnnnnnnnnnnnnnnnnnnnnnnnnnnnnnn

SEQ ID NO: 42319 - DNA, 259 bp, Setaria italica
  Peptide Sequence Number=SeqID_108293
ttttttttggtttttgaactgatctccgttacctcacgagcctgatgtctgaaatacaaacatcgctttcacttctgtccagtagacaatgtgattacagttgaagagtcttgcagcatctctagagtctagtgtctacaagaaacctacctctagtgcttacgtgtatccacatcaagagcttacatgcattcatattaagagcgatctatatttttttaaagagggatttaaaggtaaaatagaacaacccaatcta

SEQ ID NO: 42320 - DNA, 434 bp, Setaria italica
  Peptide Sequence Number=SeqID_108294
ataggggaggcaacaggggatggtggacagggaaccattgccactgaacatgctctactacgactacattggcaaagtatcaacgctggcagacaagctccgtcttccctacaaggggattgaaatctggtccgaggatcgcggacacaaggcaaacaacaacgacccatcgatgaccaaggtggcagatgcgttcacacgcatactggaggacatacctgctgcaggaaacaagctggatggtggcgctttcatctccgtccaggaggttgacgcagccttgcagaagctccaggtggaagctgccctgcacagccaggagtcggctaactttttagattcgccgattttggccaatggccatgacttagctctggatcacgccttctctgacatgttcaatgctacatagatgtcacccgacctcaccaacg

SEQ ID NO: 42321 - DNA, 470 bp, Setaria italica
  misc_feature (415)..(470): n is a, c, g, or t
  Peptide Sequence Number=SeqID_108295
acaacccaaacctgatttcaaggatgaaccgtggagcgtcttggctttgacctcgttttctgacgtcgacggtggttgctctggcttcatgggctcggatgatggtgctgtacgtcgacgtctacagctgactgctctgaggactatagcctctgtaaaagctctatgctgtcgaggacgaattgtatgctcattattttcgttcatgtattttcttctctttttgtgtgttataacttgtataagaccgaacccatgctatgctactcacagaacaccggcagatagctgtcaggactgtaggccttaccgtgccatactgtctgaatcagcagtccttgttttttatagtttcggtgttacaaaaaaactttctgactattttgaaaaggtcagctctggttacctaaaagtnnnnnnnnnnnnnnnnnnnnnnnnnnnnnnnnnnnnnnnnnnnnnnnnnnnnnnnn

SEQ ID NO: 42322 - DNA, 599 bp, Setaria italica
  Peptide Sequence Number=SeqID_108296
ttaaactttacttaatttacaacaaaacacaatacaatgttttaccccctttcttttactagatatatatcaaccgctcctttcccagattcattttatgatcaagcatccacgaattaaaatgtgtatgataaagggcaacaggctgggtttactattttttttttcaactacacagtagagctgcatgaggccatgtttacttattgtactcacctattccaagatgggtattcacactggcataacgtgctgttccagtcagatttttgttctccctgtgcagaaaaaataactaataaatttccccaaaaacaactactaaaaaacgtaaaaagttatctttatgtccaagctatcaattaaatttgggcccaggaccctagcctgtaaaatgttacaagaaaagtcattacatatttgcataatgtaaaactagaagactctgaagcttggtgtcaaaatttattcttgaatatgtacgataacactaaacatcatgacactactggacaggcacacttgagctattcaccattttatttcggaagtttacatgtaataaacgatgcaaaagaaaaaaaatggcctttacacta

SEQ ID NO: 42323 - DNA, 384 bp, Setaria italica
  Peptide Sequence Number=SeqID_108297
actttactacctacacaacaagcgaagttcacagcttttccccatggcgctcaccaagtgcgccatcgctgttttcttggttcttgcagtcatatctaacacatccacatgttgtgttagggcaatctgctcgggctgccctactccgaagccaaaaccagggatgccgtgcttccacgctggatcctcacagcacccctgtacgactgagaagtgctccaggttatgcgagcacctaaaccacaatggcactttggcctactgtcgaagtgcttctccaggggtgtgctgctgcccaaatgaatagatgaatccatatgtttaatgataatacaatacaataaggttttgtattactctcgtcattcaaaaaaaaaaaaaaaa

SEQ ID NO: 42324 - DNA, 851 bp, Setaria italica
  Peptide Sequence Number=SeqID_108298
gtagcaagccaaaacccaagagcagctgtgttcctagcttcttcctagaggctattccaggatgtctcgcccccaaacccatgcccattttgttcggcatcgccatgctagctgcccttgttctcacttccgagggccgcatttctagaaaggacttaagcgtcgaccttggtggtggcggaggtggaagcattgggatcgggaccgggattagtattggcataggtggtggtgtcagtggctctggctccgggtcgggatcaggttctggctcggcatctgggtcaggatcaggctctggctcagcctcaggttccgggtccggtgctgcttcaggtgcaggctcatcagcgggatccggtgcaggctctggtgcaggatcatatgctggctcgggtacaggctccggtgcgggatcaggtgctgggtctggtgcaggctctggcgcaggttcagggtctggttatggtcaagggcaaggtgcaggtgaaggccaaggccaaggatccgggtatggcgaaggtcatggctcgggtcacggacaaggttcagggtctggctcggggtacggtgaggggtacggtgaaggtcatggtcaaggaagtggctccggtcaaggatcgggctatggcgaaggtcacggctctggtcatggccaaggctctggccaaggatccggatccggttacggcgaaggctatggctcgggtcacggacaaggctccggatatggcgaagggtacggcgagggttcgggcagaggatacggtgatggttcaggctcaggctacggcgagggacacggctacgggtacggttctggacacggcaaataagacgatgaacaaggg

SEQ ID NO: 42325 - DNA, 383 bp, Setaria italica
  Peptide Sequence Number=SeqID_108299
cgagctcaacctctacaacgacaagaaggccatcgccgcaacgggcagcgggcggcgcggagggacgttcctcggcaaggtgaaggtggccggggcatccttcgcgaagggcggggaggaggcgctcgtctactacccgctcgagaagcggagcgtcttctcgcagatcaagggggagatcgggctcaagatctggttcgtcgacgacccgccgccgccgcagcccgccgcgccagtgggggaggagaagggcgccgatgcggccgcggcggagaagaaggaggcgccggctgaggggaaggaggagaagggggacggatgctgcagccgccgccgcgccggctgaggagaagaaggcggaggcggcgccggccgaggagaag

SEQ ID NO: 42326 - DNA, 461 bp, Setaria italica
  Peptide Sequence Number=SeqID_108300
cttgacgggccagattgctccgcgtcatgacttagctgaaatgtctggttctagtgaattgtgcaaaggacttgctgattctatcgaagtgcctacactctcagaacagcaccggcaactgttactgcagtgctgaggcgccagactccgatgaggcttacctactcatagccattcgtgaagactagctccataggcacttggtcctcgagcaaagttggatgcaatttcaagagatgatactcattggctcttgatgatgtggatgcatgtaagcgctagtaggttccttgtggacactagataagctatctaggggtaggtttcttctagacactatatatgctgtcagattgaaaatgtaatccaattgagaagtgaaacagtgtttgtatttcaggcatcaggcttgtgaagcaagtgcatgttaggactaaaaacaaaaaaaaaaaaaaaaacaa

SEQ ID NO: 42327 - DNA, 490 bp, Setaria italica
  Peptide Sequence Number=SeqID_108301
ttagcacggacagaatttctcctattctcattcgggaccatccttcctgccttggctccttgtaatgccaaaaaggaacgatggtggtttcatgagactggttacttgttgaatgaagaaaaatgtggcaaacaccaatttgattgttgaggaaaaatgaacggtgggtactggtcctggctagatgtgcatacctgtctcttttcatgtcctcttttatccttcttttattcctggactgcactatagcttatggtgcctccaacactccataccttgaaagccaaattatagagctgaatggtatgtttgtttttcatctgacatctctagcaggtggcccacgaattcaccatttttcaattcattttttttcgtttctgaggatataagcacaaccatgagccataatatcttactattggggttcagggagaggtaagcatgttatcacacttgtgtttgaaaactgcaaataattaagcgcatt

SEQ ID NO: 42328 - DNA, 1529 bp, Setaria italica
  Peptide Sequence Number=SeqID_108302
gctacatcgaagaagaagcattgcgaaaaaagaaactgtcaccaacatcctgtagagatgggtgctaaatatatatacaaaaataaaaactaggatgatgaggcctgtcgcaaacgaacagcggggttctgttgctactttttatgcacagataagtttaaactggggcagagcctaccgaggacaagaggtgggaaaaaaaattcaaatgagcggaggtacaatggttatgatgatcgatacatcacataacagctattctttcttttctttttaaccatggattctatgcatcagcgtccatatcttgtatctctgtaatggaaactagccattcttccaggtgctgcaatactaggaatagcccctgttactatgtattcatcatcaatttcatcaaatctgatttcccttaattcaacagattgtgttggaacctccagattgaaattttccagatttgcctgattgccattccttcttccattgcctcttctttcccttgctcttgctcttctacggcttcttgaagatctcgaaaatgccttgcaaaatatacatgaccaccagttcgtcctgaccctgcggaaaacttcatagtcctctccagtgtcatcatccccatactcaattacataatctcccagaacaattccattgggaacttgtgcgtgtattgtgctcaacacatctacgatatcagaagattgctggaagttgtcccaatcaacttgcctagcaggatcaatctctgaagggcgtgaatctggatgcttttgttgtgtgtgcttctgaagctcattgaagttaccaacaaaggaacagcaatcctcttcgcagcaccttttcttctggttaagatgcatccgagcctcaccgataacaatccatccgataacatcacctctacacaaagggcagcttgggcggttgtttgcattagatggcacaatatgaataatgctatcaagaggaggcacggctaacgaagaaactttcacgttggcaggcaactcatatgcacccttaaatctctcgagacagtttgagcgggtctggtctgtgtcacagacaaacggcctgcagcctttctcataagatgtgcacctcagtaggactgcattgtgagggtaatcaaggcagatcgggcaggtaacatcctccatccaactcttatcaagctgtatgtccaggtcaaaagagctgtgccttaccaccttcttcatgagcaggtttcctgaacccatgtcggacttccaaccaaaactcgtgaacctagcaagcacagcttttcattacaaccaacaacagaagacgagaccgggcacggatctccgctccgctcgaccggtagagggttggcaccgccgcgggtggaggatccggcggacggagggagggagggaggggccgtccggcgcggcgcggcacgggaggggacgggaggaggggaagggggacggcggcgtcgcgctcggctgcggcgtcgcctcggggagagtctaggttcttaggtttggtagtttggt

SEQ ID NO: 42329 - DNA, 315 bp, Setaria italica
  Peptide Sequence Number=SeqID_108303
gcaagacactattccactttcttttgtttatcagcgttcaccattggctctggctctatctatcttttctattctcctgacatgaggccactaatggaataacaaaaacagaaacgtaacgggttttcactagaagcgtggccagaaaagtaggtcctaactcttaaaaagcgtctatgaatccatggctagcggatttctcaaaacccaggaatgctggactacatacaagtatacaactcgttccagacatgaactggtatatggcaaggtttactgtttgttatgtgtaatacctgcatgcgacaaagaaga

SEQ ID NO: 42330 - DNA, 1354 bp, Setaria italica
  misc_feature (1330)..(1354): n is a, c, g, or t
  Peptide Sequence Number=SeqID_108304
ccgcccttccccaccgcgtccccgccgccgggcgcctcccgccaaccacggcggtgacgtccgccggcgctgtcggcgctggccgctggttccggtggcagtcggcgcgggggctgtgcgccgcgccgcattccggtggtggggccggcgtcgaggggatgggatctgatgcgggggtcgtcggggccaggaggagacgggcggtgaacgggctggccaaggatgtgccggcggtgaacgggatgtccaaggaggacccggcgccgctgccgccgccgccaaggttgctcacgctgcccaccgtgctcaccattggccgcgtcgccgccgtgccgctcctgattagcactttctacatggagggtccatgggcagctacggccacaactggcatcttcattgctgctgcaatcactgattggctagatggttatcttgctagaaagatgcagctaggaacaccttttggtgcatttcttgatcctgtggctgacaagcttatggtagccgcaacattagttttgctatgcaccaaacctttggaaggatcactactcagggatgggccatggcttctaacagttccttccattgctatcattggaagagagattacaatgtcagctgtgagagagtgggctgcgtctcagaatagcaaagttcttgaggctgttgcagttaacaacttggggaagtggaaaacagcgacgcagatgacagcattgactctgcttcttgccagcagagacccaagtctacctgcgcaaggtgctctagttacccccggtgttgtgctgctttatgtatccgctggacttgccatatggtccctagtggtgtacatgagaaagatatggcggatacttctaaaatagtattagcatatagtgtaatagaagaaacagatgcaaggcgagattccattcaagattatacaatttttggaaggttgttgagttgattgatggcctagagctggttatgatcctcggtaacttgtgcgtcatcaatttttggtggatttgccgccaaaactgtcaggatccttttagattcctagaaacaaaacatatgatgtgacctagcaagttgctgaagtgattgcttccttcagctattcgaagtcattatagcctcatagcttgtgtgttggatgccaggtgtaatgagatgtataagtctacgatgcagaaggttgtaaccttatacaaacacaaaatcagggggtttgtgcgtgtggagttctaccatgtaatttacacataataccatatgccaggagcatacagttattcttttcgggattaaaaacaaaaaaaaaacaaaaaannnnnnnnnnnnnnnnnnnnnnnnn

SEQ ID NO: 42331 - DNA, 394 bp, Setaria italica
  Peptide Sequence Number=SeqID_108305
tcgacggccgtgacgccgaacctggacctgaggaactccctgtacgccgcgttgtcgacgaagacgctggcgctgcacccgcgctcgacccacgccaccgccgggcgtcgcggcaggcacgtcgtgccgttgctgacgacgcaggcttcaagtttgacgccctccagcttccgggagagctcgtagtagcgggcgtcgacgggggcccagaacgcgtggccgcgcacctccggcgtgccgctcgccgccgggaacacctcctccggctggtaccagacgccgttgagcaggttgccggcggaccgggcgttcttgccgacggtgtagtcggtgaagttgaggctgccgagctccctcgtgtagtccccgttggactccaaggcgagctcgttct

SEQ ID NO: 42332 - DNA, 581 bp, Setaria italica
  Peptide Sequence Number=SeqID_108306
ccgcaacagcgcagcgtcgaggaagcgaccgccgccggccaagccaacccgcgcgcgccgcagcgaaggaagccgcccagccaccgcgccagcctcgcggcgacgactacgggcacgaggactaacggatggggcggaaggggcggaaggggaaggacgcggctgccgcgggcggcggcggcgtgagggaggcgacgctggtgcgcgtctccaaggtgctcgaggacttccgcgcctccgacgccgaggtgtacacatttgaacctgatatatccagactagagcgaggtgcaatccatcagatgtgtagaaaaatgggcatgacatccaaaagttctgggtttggtgaacagcgacgcctctctgtttataaaagtaaacggaagcaggggcctgctatggaagaaggacctagccaccttaggttttctgaagaggcgatacatgttttgcaggatttatttacgcattatcctcctgatgatgctgatttacatggggatgccaaccggaattctagtggtaaggcagcaaacaccaaatggaaaacagacagtgccttttgcaggccagcaatgagc

SEQ ID NO: 42333 - DNA, 448 bp, Setaria italica
  Peptide Sequence Number=SeqID_108307
tgttggcaggtagctggagccaaggggcttgctgggcctgcacctagaaagggtggtgatctagagtttaaaacaggggtttagtccggtcaggtccttgtgtgctttttgttgttacgaaaaagtgtgcctatggtttacatccctcctcctggtccaaggtggggtgatgccctgtaatttggacctttattctctcttaatcaaagatacgcagctctcctgcgtgttcgagaaaaaaaaaagacaaccacttggtaaaatgcaattatactaaatttcaaattagccaacataagcactactatcatgtatctgatatgcagtacctacataccctggcccatggaatacttcctggaaatggaggtgcaaaatttttttgaatagatgatatatcataaattaactgaacaattaagttgaacatacaatttgaatcactggt

SEQ ID NO: 42334 - DNA, 1140 bp, Setaria italica
  Peptide Sequence Number=SeqID_108308
ccgactcctgcagggcttcatcaacagcctcccggacctggcgctgttccacgccaactccaacgacttcggcggcgccgtgccggcgctcggcggcctgcagtacttctacgagctggacctgagcaacaacaggctcgcgccggccccgttcccgaccgacgtgctcggcctcaccaacgccaccttcatcgacatcaggttcaacagcttctacggcgagctccccgccggcgtcttctgcaggttcccgcggatccaagccatcttcgtcaacaacaaccagttctccggcagcctcccggacaacatcgggcagtcgccggtgaactacctctccctcgccaacaaccggttcacgggggagataccaacgtccatctcccgcaacgccggcacgctcctcgaggtgctcttcctgaacaacagcctgagcgggtgcctcccctacgagctgggcctgctggagaaggccacggtcatcgatgccggcaccaaccagctcacgggcaccatcccggcgtcgttcgcgtgcctgcgcaaggttgagcagctcaacctggcggacaacctcctgtacggcgaggtgcccgacgcgctctgccggctcgcgttcggccgcctcaagaacctcacgctttccggcaactacttcacgtcgcttggttcatgctgctgggacctgatcaaggaggggaggctcaacgtcgaccgcaactgcatccagtgggcgcccaaccagcgctcgcacgaggagtgcgccaagttccaacgccagaccaagtcctgccccgtcaacagctacctgccgtgccgccccaaataccgcggctccggcgagccagccggcgcggccgcacgggcggcggaggaggaggaggacgcggcggcggagtacaggtaccggacgtactcggctctgcatccttgagggcccaacccggggctgcacaggttgaaaaggcgcggagcgcgctgtgcgtctcgcgtgacccgtgaaacgactgatgagtcgatcgcttggcccgttgtgttcgacgggttgtattggtgtgtcgtgtgtccctgtctgtctatgttctccttctctctgataatccatccactatttattacggcccccaaaattaacttaaaaac

SEQ ID NO: 42335 - DNA, 496 bp, Setaria italica
  misc_feature (476)..(496): n is a, c, g, or t
  Peptide Sequence Number=SeqID_108309
acttgatcagaacaccatgctaaaggatgagtgctctaaacttgaggcagcaggaaagcttctgacatctaaggcagatgaattgagaaaggaactcagcgtgtggcgacgggtgcacaggagcctaaccgacgaattgcaattctacaatggccttgaaggattgcgtcgtggtgggcatctcagcaaccccggcgttggattcatataagtgatggtggaaaatagtggcagaaggcccgcaagtattctggtagttgtgcctgtagtagatctggtatatatgatactcaaccatatgcagtgcaggcgtaggaggatagctctaagatctcagacgatcactcttaggccacacattgggtggaagatatttacagcctgtgtcattgcccggagagatgtgatgaatgtttacatccagatattcgcagattttgtgttcattggttacattaaataaaaaaaattgtcgnnnnnnnnnnnnnnnnnnnnn

SEQ ID NO: 42336 - DNA, 507 bp, Setaria italica
  Peptide Sequence Number=SeqID_108310
tcataagagcagcaggaggctgtcagtacccaccggtgaacttggacttgaggagctcgacgacctcggcgtccacccggagcgccttgacgagcaccggcgtcgggatcggcggcgaggacccgaacagcgtcagcggcacgaagatgatgcctgggttctggctgttgaacgacaccaccatggtggcctcctccttcccgacgttgaactggaagtgcacgaggccgcgcgggatgacgaaggtctccccggcgcggaccaccttggagtagtaccggttgccggagtcgaggctgccgacgatgccgacgaggagctcgccgcgggtcacgatcccgacctcggtggcgcgcgggtggacgtgcggcgggttggtgccgccgggggcgaagtcgacgcggttcatggacacgccgagcgtgttcaggccgggccactcgttcacgtcgagctccgtcacgttggagccgttcgggttggccagcgtgtccccgccgctggaga

SEQ ID NO: 42337 - DNA, 549 bp, Setaria italica
  Peptide Sequence Number=SeqID_108311
cgtcgatggagcagctctacgagggcggcgggttcgtcagcacgctcagcggcggcgcgctgatcctggcggggtcggcggtcggcggcggcacggccgtgaactggtcggcctgcatcaagacccccgacgaggtgcgcgcggagtgggcgcgcgaccaggggatcccgctgttcgccaccgacgagtacgccgccgccatggacagggtgttcgagcggctcggcgtgacgcacgggtgcaacgaggaggggctccagaacaaggtcctccgcaaggggtgcgagaagctcgggtacaaggtggagtccgtgtcgaggaactcgtcggagggccactactgcggcagctgcgggttcggctgccgcacgggcgacaagcgcggcacggacacgacgtggctggtcgacgcggtgagccacggcgcggtgatcctgacggggtgcaaggctgagaagctgctgctgatggagcgcgccggcaccggcggcgcggacggcagggcgaagcggtgcgccggcgtggtggcgaggagcaccaacccggcgg

SEQ ID NO: 42338 - DNA, 946 bp, Setaria italica
  Peptide Sequence Number=SeqID_108312
taaatggtgcaggcatttggtgataatcataggaagtcggaagcctcctctccgcaacttgtttgaggatgttaacaaaactaacaaccagatccttgtatgaatttggttcctccaaaatcaggtcatagagggggcatagggttgcacccataactccaggatcattgtcacagagcctcttgcggaagttggagacaaggtgggaaacggaggagggggatcgctggtaaaaccggtgcagcgccatgacggccttcttccgtacggcctcctttgggtgcgcaagcagctctacgacttgtggcagcacggcgggaatggcctcctcgccgatgaggcggcacgcggcggtgagcgctgcgcagacgacgagatagttgtcggacctgaggtccttctggatggtgttgaccactaggatgacgaggtcgtgccgctcgtcgaggaagagcgcgacggcgaggtacccggtccgcttgagcgggagcgactcgtcgtgggtcatcttgacggcgtggatgtggccaaaggaggcgtcgtggccgagcatctcggcgtagacgaggcggaggaggagctccttcatcttgcggcggggcacgtcggggtcggcgaggcggcgcttgaggtgctcgagctcgcgcgcgatgatgcggtcctcttccgccttggagcgcgcctcgccgatggacttgacgaggtcgaggaactccttggactgcccccacccgccctgcgaccccatcgccagctcccgcccgatcgtccgcagctgctccattgccgacgcccgctcccggacggggcagaggcttcctcctcgggggggcacggccgccgccggcgacggcggaggcgtccggtcggagtggggaagtggaggggtgaaggagatctggatcggcgagtgggggagagccggggaggtgggtttgcggggaga

SEQ ID NO: 42339 - DNA, 502 bp, Setaria italica
  Peptide Sequence Number=SeqID_108313
atgagatcaaacagcttgaaggtgtcgtcagcttggctgtgcacggcgagggctctgatcatcacgttccaggagaagacatccttcctgtccatcttgaagaagacaaccattgcacgggctatgtcgccgcacatggcgtacattccgaccaaggctgtcccaaccgtcagcatgagcatggagtgccggattcaccaggttggcgtggatccatctgcccagcctcagtttcctcaagttctcggaagctgagagaaccgagacaacagtgaagctgtcagggatgagaccttcaagcagcatccgtggaaacatttggagcgcctgccggaatcttccatgcctggtgtaacaggagaggatgcagttccaggacaccaggttcctttcaggcatccggttgaacaggctcctcatgccgacgaaatcccctgcatcagatagcgccctgagcatcgccgtccatgatatgatgttcttcaccggcattctcgcgaac

SEQ ID NO: 42340 - DNA, 588 bp, Setaria italica
  Peptide Sequence Number=SeqID_108314
aacgtaacgaaaacaaaatacgactagaacaaagtacaagttattaaaatctacgcggcgccagctcgagagggagctgttgctcgaagacattcagagaatcgaggacatgccatcattcaggtttctcgcccactagcaattgaactcggtcacacctaacatttccacagatagtgcagccccatacacctcaagaaattgcaacgttggaaccacgtataccgagctcagtgtggggcgatctaggatcgtggattgtcgatttgctttgttggactgtgttctggttagctactctgacaacagcctcaacgctgggtgcctcgcttttcttttgaacagatgtgctgttatcttcgtgccaaagaacggcagctgtaattcttttttgaacgaatgggtacgagacagtgcctatttcattgatagagtagagaattacagttggctagccgaatagggtacacacttttacatgattactctctagatgaaaaaatcgctaaggcctttgcccctgctagtatccatgctcttgcttcctccttgattttggccattagtatgattgctaccgtctcttgt

SEQ ID NO: 42341 - DNA, 811 bp, Setaria italica
  Peptide Sequence Number=SeqID_108315
tactaaaattagtaagggttttaggtaaaatttagtactttactaacctaagtttaatttctttgtggatggctacaatgtatgtggctactggggaaagcttaagaaggatttcatgaatgggaggcaagaaattgctagacaaatgctcattgatgagctggtatctttcagtgcagtaagaggtctgcaccagcggattaaatccattataacaattaaaaacgcctcatttatgatttcttgatagaaaaagggtcccaattagcctacttaagcaattactcaaaagcttatgtgcagttttacactttactatttatatacgacttacaatgaatctagttacaacttaccatgaatgtagctaggcaattgtggagcataattcgatcagattgttttttacctatcaattgtgataccatttccccttgattttctcaatagccatgcaaacttttacaatgggtgttttataccatttctcacaatgatactttcagaggtaaaagttgtagttgtattgatgctgccaattcaggggtttctacacataaggaaacatataaaggggttgatgttgtatattctgccgacttatctgctgattcttggattgagaaggaggttgaagctttagtggcagatggttgcccgaaagtatgggtagtaacatctgatgcattggagcaacaattagcacatggagagggtgctcttatctggagctctaaaagattggtcaaagagataaaagaatcggaaaaggaacttgatctggagctgaaggaaaccaggtcaacttcgt

SEQ ID NO: 42342 - DNA, 534 bp, Setaria italica
  Peptide Sequence Number=SeqID_108316
tcagttcaaaattaaggcaaaaagatcctaacgtatgagatatacatgactaaaagaaaaaatattggaaaatatttgagtcagctgtgtcatacccagctgtttgaatctttaggcattctttaattgggggtcagcaaaagaaatacagttgatagatttttctggcctgaagtagtgcatgctgttgccatatcattgagaagcgtatttttgtgactatataagttttggcatgagaacttaatgggggacatgatcaagtgatttttgaagcaaatggatttgaaatgaattcatatcatatagcacaaatgaaatacacaatacgtaatgttactgagcattttgctgcttgctggttcttccacctatgcaggttgaagctttagtggcagatggttgcccgaaagtatgggtagtaacatctgatgcattggagcaacaattagcacatgttactacccatactttagtggcagatggttgcccgaaagtatgggtagtaacatctgttgctccaatgcatcagat

SEQ ID NO: 42343 - DNA, 721 bp, Setaria italica
  Peptide Sequence Number=SeqID_108317
gatattattgtaaattgacttttagtgctagatttttttcacaggatattgatgccatgcaagcagatctgactgataaaacaaatggaagttcagtatttccatcagatttttataggcagctattagggaaaacctaacaagcaaatttgttctcatcaaacagggttgatgttgtatattctgccgacttatctgctgattcttggattgagaaggaggttgaagctttagtggcagatggttgcccgaaagtatgggtagtaacatctgatgcattggagcaacaattagcacatggagagggtgctcttatctggagctctaaaagattggtcaaagagataaaagaatcggaaaaggaacttgatctggagctgaaggaaaccaggtcaacttcgttgcaaggaaaaattttgcagcacaagctgaatccaaaagtagtacatgcattaaaaggtctcaggaataagcttgaagaacaagagcggagaaagaagtgaccactaactattggacggtgatggttgacaaagagaggaagagaacaggtgtacataagtgcattttcgtgtgaacatccactaacatcggatccattgacagctaatagagcaactgagcaagttcgatgcgagcgcaaagactgctacgagaagagcatcagagtatgctaacatcatgtaaaacaaaggaatctggctttatttgggcgcagtca

SEQ ID NO: 42344 - DNA, 442 bp, Setaria italica
  Peptide Sequence Number=SeqID_108318
cggcggggagggattgcgtgccgcggcagaggaactcgatcgtcgcgttccagtcgaagactggcgttgaggtctgcacattcagtttgatactgaagaatgccgcgtcgctgctcaccaaaaaggatcctctcaaggttgaagctgatactaggcttggggatctcatccagtcattctccgacctgggaaccattgtggagaacagtaactttgagctcactggtgacagagagaagatgaaggatggtgtgctgagcagtatctctgcccttgacaagtttgaacagagtgttaaagactgtttaggtgtttaaattttttttggctgggtcccatcaatttttctaaggttttaaaatgaattattgtttttatgttcctaatattccggtggtaaggtttcatttgcctttgctcatcagggccttttgttgtagaa

SEQ ID NO: 42345 - DNA, 356 bp, Setaria italica
  Peptide Sequence Number=SeqID_108319
tagtggccaggggacaaggctagttactgcaaaaattttatttaagtacattctccagagacacctgctagaacatagctaactgagtggacagtctgtaccctaaaggaagcaaccaataaggtgttagaacctcccatcaagactaagatggttaaacatcaagagaaaagaactgagctttaaaaatgctaaagatatcagagaaaaaaaagcacaaaattgaaattctcagtgtatctaattcagactttttttttaaactgcttcttatattttcctttttcttctccttttttttgagaagcatggagcaaggagagaaactgtgatttcacagaggtagtctgtcttta

SEQ ID NO: 42346 - DNA, 697 bp, Setaria italica
  Peptide Sequence Number=SeqID_108320
cgcagaaacaacaaggttcaagaccgatctgcggttgctccagaaaagccatccgtcgtcgaggaggaccgctctctgtattcacctgcagacagacagcaccagtcagaaatacaaatactatgcaactggacagagtttgaccgcccgacaaaagtacaaggcatcgaatccctgataggcttactactgaaattgttgagaccattataaagtcatccaaaaagcacatcttttcagtcagggcgataatagttcatataattcctttctctaactgagtaattcacaacgttttcatggttaatatatgtgagaatatggaattggataaattagcttggaacattagccttatacatacacaccacctgacctcctagatcaaattggtaatatgccctttatgatcataatggccttgctacagtgaatatgccctttatgaacaagaattctgtgacaagatcaatttacctaatattattttgtcacctcaagcattaaagcatgcagtcttactatcttaggtcattgtattgaaaaatcaagtacagctcagctcccaataaattgcttaccgttactctcctggtaattgcatcaggcagaaaatgtccgattgcgcctctgaacatcaaactcgacatcaatgaggtctgttataccagctttgatcttctgaacctaactacga

SEQ ID NO: 42347 - DNA, 901 bp, Setaria italica
  misc_feature (1)..(73): n is a, c, g, or t
  Peptide Sequence Number=SeqID_108321
nnnnnnnnnnnnnnnnnnnnnnnnnnnnnnnnnnnnnnnnnnnnnnnnnnnnnnnnnnnnnnnnnnnnnnnnnttgtcgctaagaaggatttcttttatttgcagcaagtgaatgttttacagctccatcgacagggagaaacgatgcaggagggaacgagttcacatgttcatagaatcatggatagtttccccaagccaaacatcaataaatcatcaggtcgcagaaacaacaaggttcaagaccgatctgcggttgctccagaaaagccatccgtcgtcgaggaggaccgctctctgtattcaccgttactctcctggtaattgcatcaggcagaaaatgtccgattgcgcctctgaacatcaaactcgacatcaatgaggtctgttataccagctttgatcttctgacctactcggacaggacctacaccctcaggagtgcctgttagtatcacatcaccctccattaatgtcatgatggaactaatataactaattagaaaaggaatcttgaataacatgtcatttgttgatcccttctgccttagttcatcatccacctttagccagagctctagatcatcgggattagtgacagccgatttgggaattactgcactaactggagtgaaggtgtcatatcctttagccaaagtcactgcactaattggagtgaaggtgtcctgtcctttagccaaagtccatggaagacctgcagacttagcagcagactgaaggtcccttgctgtcatgtccaaagcaagtgcataacctccgacgaagtccatagctgacgcctcggggacatcgcgcccgcgccgggagatgacgacgccgagctcgacctcgtggtgcagcgactcgagcggctccgggatctcgattggcggcggtggac

SEQ ID NO: 42348 - DNA, 874 bp, Setaria italica
  Peptide Sequence Number=SeqID_108322
ccgatctgcggttgctccagaaaagccatccgtcgtcgaggaggaccgctctctgtattcaccgttactctcctggtaattgcatcaggcagaaaatgtccgattgcgcctctgaacatcaaactcgacatcaatgaggtctgttataccagctttgatcttctgacctactcggacaggacctacaccctcaggagtgcctgttagtatcacatcaccctccattaatgtcatgatggaactaatataactaattagaaaaggaatcttgaataacatgtcatttgttgatcccttctgccttagttcatcatccacctttagccagagctctagatcatcgggattagtgacagccgatttgggaatcactgcactaattggagtgaaggtgtcctgtcctttagccaaagtccatggaagacctgcagacttagcagcagactgaaggtcccttgctgtcatgtccaaagcaagtgcataacctccgacgaagtccatagctgacgcctcggggacatcgcgcccgcgccgggagatgacgacgccgagctcgacctcgtggtgcagcgactcgagcggctccgggatctcgatggcggcggtggacacgccagcgtggaggaatgacgaggtcggcttcaggaacagaacgggctccttggggactgggttgccgagttccttggcgtgggcgacgtagttgcgcccgacgccgatgatctttgtgctcgacgcgaggagcctctgcgccgccgcagacgccatggcaggcagagtcttttttatttttttattttttgtggtggatcggagcctcggaggtgtcgatgaggtggagatgacggagaagcaaatggtttcgagttctgac

SEQ ID NO: 42349 - DNA, 838 bp, Setaria italica
  misc_feature (1)..(84): n is a, c, g, or t
  Peptide Sequence Number=SeqID_108323
nnnnnnnnnnnnnnnnnnnnnnnnnnnnnnnnnnnnnnnnnnnnnnnnnnnnnnnnnnnnnnnnnnnnnnnnnnnnnnnnnnnntttttacatttttatcctgaattttgatcgatcacttatcattcattcaagaacccaattctccaattgctacatggaaatcaccgtatgaattactggattgctatacaagatattctagtatgctacactggcactgtggcacacgggccaccaaaatcagccctgggcccctgaaccctgatccatcatcagacggtctggaggctgggctcggccggcttggcgcgggcgtcgatggcggcgagccactcgagcagggcccggttggcctgctccggcgcctcgtcgtgcgggcagtggccggcctggaggtgcacgacggcggtgtcggcgtagaactcctggatccgcgcggccttggccgggccgacccacgggtccaggtccccccacagcagcagcagtgggcacgccagcttccccagcagccggtccagcgtgtaccggctctggttcgacatgaaccgcgacatcagccggtagtacacctcgccggcgttcgggtccgccgccggcgccgtgatcgagccgatcaggtattcgtccacgttgctggaatcaatgtacacgcttttcaagactttctccaccctggccggctgcttggactgccagaagaggaaccccagcaccacccgctggaaggcctccttgagcggcttcacgacgaacctggacagcgggctgctttcttcctcctcctcggccggcgcggcggccggcttgttgggggtcggcgaactggccggcg

SEQ ID NO: 42350 - DNA, 1074 bp, Setaria italica
  misc_feature (988)..(988): n is a, c, g, or t
  Peptide Sequence Number=SeqID_108324
tgctggaatcaatgtacacctgcagttttttttttaaaaaaaagtacagacgacgatctgagtcagataaacctcgactggcatggcaaatgaagaaccagctcgtgctcgagtcacgttacgcttttcaagactttctccaccctggccggctgcttggactgccagaagaggaaccccagcaccacccgctggaaggcctccttgagcggcttcacgacgaacctggacagcgggctgctttcttcctcctcctcggccggcgcggcggccggcttgttggggtcggcgaactggccggcggagttgagcagcacgacgccccggaccagctccggcacctcggtcgccgcgaacagcgtcgtgaatcctcccaggctgttgcctacgaggacggctggctccttgacgatctccctgaggaagtcggagacctgctccatccagatggtggcctcgtagtcgaccagcgccttctcgctccagccgaaccccagcaggtctatggcgtacaccttgtacttcttcgccagttcagggatgttgtacctccaatggaaggcggaagcgccgaagccgtggatgagcacgatgggctgcccggcgccttgctcgacgtagtgaatccggcggccccgccacgtccagaagttgtacccgtccggtttgaacggcaagacctccagcccttgagcggagccgttggcggaggcgggggacgaggtggccatcgagcaggagacggcgagcgcgatcccggccttggtcaccagctccctcctctgcatcatcaagaacctgcccccgttgaggccgacctgcggggaacccgcgccgcggcagcggccggagccgccggcggttcggagggcggccacggacgcgacaggcatcggcagaggagcaggcaaggcttctggagagggatggaagcaccggagcagaggaaggagaccgggggaaggctcgcccgtcggttggtttttgngggcttgcgccggggatcgtgtggtccgccgtggcgcggcgcgcgatggggtagccgtggacgcgcccgggccaaaagagtttgct

SEQ ID NO: 42351 - DNA, 354 bp, Setaria italica
  Peptide Sequence Number=SeqID_108325
aaaacctcgccgccgcagccgccgccgcagccagccagccaccgaactcgaagctgcagccatggtgctcgcgcgcaagaagctgaagcagaagctgcacacgcttctcccggccggtgaagccgaggtggaggctcatggcgaggaggcgcaggccgtgaaggagcggcttgcctcctccaagcggccgcgccccaagaggccgcccaggaagaaatcgctccccgaagtggtgtgtcagacggaggaggaggggaaggaggaagtggagaggaggagggaggagaggaggaaggagaagaaggagaaaaggaggatcaggaggttgatggaggctgaggccgcggcgtccgc

SEQ ID NO: 42352 - DNA, 859 bp, Setaria italica
  Peptide Sequence Number=SeqID_108326
agaatgataaagccgtatcgtcttaatgttttcaaattgaggtgtgtaaatctaggcttgcatttccatagattcaaagactcctacagaaataattttgatttagttttacaaaactacaactattcgcaccaaagcatcaatgaccaacttcgacttgtgccgactttacaaaactgcaagagcttgcaccctcaataacaagaaattactgcaactattacaaaatcctaacagaatagttgtgcggacccacccgtgagcctaacactacaacttttacaaagctctaatggaatcaggcttttgccttttactcttttggaattatttgtcttaagtttttttgtttctggtgtagatcgagtatcaactaaacaatcttagcgattaccgcctaactatttgtggcggttctttagtttctccccagcatggaactggaatcccaattggcaagagggctctagatttgtgcctttttttagggcagatttgtgctttactataggcagtgttaccctgtttctgaattcaatgcacttgctgacatgctattgctgcatctaaaatccgcagattgtaaacttctttgttagtcttctgttcttgcgtcttctggagcaacttggtccacaggttctgtacacaatattttcatcagtctgcgtggtagctgcaatatttgtgcggcgccatatccttgaaacaaagggaaagactttgcaagagatcgaagtttcactcctacaagcacaataaaggttctatccatgcggtagggattcgacattgattggaatctgacgctacagtgcttgctgaatagactagaaataaccaaccaaggtagggacta

SEQ ID NO: 42353 - DNA, 1955 bp, Setaria italica
  Peptide Sequence Number=SeqID_108327
cgcttgctaatcgcttcattggttttctttctggaaatcagcggcgatgcggtggaagcttaactcgtcggcgtacaagcgcgtgccgtccagggaggccaccatggagcccgacgtcgagacgccgatgaggacgacggacgctggcgcgggcccgtcgtggcgcatgtcgctgccgcacgtctgcgtcgccacgctcacctcgttcctcttcgggtaccactccggggtggtgaacgagcccctggagagcatctccgccgaccttggcttctccggcaacaccttcgccgaaggactggtggtgagcatctgcttgggtggagcctttatcgggtgcctgttcagtggctccgtcgctgatggaattgggcgtcgccgggcgttccagctcagtgcgctgcccatgatcattggtgctgcaataagtgctctcaccaatagtttggagggtatgcttctaggaagatttttggttggaacggggatgggattgggcccaccagtagcttcactatatataacggaggtttctcctcctacagtgaggggtacatatggcagctttgttcagattgcgacctgtcttggaatcattgtatcgctcctaattggtacacctgttaaagatattgatagatggtggagagtatgtttctgggttgcagctatcccagcaactttacaagctcttgctatggagttctgtgctgagagcccccagtggctatacaagtgtggaagaacaattgaagcagagatgcaattcgaaaagcttctaggcccccttcatgtaaaatcagccatggcagaactttctagatctgaaagagacgatggagaaagtgtaaagtactcagaattgttcaatggtcgccacttcaatgttgtttttattggatcggtgctctttgctttacaacagttatctggcatcaattctgtgttctatttctcctcaactgtgttcagaggtgtaggggtgccttctaactttgccaacatttgcatggggatttcgaatctagcaggctcaattatagcaatggttctaatggacaagctgggtagaaaaatgcttctttcagggagtttccttgggatggccttttcgatggggcttcaggctattggagcaaaccgtcatcttggttctacaagtgtatatctttcagttggtggcattctgttgtttgtcttgtcattttcattgggagcaggcccagttccaggacttcttttgcctgaaatcttccccaacaaaatacgagcgaaggctgtggctctctgcatgtctgtgcattggattgtaaacttctttgttagtcttctgttcttgcgtcttctggagcaacttggtccacaggttctgtacacaatattttcatcagtctgcgtggtagctgcaatatttgtgcggcgccatatccttgaaacaaagggaaagactttgcaagagatcgaagtttcactcctacaagcacaataaaggttctatccatgcggtagggattcgacattgattggaatctgacgctacagtgcttgctgaataccaaccaggtgggctagtatcctgcttgctgattcctgaatcaagtcatctcttgaaaacgggcgatgccctgcaatggtctcagggaagttccagacatgcgcctgcgaccgccagggcatcccggtttctgcatagacatgtactgaggttgtgcctgtatagcccgcctttaggtataggataccatgtattgtcttcttttatatttttatatatacatacgtgttaaagtatcagtaagaagatactacggttggctgttgatgagcacggttaaaacggggaatatttcatcatttgcattacatgtagtatgttcatgttccgaataattaagaacactgcacggcatgtgtttggacggaagatgtgtattccagcgcaagtacatatgatg

SEQ ID NO: 42354 - DNA, 334 bp, Setaria italica
  Peptide Sequence Number=SeqID_108328
tatgataatcgtacaactttctgcacagagtacagaataaagtataaatatacataacagtatatttcccacactataccacatgagatgagagtagaatatataggacaccacaaacagataagcaaaaggaagatgaaaagacattaacaacagcatccaagtaaacaataagtcccagatagcagaatattaacagatcctcagcacacgcttgcaacagcatccacagtttcaaacttgtccttcagatgacgttgggtgctctggaacactgtcggaccttcttcccttcactctcgttttgggcttggccagccatgcctctctgaac

SEQ ID NO: 42355 - DNA, 1952 bp, Setaria italica
  Peptide Sequence Number=SeqID_108329
ttcaagttgctttgttctgatttcatgttcggttggtttctgcttaggatcaacttcatgtacagctccaacatggcggggtaggggtatttgtttcatccacagcatgcaaaggagttccttcattcacatttcgagtagagttatcatactctggaccttcaggtttcttaattgtgttagtatccaacctcgataattgatcagtgaggggcaatgcagaaacagctactctgccatcaacatatggtggtggtatgtggtcagcatacgctctttcagggttaacctcccttgatggggctccgtgttgatgctggactgactcgggggcaatgaaaggctgaacatattgagcagtaattggattagacctaggaccaagagcactagtgctttccatggcagcaggaacatcatgcccaacaactctatatggtatgctgccattaggaggagcccatgggtttggcattcgctcatatgcaggtagacctggtatccttggactaacatcacctgtatttctaacaaagttggtgttaatgctcccatttggcattggaatgctcccatttggcattggcaggtgtggagaatcatatggcgagccagcgtggacaggactgttcgctctcctcctgagagattgaatgggtggcaaattctgctgcatttggtaaaaggaatctgcaccatatgtcgaagagtggttgtaatgctgaccaggggattcttcaaaccctgctggctgcacatatgatccactgcctccaacttgttggttgtgatatgtgtcatttatgagctcacaactaccatggaagtagtggggactttcatggctagaacgaccaagagttgctgaatgcatttcatatactttgtttggtgcaaatacagaattgacagggttggtatctacaatgtatggctcaatcactctaccattgccaggaagatgcagccttggatcctcatacctttgatgactttggctagtatgtgcatgccaaactctatcgtgcaaatgtgactcgttataaaacatgggaggatgaccaccattttgctctttgacatagacaccattttccattctaatatcttgacctcccatataatgctcaccagagcggtagcaatttgaacaagaattagaagggtgaccagggtattcattagtcatgcttggttggtcaaaatgttgttgggcagggcgagtccaacgaggatccatatagcgaggatcagtcattgaaccttgaccctgctggaatggcaaacggccatgttcacctacactgtttccatccaaaaagttgttggagcgacttaaattaccaggaaatcctgcattttgctgaattacagcaccaggtggaagccatactaaattgtccatgtgcggtggtgactgagcctcataatgacgatattttggtgactgccttacaaagtcatcaggagtcctctcatcaaaatcctccgctccgacttgaaaccttgcagatgatggtgaaacgggaaaatccctaggatcatgcactgcgtactggcctggtgagacatacgcagggctccaaggagaatccatctctccgtacctctgactctgtgatggacgcggaacattcaaatgcctcaagccagcaaaatcaggaattccagagtcattgcctacaattccaaaaagctgctccactgatacaggagacgaaggtgtgttaacatcaccaaggttattgagtgcgtcaacatatcttctctcagtttcccgctcatctacattgtaatgcacaaccgctgatgcagcatcatcatccaaattctgagaaaataagaagatcctgagccgggtgaaaacctcccctgaggcaatgactttgtcatattcctccatcatgttcaccacatcatcatcgttcacaactgagaccagcgcgtctaga

SEQ ID NO: 42356 - DNA, 910 bp, Setaria italica
  Peptide Sequence Number=SeqID_108330
aggttggccgcattggagcagcagaaagctgatgaaatgttatgaagattatggaaaacaaaagagagagaaagaagctgttatgaaaagctcacgatgttgagcatacagtcagaaaagaagctcaatcttgagttaaacattaagcacttgatgggaaaattacaagtgatggagctgaagccaggagatgaagattctgaatccggcaagaggatagatgaactaagagaggagctcagtgagaagatcactgaactgaatgatgtggaaagctttaaccaaactttaattgctaaagaaagcaagaacagtgatgagttgcgagaagctcgagacgtgctgatagatgccctgcagggtttgtctggcgccactagttcccagacgcagataggcatcaagagaattggtgagcttgactccaaagtgtttctaaacatgtgcaagcggaaattttctgcagaggatgctgaagtggaaagcgctatcctgtgttcaaagtggcagaaggaaattagcaatccagaatggaatcctttcaaggctattatggtcgatggaaatacgctggaagcaatcagggaggatgacaagaagctcctggaactgaaggagtgcagtgaagaagcctatgctgcggtaacgaaggcactgaagtgaggctgaaggatgtcaatggcaggaggagggatcctttccctgagctgtggaactacgaggaggggcttaaagcacagacgactgaagcagttcggtatgctctgaagctgtggaacgcaagcaaggtgaagggcaagagaaggcgttgagctcaacgcagtggcctcatcctggttgaatcaattaggccctgttatgagactactacagccctatagacttgttgttcttaggcagtagctgtcta

SEQ ID NO: 42357 - DNA, 776 bp, Setaria italica
  Peptide Sequence Number=SeqID_108331
taaattaacctaaaagtactaaattaactttagggtacgacgaagggtagaagacaagcggctgcagcgcgttgggagcgaacttcctcgcgaacaggaagcacagctccgatgtccggccgttgtaggtgcagttcccctgacccgccttcgtcgtcagccgcttcaggaacgcctcgtcgacatgagcttcccagaacgtggccgggtgcgcgccgccccaggaccaatccgtccacgtcacgctgcggttggcgaccctcccctgcgcttcgatggagagcaccgtctgcacgtagtgctcgtccgtgtagcacgtcgggatgcagtgctcccggaacttgggggtagtatcgctcgtcggcgacgaccaccacggcgagggcgcggtccatctcgaaccactgcgagcccttgcgccactgctccagcgacacctcggggggccaggccgccggggtagcgtccacggccacccgggccggtgtcgtcgtaggagctgacgaagctctggcgggagcgggtgaggtagtcgtacacgacggggaagccgaagagcgggatgcaggactcggagacgagcacgaagcgctcgttggcagggtccagcagcgcgttcgccagcagccgccgctccgcgtcgaccatgctcacctcgccccactcgaccacctggctgggcacctggcggcggtggaagggcgacgacggcgggaagtcgtcggggcggtggtacccgggcatcgcgtgctacgttagtacggtagttagtagta

SEQ ID NO: 42358 - DNA, 493 bp, Setaria italica
  Peptide Sequence Number=SeqID_108332
acaaacaaaaaaatacaagactaagactagacaaagaagattcgacgcgatggcgccgggtcgcgtgtggacgcttctgttcgcgctgctgctcgctgatctcgtagccccgattcacgctgccgcaccgtctcatggaggaggcggcgacaagaacaccggcaccgtgatcggcatcgacctgggcacgacctactcgtgcgtcggcgtctaccggaacggccacgtcgagatcatcgccaatgaccagggcaaccggatcacgccctcctgggtcgccttcaccgacggcggcgagcggctcatcggtgaggccgccaagaaccaggcggcggccaacccggagcgcaccatctacgacgccaagaggctcatcggccgccagttcgacgacgccgtggtgcagcgcgacatgaagctgctgccctacgccgtcgttgacaggaacggcaagccgcacatgcgggtccaggtcagggacggcgacgtgcgc

SEQ ID NO: 42359 - DNA, 447 bp, Setaria italica
  Peptide Sequence Number=SeqID_108333
tattctagttgttccattggatatatgtgtgctgaattgcgactcttctggggtatatgcgtatataacctttcttcacagtgacggaggtagaaagccaaaaagaaagccacatgttccaattcacctcaatgcagcagcaccccctgcagcctggtgcctcagttggtactcgcaccaaaaaccctgatcctctcttcaatcttggcgctgcagctggggcagcgaaccacgcctttatcctcctgcagcttgttgcagccaacgcataggacctggtgtgcgcactggagcaggatcacgaccgccgcctccttcttgcaaacaacacagtcccggcggcggcttggcttctgggctggctgtggtagtgggcggtttggatgtcggcttggttggtccttcttggtattgggtcttgtctttgttctttttgttacgtttctt

SEQ ID NO: 42360 - DNA, 2061 bp, Setaria italica
  misc_feature (1)..(56): n is a, c, g, or t
  Peptide Sequence Number=SeqID_108334
nnnnnnnnnnnnnnnnnnnnnnnnnnnnnnnnnnnnnnnnnnnnnnnnnnnnnnnngttttttggtcagactacacactgatttgcagtctggaaaatggtttcgattatacgcatataccccagaagagtcgcaattcagcacacatatatccatggacactgatgcgaagtataaccactcaggcagagacctatataacctttcttcacagtgacggaggtagaaagccaaaaagaaagccacatgttccaattcacctcaatgcagcagcaccccctgcagcctggtgcctcagttggtactcgcaccaaaaaccctgatcctctcttcaatcttggcgctgcagctggggcagcgaaccacgcctttatcctcctgcagcttgttgcagccaacgcataggacctggtgtgcgcactggagcaggatcacgaccgccgcctccttcttgcaaacaacacagtcccggcggcggcttggcttctgggctggctgtggtagtgggcggttggatgcggctggtggcctctggatgggctgctgctttgacgtccgtgctgtgcttcggttagtcatgccaggagggttggttgatgcgacagctggttgatttgtgcctgtcgacttctgcagacggttcaattcgtcttgaagcctccggaggtcatccttgtagcactgggattcaacttctttcttccgacgaagctcttcgagtcggcgatcagagtctgctttcgcagcttccttcttcctgcgctcctcttccaaaagtgccacgttttcttctttggcccttgtgtcctctcttatcttgatctccatgttttttattgccttcttgacctcagaaagctccctctcagcctgtgtaatctttgtcttgcattcagcaatgtcctccttgagcttcgctttctggcgctcccagacctcaagctttttggtgtccttcttctctttccttaacagaccctggcattgtctttcagtctccgatgcactcagctttgcagcttccatctctgcacgtatctctgcattttccatttccagcctctgaactgttgcattactccggtcaagctgcccactctttttcttcagctcattctccaggtgagcaaggcgctttattgtgtcatcctccatcacctgcttttccttcttacgccgctggttctcatcatgttccattcgcagcacacgcagctcagtgagatcagcaccaagcttgcgagcagcctgtatagcctttccctgtgcccattcccttcgctccttgagctgcgcctccatctctcttgtctgcttaatgaggtcacgcaccatctgattctttggatcagggtttgcatctgttggatccttcttgtcaatgtccagtgcttcaagctccacaacaacagactcaatgagctcctcagtcgacagcttcttggcaaaggactccttgggttgcccttccactgcagcaccgctggaccgtgaccaaccagcggccttgaggcaggacatggtcgcagcagcaggaccctggtgtatcgcgagtctcatgaaggtttccgggtcaaaaagagcggggtcctgagctgccgcggctgtggtgttattgtagtggatgtgtccacgctgtggggtctcggccacgggcggggggagctcctcactctcagcaggggcagcagcaggtacgggcttaccattgagggagcagcctatggcgatcgcctcctcgaggcgcaggtcgctagagaggaggcaccacaaggcttcggcgcgggtgagggtggggcggctgctctggaggaggcagacgagccccgcgagggagtactcctcgaggcgccggaggtcggcgaatccgccccgccggcgtggccggggtcggagaggtaggtgcgggcgttggcgacgatgttggagacggggtcgttgagcttgccgtagcagtggcccgcgcggaggacggcctcaagcgacgcttcctcgctgtggccgaggtcggcgagtcgggccagcgccgccgcgtacgcctcgtccagcctcttgagaagg

SEQ ID NO: 42361 - DNA, 446 bp, Setaria italica
  Peptide Sequence Number=SeqID_108335
ccggagccaaaatttcaggaatctcatatgccacagtcaattgtactctacaagaggatgggcttttagggaagaagcgaacagcgcctctattaggaaggccttcaagagaccgccaatggatcttttgatttttagttggcgtcatatttcgagcaagccaagagaattctacattccgaccaaatacctcatacttcagactccagcgtgaaagatctggtttatcttccaggaccttgacagatgagatgaatggcatccactgaggaatgctctcacgttctgagtaacactgataggcaaccgaacatggaacatcaacttcaagttcagtcgtgcactcctgccactccatggcgacgggagagaacaaggcaggcctcgcccttgctctcgccctgctgctgctgctgctgatgctgatgccgctccgcccttcccct

SEQ ID NO: 42362 - DNA, 499 bp, Setaria italica
  misc_feature (20)..(20): n is a, c, g, or t
  Peptide Sequence Number=SeqID_108336
cggactgcctcctgcttganaattttgtagaggtggtcaatgaggctggaagagacttggacctgggaaaattccttgacatacaccccttgaatcatcttcacagtaaatccatgtcttccatccatctttactgctaataccaagagggctggctggtacctctctcaaattagagcgactaaagtttggatctgatgatcctttgtgggaggtttcttttggtgcatctccatcagatagtccgagcatttcacctagtgttgttattcctttaggaattgaattttctgaaccagattggcaggccatttgccatcgttcagagaggtgctttctggccttcctactcactgatggtccagcagaatgcagacttgaataaatgggcatgacctcatcatgagaggtagaagcaacttttgtcttctcagtgtacgcagcaaggctatattcctccttggactgtctcctcatgctgcctactttttagttgttt

SEQ ID NO: 42363 - DNA, 1111 bp, Setaria italica
  Peptide Sequence Number=SeqID_108337
gggcatgaacacaaccactaaactgttaagaaatttaatctaaagtaaacaaacaaatgaaatgtcgaatccatatttttaggtgtgataatgagttttgactggtatcaataacataaatttagagaaatccatacagcaaaatacttaatcatgccaacatcctcaaattggtatatcgcagtgctaaattcctgagaaacattaaatgatgctaaaagtaggtatttcttcatctcaaataatataaatatgcaaatgctaatatgagcaattcattttttttctagcatccatgggcaactattgtgcaactaaaactgatagatgtttcaccttttgcaacataaaaagctataaaaacattgctcaaaaccccattactagcaatgctgctttaggatttgtgcaattcagatatttttttagagcaacaaaaacaccactcataaggatttaggatcatttcaattcaaatggaatatatgaacttacgtttcatcattttgtggtaacttcagttaattaacctttagagtattggttttaaaagaactatcaacctgttcacattttctttcccaaagattgctactgcaacaacaactcaactctaataaaaagtattacattacatacatatgatctgaccccaccaccaccaaagtttttgtaagcacagaaatatatgccaatgaatgtgacacatttgagactaacagtgcatcaatggtaaaacagagtgagtaaccgcagaggcgcagacgcagatgttagcgccttggaagatgattttccggatttcagatgcctggaaacaggcaaaggaagaaactaatttgtgttaccagatggttttcagaaaataaacagctcaattacattttgcaccattttgtgttgtacatattcctaatagagaccagcctgaaaaaagtgagaaccagctcagactctgctccttgctcaaggaactattcacctcgtcctcacatattgcctggtactgttcaccacacttgagcagcgcgcacgacagctatagcctgtagtgaacagtaatgcttaaataatcaaccattcatcaatatgcaacatgtcaacgcccagt

SEQ ID NO: 42364 - DNA, 368 bp, Setaria italica
  Peptide Sequence Number=SeqID_108338
gaaaatgccgagcgtaatatttggtcacatgaaatcttacctgaatagcccaaagaagggcatgcagaaggccaagccaagcctcaatatggcgccttccactgttctcatcggtgcatttcggccttactcgcttggccatcccatggaagtgagaagaaagaatagggagcaattcagaggcaaagggagaaatgtagtaggtgcagtcaaatgaaattgtaaccatgttcctccttttttttttgccctttttatagatgctagtcgacagctggtgattttcaaccacaattgataggttttacttgtatagttcgggagtactataaattagggctgtgtatagtgcatttgttatgtataat

SEQ ID NO: 42365 - DNA, 1521 bp, Setaria italica
  Peptide Sequence Number=SeqID_108339
cgcgctccggggatgggcgccccgcggcgccgacgccttccagaagctcgagaagattgggtcaggaacgtacagcaacgtgtacaaggcgattgacgtggagagcggccgcgtggtggcgctgaagaaggtgcgggtggacggcgtcggcgaggccgagagcgcgcggttcatggcgcgggagatcgccctgctccgccgcctcggcgaccacccccacgtcgtccgcctcgaggggctcgtcacctcccgcctcaacaccgctccctccctctacctcgtctttgagtacatggagcatgacctcactggcctcaccgcctgcgcaaccgcctccggccgccgcctgtccttgcctcaggtgaagtgctacatgaaacaattactttccgggattgaacactgccataacaatggtgttctgcaccgtgacatcaagagctcgaacctacttgtcagcagtgatggaattcttaagatagctgactttggacttgccacctcttatgatcctgacaacatgcagccaatgacgagccaagtgatcacgctttggtatcgtccacctgaactcttgttaggagcaactcactatggtgttggtgttgatctttggagtgtcggttgcatattggcagaattgcttcttggtgagcccatatttcctggaagaacagaggtggaacaattgcacaagattttcaagttgtgtggtactccatcagaggattactgggagaaaatgaagttcgctcatcctacgttcaagccatatgaacggtgtctagctgaaaaatttaaggatgtgccaccatctaccctatcacttcttgagactctcctgtcaattgacccagatatgagaggcactgcaactgatgctctgaacagtgagttcttcaggacagaaccgtatgcctgtgaaccatcaagccttccgcggtatccaccatgtaaagaaagagacgtgaagcttaagtacgagaagcacaaaaggaagtcaagggtcaatgggtcagtagaacgtcataaaaaccgacagcatgcatcacaaaatcctgggcgcagagtatttactccagatgtcaataataagccgcaagcaaatccaaaggtaccaagattggtaacaagcacgagtactaccaaacttgagagatttcctccacctcatttggatgcatcgattggttatagcctagattcatcggctgatggaaccactgaagaattcttcacatcttcagttgttgagctaaagaaaatgccgagcgtaatatttggtcacatgaaatcttacctgaatagcccaaagaagggcatgcagaaggccaagccaagcctcaatatggcgccttccactgttctcatcggtgcatttcggccttactcgcttggccatcccatggaagtgagaagaaagaatagggagcaattcagaggcaaagggagaaatgtagtagcaacagcatttgacaattgccttactgactattccttttttttttgtccctttttata

SEQ ID NO: 42366 - DNA, 1621 bp, Setaria italica
  misc_feature (1)..(17): n is a, c, g, or t
  Peptide Sequence Number=SeqID_108340
nnnnnnnnnnnnnnnnngggggacacttgacagcctgcattccgaattctgaagactagccactattgactgcatatactacatagaatggcaacaacactccagtaggctgtcaggtccggaaggtccatttcttccagggatgtaaggttagctacactggcatccttcacacagtaggattacaattacatttaccctaaatgtaactaggttagacactatgccggaggagatgctcctgcacatcatactgcttagacagcggcctaggctctgggcttaccacgccaggacatcctgctgcaacatactacctcaagtacttactaagaaaaaggaggccttgcgcgacatcatccttgccacagacatgtttttacacctcggcagacgcctctcgctcactgtccagactgctatgcctcctgccacttggcttatcagacttggtgaagtgcttggacatgatggaagcctgctcttggatgatgctccttgcttcaaccagctgagcttcgagctcaagctcacgctcggtagcctcagaggtcacttcagcacctttttgagcgtcttgaagttgcgtcattcgtgccttgattgaagccatttttgtgcgcaaactctcttctatctggtctctggccatgtgaaagggcaagtcaaagacatccgtcttgccacctagtggggactgaggagaccctgcctcttttcttccattagcagcaacagtaggctgtgatgatccattcggagcattgaggaactcacgcatgtccatctgcattgaacgcaagagtgcccgtaaatcagcattctcctgcatcagctcttgcttcttcacttcatatgcatcaacaatcattttgtaataatcattgtcattctttttcccattccacgttccacgttgccggccttctttctgcaacaagttcattatttccattccagaacgggacgactcctttttcttctccatcaatacctggtttagcttctcctgcaattttatgtattctttctctttcttcttcatttcatggagttgttgggtgcgtacttgctgatttcctataaccattttctgaaattcatcacgttcttgttgcagcttatcaatctgagatttcaaagctgcagtgtttttggcctccgttcgagtaagcgttgcaagctctcgatctttggctgctaattgagcatccattctttcaatcttggcctccaaccgcgaaatatcagattgcatgcgctgccgcaaatcatttgtcgactccctgaactcaatgtccctctgccgctgctgcagcagcgcatagatgcagttgcatgttcttgcaatcgagaccggatcggtggcgaagaggtcgagcgaggccgggaatccgaaggtgacgagcgtctggttgaggtaccgggcgcagtgctccaggttccccgcattcgcgaacgcgcccccgtcgctcatgccggatggcggaggctgcaggtgctgcgacgaggcccggaggtcgaagcgcgccgacgaggacatccgcggtgagcgagagaggagggcgagagggagagagatctggggtcttgggggggttgatggtgatgggatggaata

SEQ ID NO: 42367 - DNA, 359 bp, Setaria italica
  Peptide Sequence Number=SeqID_108341
gatcagcatcccggccacccccagcatcgcccaccgcccgttcaccagctccgcctgcacgaaccaccgcaggttctccgggtcctccgccaggcccagcgggtcgaaaccattgtcgcccggcaggctgccgtcgaggtaggcgggggaagggaggccggggagccactcgcccttggcctccgccctgaggctgcgcctcgtcggcgccgcggcgcggccgaggcggctagagtggccgacgaaggccgacgacctgagcgacgccgacgggcgcagggccgcgaccggggtgcgggcggtgacggacgccatgcttcgcggtgagatgggagtggcagaggaatggagaggaagag

SEQ ID NO: 42368 - DNA, 1160 bp, Setaria italica
  Peptide Sequence Number=SeqID_108342
ctaggaaatcaatttctttcaaacatccgtgaagtagattccatacttcaggttgtgcgatgctttgaggatgatgatattgttcatgtcaatggcaaagttgatcccaggtcagacattgatgttattaacctagagctgatattttcagatcttgaacagatagagaagaggttagataagctcaaaaagagcaaaactaaagatgcacaagtaaaagtgaaggaacaagcagagaaaacagggctggagaaaatacaggaggcacttatggatggaaagcctgcaagatcggttgatttggctgaccatgagaaagaagctatacaacatctttgtcttctgactatgaaacctgtcatttacgttgctaatgtcacagaatcagatcttgctgaacctgatagcaatcctcatgtcaaagaggtggctaaagcagcatcagacctggaatctggcatcgttacgatatcagctcaggttgaagctgaactggctgagctacctttggaagagagagtagaatatctaaaatctcttggtgttgctgcaagcggactaggcaatttggtaaaagcgacatatgacctattgggactaagaacttatttcacaaccggagataaggaaacgaaagcttggactattctttcaggcatgactgcgcctcaagcagctggagttattcacagtgactttcagaaaggatttattagagctgaaactgtatcctatgatgatttcgttgcggcgggttcactcggagcagcaagggagaaagggctgttgaggttggaagggaaggattatgttgtgcaagaaggcgatgtcatgcttttcagattcaacgtgtgacagcaatagtagcacaaagcttcaaaataccgggactatgtacaaggcagattgcagaatacaattttcccatactatgacaaatttttttggccttatgacacgactattcatgtaccggcattgttccttttcttatgagggggaaaataccatgattcactgttaaagtatcattcgccacattttgagaaatataccatgcaatgcaagagttcttcagtgtaacttctctaagaatccctattgtgtccttaaggatcactccagacatgaaacttctcgtttttcttaataaaagcatg

SEQ ID NO: 42369 - DNA, 443 bp, Setaria italica
  Peptide Sequence Number=SeqID_108343
caaaataattattctcatcatgaggaagagtttcctcttctaagtagcgatcaagctcattcttacttctaacaaagcttgtagtcctcttatttgcagtaagagttttaaatatggacaacacagcagctgcactaactgtagaaggggcaccagcagaggatgtagccacattgtcttggtctgtcacatgataatgtttcattaaactagtaagcaattcctgagcctctgtaacatattttccagcagcctcttctccaaaaagagcaatatagcaagcatgtaacattgtcatcttaagacgtggatcaagaataacagcaacagccataagaccatggatgtcagcccaatacttatcatacttttctatcatggcagcagacatgttcctaatatgttacagctaacctgttcttccctaaagtatgtgagattaa

SEQ ID NO: 42370 - DNA, 655 bp, Setaria italica
  Peptide Sequence Number=SeqID_108344
taggaagtacaatggaacaggtaaattaagtcggaatccgctctagtgatgcaatattcatccttcagatcttcttcattgtcttcaaggcatgaccaaaaggtattgaaccttccatcaccctcatctttgaggttgtgacgaagccaactttggctgcacatcaaagcttccaacattttaggagtaagacgactgcgatgctcacttaaaaccctcccactagtactgaaagccgattcagaagctactgtggtgattggaatagccaaaatgtcacgagcaattagcctcaaagtaggataacgagctccctccaacttccaccagcttctaacaaagcttgtagtcctcttatttgcagtaagagttttaaatatggacaacacagcagctgcactaactgtagaaggggcaccagcagaggatgtagccacattgtcttggtctttttggagtagcaatccaataagcaacactttctcggatgtgcgcaactgcagttccaattactgccatgccatctttcacaatgaggttgagaatatgtgcacagcaccgcatgtgcagccattttcctttcaatagcatattagcagcccccactcctcagtggccaccgccgccgcctccttttccaactcctccttcctcc

SEQ ID NO: 42371 - DNA, 277 bp, Setaria italica
  Peptide Sequence Number=SeqID_108345
tggaattatcatattgttgtatgtttcaacatccggttggaggccttcatctataagtttgctgaatatattgtgtgcgtccttcatgcaattctctcgtgtcagaacatagacaagtgaattgtaaacactactaccaggagtccagccccctgttttcatttacaacaatatgataattccaactttgtgaaaggtgtaagcttgacgatgcacgaatagtgatggaaagcatgatacttaagggcattgttccaaccatttcgacgtaccatgc

SEQ ID NO: 42372 - DNA, 958 bp, Setaria italica
  misc_feature (958)..(958): n is a, c, g, or t
  Peptide Sequence Number=SeqID_108346
ggcatatcctacactctcatggtcagttgtttctcaaaagtaggaaacctttttgataccttgaggctttaatgtgaaattaaaaaaaggggctggactcctggtagtagtgtttacaattcacttgtctatgttctgacacgagagaattgcatgaaggacgcacacaatatattcagcaaacttatagatgaaggcctccaaccggatgttgaaacatacaacaatatgataattccactttgtgaaaggtgtaagcttgacgatgcacgaatagtgatggaaagcatgatacttaagggcattgttccaaccatttcgacgtaccatgcatttttgaagcaagaaggcattgatgaatcactgaaactcttgcgaaaaatgaaggaagatggttgtggccctaacagtgatacatttctcatgcttatggataaattttttgtactgaatgagtctggaaatgttctaagagtgtggaatgaaatgagaaaatatgacataagccctgctcgttcacactatatgacattggtccaaggtttagtagagcatggatgtataccaagagcattagagtactatgatgaaatgaaggaaaagggttttgcttctgattcacaacttgaaaaggaattcaaaacctttctgttggccaacagagaccactggaggggagcaggcaaatacaatatcatcccccaacggggcaaacattttacaaggcggtccagaacgcaataacaaatgtggttcaattgaatttgcttctactatattttcttatatggaggcacttattcgacaaagttgaatttggaccacagagtgagattataccccatcgaccgagtcaaaaacaatcttgataaagaattgtttcacctttgaatcaaaatttgccaatgtggttgtatccgagcaggtgatgtcctcatcaccattagatcgcaaaggn

SEQ ID NO: 42373 - DNA, 669 bp, Setaria italica
  Peptide Sequence Number=SeqID_108347
cggctcgacgcgatccagggaggggactcgatgatccgcgaggggaagcgcgcggtgagccgggagctcacccggatcctggagttcgttgacaaggtgctggtcaaagagcacgagcaggtggccatgggtgacgcattgggcgccagcgagtaccatgaaggctgcagtgcttcgttcgtgggaggacgcccgtcagtgagtaagaagaaggtgagtttctctggtaatggtcaggttcatgagctcaacgaagagacaggggatggaaatgaggtagatgagggctctgaaaactcgagctctgctgagtctgatgaggtgaagcctaacaagagaagtgccaatggtaagcctggtcttgctgcaccaatgccagtgcacatggagtcgaggaggattgctgatgcaaggagatgacttgagatttgcatcatgtaatgcgacgcgtgggtttataaccctgttgtcatctccttgctgcatttccactgatgtttcacgagggaggattgggtctctcaaaatctcaaatggcggagagtacaactgtgaacttaagaactagggcagttgtattgctcagatgacctttctgttaattgcattgtgttgtaggattgtactattactagtatctagtttttttggcactgagagtgagtaaag

SEQ ID NO: 42374 - DNA, 173 bp, Setaria italica
  Peptide Sequence Number=SeqID_108348
aggcagacgcttaagttgttcaaggcatttcgaaattcttgagttttgacaatcatcaaccataactgcctcccaactaattcgcccaatggcttcaatatcctctaagatggcgtcagggtgggacaagagaacttgcaacatcacagaaccatcctcatagaactccagat

SEQ ID NO: 42375 - DNA, 481 bp, Setaria italica
  misc_feature (466)..(466): n is a, c, g, or t
  Peptide Sequence Number=SeqID_108349
ttcgatcccaactccatcacggacatcgaagatgatgccttcttgcaggaacaattcctccaggaggtctacatcttcgatcccaactccatcacggacatcgactcggcctgccaggataccgcgagcgaggagatctcgttgctgatgcaagccgtggaagagctcaaaggaaccgtcgaagagctcaccgacgagaacgagaagctgaggcgggagctcgacgtcgcgcgggagatcgctgctcaggcccagcttgctgctgctgctgctggagcagaagcccggagccgtaccctgcttgatttcgtgcccgcacccctcctcctgccgtttgggtttgtaccagactgacgactagagccaatatcgaatgtccttgttccgttgttattctttcatcacatatgagagctagcgaacgaaccatgtcatacatgttgaagcataaaccttgaacaatggngtgcacttgcaggac

SEQ ID NO: 42376 - DNA, 198 bp, Setaria italica
  Peptide Sequence Number=SeqID_108350
tttgttttacttttggttttacgttttacgttttagttttagtttagttcccttaattattcgtaattgtctgtccgtgtatctcgactcatcatcacatatgaggagctagcgaacgaaccatgtcatacatgtttgaagcataaaccttggaacaattggtggtgcacttgcaggacggatcatggtgaatgcttg

SEQ ID NO: 42377 - DNA, 683 bp, Setaria italica
  Peptide Sequence Number=SeqID_108351
ttttttttctagcagcaccagcataacacgacaactcaaaatagtgtctcgcgcatacataactcttccgaaataacatcagggcaaaattctcgcccacaaacttgggaactactgactgtcagcaaacaactgtacacatccgaaaggacaaaataccagtgactagttgcctgctctatggacacttgccacaacaaagacgcatgagatatgttctgataactaccgctgctactgaagcaaagctacaacatatgcatagatgattcacctgagggaatccaacatcctcacatcatgcttcttgcgcctgcagcggtgatggctcttctgctccccgaagttattgtctccaccaattctcattttattcatatctccaattaccccgccccagaacagctgctgcctcccatcctcctcctcttcgtcgatctcatctccgtatccgagctccacatcgccacggtacccaggttcgctcccgtacccagaatcggctgcggccgcctccgcagccgcgccggacccaccagtccccgcagcagcgccaccaacgggcgccgggccgaactccgtggccatcagcacgtccctcatccgcacctcgccgacatccgacgcccacatctcaccgctggagtcggtggcgccgccgcccccggcgccgcacgtgaaat

SEQ ID NO: 42378 - DNA, 1055 bp, Setaria italica
  Peptide Sequence Number=SeqID_108352
tattctatccccctgacgctggtccagccatcctgggcgcctccggcgttggcgcactaccaccccaccgccaaagccggcaccaccctcttcaagtccgagctcctcggcagcgcgtggacggggttcctcgccgggtgcctgcacacgctctccggcccggaccacctcgccgcgctggcgccgctctccatcggccgttccagggtggagagcgccgtggtgggcgcgctctggggctgcggccacgacgccggccaggtgatcttcggcctgctcttcctcggcctcaaggaccgcctccacatcgagatcatccgcacctggagcacccgcgtcgtcgcgctcacgctgctcgtcatcggcgcgctcgggatccgggaggccagcgaggtgcccacaccgtgcgtcgcgctggacggcggcgagtgcgacgtcggcggcgtggtggaccaccgccaccaccaccaccacaccgtgggcgagaccctgccgggcgggaagaagaagatcaacttcgcgacgttcgccaccgggatcgtccacggcctgcagccggacgcgctcatgatggtgctgccggcgctggccctcccctcgcgcgtcgccggcgccgcattcctcggcatgttcctcgtcgggaccgtggtctccatggggagctacaccgtcttcatcggctcctgcacggaggcgctcaaggacaggatccctcggatcacggagaagctcacgtgggcggcgtcgctgttggcgatttccatggggctcgccatcctcgtcagccagtccttcggcatcaccttgtactgacatgattcaatcgcaacggtgtcttcttcttgctcccttcgcgttctagttctgcctccctgtccctggtgctttcatttctggagctgctattgagtaggaacctcgtatgagatcgaattttcctgtcatgtgcgagaattctgcgcaccttcctctcgatcgagaggcactgctttaggattgatcatcagatgaatgagttgcagtaaggtgatcttcagtatgagtgaattgcatat

SEQ ID NO: 42379 - DNA, 2172 bp, Setaria italica
  misc_feature (1)..(54): n is a, c, g, or t
  Peptide Sequence Number=SeqID_108353
nnnnnnnnnnnnnnnnnnnnnnnnnnnnnnnnnnnnnnnnnnnnnnnnnnnnnnaacttttgaaaccattcgcaactaacacgtattatgcacagggcggcaaactgaacacatgacgacatacaaaaagcacatgtaattagctaattacaagccaaacccaaaaagaagaagcgcataaactacaatggcacaaagctgtcgagctgacatcagatatctcagcgtcaaaccaaaccgagcctccgaagaataagagtcgcagggctcgcagtcgcagctgcttgcctcagtcatcgcctaccgacgacatggcaagcgtccgtcttgagatctccatgtgcagttgcttcacaaggttgatccaggcgccaacgctctgcccgtctatcgttacccagtccacgattgtcgctgccggctgctcgtaccactcatctaccaggcccctaacacgctggcaatcttcgaaacaccttcgagcttcttgaactgcatttctcagttctggcagccatctttcgctcaccaccttttcttgttcaccagctaatttaaggcaatagttggccactctttcatattcttgttgagcacgatgtgcacggttcagcaatacacggtcattctcaacaagatttctccgtgtgtgcaccaagttgatagcttttgataaatcttctaatatactagcttcagacccacaaggtttcaggcagaactccagggaatttaatactgaagctaagccagaatctgtgccttctgtacctggtgaaacagaattatactgaagagcagcagagatgcggcatatagatggcacagcagacggatctctggcaccagctcttgcggtcaacaaagctgcatgcttttctgcagctgcaagtgcttctaatccggtcacaccgctagaacccacggcctccaaaagggcctgaggagttgctggcaatctgcacaagctattatccaagctctggccaaatgcagctaattctcgctctatgaggtcccttgagttcgtagacatgcctaccacggcattgcatgcagggatgatcgtagttgacacatatcctctagctgataatggttgttgctcccaaaatgctgacgcatccatattggcccgttgaagagcactgtaaatgcactccagctctgaccgacgagcgtcaaattcttcaattttcttccacttcttcttcagtgaatcttctgcttccttccactcagcacataacttatacagacgttgtacctcggatgtaagtgtactcaagcttgcctttagtcccgcaacttctctttccttggcccaaacatccagctctaaatgcctactgttggtcacattctgtgagttgttcccagtaggcagcttcttacttcctgccatgtcaatggtgccatgcaggcgttgcaatagcttctgacttagagctttagcttctgcagctttgttcaaagcatcttctgttgctaagaattgctgaacatgttctttctgtctttctagtagctggtcatacgttcctcgagttgacaactgagatccattcttcccattgccatacacctgatacggtaagggtgagctcgcatcagttgaagcagcatcaataacctgctcattttcatatttatacctaagcagttctgcatcagcacgtatgtcaatcttgtctgtttctctatgtataagtgttttcatgcgtgatgtgtaggtgatgattgactgcagaagcaaggtcggattctttagggaatccaatgcgacagctttaacatctgttggtatttctccatccaagtcaatacccagttttgctgcatctaattggcaacttgaattaatgccactcccttcaaatgctgggaatgaactccgaatcgtttcaatcatatctgcagctagagtttcacatgcctttcgaatgctcctttcacctgcagtttctacaagatcctctggcaacctattgcttttgatagttgatgagtaaagatcctctctatcgctctgcaattgcatgtcctcaacagcacctgcagctccagagacacctatacttgaccttcgcacatcccttgcttggttaacgaactgatgcagtcggcgctggtattcagcaaatattttgcatgcttcatcacattgctgtt

SEQ ID NO: 42380 - DNA, 1655 bp, Setaria italica
  Peptide Sequence Number=SeqID_108354
ttcttttgtttcatttccatctccctccttggaatcttcagggaaatgatgtgcatagtaatcactccagatcctgttgatcaacctggttgttgttgcacgcatcacttttcttcttgatgctgggcccattgctgcacttgggttcagattttctcccctcattacttgagtttttttcttcataactaactttgtgtgctgcctctgttccatcttcaataaaaggccactgacaaatgcactgcgacgaatagtctcatctggaaaatctgcaaactgctggagaataatctgtccatgcaccacaatatacctctcaactagcgcaacatttgacgatataaatgcagggttccctttgtcaaattcagctactttttttatgacatcagcaaaagaaagctttgaagcacgactttgttcttttaacagggtgatgatgctaacagcaagccttgctgttttcaatacaggctcacaccatggagcatattgcttagtcggttggcgtagcttgtaccaggccacatcagtccgaatggttatacagatcattgagccaccaaattctataagccattctttgattgggcttaaataaatagggactccagcgtccgattggtcagctttgctggaggaagaagatgatttcacagactcagctgtggaacagcaactgccatcatcatctctcatgaaaccagacccaaatataactacatcattttctgctcctgatttcatagggattaattccaaagatataagcctggaatctgcattgtacagagcccagttattgagtatcctcactggcacatcatcagaaaatatgctgtcatcaccatcaaatatgtattcatccatttcttggttagccggtttgtaatatgcaggaagaggatagtcattggcaatctcagcttcactaattttgatgtagacatttttctgtgatggtgttcctcgtctacccctctgtttcttcatcattttccattcttcttcttgttgcagtaacctagctaattttgcatcatcatcttctggtatctcttcacactccgtgtccttaattttcagacttgcattggagatgttagatggcatcttggtcaagtccaccctagatttgcactgatctctaagagcaataagaactggcagggtagcaaacttttcatcatcattccctgatgtctgatccaatccaacaagttgattgtatacaaattccccaatggagatcaccaaatctttgctcatggttccactatatcctttcatggcattaattgaacgaacaacactggcaagtaattcatccagaccctggtcaggattcccaccaactgatcttgtaagctttttgaaaacttcaacacacacctgagccttttcatagaagtggtcaaagtaagatttgtaattgcttgcaggtttcacacattcatagtcagcaacatctgttgacacccagactacagctgtaccttcatcataaccagaaatattccagtcctcaattcgcccaaatccttcacagcgtactcctctttcacgctctttttctagatcatcatccatgggcattataagagctgttatggaaagtcatcaatttctgacattttcaaagggttgtggtt

SEQ ID NO: 42381 - DNA, 919 bp, Setaria italica
  Peptide Sequence Number=SeqID_108355
tgaatacgagaaattggatgcttgtcccatctgcgaagccctgcggtataagatcaggcgagatgatcctggtgatgtcaaggggcagtctcccaagaagagagttcccgcgaaggtgatgtggtatttccctataataccacgcttgaagcgcttgttcaggaacaaggcgaatgctaagttgatgcgatggcacaaagaataccgtaaggaagatgagatgctgagacaccccgcagatggggcacagtggagatcaattgatagaacattcccagactttgaaagtgaagcaaggaacataaggtttggtttaagcactgatggattcaatccattcggtgagttgagtagtggtcatagtacttggcctgtgaccctttgtatgttcaaccttcctccttagctgtgcatgaagcggaagttcattatgatgccggcgcttatccaaggcccaaaacaacccggcaacgacattgacgtgcacctaaggccgttggttgatgaccttttacagctctggaaggaagaaggtgtacgtgtgtgggatgaggatagacaagagatctttaatctacgagcactgttgttcgtaaccatcaacgattggcctgcattgagtaacctttcaggacagacaaataagggatatcgggcatgcacccactgtttagatgacacagatagcatgtacttgaagcactgtaagaaggtcgtctatatgggtcatcgtcgatttctcccggctcaccaccagctgagaaagagcgggatgcatttcaaagggacgccagaccatcgtaaaaaacctgcacaccgtaatggaaagcgtgtgttcgagatgatgaaggatgtacatgtagtctttggaaagggacttggtagccaacctgttccgaacgatgataacggacatgca

SEQ ID NO: 42382 - DNA, 401 bp, Setaria italica
  Peptide Sequence Number=SeqID_108356
tgacgtagttagcttgttgtgtggcaaacacatgataagaagataaacaaggaaagctatacacaataaggagcacatggcagagttaagagaattcttatcatgctatcaccacattcttaacacatttacaggtaccatgataaatttaaagattagcaaatgatcagatagcaaaatagcaaagttctatgcttctcttcctcagcttttgacaaaaattgcaaatcttccaccaattcaaatagtaggaccattgacaaccgatacaacaaaaagctgatcattctctatagccaactctgagtcccatgtgacatttagtttgacaacaacaaaaaatgaaggaaacatattctacccttttccacatcatagcttttgacaattagtttacctag

SEQ ID NO: 42383 - DNA, 391 bp, Setaria italica
  Peptide Sequence Number=SeqID_108357
gggttgaggacggtcgacgctgtcatcattacccactctcatgctgatgccattggagggcttgattgtcttcgtgattggacgaacaatgtccagccatcgatcccaatttatgtggcggagcgtgattatgaggtgatgaagatgacccactattatttgattgacacaagtgtagttatacctggagcggcagtttcagcattgcaattcaacattataaaagaggaaccatttacggttcacaatcttgaggtgattcctttacctgtttggcatggtcaaggttaccgctctcttggttttcgttttgctgacatatgctacataagtgatgtcagtgatatacctgtaagtaaaccttactaaaactttctttggttaaaattta

SEQ ID NO: 42384 - DNA, 949 bp, Setaria italica
  Peptide Sequence Number=SeqID_108358
ccgtagccgtggaggatggaccgggtggaccagcagtcctcgtacgtcttgcggatgccccggaggctggtcaggtacagcaccaccttcctggcactgtccggcgggggtgggggagccgggggcttcggcggcgccagcttggcgagcttcgcgtcgatcctctgctggaacgcgctgacccgcgcgcgcacgatgcccgggaacctctgtatctcgcgcttcttgacgccgtcctcgccgccgaccaggccgtcaggcttcttgttactgacgcagtcctcgttgcccgggtcggctggcggcggggatatctcatcgagcgccttccggaacgccgcgatgacgtccggatcgaactccggcgatcccggcgccgacttctcccggcggtcctcgccgtcggcggcgtcgccgtcctcctcctccttgtcatcgaggccgtccatgagctcccacacgttgatcacctcgggctcccgtaccggcgtctttgccggtgatcccggcacctgcttctgccgcctgaccatcagctgctgcttcaccggcggcgtcttggccgcgccgacgccgccgtcgtcgcgccacttcatcatctcctcgtcccggtcgaggctgagcgacccgagcgtggacgacttgagcgctacggtgtggtgcacgctcccggtgaccggcccggagcagctccgcgcgtacggcgaccggccgccgccaccgcggacgccgccgcgcagcgcgtgcctggaccccgtgcagcccatcggacacccaccaccactgtacaatccggaaacccaccaccacagatcggcagcgcgaaggcacagctcaatgtcggcgcggagccttctgggagcgctggaccatccctcgacaagaaccgatcagctggaccaagaacagctgcggccagttcagagggacgagcaggtatagctgggcg

SEQ ID NO: 42385 - DNA, 365 bp, Setaria italica
  Peptide Sequence Number=SeqID_108359
tccccttaccttcaaatctgttttttgcggacgatagcatttttctttgctaaaagtgatttgagtgttaaggcgctcaagtctacgctacagacttattgtgagggttcagggcaaaagattaatttctccaagtcttctgttttctttgaagcacattcttctgaaggtactgaaaacaaaggctccgttcatttgagctacaacttttgagcttttttaaatgttgctgctggcttttttcctgaaaagtcaatactagattttataagatgtgtttagcttgctagactcaaaaaagctacgaaaacctaagaaaactgagcttttcaattttccatataaattcagcttttctgaacttc

SEQ ID NO: 42386 - DNA, 598 bp, Setaria italica
  Peptide Sequence Number=SeqID_108360
tccttccgtcttattaggttacccgtaactagtctattattaggtttagttgttgtaaaaccttcttccttcaatctccagtttttcaattttaggccttcctggcgcaatagtagtagtcacagcagataccagctcactggatcgtccaaatacatcagtggcaaagcattcacatttcaggcagcgaccaatatcctcaaagcgtactttgtatgagcgagagcactgggttgccaatggttcaaaagctgatcctctcctgatccaatagagacaaaccactgatatttcatctccttcttatagttattccatatatgttgttggatctcattgcttggaatttgttcaacaacagttagtgtctctctctcaacctggtttcccttgaaaacaagtgtctcgattttgagtggttctgaaaggaaagtgataaggaatacatgtggttacacaaaaactgcaaagatgagggaggacctagcgccagagaaagttggattggggtatagaggttaagcatgatgggggtgacataaagcaaaatctaataggttcagagacttgcctggcaaaattacatcagatggttcag

SEQ ID NO: 42387 - DNA, 448 bp, Setaria italica
  Peptide Sequence Number=SeqID_108361
ttggattcagaatttaatgtcaaagggcgctgggaaaagccaggtcacagccccttgtttggctatgacttctggtaccagcctcgccacaagacgatgatcagttcaacatggggagcccctgcagccttcaggacaggtttcgatcttcaacatgtccaggatggtctctatggaaggcatctgcatgtgtatgactggcctggtggtgagctcaaacagacgcttgatctaggtgacacgggacttctcccccttgaggtaatataatgtttaaactgcagtaactaccaccagagtggttttgtatcagtctatgtttattactttcgaactgcctttgtttttcattaaatgctaccagaatagtcggtgcttgtagtattctttcaggggctgttgtaacgaactcagttgctacctgcagctggaggttgacaggcctcag

SEQ ID NO: 42388 - DNA, 391 bp, Setaria italica
  Peptide Sequence Number=SeqID_108362
tgcgacagaccccagggcgccgtccttgcataaggtggtccaggccgaggacattgctgagaagacggggcttggatttcctcacacatctcattgccttgcatctggagacataatgatttcttgcctgggagacaaggaggggaatgctgctgggaatggcttcctcctgttggattcagaatttaatgtcaaagggcggtaggttcttttcacaatataggcaaattaatgtggaaaaataacatgtaactagagctaaactacagataataaccttattatattgaaccagatcatgctgatatacaatttaccatgtcagcagtaatatatgatcacacacggtccatatgcatgtcattattgttacttgacatgtgaaaagcag

SEQ ID NO: 42389 - DNA, 916 bp, Setaria italica
  Peptide Sequence Number=SeqID_108363
taaaggtttaaacccttaaagaaaaaacaaaaagtaagtaactaacgaaattttaagaagtaggttactaggacaaaattaacatcagatggttcagacagcttttcttcaccagttatcccatctgaacgaacaggagtatatccaaacaatagatggcagctgtaatctgcatctgtcacttcatatgtgactgaattggcaccatctatacgagtcctggttccatcactagattccctgtaccacctatacaagcttgatccctcgtatccaccataatagatgcccagtccacaatacacatctgaacttttctgctccaagtgaacatccaaaacagatggaaaagctgccatgactgggtcatcagtaatagccatcaccggatcgccagtctttccatcacatcgtgtaggaacccaataaagaacaaggtaggaaccaacatcatccaatgaaagcttgtattttaaggtttctccaacaacttctgaagatgcagcaacaagatcaaattccaaattatcaggtctctctttgcttcgaaaccatttatatttcccagtgccttccttaccaccaaagtaagttttgatgggagaaatttcattgtcctcaaaacactcaggtagaataagattgacacccttgggctccccaggtaagattgtatctgaaataacactcctgggtgacccctgtaatccgtcttctcgtacaggtgtatgtataagttcgatccggcaatcgacatcagctagatcgagatctagacagtcgccggcagtcaacttttccttgcgaccatcgtcatgtaatctgaaccattcgtggatgcaacttcccctcaaacctccagtatactcagcatggaaggtcaaacggccaccttcgaccatagagccagctagtt

SEQ ID NO: 42390 - DNA, 481 bp, Setaria italica
  Peptide Sequence Number=SeqID_108364
tggaaagataataaataccatatagcattgttgttgaaataacacaaattgggcagtactaggcttgaatattgttgcttttgaaagaatttgtcactctactgtgggatttatcagcacttggatttgaagggaaaatagcctactaagaaacgctcattctcagcaacagacaacagcagggcaagtagctcactatgattggctctaaaataccaggaaataaaccattataatttaaatcagtgtcacctcaaatttgactgaaccatcatccagcttctgtttcacttccttgtaaatttcaggctcaactgcaatcggctctgttgaaactgaaataggttgtccctcaactccatcctctctcacaggtgtataaattgcaacaagtctataccctacatcgtcaacattagcttcatacattcttccaatttcgccaggtatagagataagatcatttcttccaaccatcgat

SEQ ID NO: 42391 - DNA, 433 bp, Setaria italica
  Peptide Sequence Number=SeqID_108365
gtgggcttagatccccaatgaccagggagctaaattaaataggattttttctccatggcctgtactagtgatatatgttttcatagtttaagactatgcctaaaagtttttgaatttaattcatgtgccttgctccatggcggaaacagacaataccaattctgaaacagtttcggttagtggcagaagttcacatggtttctgccttgggaatttccgaagaccacagaaatcatgtgagaatgaagagagctgtggatcttgcaattgttggaggggttttgttcttatgacttatgtatgattgtgcaggtactggaattaacaagccggattaccttgcgacggtggatttggaccccgcctctcctacatactctcaagtgatccacaggttaccaaacaaaggaactaacccaaagtaagaaaccaa

SEQ ID NO: 42392 - DNA, 765 bp, Setaria italica
  misc_feature (754)..(765): n is a, c, g, or t
  Peptide Sequence Number=SeqID_108366
gctatcgatgtaaaaccactgaaagtccgcaactggattctgccagaaatgccaggattgataactgattttgttatctctcttgatgaccgctatctctatttggtcaattggcttcatggggatatcaggcagtacaacattgaggaccctgcaaagcctgtcttggctggacaagtatgggttggtggtcttcttcaaaagggcagcgatgttgtctatcttactgatgatggccaagaagaacagtacaatgtgccccaggtcaaggagcatcgacttagaggcggaccacagatgattcagctgagcttggatggcaagaggatttacgtaaccaattcacttttcagccgatgggatgaacagttctatggtgatgatcttgtcaagaagggctcccacatgctgcagatcgatgtcgacactgagaaaggagggctggctatcaaccccaacttctttgtagattttagcaaagagcctgatggtcctgccttggcccatgagatgagatatcctggtggggactgcacctctgatatatggatctaaggtcaaggattggcataatagtctgctggaggtcgttgttgtatgcactgtatttgatatggtatccatgcagtgtttcatcttgtattgtgactactccaatggactaactaataagccatggtttcatgagaacttgagcttaataaaagatctttcaattctgaaataacaaaaaaaaaaaaaaactaaagagacnnnnnnnnnnnn

SEQ ID NO: 42393 - DNA, 2359 bp, Setaria italica
  Peptide Sequence Number=SeqID_108367
tatacaaatttgaggtgcctgcccacgtcctcgttagtaagtgtatactccatgctgtctgacagcacaagaagaaattcaccattttccttctctctaaaccaccggattttgcttagtccctctcggccaccaaagtattttccctttcctatgataacattatcttcaacaatatctcccagaacatgtacatcgctgactgatggtgttgcagcctttacaaaatctgtcattgtacattgcggctcccccttgacacctgcatctgtagcaggggtgtacataaagaccaaacttgaattgatatcattgactgtcagctgatattccatcccctccgctccatcgattacttcagcattgccattccaccttcgccttaaccaacttgcaacaccttttcctggtgttccaccacaccaagcaatttcaggaactccacttagtatgtttccttccactagttcaccactgactgtcaaattgatgacctttggacatccagtacctggagaaacaggtaaagatacagcaaagatgggcggaaattcagcaccattcagtatcggagtgcattcaactttcaaacatcttccaacatcctcgtgcttcggccagtacacctcgctcaatgcttcaggaataggctgaaaatcagttggtgttttgccacccagaaaccattggtatttgaggaccagctcaccctccctaccaagatttgtgaagccaaaatgacaatggcatggatcctcttcaaatggatggtcaacataagctttattcaccatgtaatcttgagggagcttatccttccattgctcgagtaggaaggaaaatgttgaatcagcagcaagttcaggggagcaaaattcccagccatcacgaatgcagatagctgtatgagcaggatattgctttgcgacctcagcctcgttggggttcagatctcggtcattgaactttttcaaagtagggcctataagcagaatagaagcagcttccaagtgtggcatctcaagcagtggattctcctcaacacgtaaatgctccagaaaaggcagatgtggaaatcccttcagagttgatattttgtttctgctagccgctaacacttgaagtcgaggttgatgagccatacagagtgactttagcctgttttgagcaacagaaaggaactccaagttaggaagttcgggaaggctagcaagtgaagttatttgatttccagcaagataaagttgctggagaacgatgcaattcctgagaggctcgaacccagggagcttaaaatcattaaagctcaaatcaagaaccttgacccccttgagaatctcaatgccctccaaacttgataaaaggttgtccctcagatacacaaactcaagagcaggtgataatctcaactgcttcaggctacgaaccctatggcctcttgaatccagtctcacttcgtcactagccttcaaatccacctgtggcagcatcatgaaccttgagtcacggctatctgcagttgaactcttcctccgactaggcacagatgatgatgtctgagaacctgatttctttgtagcggtgcttgtaacggaacgtggtgattgcagagaagcattagaggccactctcctcgtgctgccactgctgccattggagctctctgtctttgactggaccttcttcagtgttgaagttggggatgccttgacagcaggtctcttcaccaaatctgcctttgcgctctcagtcaaggatgttttcttttccactgcgggctttgagctcacagtggaggcggacaccggcttactcttctttgctccatccaacagcgtaggactagccttcttagcaacaactgaactcccattgccctgttgcttcccaacagttcctgtgctgcttctcctctgcaccgaactggcattcactgatgaagtaggcttcatcatggaagaccggggcacggccacctccgctgaagctgcaccatcagctcgctttttaattgacgaggcagtccccaacgcaaacctgcctgtgggtgccactggccgtggcttcaccggtttaccatccgccaccttcgaggcctctgatggagcttccattcccctccaacaacaatggaaacctcaacagatccacccaaatgcgtcctagtcaagcccggaatctctcaatgataggagcataagtgacctgactctccggaatccgttggcggcggatcccagctcccgccggctatcccgcctccgcctccgcctcctccgcagggagcagcaatgcaggcggccaccgagagagcgcgggcagcgtgagggaggagcagcagtccagaagagtggggagc

SEQ ID NO: 42394 - DNA, 3513 bp, Setaria italica
  misc_feature (1)..(78): n is a, c, g, or t
  Peptide Sequence Number=SeqID_108368
nnnnnnnnnnnnnnnnnnnnnnnnnnnnnnnnnnnnnnnnnnnnnnnnnnnnnnnnnnnnnnnnnnnnnnnnnnnnnncgcccaagtagccgacggccagttgaaaaaaaaagcaaaactgcctcatcaacatgcttaatctgagaatggcagttgacaaacacagcccccaagcaacaccactctatctcactctgacactcctatttacatttctatgacgagtcagaggaacaaccagctgatgctgctcctgatttgagaaatcaattagaaaaagacctgtaaagcaacacgcattgccatcccacgcccatacacacaagctgccacgctacgaatcctactaaattacacgcacactaaccagcaattgcactgtcaggtggagcaggtaggtatgaggtatccctattcctcatgcctcgatcttgagaagggtattgagggaggtgctgttgaacttctgggcaaggcctctgatcgtgaggatgacgacgtctcgcatgtgccgcgtctgcaccatcaagtcgacttcgttgtcactgtcgacgacaatcttgaagcggtgctgatcgttgcgatacagctcaacatggaagggtggagcatatgttcctcgtacttcggtagatggaaatgatgtcttggatccaggctttactacttttatcctctttcgattcacttccaaaactctccgttccaaatgtcccattacttgtgcctttttgggtgttcgatccttgtcacatagaacctcaaatttgactgaaccatcatccagcttctgtttcacttccttgtaaatttcaggctcaactgcaatcggctctgttgaaactgaaataggttgtccctcaactccatcctctctcacaggtgtataaattgcaacaagtctataccctacatcgtcaacattagcttcatacattcttccaatttcgccaggtatagagataagatcagggcttccaaccatcgatctgagccactgtattttactcttgccttctttgcctccgctataggtaccccgaacagcatataggttagtgtgaaaacctcttccttcaatctccagtttttcaattttaggccttcctggcgcaatagtagtagtcacagcagataccagctcactggatcgtccaaatacatcagtggcaaagcattcacatttcaggcagcgaccaatatcctcaaagcgtactttgtatgagcgagagcactgggttgccaatggttcaaaagactgatcctctcctgatccactagagacaaaccactgatatttcatctccttcttatagttattccatatatgttgttggatctcattgcttggaatttgttcaacaacagttagtgtctctctctcaacctggtttcccttgaaaacaagtgtctcgattttgagtggttctggcaaaattacatcagatggttcagacagcttttcttcaccagttatcccatctgaacgaacaggagtatatccaaacaatagatggcagctgtaatctgcatctgtcacttcatatgtgactgaattggcaccatctatacgagtcctggttccatcactagattccctgtaccacctatacaagcttgatccctcgtatccaccataatagatgcccagtccacaatacacatctgaacttttctgctccaagtgaacatccaaaacagatggaaaagctgccatgactgggtcatcagtaatagccatcaccggatcgccagtctttccatcacatcgtgtaggaacccaataaagaacaaggtaggaaccaacatcatccaatgaaagcttgtattttaaggtttctccaacaacttctgaagatgcagcaacaagatcaaattccaaattatcaggtctctctttgcttcgaaaccatttatatttcccagtgccttccttaccaccaaagtttactttggtggtaaggaaggcactgggaaatataaatggtctctctttgcttcgaaaccattcaggtagaataagattgacacccttgggctccccaggtaagattgtatctgaaataacactcctgggtgacccctgtaatccgtcttctcgtacaggtgtatgtataagttcgatccggcaatcgacatcagctagatcgagatctagacagtcgccggcagtcaacttttccttgcgaccatcgtcatgtaatctgaaccattcgtggatgcaacttcccctcaaacctccagtatactcagcatggaaggtcaaacggccaccttcgaccatagagccagctagttcaagagatcggcatgttggtggccctggtataataggaccaatcacttctgtcgacaccaaagaaccctgaactccatcatttctaacaggcttgcacaagacagatatgtagaagccaatgtcatcgcatttcaaggtatacgatgaacttgttgcaccttcaatttctttctcagttccatcagaacttgccaatatccagcggaacattgtgtccccttcttctcctccccaatatcttttgctggcaaccatagttgttccttcaatggcctcaccagttacttcaagagaaagtaatgttggcattcctggagtaactctatcctttcctatgaatactcttgcctcgccaacgataccatcatccctgataggtgtgcacttgaaagaaacaaactttccaatagcttcctttgaaacacggtattgtagcaaaccagatgcctccgacgctggagtgccttcatcatcttcagtctcatgaagatgccaactatataaactatttccttcatgccccccaatgtacccgtatgatgctgttaatatctgaccctcagagaattcaccagtcactgttaagaagttcaggctgggtggcaatgtttccacaacgccatctgatatagcatacgctggttcaccgatttcaccgtcaggtgccacaggtgtaaactttgcgacaatataatatccaacagcactgagaggaatgcggaatgttttagaaacttttgatgtactaagggcttcaagctcatgttcattcttaaattcggaggacgatgccttgtaccattgaaccctactggacccttcagttccacctgtgacagtagcactagcagatatcttgcttccttcccttgcttccccaataatcattaaattgaagacttttggaggggctttcttaactacatctgttagtgcgcaagcagattcaccttcctcgccttcaaggttgacgggggtatatacaaatttgaggtgcctgcccacgtcctcgttagtaagtgtatactccatgctgtctgacagcacaagaagaaattcaccatttccttctctctaaaccaccggattttgcttagtcccaactcgtctcgtcttcgttcccctttcctcctccctccgcctcccttcttctcctcaccgcgtcaaaccccagcaccaagcaaccgcccgccgcccctccccttccctcccga

SEQ ID NO: 42395 - DNA, 591 bp, Setaria italica
  Peptide Sequence Number=SeqID_108369
agtacaggctgcccctcaggtttggtttcattctggtatttgcttcttaatgttcgtcatagtttctcattgactggtgagaataaaggaagtaaggagctagcttccttctgtccttctttgttatgaatctgtgaatactatgttctgaaccatgcaatgatgcatatatttagttatgtctcttaagtgaatgattgtctagcacagagcagtaggcacatattcctttggccatcttgcaaattgatggacataacagcttgtgccctgttagcatcctattacaaaaggagtctgtagtttcataaacaagccatccagttatattcaaacctcaattattcggacttcatagcatcatctttcttcgctctatggttgctgcagaaaaatcattggaagaatgatataagtagtaccccctctggttacagataactgttgtttaggacagcggcaagcttactaggaccattgatgaatagcattaaatgtatgcaaacacagtatagttatacttttctgaaactatttttgaagacaaatcaagtcatactattttcaaaagttcatttgaattatttaaag

SEQ ID NO: 42396 - DNA, 417 bp, Setaria italica
  Peptide Sequence Number=SeqID_108370
aaccaccttaggaggcttcttgttggtatgagcaaccgatccattcttgttgtcgaagatattgactgcaccattgaatttgaattcagaatacatcaagtgcacaaatctcatctcttcttgattccatgacttcctcacatgtactgatgagaatttggatattctgagcaggtaacgctgtctggcctgctcaactttgttgatgggctgtggtcaacaactggggaagaaaggatcattgtcttcacaaccaattacaaggagcggcttgacccagcattgctgcggcctggaaggatggacatgcacatccacatggggtactgcacccaagaatcttccgaatccttaccaacaactaccactccatcaactaccatgacacatatccagagattgagaaactgatcaagg

SEQ ID NO: 42397 - DNA, 280 bp, Setaria italica
  Peptide Sequence Number=SeqID_108371
aggggatcttttccctagtgctgcaccaggaacctgaggcttgtccatttccgaaactccccattgtttcctcgaaggagttttggcaacatcttgtggactatcatcacctaatctagggtcaacactgtccctcaaaaccaagagacattccactactgaagacattgatccctcatcaagttctttcacactgaaacctggcaaccccatatcagcaaccactgagaggaacttcttcacattgcctgacctctgatccagtgatgcataacctccc

SEQ ID NO: 42398 - DNA, 875 bp, Setaria italica
  Peptide Sequence Number=SeqID_108372
atcccacaactgtgattttagcttggaagcagcctcaacttcttcaattttcttatttgattgtagtaaaagatactcaacttctttaactttggtggttaactgttcctccatttgctttgcctttctttcgattttctcaagctgttcctcatgcatcctattcatggcttccatatctttcttcaggctttgtataatattttcagaatgttctttctctttcactaatcggtgaacatcttgctcactgagttttcttctctcttcaatttttgacttttcatccttgagtatctgaagtctgtttgttgccatctgattttcttcatttgttccctttaccaacatttcaagtgctttaatttttgaacagtatttctcttctcttgtcttgatgataatattttgacttcttatatgctctgcttgaatacagagacggcgctcaatctcttgaacgaccttcctcagtaagtaaactacacgatgtggtatttctccctttttcctttctatgctttcatccaaaaattccattaacaacactaatgagtgactgtgtcggtgcattatctaagctactagagtgcatcatctctgaaatcttggaagcaggaagatcagaataggatccgcgttttaattggaaaacttcacgaaactttttgtccagaaaaagacagaagttttctgatgggccttgggttctggaacaccatttctcctgtcctctccaggggatcttttccctagtgctgcaccaggaacctgaggcttgtccatttccgaaactccccattgtttcctcgaaggagtttttggtcaactattctttgttggtacttattctatttcttacctttaatttcttt

SEQ ID NO: 42399 - DNA, 570 bp, Setaria italica
  Peptide Sequence Number=SeqID_108373
atcatacagaagttctgggcaaagcttctgggtattggtcctgctttgcgacttattgcttcaatgagcaggtctcttcctctcttgaaattgaagcatcactctatcattctattttgatggatagttttctgtctgcctcttcaacgtttgacgtatacttattgcttcaatgagcagagctgattgggctgcaaatttgaagcattggaaggatgaatttgtttctacactgcagcattattggctgggcactaagctactctgggcagatgttagaatatcatcaagactgttagtgaaacttgctagtggaaaaagccttacaaggcgagagaggcaacagctcacacgtacaacagcagatctgttcaggctagtaccttttgctgtgtttattattgttccgttcatggaactcttgctgccagtgttcctcaagttgttcccaaacatgctgccatccactttccaggacaagatgaaagaagaggaggcactaaaaaggaaactgaaagcaaggatggaatgtgcaaaatttttacaagacactgctaaagaaatggcaaa

SEQ ID NO: 42400 - DNA, 502 bp, Setaria italica
  Peptide Sequence Number=SeqID_108374
taacttaaaaacgttaaccctaaaaattacctaattacgtaccagaactccatagtttgcttaagcgtcataagctcaactccaacggggtacacttccatctaaatgaactttgtgagtaataatttgggaacaatttttcatgtgagactagatcaagataaatattcctagattccagaatcatcacccaacttttagatgcccgaagacggttcttcctctaatgtaaaagaaaatgacacttgttccatcagtttgtcaagtggctaaaaatttggatgaacacactgcaaatcgacaaggtaggcagcaagaatagtggaatgcccatcaatataggcttgataattcatcctcagaaagaacaatcgtcctgccttcttctggtgaatccatcagcaagattacctaccaggctaccaatattgaacagaggcgtgctaatgttctgttacatgatggtgattgatgactgttagcttagatcagtagatcacct

SEQ ID NO: 42401 - DNA, 337 bp, Setaria italica
  Peptide Sequence Number=SeqID_108375
agacgctgaggaagatggttcactggatggagaggagtttcaaggggagggaatggatgaggatgctgatgtcgagtgcttcgggatggagattgtggatgatgacgggcctgctgttgatgaggatgatgaaggtgatagtgatggctgacataggctgatgattcttgccttctgaatttctgttttgagattgtggcttcagttatgaattccagtgactgggtttgattcaacttagtggctccaaatgagaggttctgcaaagctattgtagactactgtgagtatcatgctctgtcaaagttttgatgtgtactacatttagctgcttaag

SEQ ID NO: 42402 - DNA, 680 bp, Setaria italica
  Peptide Sequence Number=SeqID_108376
gcttattgagggaacggtaaaatagtaagaaaggcattcttatccaattagaatgatctgctgcactgtcccctagcttgttcagcaatagagaggcgcatgaaggtgtggtatcacccatatgttcttctgaatcctctgaggatgctgtagattccagcatggttaacttgctaggaacaggatcatctttaccggtccattttgcttcaagtgcattagtcacatccaatacactaggaaactggccttctgaaagggtgcgccgagcaacaagatctggctccaagggtagccagtcaccacttacactgacactactgtacagaggagttttaatgtctctttggagtgaatccaggtcacttgtactcatttgctggtcatgactggaatttgtactagtacttgcatcaagtccagtgcgattccctccaaaaatgctttcctgaagacactcaacatatttagaatctttgctggtatacttattcccactaacttcactttgaggctttgttagcgcatttagctcagcaacactatctgcagaatggatcttctccttgtctccttgcttgaaattaaataactcgtgagaacatctatctgatcttgcagcaaacaccaaccttttatccccacaagtatgaatggaagagtaactgtcttcgcagccg

SEQ ID NO: 42403 - DNA, 660 bp, Setaria italica
  misc_feature (69)..(69): n is a, c, g, or t
  misc_feature (544)..(544): n is a, c, g, or t
  Peptide Sequence Number=SeqID_108377
acagttctatggtttatttgaggatatcttttggttcaatctgtgtttgttatcgtccataggacaggntacatgctatcatttaaggttatttaggtgacaattaacatgaggattcatttgaactggaagtgaaactcaaacagagcatatggtaactgaatgtccgcagcttggttgaaactgatagaagaaaatcgattcacttgtgataattggagtagtgacctaattggtagctagcaaatcctgatggaagaggagtataccatggtgattattactcataattggtttctttactggttaagtgttcctatgggatctggaaattataaaatctgatagtttagctgagatgattgtgcttattggagaataccaaagactgtgcctgattgccacaatctatacaagaattcattcacatatcacagtcttcagcgcgacaggcctttggattttgatgacgcaaaccggtttctagaacaatgtgaaagagataaatcacgcgttcttgttcattgcatgactggaaaaaacnggtcagcagctattgttgcagccttcttgatgaagtctagaggatggagacttgctcagtctttccagtgggtgaaagaccggcggccgcaggttcaactgacagatgcttctcag

SEQ ID NO: 42404 - DNA, 885 bp, Setaria italica
  Peptide Sequence Number=SeqID_108378
ctggaagtgaaactcaaacagagcatatggtaactgaatgtccgcagcttggttgaaactgatagaagaaaatcgattcacttgtgataattggagtagtgacctaattggtagctagcaaatcctgatggaagaggagtataccatggtgattattactcataattggtttctttactggttaagtgttcctatgggatctggaaattataaaatctgatagtttagctgagatgattgtgcttattggagaataccaaaggtatggtttctggaatgttcttaaatagttttcgttacacagagataggtaccaatccttcgtaccataaaagttgtttaagcacgttgtgatagctatgtcaattcaacatctaataatcttcatggtagatatatgtgtgtagcctgtttgggttcagtattagttatgttgctgtcatatagatcatgttcacatcaatggctttttcaggctaatttctcaatatcgttttcttttgaatctatagactgacatatacttgacagccaacttttagtgtactcctgctattgactgttaaaataactttttcccttgactgtttagtgcatccttcagtgtgatagttgaagattaattgctatgtttattgcttaacagactgtgcctgattgccacaatctatacaagaattcattcacatatcacagtcttcagcgcgacaggcctttggattttgatgacgcaaaccggtttctagaacaatgtgaaagagataaatcacgcgttcttgttcattgcatgactggaaaaacaggtcagcagctattgttgcagccttcttgatgaagtctagaggatggagacttgctcagtcttccagtgggtgaaagaaccgg

SEQ ID NO: 42405 - DNA, 1346 bp, Setaria italica
  Peptide Sequence Number=SeqID_108379
tgtcacaagtgtatgagcagaacaatggcgagctggcggaaatcatacaaggataaacccagagctcaatctaggctctcctgccgctagactgttaaaatcaatttttgcccttgactgtttcatgcacccttcagtgcgatagttgaagattaatcactatgtttattgcttaacagactgtgcctgattgccacaatctatacaagaattctatcacgtgtcacagtattcagtgtgacaggcctttggatttttgatgacacaaaccggtttctaggtactgttcattttgctctctctgcacttttggtgtggcattaagcacacactgagccatggactactacatttttctccacataaagctgcccctgcgaaaaatatgctgctacctgatgctgaacttgagtaggtatcctctgcctgtcatactaacatattccatttcttctctaccattgtagtaataggttcattatataattgtttgaacttgatttttgagcgcatgcttccattcaacatggttcatgtctctgttaagatgaataaacatttgtatgtgtactgtctttctccaggttattttctgtttgtatgttgcacaacagccttttccctagtgcttctttctgaaatttttacaaatgtaaaagtgaagggattctattttacttctcgtgtacttgagctacaagacctctttattgccgtttgtcacgaataggaaattttcatttccttctctgcaatttcaggaaaatgtgaaagagataaatcacgcattccttttcattgcatgactggaaacagcaggtcacagatgttgttgcagccttcttgatgaagtctagaggatggggacttgctcagtctttccagtgggtgaaagaccagcggccccaggttcatctgacagatgcttttgagcacgatcttctggcgtacgagcagaagctctttggaccatgctggcctagattcaggtttccgccaccacatccagtagtgctgagcctctacaccacatacaggccttggaggctcgggacggggaggagcagggtctggtgctcaagttggttgagttggactcagtcagcatctcgtgcgactcgtacaggctcatgttcgctctgctcaggcggagatcctggtcgtgcaccatgatgggccgtctgtccgatctcgcgaggatgacgttcgggctgccccggttcgagctctcgcggatccagcgcgacttcctgccccggctacgcgatgactgtgacgacgtcgaagcactgctgctgttgatgaatgctagtcgtaggtttcgccaccgtggcggaggccgctga

SEQ ID NO: 42406 - DNA, 520 bp, Setaria italica
  Peptide Sequence Number=SeqID_108380
gggggacgagatgaggaagcgggatcgggagaacacgtgcggggtctgcggaccccaccacaagtacgacgaggagggggaggtctgcggggtgtgcggccaccggtggaagccgtcggagggggagggcaccccggcgaggcgagtccgccttccccaccgaggtgctcaaggacttcctcttcctcaagagctacgacaacgactcccgctccgaggtcatctggacgctcagcatctcccacatcctcagcgtacgtactgcgcaccccgcccttttctggatggcccccgtttgattcctcgtttgcgatttttgatcctgcgtggtaaagttggagaatgattacccatccgtttgattcctcgtttgcaatttttgatcctgcgtggtaaagttggagaatggttccccgtcaaaatggaaataaagaagttggagagtaacggtgttggcgccatcttgcggagggggttttttttttgtggtaattcatggtttatgaggatatctttggtg

SEQ ID NO: 42407 - DNA, 1274 bp, Setaria italica
  Peptide Sequence Number=SeqID_108381
tacaacgactcccgctccgaggtcatctggacgctcagcatctcccacatcctcagcactgtgcctgattgccacaatctatacaagaattctatcacgtgtcacagtattcagtgtgacaggcctttggattttgatgacacaaaccggtttctaggtactgttcattttgctctctctgcacttttggtgtggcattaagcacacactgagccatggactactacatttttctccacataaagctgcccctgcgaaaaatatgctgctacctgatgctgaacttgagaaaatgtgaaagagataaatcacgcattcctgttcattgcatgactggaaacagcaggtcagcagctattgttgcagccttcttgatgaagtctagaggatggagacttgctcagtctttccagtgggtgaaagaccggcggccgcaggttcaactgacagatgcttctcagaatgagcttctggagtacgagcagaagctttttggacccagttctcaacctgtgattcccactgaatcatttgcttctcttggattggctaccaaaaccgcaggtgacacccaagcacctacgttcaaccaaatgaccgggacggggaggagcagggtctggtgctcaagttggttgagttggactcagtcagcatctcgtgcgactcgtacaggctcatgttcgctctgctcaggcggagatcctggtcgtgcaccatgatgggccgtctgtccgatctcgcgaggatgacgttcgggctgccccggttcgagctctcgcggatccagcgcgacttcctgccccggctacgcgatgactgtgacgacgtcgaagcactgctgctgttgatgaatgcagcgaggaccattcgccacctggcggaggccgctgacatcggcaaggtcgtgcaagatggtgctgaagtgcttggcgcaagcatcattgatgccgccaggcgtgttgaagatggagccgcggatagtgcttggcttcaagctcgtatgccatccctcctcgacgacgtcaacgatctggcacagtgccctgttcgattcacttgactgggggtggatctgatgtctacatctcttacgtatacagaggcatagttgtgctagaaggttacttagatgttaggaccagagcatttgcgatgaccattaatggcaatggtggagctagaaacttcgtttttttttctttattaggacaggccgacagtgcaaactttcttcaaaatttggtataatttaaaattctccgccactgatt

SEQ ID NO: 42408 - DNA, 798 bp, Setaria italica
  Peptide Sequence Number=SeqID_108382
cacgaaaaatctgggaataacctcgaatcgccttccctgctctgcttgatcaagcagcgccgcggcggcggggggaagcggaaggaaggggacgggatgaggaagcgggagcgggagaacccgtgcgggatctgcgggcactaccacaagtacgaggagggggaggtctgcggggtgtgcggccaccggtggaagccgtcggacggggagggcaccccggcgaagcacgagtccgccttccccaccgaggtgctcaaggacttcctcttcctcgggagctacgacaacgcctcccgctccgaggtcctcaagacgctcaacgtctcccacatcctcaacagtgcatccttcagtgtgatagttgaagattaattgctatgtttattgcttaacagactgtgcctgattgccacaatctatacaagaattcattcacatatcacagtcttcagcgcgacaggcctttggattttgatgacgcaaaccggtttctagaacaatgtgaaagagataaatcacgcgttcttgttcattgcatgactggaaaaacaggtcagcagctattgttgcagccttcttgatgaagtctagaggatggagacttgctcagtctttccagtgggtgaaagaccggcggccgcaggttcaactgacagatgcttctcagaatgagcttctggagtacgagcagaagctttttggacccagttctcaacctgtgattcccactgaatcatttgcttctcttggatttggctacccaaaaccagcaggtgacagtactagtaggtgcttggg

SEQ ID NO: 42409 - DNA, 780 bp, Setaria italica
  Peptide Sequence Number=SeqID_108383
aatcaaccagcccagcccaggcacacacgcgatccctcccactgcgatctcccgcggggatcgagcagcgcggcggcggcggcggtggcgggtaaaggaaggggacgagatgaggaagcgggatcgggagaacacgtgcggggtctgcggaccccaccacaagtacgacgaggagggggaggtctgcggggtgtgcggccaccggtggaagccgtcggagggggaggcaccccggcgaggcgagtccgccttccccacgaggtgctcaaggacttcctcttcctcaagagctacgacaacgcctcccgctccgaggtcctcaagacgctcaacgtctcccacatcctcaacgtacgtaatgcatcccccgcccttttctggatggcccccgttcgattcctcgtttgcgattttcgatcccgcgtggtaacgttggaaaatgattccctgtcaaaataaaattaagaagctgaggagggatggcgttggccgcgatctagggttttgtactttgtgacagttcatggtttattgaggatatctttggtcaatctgtggtttgttatcgtccataggacaggctacatgctatcaatttaaggttatttaggtaggtgtatatgaaacaaacggctaatgtttttgtttagtttagttgtggtacagtacctattttctcataaggaaactgtggtgaagtgcaggtgacaattaacatgaggattcatttgaactggaagtgaaactcaaacagagcatatggtaactgaatgtccgcag

SEQ ID NO: 42410 - DNA, 585 bp, Setaria italica
  Peptide Sequence Number=SeqID_108384
caacagtgaaacaactgaaattctgtgaaacggtcaataagtcagcaggccttgcagctctctgatctgctttacatgaattgaaactaccttaggagacaatatcctctcaaaatccaaatccaaactgggatctccaaactggatggatccctacaccttctatgcagtaaacaatccactccagtatgaacatgtcaaccatgaattgaggtaaattgaagctactggagggagacgaaatcctctcgaaaccaaaatccaacctggaaccacacaccctggtcgagatacacgaaactcaatcatgcaaaaaaaacatacgcagaaacaatccgcttcaggatgaacatgtcaaccatgaattgagataggcatacatccaggcccggcaagcataaaatttgaagaaacataagagctgtcattaggcccaaccatcaacgtcaactgttacatgacgaatcgcgtgagaaaaaacttgcgagatttcccaaacctaatttggtcaaaacaaattcacactggacatgatcccctcctaaccacccaggcaaacaaacgtaagcgagcttgaaagcgaac

SEQ ID NO: 42411 - DNA, 430 bp, Setaria italica
  Peptide Sequence Number=SeqID_108385
gcagaaatttcaaagaacgagaaccacgctgcattaaatagtaggccccatatcaatagaatcttggaaagtatcaacaaaaacggacagctttattcatgtctgaactctaaactgcaactggtgaactagaagatgagaacaataaataatctcgtagaagacaaattaatactaaacacgacctaatttagcaccaatttcaattagaacccatagaagaatgaaaagtgagacaagaatcggtcatccgaagaaaggaaaaggtgcatgacaattcctaaaaactgggggaagctacgagttccatgaggatgcggatgagcagtcgagcagaggaggggaaacgaagcttgaagtactagtcctataaacagcaggtagtttgataagaggcggtatcgagtaggtaggtaccctgcgtggatga

SEQ ID NO: 42412 - DNA, 344 bp, Setaria italica
  Peptide Sequence Number=SeqID_108386
cccgtgtggcgatgcctgggtcagtcttctctctttctttcctcaatccacaaaagatgcgagctcgagcttcaaatccggggtggatctaaggtgcgggagggcggattcgaggtgagggtggctggacctcgcggcgccattgtgaaatcgggagggaaggaggcgggagagggtggcaagctggcgaggatggctcctcgggggagggaattcgtgcgcacgcgggagggaaaactgcattaccggtagagtaagggcttcgctctccaccagtgggagaaggggctggaggggggaaaagcaggagcctccctaaagtaagtaggggtctgagaagtgtg

SEQ ID NO: 42413 - DNA, 392 bp, Setaria italica
  Peptide Sequence Number=SeqID_108387
tagtagtgtggtagtgttgctgcatatcctggacagtgatggagcatcctaaattggcttcatccgacagtgtcactagatgattcggtgtcaccttgcttgccacgtgccgtacacttttggatctatctggattttttttctttagtcagaaatgttaatgttatcttgggttctccactataaagtatcttttgtccatttacccactgacagatcgggctttcagaattttttgcctttattcttgatggccttgctctgcattttaacactcatgatgtatgtcttatgatatgttgttgagagtagtctgtcaacagtatctatttcccggtctcagtacatgagacgagactgaaaaatgctcttcagtaagaacaatagattag

SEQ ID NO: 42414 - DNA, 2044 bp, Setaria italica
  Peptide Sequence Number=SeqID_108388
ttgcagattcgtgttgtccaactttctaaactagtaaatttgtacttaaacttaaactaaattaatagagattgcaacatttaccacagctttattactgacaagtctagcgaacaatagctgggattgcataacaaccaaattgagtttcgaagcaaagcattcgtgccagggctgtgacgacacgactccaaaacaccttgtctcgctgcgccatcatcgatacacacaggccgtgaaacaatcgctagcccgaactgaagcaccgtctaatctggcacatctattcctgctgtccttagaaacacgtattcgctgtgcctagtttgtttgcctcacctcgtactggtggcaaatcctcaacggcgtgtccttagaaacaggcctttcctccgaccaaagctccatgttcacatcaccagttccccagtgcaccatgcatttgctaacctcacttgggtcaaaccgattcaccaagctcagcccgacacacttgtccactagcatccattccccattgggcctgaggtctccctcgaatgttatttctcctgactctggggagatctcttgctttgaaccattgatggccgtgaaagcaactaccacctcagttgggtgcagcagggtgaatgtaggatgaactcgtaaacagaccaaccttgaaaatccaccagaacctgctcctacacttcttgcctgaatgctagactcaatctgaacaatctttgggttgtctttcaaaatagatatctggcgttggagaaccagaccaccacctatgtctccttccatacaaatagattcctcctctccagattgctcaagatacctcctgatgacattatactcttctgtgcagccagcagacctatattcagtcccactgtattcttcataaccattgatctcaatcctgctatgaagccactgggaatcagaaggaagatgggtcatcgagataattcgaccgccaatcccaggaacaaccttaagcaaccagtctccactctttaaatcaacaggtatttttgatagttcagcaccttcctgtcgtgatggctcatcgatatcaggtataggctgaatcatctccaaacgtttcttgcactcaagttcactagttgcaactaagctggacacttcagattcaggaggcattgtaaggtgtatttctccaccatcaacaccatctgcacttatcatagcacctccaccaagcaatatatttatttttaaatttcgttttggtctcttccatgacccttcagatttgaagactttgacagtaacaactgatgagtggagttcagcagtgtaatacgtcaaaagatagtctccctgtgtgaatttatacccatctccagcatcttcaaacaggacaccttcagctttaccattttcatccaatgcaataattagtgacaaatcatcctccaaacttgcttcaccaacatgcttaataggaggacctacaggaagaattgctccacctcgtaaatacagcaccggcaaatcagggtgtgaatccgcaaaatcaaaaggcaaccatatgccctttggtaacgtatgtgcacattcatgagctcctttattaggcaaagtgcttgcacagactaaaagtggtccaaggagaaaggaagtctcaacttttctcagttcagggtcttgagggtcagcaaagaaaactggagtagcaaccggaataccctttgtatgagaatggtaaaaaagagtgtagatatgtggcagtagccggtaccgtcttagtaaggcaaggcgacaaacttcctcgcactcttcaccgaaggaccatggctcatggtcgatacttccagtttccgtgtggccacgtgaaaatggaaacaatgcacccacacccatccatcttccaaaaagttttggagtagcattcccagcaaaaccaccaatgtcaggacctgacaattggtttgtaccacttagaataggaccgtagaaaagacaaaactaaacccaaacctaacaaagttaaggtaactaagtttaaacgaaagttaacaaa

SEQ ID NO: 42415 - DNA, 1357 bp, Setaria italica
  Peptide Sequence Number=SeqID_108389
gcccgcggtggtcccggcgtgcgaggccgcgccggggggcgcccagaaggtcgtgctcaagcttccatctggcacatctttctatggtactggagaagcgagtggcccacttgaacgaactgggaaacgagttttcacatggaacacagatgcatggggttttgggtcaggaaccacttcattgtaccagtcacacccttgggttttggctgtcctccccgatggaaaagcattgggtgtccttgctgataccactcggcgctgtgagattgacttgagagaagaatctactataaagttttctgcctcatctgcctaccctgtcattacttttgggccatttaaaactcctgctgatgttatgacgtctttgtcgcatgcaattggtactgtgtccatgccaccaaaatggtcacttggctatcatcagtgtcgctggagctacgattcttctgagaaagtactcaaggttattagaacatttagggagaaaggcattccttgcgatgttgtctggatggatattgactatatggatggttttaggtgcttcacgtttgatagtaagcgattccctgatccaaaagcaatggtggatgatctccactccataggttgccaagcaatctggatgcttgacccaggaatcaagaaggaggaagattactttgtttatgatagcggtacaaaaaatgatgtttggattcaaaaggcagatggcagcccatttgttggggaggtatggcctggtgattgtgttttccctgattatacgtctgaaaaaacacgtgcctggtgggctggtttggtaaaagatttcatctctaacggcgttgatggaatatggaatgatatgaacgagccggctgttttcaatactaccacgaagacaatgcctgaaagcaatattcataggggagatgctgatattggtggtgttaaaaatcattcgtattatcacaatgtctatggaatgctaatggcaagatctacttatgaaggaatggcaatgggtaatgcagctaaacggccatttgttcttacccgagctggttttataggaagccagcgctatgctgcaacatggactggtgataatctgtcaaattgggagcatctgcacatgagtctaccaatggttcttcagttgggtctcagtggtcaaccattgtcaggtcctgacattggtggttttgctgggaatgctactccaaaactttttggaagatggatgggtgtgggtgcattgtttccattttcacgtggccacacggaaactggaagtatcgaccatgagccatggtccttcggtgaagagtgcgaggaagtttgtcgccttgccttactaagacggtac

SEQ ID NO: 42416 - DNA, 243 bp, Setaria italica
  Peptide Sequence Number=SeqID_108390
aatggctgagcatggcgcggcagcggcacagccgccgcaaagtggcaagaacagtagcgagccggcggagtgcctgctgaaggagtacctgctgcttcttgccaccctggtggcgacggtgacctacgcagcggggctcaacctgccggggggctcctggctggaggacgcgccggcggaggggcagctcgccggcgactccatcctccggcagacaaactacacgcgctatatcgtcttcta

SEQ ID NO: 42417 - DNA, 513 bp, Setaria italica
  Peptide Sequence Number=SeqID_108391
ttaaacttaaactaaaactaaaagtactcaacaagaacaaaaggagagagaatcatacctcagatggctcgatctcctgctgcatgccgcatgcctgcttcttcaattccttcaaatttcgttcctaattttctctttgaaactcccaattttgtggtttctttgtttgacgccaggtgaacgcatacgcatcgattaaaatcctccaaaaagttttctagatttattttgggtgctctgtacatgatattttgtgggatacagcaaaaattatgcatttcccatgtgttgcaccctcttgaattttgatattaatagcctgaaactagtggagaacagtgttccactatacagaaatcaaaggcaactgtagtactgtatatacatgcatgtacaagattgaattttacttgcatatgcaaaatcttccaaaaataattatacaactgctaacttgtgcataactgcacacatcatgtagctagacagaggttataaataagaatcaaactt

SEQ ID NO: 42418 - DNA, 470 bp, Setaria italica
  Peptide Sequence Number=SeqID_108392
tagaacatgacaggcaggactatattccggtcgatgagggtcttaaaatttccatttgcaacactctgctcactcaatgtaatgtcttcgcttcgtgcatatccttcagctagccaccgcctgattatgacattcttcctgagaggacggtcattagggaatataccaagatatagcaaacaggtcctgacagtgaggtcagacagactggtgtaactatccataagcacatcacggagccttgcgaagttgggctcaccatcttctcgttcaagataagaacccagcttgctgcataattctgagcagaattgccctgtaggttcatcttcaccactcaactgtctggccacactgacaagagcaagtggaaggccgccacattcttcaggagtgtttctgaaccctgcatcaactcagctgtacatcttccgccaagagcaattttcatagaatctctcattccaagt

SEQ ID NO: 42419 - DNA, 561 bp, Setaria italica
  Peptide Sequence Number=SeqID_108393
gtgattcttgtgaaatcttttagttgggttgagagagtgattctgtgcgagtattagtgagttgaaaagagcaatccatagcttgacccatagcttgagcacttgtggttcgcatcaagaaaggctttgaagcatttgttactcttggaggtgtgcctcctagatggctaggagtcgccggctagctcccaaggtgtggtgagtagcggcaagtttgtgaggctgcgatcttgcttctgcaaggaaaaagatcatctagtggagacgaggaaagttgttgaaagagacccgacttgttggaagggagttgaaagaggctcgtattccaataggctcctcaacagagatgtatgattcattgcggtgaatctgaacttcgggtaaataaatcctcgtgtcttcctttcgtttgtctcacttgttgatttctagcaaattacttgtgcttctgcttcgatctacttggatgtgcttgtcttgtgtgcagggactactttaccctgccagatatcatctacaaaagccactctcaagttcagttggtgctagaagtcaaggagg

SEQ ID NO: 42420 - DNA, 315 bp, Setaria italica
  Peptide Sequence Number=SeqID_108394
gttcgtcttctagtcgatgtccgtgtcacgccgcgccagaaccccaaagcccaagagcttcctaccatcgccctccttctattctttctcaaagaaggctaaacctcggaaattggtgagcctgtgtcttggcacacttggtcagcatcttgaggatatcatcgctgatatttctgaatttgctgccttctttccaccccatataaagttggcaattctgtctattgcaaggagaagaaggctcctgaatgatgaagtttttgactgctcttgctgaaagctcctgggaaatcctagatatatctggatctgatg

SEQ ID NO: 42421 - DNA, 410 bp, Setaria italica
  Peptide Sequence Number=SeqID_108395
tttagttacttaatttaaacagatgcataacaatggcagtcaagtaaatagcactttaccaagaaaaaagcatatgagttaagcaaaacactcatcagtaacagtaatacaatttcccaatccctaaaacgtatgaaatggttgtaagaaattgcgttactccaaagttcaatgcttccctttctcagtcgagggcattgcttttcttcattgatattgcttctctctaccctttttcaatgaaggcataaacacaatcttgtgtatccagtgaacattgataggccaggggtatttttgtcccagttaacaccgtttgtgcaaaatctatcagagtgctagtttcatttcacaattgtttctttcactggtatttttacagggacaagttgttttggtggtatgttcca

SEQ ID NO: 42422 - DNA, 323 bp, Setaria italica
  Peptide Sequence Number=SeqID_108396
ccgctgctgctgcctgatgccccgccgtccatgttgtggttgttgttgtccgcactgccatcgacaacaacaacctgctgctcctgggttgttgacgacggccactgctggagcccactaccaccagcagtagccataggtggcttcacttcctgatccacaccctgcagaggccccaccatctgttggtcagatgatccacccatcatcccatgcccatgctgcatcacaccaaacgacggcaccggaagaattggcaacgatgccatcccattgctgctgctgccgtcaagaaaccctcctctctccatgaatgacgacat

SEQ ID NO: 42423 - DNA, 774 bp, Setaria italica
  misc_feature (1)..(82): n is a, c, g, or t
  Peptide Sequence Number=SeqID_108397
nnnnnnnnnnnnnnnnnnnnnnnnnnnnnnnnnnnnnnnnnnnnnnnnnnnnnnnnnnnnnnnnnnnnnnnnnnnnnnnnnngttacctgcaaacaacttgaacccttgaaggcttgaagccagcggccggttggacgcaacgcaaacccaaggccgttctcggcgacccaatccattacacggcagcaggaacatgctccgatccggcagcgcggcaagtgcaccggaactgcgacgctgcaaaccatcacccccaaagctacagcggtgatgagtcttctacacaggtacatgcagatcgacgctgccaatcggcattattctctgcggtgcctcacgccgaaactgggatcttggtgaaaattttggtgattgggaactgggatcacgccctgcacgaatcgatggccaaatgatgcgcggagcagccaatccgtccttcagggtcaggcagcgtcgtcgccgttgcggtctccgcgctcgggctcggcgacgttgtagtacaaggtggacgccccgccgtcgaacctggagaccacgtggtgcgccgtcaggccgcagtagcgcttccggaggcgctgcacgcagatgtttgagatcttcctgaacatgtggtcgtcctggatgaagggctgctccatcaactccgggagcggcatccactttgctgcttggatttccgcctcgtcgatcctgatgtcgttggacagtggtctcagcacgcagatgaagaacaggtctgacttctggaacgccacgttatgtgcatgcct

SEQ ID NO: 42424 - DNA, 548 bp, Setaria italica
  Peptide Sequence Number=SeqID_108398
ggctcgtcatcactatattggatctcaaacggcttgctagcagtgccaacagcagcttcagcagggataagtgggcgagaaacctggtcttcggtaccatgttgggctgcgggtgaagtgatctcaatatcatcttcgtgactgggactcacattcaatgcgtcatctaaaaattccttttgtcttcctcgggtcagaaccagcaccttgattctcgctctcttcggggctggattcaacaacttccgccgaagcagtaggcttagagcgagaatgcttttgagtgtgaggaaccgaagatttcttccatttactctgccttttgccacgaggggctggaagagcagcagcttcatctgtagtggcagtgcctttcttaagggcgcgttttagcgtagcttatttgtgaagtaatgtggcttcgcgtgtgccactcgaacttttgaagaactcaaagactcaattactgcaagaactgtctggcctcttctctagctcattgtactctttggcgctttctgggtccaagatgattgttggccctcttc

SEQ ID NO: 42425 - DNA, 627 bp, Setaria italica
  Peptide Sequence Number=SeqID_108399
gggggtggtcgacctttaaattttaacgggcgtgtatgtaacctagaacctgtgaggtgtgtgtagtgttggtgtgtgtggtgttgtatggctatatgagccttttatctcctttcttaatgcaatgatacgcagctctcttgcgtattccagaaaaaaagtagcaactagcaagtcaagatgtcacaatcccataattaatacaagggaactgcaacttttccaaccaataattgggtttttatgtccacctatgagctttgaaaacaaacaattacaatgatctctcaggagcatacttatgatttatgaacctatgcttatcaacacctgctaaactgcatcataacaaaattgcaacacggcatacataaagtgcaacaataatggcaggaaaaagacagtcagatggatttcaataacatatgtaattaaatattctccgaaaacaaaattgcagtatccatatttaacaagaactgatatttaaaaaaactccagagcatcttcatatatctactaccttcattggattggattggaatatttgttttccccaatgggtcgatttagagggagaaatttctgttttagaaaacaggcactaacaggcactagatgactagt

SEQ ID NO: 42426 - DNA, 454 bp, Setaria italica
  Peptide Sequence Number=SeqID_108400
atccgggcgccggcgacgtggcggccgtccatgaccgaggtgctggagctgttggaaggcggcgagatccggcaagaccggtgggcgatgcccgaggtggcggccgacgacgaggagccctggtggttagacgaccttgacgacgaggaggaggaggaagacgaggacgaggagttcaacaccccgtccccttcttcatcttcatcaactacgagcaattagcgtaggagtacatcataatctaaacaaattcaggtgcctgtgatagaagaagttttgctagccgccctacccgtggggcgggcccacatgtaaatacgaatgttatcttcggacctcagctatcagtgtaccaatacgaagagcaagtatgctgtaccagtcctagtcatccattgatcatgacaggatacacacacatcaaaaggaactgtaacttgaccgacgacaaaaa

SEQ ID NO: 42427 - DNA, 324 bp, Setaria italica
  Peptide Sequence Number=SeqID_108401
atccaagtggctttgaatcaagaaaggattcaaacaagcaatctcttgcaagtattacatcataaagaatgcctcatgtttactttagccagggaaatgggcaacaaggatgttgattcccaggtagaaagctgtgacatgatatcagatttaaacaactcgagttcatgccgctgtttactgactgcatctcatttggagaattcttgtagtggatggccttgggatgctatgaaaacatatgccaaacagttaccatcattatcttgtaatgaaaatgaatcatcctttcttcttctgtacctgttcagaaatgctattttg

SEQ ID NO: 42428 - DNA, 413 bp, Setaria italica
  Peptide Sequence Number=SeqID_108402
cacccaccagtctccctctccccacacctctccaaatctcgcgacgggagaggaggccatcaaatcacagggggcgccaggagccggagcgcgggagggtgggagaggaatggagccggcagagcgaatcgagtcggggaaggcgctggggaagcgcccgaggagcagggtgctgccccggacggccagcatggtgacggtgccgtcggcggctaagcagggccgccaggagcggcgcgctggcgtgacgtcgtccacttccctgccagctggtggcgcggggatgggagacggaggatccggcgccgcgacgagggcgttctactccggcggctacctcgccggcgtggagacgacggcggcgttcttgaaggcgtgcggcctctgcaaccgccgcctcggacccggccacg

SEQ ID NO: 42429 - DNA, 826 bp, Setaria italica
  Peptide Sequence Number=SeqID_108403
cgcagcaatgcaaaaatccttagcttaagaagtctgcaatgatcaggatccagaaacgagaagcggctctccattccaataaccatgagcagccaaggcgcctaagaagattgggccccaccttccggaggctgcaacggcttcccctccgccgtgtaaacgaccgcgcgcggcggcgcgtacatcatcggcgggaacggctgcatgtgttgtgggacgccgtagacgccgccggccgtgtggagatctccgccgggcacctcgcttcctccgccaccgacaatgtggtagaccggtcgaggcatgtagccgccctgcgcagacgggtcgaggtagtggaccggtggcggaaccgggaagtagtacacgggctgcgccatgtacggcggcggcggggctggccacggcgacgctccctccgcgacgtacggcgcctggcgcgcgggagccagcgcgtcgtcttcgtcgccgtgttggcgcggagtctccgcggcgtcggacttggtgcgggaggcggcggggccggggctgggctcgtcggacgcggtgtcgaggccgaagaggtagtcggggacctcggagatgatcgacgacgcctcggatcggccgcgctcgatggggtgcggcgcgggggcgttgagcgcgtcgacgaaccactggtccgtggaggcggcgtcgccggcggtgcccgagaggacggagccgaaggcggcgtcgggcgcgggcgcgaagagaaagacgcggaggcggggcggcctggcgacggcggcggtctcgtcgtggaggcggtcaagctcgtccatgaggtggtcgacgtcgtcgtcgg

SEQ ID NO: 42430 - DNA, 394 bp, Setaria italica
  Peptide Sequence Number=SeqID_108404
tacgaaaagcgaaagttgagttgtgtgagtggtctaaacaagagagcagttcatttttctttcatccagcaagtccagcataaccctctcaaggatggtatggaagccccacacttttcagcccagttggctttcattttgttgctctgttaggctgagtgtggaccatctctaagtctctatttccgttcatactccttgcatgtcagccagcagggaagtggaaatattaagacatgcattctttctttaaagatactttctaggattacacctgtgcttctgccttagacactatggtcagaacggaagtagcacccaacagccaatcacaagggacaccagaaaatgtgttttgagaggcttctcttttcgagaaaagggtatagaggta

SEQ ID NO: 42431 - DNA, 230 bp, Setaria italica
  Peptide Sequence Number=SeqID_108405
ttagggttaagttagggaaagaagtagtaggctaagtaagaagagcgaaaattttattcaaaattaaggactaatccagcagctttacaaaaaatgatagaaaactccttttcatgtcaatgagaattctgaattctcaagtttgggcatagggcccatcctgtgatatgttaactaaaagaaaaaatttctttttcaggcatctgccttcctttttttttctatttcca

SEQ ID NO: 42432 - DNA, 341 bp, Setaria italica
  Peptide Sequence Number=SeqID_108406
ttcagattctacaggggagctcagggccggctctgcagcttcagctgtaccaatgcaactatcaagaagttcaaggatgcgcttgcaaagcacaaaccagatagatgcagccttggcccaattaaggggatagaggaatcagagctactggctttggctgcaaacagggacctgcagttcacctacaccaaggagccagatctggctccgagcatggaagatggcgcagaggtcatcactcatgaccatccaaggcttcctgcagcagcaaagccgctggtcaggcaggggtccgaggacagggctgtggtctcatcgggaagataatatgtgatgatgat

SEQ ID NO: 42433 - DNA, 829 bp, Setaria italica
  Peptide Sequence Number=SeqID_108407
cctcaacaactcccctgccaaagtacatataggggcttttccaaagtatgtcataatttccagtgcatcacctccagaagtacctggcgactgagtacttgaattgtaagatagtgagctgcttgaagatggcatagaatatgagctggaagaattcattgttccaacatgttggctgttaactcgtgattcatcaggcatacgaagatctgagaagcggtaaggatccatatctgaaaagcaatattcaagaacatctatatatgtttcgatggatcgaagtaaaattgacgaagaagcttttagcagatcccgaatcatcttaggcctgatctctcttatggtaactccaactgcctgaatttcactaaccaactcccatggtacagaaaaaacaggatagtgctctttaatgaaactacaaacactagcagatgggaggttatcattatctccatttcctgagtgggctaagaacataccctcatccactttaacaatatttccacggtaaagttgccacactggaagatcagctaatcgtagatagaaaggtcttatcacttgctctattaaggattgccaatcagctttagatgctctaggtgaatccgaattgattacagcagaaccatgcccagtgaatgaagttggatactgcttcgatcttggccaaaaagagtataccctatcaccgtatgtttgtaatatagcactcatggactctgcagaccttagttcgatagtagaagatagagggttcctttttaagcttttagaaattcaagtgccatctcaacatatgagtcgcgcacgcatagcatgagct

SEQ ID NO: 42434 - DNA, 550 bp, Setaria italica
  Peptide Sequence Number=SeqID_108408
ctccaatcttaatcagcccttgaagattcttctcggttgagaggtcggctgacacagccgctattggtatgttgtgttcctgaatgcgcaaaagttggtctgagcatccaattgctttgaaaaggtttgcaacatgactatcagtcatgtctgagctagcatgcaagaacatgtgcagcaaaggcatggtatagtgccagccaagccatcgaaaaatgcccgaattcgacgaccgcaatgcatcaaacttgatgtcttgatctggaagacccgtgcctaatgatattaccagatatctattgtaatccaagggcttggtttcagggaattccttgctcctcatctggatctgctttgttatctcactcattgccactagagtcggattgtttgcgacaaggcccccatcaataatgttgaagctccgtgatgcaccagtgtgataatccacagtttcaaaatagtgtgcagggagaacggttggtgctgcagatgtgccaatacacacatcagcaagacgagcatccatcaaggtattagatcttgcctt

SEQ ID NO: 42435 - DNA, 660 bp, Setaria italica
  misc_feature (1)..(99): n is a, c, g, or t
  misc_feature (555)..(555): n is a, c, g, or t
  misc_feature (580)..(580): n is a, c, g, or t
  Peptide Sequence Number=SeqID_108409
nnnnnnnnnnnnnnnnnnnnnnnnnnnnnnnnnnnnnnnnnnnnnnnnnnnnnnnnnnnnnnnnnnnnnnnnnnnnnnnnnnnnnnnnnnnnnnnnnnnctaacaaagaatacgtcactgcctgtgtaaaaataaagtacctcacaattaagaatcaatgcgtgaacacctagtggtacttctggctgctccttgcaactttagctaacattacctagctgggcatgtttgatgtgcttgaggcatttctttgacaacctgatatactcttggccttggaggggtatgcaactggcctgctacattgaccttttcgttccatgcaacgaccatcctttacgtttctctacttatgaactcagtgtttcagcaaaagtcaatgagcatggatctggatcataaagaacatccacaccatatttgcaacttcaagagaatgttggttctctgcaaaacatggaaaaggaaagtgaaaacaaacctttgggacatcatgccaaattgatcagttacatttggcaggtttctttccaaaagccgcatgagtgcaaaatntatgttcatcctaaagtgaggggancaggacatcagaagtaattgcagcatagaaacaaagacactgctgacatctagcgctcatctcatacacccctttgacta

SEQ ID NO: 42436 - DNA, 568 bp, Setaria italica
  Peptide Sequence Number=SeqID_108410
tctttttctcttttcctttacggacggcaatcttccatccaccttcttcctcttccaatgcaaccagggaaaaaaacgactagatttctagaatcgaaagaaccaagcaaatcctcccatgtttagtctagactctagaccccactgcagctccgtcctcctctcaggatcacttcactaccagagcctagtttactccctctgctgcagatcgatgacgacgacgctgatgttatcccaactgtcccgcccgaacgcgagcctgacgaggagcgaggcggcgttggagcaccggggctccggctccgggccggtgccacccgctgccgccgcgtcggccgggttcccgtcttgcaggcactgccgcgccacggagcaggcgatctcgttcgggaccgcgtcccacatcccgtcgctggccaggatcaggcactcgtcctccggtgtccggtcggtcaccgtgatctctggctcggcgatcacctcaggacgcagcatcctgtctcctagtgcgcgcgacatggcgaggatgccacgcacgcggttggccgtttgtttgtaactacct

SEQ ID NO: 42437 - DNA, 342 bp, Setaria italica
  Peptide Sequence Number=SeqID_108411
ccgacccccgagcccgagccgttccctttcgtttcgttctcgctcgctcgccccccttttctccctcgcgtctctggcgattagctcccgccgcctcgtgctgtccaggcgcggcgtccggcgagggttggagggtggtcgcggccggcagatccggcgtcggcggcggccggcgtgctccggggtgagatcggcggcggcggcggcggcggcggtggagaataaggggggttgctgctcgagggaggaatcggctcgcgcgcgtgggtgaggaggagggcgtggaggtgggggagcagggaggccggtgcatggggcatgaagcgcggcgccagggacgta

SEQ ID NO: 42438 - DNA, 273 bp, Setaria italica
  Peptide Sequence Number=SeqID_108412
ggggtggggaggacagggctgggggagaggccagagggggtgattcgagtcaagtactagtgggaagctgggaaccgggtgcaggcaggcgtccagtaacccagtggggactgcagcgtcagccgtcggggtgatcgaaaccgtccaagcttcatccaacgaccgagaatccgacagcccgccaacgctgacttgttcgttgttccccatctgctgctcctttttgtctcaatctcaaatcctcaatggacttccatttttgcaagcatcaag

SEQ ID NO: 42439 - DNA, 485 bp, Setaria italica
  Peptide Sequence Number=SeqID_108413
agaaacaaccaatcaacaagcagaacggtggccggcggaggtcttcaagtccgtgcccgtgcaaaactgattaaggttgcctgttaaatcatctcgtgtcaatgcaagagaccgtgacaccaatgtacttaaggaaaacttaccttcaagttgtttggagtggagtgccccttcttatatagcacgagccggtccttgggatcaggccgttggtcagtttggtgcccccaaaccagggcaacgtgggatgatagttaggtagttaaccctcttaagactgggtcctttgactaaaagccaaaatcaattccaacatggactaccttctcatccgtcaatgaatggtggtcagcgttagaatctacgaacggagctgctcccctaaaagggttgcggtctctaatcatcctcgtgtgctgcaagagtattccaacgcaagtttaaaagcctaaaccaactgctctgcaaaatccaagaggaagcgc

SEQ ID NO: 42440 - DNA, 1458 bp, Setaria italica
  Peptide Sequence Number=SeqID_108414
tgcaaagatgtctcgtcaagaaaattcggacatgttccatagggcagcacaagactatataccagatacaagcaagtgtaatttattctttcttttcttgagaaaaagggggaaaaggtgatctattggaagataaagagtgtggtgtgatgtgatgttgaacagcatcaatgcgacatgccgacatggtgactagatgcagcctaccacgtgcacgcaggggcacccattcattattgcttactacctctggagaatgataaagtataactgctacgacgacacggccggatcgacaatggaggtgaacaatataggagtattaatcaagcaggggagacaaggccctcgtcgccggcgttctggacggtggagccggcggagttgcgcctgaagcaggtgcgcctgacctcgccgacgtttccctgtgggcccttgaggttgctcatcttgatcatggaggtcttgaactggtcgaagaaccaccagtggttgtcggcgaatccctggacgagccagctggtgcgcgggtccgtcaccagagcctggtccgacggcagcatcacccccttgttcttcttcagcgtcagctcgatgaagtagatgttgtcgaacacgctgggggtcaggaagtccaggtcccgcagccggtcgccgctgcccgccgccgagcacggctccgtgatgcacctcgtgatgtcgtcgctggcggggccggagatggcgccgaacgcgctgcagcgcgccttccccacggtgtgggcgccggagagcgagacgaggtcggccgggtcggtgaggcccgcggcgttgaaggcggagaggagctcgtcgacggtggcggtggggcggggggagcttgaagacgtcgttgtcggaggcgggcgcgaggctgtcgaggcggcccagggacacggagaaggcggggccgccggccaggttgacggcgtcgcgggtggcgaggacggtgatgtcggcgcaggagacggtggcgccgcactgggcgtggaccttggcgcggatgtcctcgatgaggttgagcacctcctgctggaggcccacgttgggggggaggttgcgctcgccgttgtccaggaggatggaagcgtcgcagccctgcgggaagcagtcgtggaagaagaggcggagtaggccggcggtgaggcggacgttctggcggagcgcggcgtcgacgttggagcggacgagggtctccagctgcgggcacgactccaggtggaagtacaccgacaggccgtcgccgctggtggcgttggtagcctgcagctcagtcaggctcagaggcgccctcgcgctgacgacggcggcggcggcgaggagcaggcccacggcggcggccaatggaggagccatcttcttcttctgttagcactagcagcagcttgctagctagctagcctggtacactagagtccagtaggcgagaggggtgctggt

SEQ ID NO: 42441 - DNA, 583 bp, Setaria italica
  Peptide Sequence Number=SeqID_108415
ctagcagttatgttggcaacatttcctggcaaaggttctgcgaaaacaagaaatatgtctcaatatacaataattttgagcattgggatgattcaggagccttcgagaattttcagaatgcaaaggcaaggttctgggctgactatcatggccagccttctgatattcctttgcccgatcctgatatgtacattgatgaggtcgaccaccactgcacagttgaccctgagttggcagctgacgtggagaagtctgctggaaactgtacagaaaagccagctgaagtgcatgattggggctgggagccaagccatggatccaatgcgacttggggtgggaataatgaatcttccagtaaatgggataacaacaactccggttggtgtgctgcgccggagaagcctagttggggcagcttgagcaacaaccagtatgcatcaaacaacaggtatagtaacttctatggtggatccaacaataacaggtacttcaaccagaggaacaataaacagaaggaccatcatgagggttttcaaaggagcagcttgcaggatcctagtagaggaaaaaagatggaatggcg

SEQ ID NO: 42442 - DNA, 1134 bp, Setaria italica
  Peptide Sequence Number=SeqID_108416
gaggataatgaactgtggtgaaaaacatatttcatctaatctatctactcttttgaggtggtccccattttctacagaaggtgaattattggatcaattcagcgatatggagtgccatggcacaaaaatcattgtattcaacttgtggttcaacgatgcattggaaatggagcttgactttgacactgataaacaggatattatgatctcaggagcacctgagatacgagcagggcgcaatacagtagaaaggttgacacagatgcatgtagcaaatcgttttcgatattcacttcgggtttatgcatctatattatacctacatgtacctgaaaactttcaaatcatcctgtgtggacgagctgttgaaccccattatgctgtcaatgatctcatgtaccgcgagtgtatcaaatatcgaccacaagttgaagtaaccggggaggttgatgtcattactacaattggctacttaagtggtgctccacgacttgatatctatggatttagtgtctaccataagaaccgtttgatactgccctactggcgtgcaggctcatttaatagacagagaagaggcattgctggggttttggaggcaaacttcataagacctacacatgataagcaagattttgagaggactggacttttccagagacttgagacacgactaaaagacatggcaactgagtattggacttaccattgtcatctggttggttacactcaggtggcaaaaggcctcctccagcacattatatatcaactactgccgaccacgatgatcataacttagtagctcaagccaccacaaatacttgcgattacaattcaagagccagggcatctgtagcattgcacccttgttccaatggatataacatgctatatcctttgcatgttgatcttgatgccttgccagatcaaatggactgtgatgcatgcccttcggcaagcataaatgtggggactacatcatatacaccacgcaatgcgcctcaacaatctgaaactgaattatgcagacgaagaaagccttgctcagagattttctggagagctcaaaaaaaggcggaacaccaatgtttatctgatcaacctggaagcgacaatggcactgaggaggcagag

SEQ ID NO: 42443 - DNA, 464 bp, Setaria italica
  Peptide Sequence Number=SeqID_108417
tcagcaagagggatgtacccagcaagaacttggcaagagatcaataactaacaaatgagcacagctggtgagcactaccgaaaccaagggaaccaggtgaagaagatctcctccatctggacagacgacgaggcctctgtggcctgctcctggacctgatcactcgcgaaatctttttcacaaaaggatcaccacactggccagtcctgcaatgtgggtgcctccgatactttctctgctgtctttcgctctcatacttttctctgctctctgtcgctaagattcagcaatcagcagggcctataaataccacccttggcaatttcagtgtatatatgtggttagcgatagtgacaagtaaaggagcattgtaccagctcgatacaagggtaccgaggcttcctttttaccccttcttctttgtttgggcaaacgcagcatagctgcatgtctcttccatgaaa

SEQ ID NO: 42444 - DNA, 381 bp, Setaria italica
  Peptide Sequence Number=SeqID_108418
ttaattttgcattttaagcagtagcatagaggaagatagaaaaccacattaatcatatacagtttaaggctaaagcaaagttttaagcatatacagctgtattttgtatgactcttctaattgaactaaaagatgtggaaaaaatctgcagaaagaagaaagattgagaaagcctcactgagcatctttcagtgactcttccacagaaacatccctgtcgaattccaaacacaaaccttactaaatttgttaaacagagggtataagatcagacgactacctagtaccaaatgtaaatccaataagggctgacagcacatttagtcatatgcttggtacttctgcacctctacctgcatcagctgcttacctgtacattcc

SEQ ID NO: 42445 - DNA, 368 bp, Setaria italica
  Peptide Sequence Number=SeqID_108419
tactcggggagcaggcgacggcgatggcgcagcatcttcttgaagctgcagatcggtatgggttgaacaggctcaagaggatatgtgtggagaaggtctgcacaaccattaacgtggacactgtcgcaacgacgttggcgttagcagagcagcatggatgctccaagttgaaggccagatgcatgaagttcgccttggacaatatctgtgcggtttctgcaacggaagggttcaagcatctcgaggcaagctacccctccgttttgactgaacttctcaagcttatggtcgaggggcacaagtagttggccattcggttgttgagcgcagaatctcgaccttttttcatttgtttttcttcactaaat

SEQ ID NO: 42446 - DNA, 508 bp, Setaria italica
  Peptide Sequence Number=SeqID_108420
ctgcctgaaagaaaaggtgcaagatttgaagttgaacacctcaattcctgaaatagatctaccgggtgcaaaagtcggggaggtttgtgttcgttttgccccggagcctagcgggtatctccacattggtcatgcgaaggctgggctgttgaataagtactttgcagagagatacaatggccgtctaatagttcgctttgatgacaccaatccttccaaagaaaacaatgaatttgtagagaacatcatggaagatattgacacaatgggaatcaaatatgacagagttacatacacatcagattattttccaaagctaatggaaatggttgaaagtctgattaagcagggtaaggcatatgttgatgacacaccaagggagcaaatgcgagctgagaggatggctggcgtggaatcaaaatgtagaaacaatactgttgaagaaaaatctagtcaattgtggagagagatggttaacggaactgaaattggtatgcagtgctatgta

SEQ ID NO: 42447 - DNA, 488 bp, Setaria italica
  Peptide Sequence Number=SeqID_108421
ctctggagtggcctcgcggcggtggcggcggtggccactccacatccgctgttgctctgcggctgccgccaccacgaaccagaagccgccgcctcaggaccgtcgtcgccgtagtgcctccagctccagctccacctccgaccgcgactccatccgcgccattcggctcaaaaaggttgaggagctaagaggaaagggttttgagccatatgcttacaagtgggataggactcacacgactaaggagctccaggaagagtacacccatcttgagaatggggaagtctgtgaggaggcagcggtctccattgccggtaggattgttgcccgaagggcatttggaaagcttgtttcatgactgtaagagacgatactgggactattcagctttactgtgagaaagacagccttacggaggaccaatttgagcaactgaaggcatttattgatattggtgatatcttaggtgcaagtggatccataaagaa

SEQ ID NO: 42448 - DNA, 1280 bp, Setaria italica
  misc_feature (1)..(42): n is a, c, g, or t
  Peptide Sequence Number=SeqID_108422
nnnnnnnnnnnnnnnnnnnnnnnnnnnnnnnnnnnnnnnnnnttttttttttttttttttttttttccaagaaatggcaatgtatatttcggtgtcgaagcaacagtactgtataattacagggaagggagcaacatctacagccctgacatacccacattgccaaaaatctaaatttgcaggttttgcttaatgctctctactcctaatggcaaaactggctgtacttaccacccagcctcaagtgcttattgagctgatcaaattcacatcaatttgcatgtacatccgcctgcttgccatctaacatgccactgattatgccgcattgctgctatactgcttcttcctatctctccacaaattgatatggtagccactaagtctgccatcagctcaaccacccgcatctcttcagataagatgatagagctagatctgcaagtttatctatgtatgctcattaccatttgtgaatttggtaatcccatctccttcaaactctgaactcagcaaggtcaattgacaaaccacgcatcatcgaatcaaattacagagcagcagcatctgcatccctcactgaattgtccttgtgagtttgcacttggagatgaagagagtgtcagtgtagttgagccggcacagcttgagcagctcagatgctttctgcttcagctccggcgcacaaccgctttggatgacaagtagaagcttggcagctaacccagcctccacggcagcaggtgcacactcttcaggcgccatccgacacaccgtccacagcattgacaacgaccgtcgcgtgcatgcctctgaaactctcatcagcagacggacagcattgggtattgtccgcgggcaatccttaagagccacccttccctctggaatggcagacagggcatccaagatgtccaacgccggctcgacacactctgttgccagctctggcaacaattcgaccagctgcggcaccgcaccaatgctaacaatcatacccctcgccggcctatgcactgcacaaatcgaattcagcagctcaagccctgcaactacgccgtccggatgtcgcttatctcggatgagacgcatgacaccaaccaagaggctcaggctcgccatcgtctccggccggaaacccctctcatccatgaggatgcggatgaggcggacacagttgatcttggtgtccgctgccccctcgttgagcatgtccaccacgagcgacaccttcgccggctgcatgagcgcagccttggcgtcggcgtcaagcgtcaccg

SEQ ID NO: 42449 - DNA, 278 bp, Setaria italica
  misc_feature (193)..(193): n is a, c, g, or t
  misc_feature (239)..(278): n is a, c, g, or t
  Peptide Sequence Number=SeqID_108423
tcaagaggtgcagatggactagcctgcctttctaaattcccatcttgtagggcaccggcatcgaaagcagtctggtgcttgtattggaatacaaatggagaatagtcagatttggaacttataactctcaatgtctttgcaaaggtggtaatgtgagtcacatcagaggtggtggggctacaattttttttgngtatatatgggattgctattacgatgtataagtttggctttagttnnnnnnnnnnnnnnnnnnnnnnnnnnnnnnnnnnnnnnnn

SEQ ID NO: 42450 - DNA, 1563 bp, Setaria italica
  Peptide Sequence Number=SeqID_108424
tttttttttgtctaattaacttaaattattcctattagcaaaggcaccaataggttacaaataaagaatagcttagctatcatatccacctcgcaagcagcgagctgcagttagtccattcctaaaatatagaagagaaagagaaaaatgaagggataccctattcactcgcttcacatttccttttggcaagagctacttacatagtcggctagttcctcgcatagtaaaacaaaataaatgcagcctaaaattatccgaatcgcctaacaattaaggaaaatttctgtaacgctgcaagggtccatgctcaccaagaaaagaaaggtgagattttgcgggaagctacaatggtgatcggttgctgacttgctgtccactacagaaccttgacgccgcttggccgtttgccttccatggcgtccttcttatcacggcaatctgagcagaggaatgggccttcccatggcttagagctcgaagagaagatggatccggcatggactgatatgccttcacttggttccaaatctacctggcaaatggcgcatgtaaacaagcttgacgatgtacgcccaccatttgaatcaggacctaacctttctgatagcatggctgaaccttcttcaaatatctcttcaacgacaccagcccctgaatgttgcttagtcaatttctgagaaggatcctttgctttctttctgaagattaaagacttcaacttgttcatctttttaggcggagaagcaggtcgtattgtttgaccaggtgggattatgtcaacaacaatgcaagttgtatcatcctttagccctcttgtcctgagcgcctccttaacaacttgctttgcagcaagctcagcaggtaaacctctgcaagacttagcagctgcctctgagggcaatgcatcccaaatgccatctgaagcaatgataagccttcctccagcatttgacaacttcacttgcttcacataaggaacaggaacaataaattcgccaacatcaatatctccaatggatcttgataggcatagtcctcctggccagcatcgtagcggaccaatctctgctccaccaacaacactaagccttccaacttcacctccacttgctgtaacgcgctccctctcctcaacattttcttctagtctgtgatccacagtaagcaaagaaacagtcccaccctgagcatctaaaatacagcgagaatcgccaacagaggcaacagtgatagtccatccgtcaattatcacaaacgtagcagttgtgccagatgtttggcctttgctctggaactccttgtccgtcttaacaaacccagcgaccagtgctcgtggcaacgcgtgcaaccactcctccctggacagcccacgtggcatcgcgctgaggacatggttgagcaaattgtcccttgtgtatattgcggcggcattaccattatggccatcaagcacggcgaagacggcgaaggtggggtgcggcgaggccgcggaggaggaagcagacgtgaaggggcgcgggcagtccgtcctcagcaggaagaagtcctcgtccctttttg

SEQ ID NO: 42451 - DNA, 1152 bp, Setaria italica
  Peptide Sequence Number=SeqID_108425
ctcgtggtgatcgattccgcagggcggcgacgggaggaggggatggacggggaggcaggcggctcggtgggcggcggcggcaggagagcgtgcccgtcggcgcggacctcgtcgcggccgcgctgcggcagctggagttcctcgcggcggtggaccgccgccggtggctctacgagggcccgctgctcgaccgggccatacgcaggtacaaagcttgttggcttccccttcttgctaagcacactcaggctcctgttgtggatggatcattagttgtccctcttgattgtgagtggatttggcactgccatcgccttaacccggttcagtacataagggactgcaagaaagtgtatggcagaatactgaacaatgacaatgttgagtcgtccactagaacaaaatcaaagattcagtcagagaaagtttggaatgagttgtatcctgaggagcccttcgagttagagtacacaagttcttctgaaactaccatggatgtggaccctggagctacagagggcatttcctatgatctggtttcagctgttaagagacaatcttctttctattatcaggttggaacaccaaccatgcatgatcagcgttttcttgttgaagcattagctcgatacaaggcatttctatatctgatcaagatgaatctggagaaaggagtgcagcgcttccgtgtaccaacctacgatgtggatctcatgtggcacacgcaccagctgcatcctattacttactgcaaagatatgttgaagcttcttggaaaagttctggagcatgatgacaccgacgctgatagatctgaagggaagaagcttgatgttggatttacagagactactgaacagtttgagagttcctttggtgtaagatactggaaggccggatgtatgtaccgtggcaacatgccgtctcctgtgacatccgctcctcagatattcaatactgaggttggatctgatatctgcaaacttcagcagagtcttaatgttcttaaattaacatttgtagagttatatttgcaagttgtggacatcaagaatttgccatctgctgttcccaaagaaaatgtgtatgtaaggttcaccaagaatcaatcagatatgtttattagtgatggcggcaggttggatatttcca

SEQ ID NO: 42452 - DNA, 372 bp, Setaria italica
  Peptide Sequence Number=SeqID_108426
ttggttttgggttgcctttatctccacaagatagcttcccatgtcagcagctaatctgttccagtcattggtcaacaattcaatttccttttctttgtcttcaatcacagaagaaaggctttcattctttttcaatacctcaattaacttatcattcaactgctttatttctagctgaagtgcatctatgctttgctttgctaacagatcttttttgttgcttgcatctagctgctgctggactgatatcagttcttcttgtaagcacacaattacctcagctgtctcaacctccacctgcctacggacttcatccatttcttgctcagaggaactgtgagatgcctgatccctttggtaccttgtattcaa

SEQ ID NO: 42453 - DNA, 1025 bp, Setaria italica
  Peptide Sequence Number=SeqID_108427
gaagcacggacggcctctccgagcacctttgctcgctgctgcactgccattcctccttcagaaaccatggcagtcacgatgacttctctaatggcctccgccggaatcacctcaccgtgcttctcccaagggcgcacgaggatacccgctttgaggtacttgcacaccagctccgcgtcccacggctggtccccgtgcatgggccacgccaggataggcttcccgtggctcaggctctctaccgtcgagttccagccgcagtggctcataaacgccgcagtggcacagtgcgccaggatctccagctgcggcgcccaccctgtgatcacccggcccctcccttcggtctgcttcgtgaactcggggagcagctcggcgtgtctgctctggctctcgtcgtggcccgtgaattcatggccgcggtctgcgtcgcgcagcacccagatgaaccgctggttgctgtcgcgcagcgctgctgcaagctcagcgatttgttccgtccgcagcgtcgacgttgtgccgaacgacacgtagagtaccgacgctggcggctgtttgttcagccaatccagccactcgtgccgcggcttgctctgctcttgcgcgtccgtgtggagcaatggatttaagggcccgatggcaaaacacttcttgccgtcggcggccaggtggtcagcaacgacgtcgatgaactcgccctcgagcgcgcgacatgtattcatgaggatgcccgcgccaggcgagatctctttcgacggcctcgcgcgcttgacgacgtactccacgaactccttcgatgcgcacgcgtcggtggcgaggaaaaccaggccacgctcacgcaggaccgggagcccggcctccatcttgccggcgagcgtcgacgcggccaggcagtgcagcccgaacgcctcgccgttgggcagccgcgcggcctcctcggcggcgtacccgttgatccggtcgtgcacgacgacgacgcggcggtgggaggcggagagcctggcgaggagcgccgcgagcggggc

SEQ ID NO: 42454 - DNA, 664 bp, Setaria italica
  Peptide Sequence Number=SeqID_108428
tggctgcgcctcagctcaacgcggtgtggcagcccaggaagcagcacggacgcgtcggggtcatcaggggcggcctccacggggttgtggcgcagcatgctaacgctgcaggcccgcgcgaacaagctgctgccgaggaacgccagccgcgggacgccgtgctcggccgcggcgtccacggaccagtcgaagaagctgtcggacacgacggcgtcggggcggctctccgccaggaaccgatcgaagggctcccggagctgttgaatcgcgtggaagaacttcccgcggtcggcctccgaattaagagccggcccgctttcgacgccggggggcagcccgacgtcggggaaaggcacgacggcgatgtcgatggccagggcgccctcggcgtcgttggcgcgttccaccgccgagcggatgacggcggcgttcacgggtgtggtgaggatggtacactttacgccgcgggtggcgaagagcgcagccatgtcggcggccgggatgaggtgccccggcgagaggaacgggaagaagaggatgtgcagcggccgctgctcaccttcgatcgccatggctggccgcgagccggcgccggcgctgttgggaacagatcaggtggacactctttttgtatggattttgcgaggcagggcgtagaaagcgg

SEQ ID NO: 42455 - DNA, 507 bp, Setaria italica
  Peptide Sequence Number=SeqID_108429
tttagttattgtaataagacaattaattgaagtgtatgacggaacagcaatctttgagacctcggtctgtgttgctcgaggacaaggaaaggtacacaagattcctaggattgacctggaagtataacaagagtacaatcagtgacagctttcaattgtcattggttgtgtctcctcacctctctcaccgaattgtcctttcatgtcattgttttgaaaacccatgctgacatgcccgtaaaactctccaaggaaaagctttatcagatgtcccttcagagactatagaattgctgcctagctagtactctagtattttatgctgacagatactcatcgtattctgtagattttgttcccgcgcatcagttttcccctcgaagtctgcaacatggcagaacaactgagattctcgtggtataagggataattgattattctagggtccattgggtgaagccataatattttttctctcgtgtgctatatattactggcacattacgg

SEQ ID NO: 42456 - DNA, 277 bp, Setaria italica
  Peptide Sequence Number=SeqID_108430
gcgagaagtgaggtgattaacctcttctgacgtgagtgagcaggcaggattcacctcacttctcgcatacagaatggtgggacagaagtagttgaggctaaagctggagcaggatcagcgactctttcaatggcgtatgcagctgctaaatttgcagatgcatgcctgagaggactgcgtggtgatgccggaatagtggagtgctcttatgttgcgttctcaggtgacggagctacataagagcactccactattccggcatcaccacgcatgcctg

SEQ ID NO: 42457 - DNA, 560 bp, Setaria italica
  Peptide Sequence Number=SeqID_108431
ggccatcatgagggaccccgaggtgtggaaggacccggaggagttcgtcccggagcgcttcctgcccggcggcgccggcggcggcgaagggcggaagctggacttcaccggcagcgacatgggctacctgccgttcgggtccgggcgcaggatctgcgcggggatcgccatggccgaccggatgacggcctactcgctggcgatgctgctgcaggccttcgactgggagctgccagccggcgcgcggctggacctggaggagaagttcgcgatcgtgatgaagaaggcgacgccgctggtggccgtgccgacgccgaggctgtccaggcctgagctctactccgcctagtccgccatgtccatccatccacaaactgaatagtgaatgcgctgtcgacccgacacaaggccactgccgccaatccgccactgcaccgcttcttgagcatgcgacgaacttccttatcgtgggccgcgatgtgttgttcctaaagcggaataattccgtttccctagcaatacgatgatatgtcacatcagaaatcttgcccgatgatttt

SEQ ID NO: 42458 - DNA, 975 bp, Setaria italica
  Peptide Sequence Number=SeqID_108432
taagcggaaacaaacggggccaatatttgtctacgatttagccactggagggaaacatagacatttcctcctttattgttctactgaaaaatgattaaaaaatccaaagaaacctctttgttcatagtgagaataaatgtgcaaaatatacagcagaagatttataaaatgttaaacaaatgactactctacttgaagcctttttattgtggcaccaagtgatgaacagagagcctccagcttgcaaatggatgaggattgatacacctgaatactggaagaaactaagcccagttgcctgatagctctagcagccttgtggggcacacgaaccacttcgcaacaccagctttgcttgacagctcctgttatccatacacaatgattgtccaattatatgtaccctcaggttttcgctattgcattgcacggccaactctgctactctgctgagtttttactcttgtcagatatctgctgcaagtcactactagctgattcactgttacttgtgtttgattgttcgctaatcttccctgtagaggagctattggagtcatcatccatgatagattggaaagtgagttggagggaatacaaaatcaaccccactgcattgattccaaagacagaagttgctaggtagcaaagcccagtgataattgttcttattgtgattgttatctgacgaaccgagaagctgtcggaaatggtctgccggttgagcgaggcctctatggtggtagtgaacttgtagaggatgagcgcgatgacccccgccgcaatcccaccgagcagggcctggatgggtgacggcggcttctcggtctcgatcggcgaggcgctcatcatcctgagcccctcaagggcctcctcggtcagattgttgggcttcttcactccgctcgaccgcaccctcagctccttggcgcggcgggcgcggcggcggagggagcggaagaggaagacggagat

SEQ ID NO: 42459 - DNA, 2172 bp, Setaria italica
  Peptide Sequence Number=SeqID_108433
tgtggatggcttatcagaattctccccctcaatggcactcctctttctttgctatgcgagcaagcttagctttccgattgttcaacctggaatttacaggaaaacgctgttacaaatagctggtgatggaaagcccacaaacagtgttgtagatttaatggaagtaatttcaaaggacaaataactaaggaagattcacagttttaccagtttttaagttgtgatgctgtgatctctgggccctacaaagcacggccgtattttcatgaatgagaaatgcatatagagtagttagacctgacaagagaatgttcaagtgaaagacctatacctgcatgctcaacttctctgaccaattctgcaataaaacagcattcttgtgcatatcaggctcatctactagagccgtttctagttcatctatttgctcatcgttcataatggtccgtttccttctcttaggttgcctgtcatcatacatactagtatctcctttctcgtcttcctggagaccactttctttttgaaagttccggtgttttaaaaatgatccacagtgctggatgctggatcgaggtccatttgctgcgctggtatccagtattaacaccagaagagacagccgagaagcctgcactggctgttcttgcaacgccaagatggactaggtcttgaccaactgcattctgcaggaaccaccatttcttagagttctttggtagtctcatccgtagcattcctctagctttgtcgagggtgctgttgtagacacttccatgttctgcacatccttcaggttattcataaaggagtcaggagtgcttgcttgtgttggcaagggctgctgcactgggtgcaagtcttccttgctttctgatggagtatcagtatgtaccacctgttgtgcaacctgtccaacttgtgatttacaccaagtttgtagcttatcagaaaaatcacttaacaattgcacgtcttcctcatttaagaagttaggaatcaatgttttagcataatcagacaaagatcctaagtttatacagactttagtggccttaaaatcattaggctggtccactgattgtttagggctccctgacatcaagtacttttgaaagttctgaagaaaaagatctctttcttgctcttcacatatatttggaacaaaaacatgcagatttgctattattttcactacacatgatgttcttgtctgtgcatatgccattgaaggcaggctagggcgaaaagggcatgaatagttagctttagcttcagtcaacgcattatcagaagctaacagtgccacctcaacggcaccaaatggatcataatctagatttgcatcttcctcaaccacaggtagattgactgagcaccaactcaaaacaaactcatcatgaggaattgctagaatctgggtcagaaagggaacagtgttagtcataaaggacgatctgaagtttgaatcgtcagaaaacacatcaactagacgcaatgcactgataagcacagatcccatggggtaactcttattatgagaatcagaagtaatttttgtttcttccaaatgcagtctttagcaaattgagaacctctagagccaaggtttgccctagccgcatgctgtttggggaagtggcaacttcatcgaggtaagatacactttcagcttcacaaagttgcaacagaatagaaagtatcttagcctttagcctggaaactgaagcaacaagatcagttgatcccttcaaacattcaggaacaactaactttaatatagtgtgagaaagcgacagtatgcctccgtttctagagagttccttattttttaaaatacgatctcgaaacagcttttgctgacacagcagcaaaagaattgcaacgatgtttcacactgttggcagatgaagtgagcaaggtggcactccaaagaaccaacaggaacatcactcaagcccattgctgataatctgatactcaacaatctaacatcttcatgcagactatcaaaggccacgtccataaaaatatcaacctttggatgtgcaagcagaatatggacaagttcatgccactgggaagagaagtaacttgtcaacagatgaagactcgctgctacaagtgatgcatgtacaagcggagaagcaccaacattattctcctaattta

SEQ ID NO: 42460 - DNA, 1629 bp, Setaria italica
  misc_feature (1)..(75): n is a, c, g, or t
  Peptide Sequence Number=SeqID_108434
nnnnnnnnnnnnnnnnnnnnnnnnnnnnnnnnnnnnnnnnnnnnnnnnnnnnnnnnnnnnnnnnnnnnnnnnnnnttgtttgtttgtttgtttgttttgttttttaacagtaacattggtaaccatcttgggcataactcagtgaacatgtccaggtctagcattcagttaacggatacaacagtcaccgttatcgacaggttttacataacgttagtcacttgttaagcagctggcttgccctaacatccagagacccatcagcttctgatctctcaccctaaaccaaagctttgccctgctcggctgtgctctcctggtatccaaagcttccacctccggccccccaaaaccaagagtttctgcctcttacctactgtgccacaggtgctagcctgacgacgtcccacggcaccctgatcacaccgccattcctcacctcagcctcctggaacgtcctcccggacgcctcggaggggtgggggagctccctccacttctcgatcctgagctcagtgacatcgaccacgcagaggcggctctccgtggagcttttaccaggaggggcatggaagatcttcccccggccgacctccttcccatcaccgtcgaccagcgagacgagacggccaggctcaaacgagaaggaccttgtgaatgggcggctcagcatcatgttctgggagaactcggccgacgatgtcagctcactgctgtctgggctcaccagtctgcctttggatatagcgttcatcacccttgcagggggcagatagctgtcctccccggcactttcggaggactcaccaagatggggagtagctggtgtggatggcttatcagaattctccccctcaaatggcactcctctttcttttgctatgcgagcaagcttagctttccgattgttcaaccagtttttaagttgtgatgctgtgatctctgggccctgcatgctcaacttctctgaccaattctgcaataaaacagcattcttgtgcatatcaggctcatctactagagccgtttctagttcatctatttgctcatcgttcataatggtccgtttccttctcttaggttgcctgtcatcatacatactagtatctcctttctcgtcttcctggagaccactttcttttgaaagttccggtgttttaaaatgatccacagtgctggatgctggatcgaggtccattttgctgcgctggtatccagtattaacaccagaagagacagccgagaagcctgcactggctgttcttgcaacgccaagatggactaggtcttgaccaactgcattctgcaggaaaccaccatttctagagttctttggagtctcatccgtagcatttccctctagctttgtcgagggtgctgttgtagacacttccatgttctgcacatccttcaggttattcataaaggagtcaggagtgcttgcttgtgttggcaagggctgctgcactgggtgcaagtcttccttgctttctgatggagtatcagtatgtaccacctgaaacatctcataatgagaacatccaacaattaaacacagattgaaaaaagatttgaagaaaactgctacagcaaattgaccacctaatgcaagtacccaagcatttaaca

SEQ ID NO: 42461 - DNA, 482 bp, Setaria italica
  Peptide Sequence Number=SeqID_108435
catgtaaaatcaataaagctcttctggctgccaacacactcatttattccgcatatcacatgtagttcatataaatatccctcgttcctcaatgcagtttcgatctttttgcggaagaaactctgcttgccaacaaagttttccttaaaactcgcgaacatctctaacgcatcgttcgatagctcaatgcttggttccaaagttgcttgcaaaggtttagcagggttgcaatttgagggagaaagtaaactagcaagctggagaacttcactggaggaaagtgagtcagaaactttcaacaatgacttgatagcaggctgcaccaaaggtagagattgcatgacaaaatctacataagcttctagttccggatgaaacgattccctcctgcagccttgtaggtattgatatcccagtcatgtacatcacaaccttcagatcttgccatttggatggctttgttgactttcatgttattcttt

SEQ ID NO: 42462 - DNA, 413 bp, Setaria italica
  Peptide Sequence Number=SeqID_108436
tacattactacgtctcctctccctgatattcgcacggaagtgcctagcatcagcgtccgaacttgaccatagtctcatgagctccggtggtgtgtcgaggtcgacagatttatctttccaccactgcgacaacagaatccaagcggttcaaacccaaacttctttgcatgcagtgctcacagttttccatcggcgccagcatgtgcgtctctgacgggacattggcgtaaacttggccgtatgggtccagtacattgggctcactggcatctccagtggcgagatcaacatccacatcggcttcctcatcattagcttttaattagatgcgaatcgatcctatgcagccaatggatatcttcatcggttgctggctgtccttgttaccatgtcactgcaatctgttacttggg

SEQ ID NO: 42463 - DNA, 699 bp, Setaria italica
  Peptide Sequence Number=SeqID_108437
ttttttttttttgggggtttgaagattaaatctgcatatggcatcaatttcagaatacctgcacccattacattgttcactgctaaattgctaatagcatcatacatggcaacatggaatgtcaaaccaagatatacgatacgatacatgtcagacgaacaaacgattcaaccagaacagatctcaactataattctggggcacacgaatgcagcatatgtaccccatatatctgaaatcactgaccaagaactaaacaagttttgataaagtatagtaaggaaacacctcccttcaatttgacgacatcaagctcgatccagagcatcgttacatctcctcatcatcatccggaatcttgtcctggaacagttgcagcgtcctctgcatcttggggggcttggggctggcgctgaccttgttgtcggccgggaacagctgcagcgtccgcggcgccggcggggggctggccctggcggcttcggcggcagccatcgccatctccttgacgccaaacaggtccagcatccgcggcggcgtggggttagccctggaggactcggctgctgccctcgtcacctcattggcgccgaaccgcggcggcgaccatgacgaccacggtggcgtgtggctggagccggcgccgggagccaccgccgccgccgtggcgcaccccgtgccaatgctcagcgcggccag

SEQ ID NO: 42464 - DNA, 500 bp, Setaria italica
  Peptide Sequence Number=SeqID_108438
aacatcttcaaaattcagttttttaaatagcaggctatatgatttagtggtagtcttgtacaaagtagttataacactgtcatagcccgctatttaaaagtctaaacaaataaagcagggaaagtagccttaaacaaaattaaagtacgttttttataccctcttccgatgctttgggttacagtgtctttgcatgttttaatttgatttgctgcggggcatactggagaatttatctatttttatctatttttgcaggaatacgttgaactgtcttatgatgtgtagattgtggaattcttgctttggctgagagcctgagaatcttgtctgaagttggataggttatatttcctcgtccttcgttagacttgatgacgggtttctcggttcagcttgataatcctatgcggatctagatgtgtaaagtgtgcagcacaaccatgcttgaaatagattacttaaaaagagtataaccatgtctaacaatcatatcttct

SEQ ID NO: 42465 - DNA, 367 bp, Setaria italica
  Peptide Sequence Number=SeqID_108439
tgagaatttacaatcgagaaagtctgcagtgcaaaatgaaagcaaatttattaagaaagaaaaggaataaaagaatggctactccatattcagagcagccccgagggctgctggttgcctatttttatggttatttcttgatgttatgctaaacaaggggtggatattcatgcctcccctttttagagggtaacttcctgatgttgccatggcatttttaaaccgtcatggcgctggtaggagtgtagcagtcaggacgaccagaggtcactctcatggccattttggtttggtgggttttgcctgctcccttactgtaaactgttttatcagcaaggtctttatgacctgcattttgtgttgacct

SEQ ID NO: 42466 - DNA, 1127 bp, Setaria italica
  Peptide Sequence Number=SeqID_108440
aacgaatcacaaaaacaaacaggctatcatgtaaaaataatcgtcatgtaaaatgttatgactttgcccgattacacaaaccgtgtattgttgccgtaatgctctctcttaactccgaatcatgtcaccgttaaggaagcacacacagccccatcttttgcaagatagcaatagcatgtatgggaactgcagcaacatcgattcatcaaaaaaacttggggcttggatcatcttccatccaatatttacaaaacacaatgtcttctaatgtttaatgaagatgtgtaatctaggtacaccgtacatggcaggcagactatgtgcataaggggaggattgcaaacaggtgtcgccttatggattttttagagcagccagcctcttctctagttcctccaattccgaactgtcatcaacctgaaccttctttccagcaatttttcctttaggagccgaggacaactgtgaggcaatgtcgacaccaatctcatccagaacctgattagcaagttcttcagtctcttcctcagcctgatcgtcgtctaagacatcatcaattgaatcagacatcatctcattcatcatatccatttgagctgactgcttttggaattcttgcattattttcgtctgcttggcaggtgccatttgcttattcaaagctcccattgctttgcttgcactttgtaaaccagtagccactgaagtgttggcatgcattgcctgagtatgagtcgcaatcccccgaatctgagctcggttaccttgcaaattagaaatctgctgccttaacctgatcagctgccgggctagaattttcgttgctgcctcattgccagtttttgctgtccttttaatttcagcaactagcttcttctcctcttgttgtagtgacgcaatatctctctcaatccctcgtgtagcattcgtcaggtctcgcttgctgctccgcatcacctctcgcggcgttggcttcttcgcgaagggattcatggctgactcgccgcggtgcgttcgtcttcgtcgtcgccgggaggaagagcaccgaggaggatgccgcgtacgcgtgtggggatgattttatttgtttttcttttcgccccgtttcgtcgtacgctggcagttga

SEQ ID NO: 42467 - DNA, 896 bp, Setaria italica
  Peptide Sequence Number=SeqID_108441
aaaacctacttcttcctcttccaaaggatagaggtggatgatcgggcccaagctcgtgctctttccataatttattctcatcctgtttggatggtgagaagatggatacgatttcatggaaaagacgaagctctaagattgatgaattggaataacagtgatccccgtttcagtctaagggtgaacacatcaaaaggatatacaagggctgaccttgtaaaacaattggaaagtttacaggttcattatgaagagtcaattatggatgaatttgtccgcattcgggaagggatgcaggcagtcttacaagctggattactaataatgggtacttgttctctgcaagacgagagtgcaggtcttgtagtttctgtggtcgatccacaacctggagaaaccattattgattgctgtgctgcacctggcggaaagacactgttcatggcatcacgattgtcaggacaagggaagatatgggctctagatgtaaacaaaggtcgcttgagaatacttatggaagcagcaaagttgcacagtctcgatgatatgatcactgacatccatgctgatcttcgactacatactaaggaaaccactgctaaatatgacaaagtattgttggatgctccgtgctctggtctgggagtcctttccaagagggcagacttgcgttggaatagacagtttgaagatttggaagagttgatgtgtttacaagacgagcttcttgattcggcatcaacattggtaaagcctggtggtatactaatatacagtacatgttcgattgactgtgaagaaacgaaagaggattactgcttttgtccagaggcacccggtacttgttcatatcaaccagcatgtatttttcggttgtaagttataaaatcgatatt

SEQ ID NO: 42468 - DNA, 469 bp, Setaria italica
  Peptide Sequence Number=SeqID_108442
ccgacggctcccatttttaaaatcagttgagttggaagcccactctggtttgttttgtgccatcttctgtcgtcgatagcgcctttgtctcgtgagaaccaatgcaacgcaggcgcccaccaaaaccaccaaccaaaggcttttgatgtgtgacacccaagtctcctcggactaggattcgctttccagcagcatcaaggaatcgctgtgaacccaccatcgaacacaaatccaccgtatacgccatcactgtagccaggaacaccatccacccagtcccacttaccaccgctaatgcccgtctcatcctcctcccacattgcaagtttcccacgtacccgctttccagcgaaccacaccttcccatcacctccaaacaccttcaccttgttgttgccaccggcagcggcagtgggcatcgagttgccctgcgaagcagcctcgcagaggccagtgaagcagcggtaca

SEQ ID NO: 42469 - DNA, 576 bp, Setaria italica
  Peptide Sequence Number=SeqID_108443
tttttttttacgaagtaaattaaaacaaaacaagttacatcaagaaatgaagattgctcaacagcatttcaatgtccaaaataaacgacttaaggttccttttccattaatcaagtacaacaattagaagtttccatcatgctaaacattgtaaataaaatttgggggcatatcagttcccatgcatgcaacagatagacgtcccatgtatataaaataacttgagctcatttagtgacgcaccggactaggattcgctttccagcagcatcaaggaatcgctgtgaacccaccatcgaacacaaatccaccgtatacgccatcactgtagccaggaacaccatccacccagtcccacttaccaccgctaatgcccgtctcatcctcctcccacattgcaagtttcccacgtacccgctttccagcgaaccacaccttcccatcacctccaaacaccttcaccttgttgttgccaccggcagcggcagtgggcatcgagttgccctgcgaagcagcctcgcagaggccagtgaagcagcggtacatgttgggcggcatgcggccagcttcgtccca

SEQ ID NO: 42470 - DNA, 646 bp, Setaria italica
  misc_feature (556)..(646): n is a, c, g, or t
  Peptide Sequence Number=SeqID_108444
taaagtaaactaaagaacaaggaaagtagtcggcgaatctgtccaggaaagctgcgaggagttgatgtctgatgcaaacaaccgggaaggaagcaaggcaagcaggtgctagcacacagcacgacaagctgtataccgccgagggcatactcgaccctcgaaagagaaaagcggagaagaaacggcgcaaggcaaacaagttcagcgtgctgaacgacatcgatgaggacaatgatttcaaggtagattatcaaatgaaggatgcggcagccgatggtgaggacgatgagagcaacgaagcagtggctgatggtaaagatggaggagatgaagccaaggagaatgacccaatgactggcatcgatgatgcgtgaaacaatgtagccccttctgtgtattgagttccaaaaatgagcagcaagtggggagttgcaaaattgacccacaaaagttttgtgctcagtttgtttgacacgaaagttccaaaaatgatagatgttaactgttgaacctttatttgaaatgagaagataagtaggcttgtgtgtagttaaannnnnnnnnnnnnnnnnnnnnnnnnnnnnnnnnnnnnnnnnnnnnnnnnnnnnnnnnnnnnnnnnnnnnnnnnnnnnnnnnnnnnnnnnnn

SEQ ID NO: 42471 - DNA, 656 bp, Setaria italica
  Peptide Sequence Number=SeqID_108445
ccttcttccccgactcccccaaggtccgccagctcctcccttccctctctccccctctggaagcggcggcggcgagatggggaagcagagcaagaagagcaagagcaagcgcgtcacgctgagccagaagcacaaggtgctgcgcaaggtcaaggagcaccaccgcaagaagcgcaaggaggccaagagggagggcaaggcgggccagcggaagaaggtcgagaaggaccccgggatccccaacgagtggcccttcaaggagcaggagctcaaggcgctcgaggcgcgccgcgcgcaggcgctgcaggagctcgagctcaagaaagaggcgcgcaaggagagggctcggaagaggaagcttggattgcttgaggatgaggacattgctaaattggcctctgcagcttctgcacagggcagtgaatttgcagaaaaggatacaacaaaggagaacactccttcagaaatcgcaaagagccatgatcattcagagaggtcattttacaaggagcttgttaaagtaattgaggcttctgacgtaattctggaggttcttgatgcaagggacccactgggaacccgttgcattgatatggaaaggatggtcaggaaggctgatccaagtaaacgaattgtgctgcttctcaacaagatag

SEQ ID NO: 42472 - DNA, 1772 bp, Setaria italica
  Peptide Sequence Number=SeqID_108446
gtttaggtttaaaaatttaaccttaatttaattttaattttaactttaatttttagtttaccttaacctttaaagttagttagttatttgttcgggggttaggtacttctaacactccttcagaaatcgcaaagagccatgatcattcagagaggtcattttacaaggagcttgttaaagtaattgaggcttctgacgtaattctggaggttcttgatgcaagggacccactgggaacccgttgcattgatatggaaaggatggtcaggaaggctgatccaagtaaacgaattgtgctgcttctcaacaagatagaccttgtacccaaggaagcagtagagaagtggcttacatatctaagagaagaaatgccaacagttgcatttaagtgtaatacccaagagcagaggaccaagctgggatggaaatcatcaaaacttgataaagcgagcaacatcccacaaagcagtgattgtctcggtgctgagaatctgatcaaattactcaagaattattccagaagccacgagctcaaactggcaattacggtgggtattgttgggcttcctaatgttggcaagagcagtctgatcaacagcttgaagaggtcccgagttgttaatgttggttccactccaggggttactagatcaatgcaagaggtccaattagacaagaaggtgaagttgctggattgtcctggtgtagttatgctcaaatcctccaacagtggtgtgtctgtagcccttcgcaactgcaaaagagttgagaaaatggaagatacaatcagtcctgtgaaggagatcctgagtatttgcccgcacgagaagttgttgtctctgtacaaggtgccaagctttagttcagttgatgagttccttcaaaaagttgccactcttcgggggaaattgaaaaaaggtggtatagtggatgttgaagctgcggcaagaattgtgcttcacgactggaatgaaggtaaaataccatattatacattgccacctaagagagatgcgggggaggactcagatgcagtgattatctcagaaggtgggaaagaatttaatattgatgaaatttacaaagccgagtcttcgtacattagtggtctgaagtctattgaggatttccatcatattgagattccaccgaatgccccacctggtattgatgaagagatgctcgaggatggcaagaagccgagtcagcccgttgaggaaagtcgtgaggaatcgatgtctgacgttaatgaccgtgaaggaagcaaggcaaccagtgctagcacacagcatgacaagctgtacactgctgagggcatactcgatcctcgcaagaggaaagcagagaagaaacgacgcaaggtgaacaagttcagtgcgctgagcgacatggatgcggactatgatttcaaggtggattatcaaatgcaggatgcggcagcagctggcgaggatgatgagagcaccgaagcatgacgatgataaaaatgatggagatgaagccaaggataatgatccaatgaccggcgttgatgatgcgtgaaatgatgccctcttccgtgtgcatgagtcggtgactcatggtgatgagtgacaaaaaaaaaaatgtgccaagtgtgtggttacaaaattaacccacgaaagttttgtactcagtttgtttcaagtataagataatagatattgaactgttagaccatattgagtagccttgtattttttactattttcacgcggtttaaaatttgcagctgggttgggcgctgttgtgac

SEQ ID NO: 42473 - DNA, 382 bp, Setaria italica
  misc_feature (1)..(28): n is a, c, g, or t
  Peptide Sequence Number=SeqID_108447
nnnnnnnnnnnnnnnnnnnnnnnnnnnnttttttttttaaaaaactttttttacaaccccaaaaccgcttcagaatttgatagtcacttgctatccattagaatcgctctacaaggttcctgtcttgacagactctgctttcctgggcacggtaacagcaacctagttggaggtgcggtacagcttcccgaaaacatgcagcatagcaacaacagcgacgatcccaatgctcattatcagaacggtgttcggggacatcttgcgcccggcggcctcatcggtgtagaactgaagcatggagctggcaccagcgccagcgccagcagcgtctctcgtggttctacgcctgcgcaggcttgcagctgctgcggtactccctcgt

SEQ ID NO: 42474 - DNA, 252 bp, Setaria italica
  Peptide Sequence Number=SeqID_108448
tgcggaggccgaagttgtaggcctggcgcgcgcgctcgcacggcgcggaggagaggccggaggcgatccaggtgggctgcccggcgaagagcgcctgcccggggaggcccgcgtcgggggccgcggcggcgccggagatgagtgaattgagctcgcggagcacgcgcttgcggtgctcctgctcggcctgggcggcgggggtgagcggcttctgcttgcgcttgtcctcgtcgcagcccttgtagtagcaac

SEQ ID NO: 42475 - DNA, 1705 bp, Setaria italica
  Peptide Sequence Number=SeqID_108449
gtggccgccgagcccggcggcgtgcggggccggccgcgcgtcgcgctccttcttgagcgcctcgatctgggcgtgcagcgtgtccttgtcggactccagcgacgtcagcttgccgcggagctcgttgatgtaggagatggcgtcgccgagcagcgacgccttgtccatcttggacacgttgggcaccacggcgcgcagcgcgtagaagcgctggttcagcttctcgcgccgctgccgctccgcctccacgtggttcagcggctcctcgcgcccgttcgccggcttccgcccacgcttgcgcggccgcttctccgcctccggcggcggcgccaccacgcggctgctctccacctcgcgcaccgaggcgtccaggtccgagtggtccgactccgacttggccggcgcgccggtccccgtcgacggtcgcgtcgtcggcgcagacgagaaggatagcatgccctcgttcgccgtcgccgccgggtggtggttggtgttgctggcgcgagaggtggcctccatcgaacgcttgttgttgttgttcttcgtgtcgttcgccggggcggccgtcagggtcgccgtgtgctgcgagaagaggctcccgggcgcggtggtgaggctggctgtggcggcggggggcgctggcgacgggttcctccggccgttgctgtcggcgccgaagctgaggatctccccggactcgggcttgaagaacggcggggccgctgccatggagggattggacgcgaactcggagaaattgagctcccggcggaaggggccctggtgagcctggttgtgctggtgctgccgctgagggggcgcggcagccggcgccggcgggggagggggcgcgtgcacggaggggctcgggttctccgtgagggtgctcgagctaccgttctcgaagtggatctgcggcggcgggggcggcttggagacagagatctcggccgacgggtgcgacagggattccttgatgtccatgaccggcgcgtcggcgagccagagcacggaggggtccgtctccgcctggtccgctccggccgcgggctgctgcggcggcggcgccggaggctgcacgggcggccacgagccgccccccgctccgcctccgcccccaaagagcgagcggatcttagccatgctctcggcggtctggaagacgacgtcggtggagccgagcctcggctccaccgtgccgacggggacgcagaccatggtgcggaggccgaagttgtaggcctggcgcgcgcgctcgcacggcgcggaggagaggccggaggcgatccaggtgggctgcccggcgaagagcgcctgcccggggaggcccgagccgttgaggaacgactgcgtcatggagacgaggaagaaccactcggtgtcggtgacctcctcctcgacggcctcgtcgggggccgcggcggcgccggagatgagtgaattgagctcgcggagcacgcgcttgcggtgctcctgctcggcctgggcggcgggggtgagcggcttctgcttgcgcttgtcctcgtcgcagcccttgtagtagccgtccccccacgccgagcagcgaggcgccggtggcggcgtcgacggaggactgccagaagatggcgtaggtccaggtctccctggagccctcaatcatggcctgcaggcgctgctgcagcgtgtcctggttgaaccccggcgccatcgccgccggcatctg

SEQ ID NO: 42476 - DNA, 878 bp, Setaria italica
  Peptide Sequence Number=SeqID_108450
gtcggggaagagcttctggtcgggcaccaggcggcagttctggatgacgaggccggacttcatgttggggtcggtgcgcccgtgcgccgtcaccgagttctgctggttgtccatgggccgccgcgtgatgatgaggcagttctggaacacggccgccgagttgccgaagatgaagtcgatggtcccggatatgacgcagttgcggaagaactggcgcctggcgtgcacgtacagcgtgtcctggaacgcgtcgaaccggcagttgtagaacgccgccaggtcgccctgcacacggagcgccaccgcctggtgcctctccgcgccggccgtgttgtggaaccccatgttcttgcagatgaacccggacgcctcgatggagaaggtggcggtcttcatggtggtgatgccgtcggcgaagctcttgcggccggtgacgcgggttttcttgggcccgtcgccgtacatgaagatgttgaccttgtccttggggatcatcaccatctcgttgtataggccggccttcacgtagatgacgtacctgcccgtgttgcccttgggcatggcgtccacggcctgctggatggacttgaactgcccgctgccgtcctgggccaccacggcgttcggcttcggctggttgcccgccgccatcagcttcctctccggcgacctcatccacaccggggtagccctgctcgtcctgctccgacaggaggcggcggagcgagtccttcttgaacatgtcgaggtccagcttcttcaggaggccgccgaggctgttggtgatggcgagcgcgttgctgctgagttcggtggcgttgcgcagcacggagtgccatgtcggccttgagcttctcgttcatggacacctgcatcga

SEQ ID NO: 42477 - DNA, 272 bp, Setaria italica
  misc_feature (270)..(270): n is a, c, g, or t
  Peptide Sequence Number=SeqID_108451
taaataacaaaggaacaaagaacaaagaagaaaaaatagttaagtaccgtaaactttagaagacaattacaaagttgcttcccttgccggcgaacgaacttgggaggctagctcgtgctgatattgttccaattctgtttttttcaggactcaaaatttggctgctaaaagcatgccgtgtgcaatttccttgtaaaaagatagaactttgcaagcaaaagaatggcatgcaaatatcgaaatttttaaaaaaaaaaaaaaaaaccaaanga

SEQ ID NO: 42478 - DNA, 347 bp, Setaria italica
  Peptide Sequence Number=SeqID_108452
accgaccgaggtttcccaagtaatggttaatgaaactacaggaaaggtagaaggggattgggatttgttacaatctgtactcctgcttcaagagctgctttgcttatagctgatgacactgaacccataccaccttgaacatacgcccaaacaccacgttgaccaccagtctcccccatgacatggtgcaggagaacatatccagaacctggagtgttcacaccagccatggtacctatcaccgcgtcagttgctagagttgccttcaaaacatcgctctcaaaccaatagttcaggatttttgatgccggagaaaggaggaggtcaaagaattccaccatgttctt

SEQ ID NO: 42479 - DNA, 1529 bp, Setaria italica
  misc_feature (77)..(77): n is a, c, g, or t
  misc_feature (88)..(88): n is a, c, g, or t
  Peptide Sequence Number=SeqID_108453
tcttccttaccttcccgttcgtttcgttcgttccgtttcgttcgttacgttttctttcgttttagtttttttttttnttttttttttntttttttttaaaagaaggatgcgcaaccccatgaccgaaattagatgggcagccgaatgggcccacaaatgagtgatatgaccctagtagctacacatgacaaatggttggtgccttctacaatctttcctgaaaatgccacttcaacatctattttgccttcttaaggtcctctaaaacaacagaggcagcgttgcgtcctggagcacccatcaccccgccacctgggtgtgcaccactcccacagaggtacagacccttcacaggggttctataatccgaccatcccttggctggcctcatgaggaaaagagaatccaagcccattgcaccatgaaaaatgttgcctcctgttagaccaaactctctttcaagatcaggtggagtcagcatatcatagcctaccactgatgagctaaagcccggagcatattcatcaatcaaagaaaagcatcgctcagcaaaggattttctaacattagaatcctgccagctgccttctgaaagtttgtagggtgtatactgaacaaaaagattaataacatgctgacctggtggagagatggtcttatccaagacagaaggaattgtcatttctataacaggtcttttggatgagacgccacctgcagcttccttgtatgcgagttcaatttcctccatactttcagacccaatgtgtatggtgcccatgtgctctgggccaccttcagggttgatgtctttgcaacagtggaactgtggcagcctgtcaacagccacattaatctttgttgttgcagagctgtaatctgctgtgttaatagcacagaggaagtcctttggaagaacattagcaggcactaggtccacaaatgttttgtatggagtggcatttgatagaacaactggcgagtgcacctccgttccatctgccaatgctaccccttctacctttcctgtagtttcattaaccattacttgggaaacctcggcatttgttacaatctgtactcctgcttcaagagctgctttgcttatagctgatgacactgaacccataccaccttgaacatacgcccaaacaccacgttgaccaccagtctcccccatgacatggtgcaggagaacatatccagaacctggagtgttcacaccagccatggtacctatcaccgcgtcagttgctagagttgccttcaaaacatcgctctcaaaccaatagttcaggatttttgatgccggagaaaggaggaggtcaaagaattccaccatgttcttctgcccctgctgcatcacatgccgaagaagactgccccagaatgctgacttgtctaccctatccttcatcctgtcaaccacagaggcgtggagctcctgcctcagctcgggtggagccgagtctatgacaaagtccatgagcttgcagaacctctccagctgctcctcgtacctcggatat

SEQ ID NO: 42480 - DNA, 547 bp, Setaria italica
  Peptide Sequence Number=SeqID_108454
actgaactcttatcggagatagagccatcccctgcatcaacccctgagtagctagcatctgggcacagcccaagacctctctccattccccagcaccatacctctccatcagaggagactacagttgtgtggaacaatccacaatcaagggatataaggaaggatccggttggtaagccatcaacaggttgtggcgagcaaatggtggcttggtttccatggccaagctgccccttgtcaccaaggccaaacgtccagcaccgagattctatctggtcaaacgacttcttattggtgaggacggcagtgtgggaagctccacatgcaatttcatacacctcccaagaagattcttcactaaatgctgagataagcacaggacgagatctactttccttgtcacctagacccaactgaccatggttgttatttcccaagcataacaaacaaggtcacctcctgtatagatctccccagcactaactgcagctactacatgctcattaccacaggcaaccttaacaacggtgtgtccatggaaatccca

SEQ ID NO: 42481 - DNA, 805 bp, Setaria italica
  Peptide Sequence Number=SeqID_108455
gttggagctggtcagcacgagacttttcgttctcagcggcttgtgcaaggcgcgaagtctctcaacttcggcctcagctcttcgtttctcttcgaaagggaatttttctcaacctcaagcaaaatagatttgtcttttcagtgtcaagggcagtagccaaagtctctttctcaaactgaagttttttcacaactttgatctctttggagagcgcactttcagaagattgtttagacaactcactctgccgcaggtcttcgcgaacgcgccgttgagcaacatggcaggcaacgaatgccttcatagacaaatcttgggcatgcgtcaatatttcttcagcactctcttggccaaggtcctcttccataatgagaaagctaaagctatcttgagctttttgtaaatcactgcgtacccggtgaccactagagaagtgcagcaccttgcgttgagtaccaccaaaaagaagtgtgccctccgccaggtcaagtcgattagcaacggcagtagggggctctgcgctcatgaaaagggcactactaggatcatcgctttctgtctccgaatcagaaccctgatcatgctctgaaatgtcctgagtagatcgccccgccaaggtcacaatccctgcagtggcgacttgttcagcagaagcctcctcttcgtgaggtacaagtgccaactgaccaggtaccacctcgggcgcaggggcgcgcggctcgggtggagggctgcggtcgcgagatcggtgaagtggaggctcgtcatcactatattggatctcaaacggcttgctagcagtgcc

SEQ ID NO: 42482 - DNA, 329 bp, Setaria italica
  misc_feature (291)..(291): n is a, c, g, or t
  misc_feature (302)..(302): n is a, c, g, or t
  Peptide Sequence Number=SeqID_108456
taggttggtaagttggttgtgagctgatcatcgtttcattagccagccaggcgctgatcttgatcatcaaacaagagatgccgcgatcgcaactccagcatgcaggtgattttagatgcatggattgctctgaaacatttcgacgtgatggggccggccatggatcatcgacaatagccaatcgaacgccgtcgtcagtcagggctcaggagctatctccggcaggccataaccggagatggtcacactactcacggcgacgagcataattggggcgctggctgaaaaggngattcaccctnaagtcagtgtgtgaaatgcaatgggat

SEQ ID NO: 42483 - DNA, 440 bp, Setaria italica
  Peptide Sequence Number=SeqID_108457
gctctactttgcaagaacagtcgaagatggcttcccccatttctttttgtcaatgcaaaattaatatcagcggtttttggattgggaaaggagaaggagggtttcattcatcaatgtacagaagcatttgtgcagttggtcgcttctttggtacctgctattcttgacacagtctgcagtgatatacagcaggttctggctggcaaacgccatgggcctgttactgctttagctgggcgagctcatccaaagagcacaattcatctgtttccagttattcttcatcttctgggaagtgcatccttcaggcacagagtcatgacaagtcatgtattgcttcagctggcaaatcttattaagattctggaggcaccgtttcaggctagggatgatttccagatgacattgttgcgagttcttgaggctgctacagaggagcc

SEQ ID NO: 42484 - DNA, 373 bp, Setaria italica
  Peptide Sequence Number=SeqID_108458
agaagaagaagaagagtgagttaaattatacgaataaagttagaagatgcttccttctaatctgttttcccgttttcactgtgcttcctcctcctggacatggttttcaccattcccttgagtatcttccagaaccaaaacacgttcatcactgataccgtcgatggcactgccaccaagctgtagaatcctaaggtgaagatggatctcgcctgatcgtagtgcaaatacatatgggtgaacagatacacgaataatattatccgagcaaccagccatccaacaaatagagtcacgccgttgtataagtaaaggttacaagtcttctggccagcaacatccagataccatctgagattcacaaatggagtgg

SEQ ID NO: 42485 - DNA, 1050 bp, Setaria italica
  Peptide Sequence Number=SeqID_108459
tttaagtttaaaattaacggtaactaaaagttttactaaattacttttacttaggaaggaatgcaaatggtttggccgctgggagaacaagatcggccaatactcactcatggattctttcagataccctgataatcagttcttggagaaacatagtgagcttatgaccatgttccgggaaggaagaaaaaaggacagtccataccagtgcccatggaggtgaagaaagcgatagcatggactctcaaggcctcaaatggccagattgcaaacggagcaccggcacttgtgaggcatggcatgcctgagctgtgctgggcatgtccaaccaacaatgagttcactctagctcaggttatattgttatggcacattgcaacaagctactgcgagatatcagaatcgaaccgagtcaatgtgcaacccacagcacaaaccagtaatccgaagcttgttgccaccagcttgtccaagtattgtgcatacttggtcaagttcgccccaaaactggttcctggcagtccaatagagacagagtccacgcttgaggaactagtatacgaagcaagaagagctttcaaggtaaatccggatatattgacattgtttggggagctgcagcaacagcacaacgaaggaagggcacgcgattggatgttggccaagggcgccgtacttgggataaaactagcgagcatggaggaccaggtgacgcggtggaaccttctcgcagatttctgggcagagctgatgctgtacatcgccccatgtgacaatgttgctgcccatatagagtctcttgctgaaggtggcgagttcgtgacacatgtttgggctttgcttatgcatgctggcatcctggagcgtcctgctgctcatgccatctaatcaaactgagaagtcgggggcaagaacatccgcaaataactgtcctcaatcctgttgtgattgctatttgtgtattaaaacgtcgttatcatgtgtgactgtgtgagtaaagacaatgaaacctggttctattgtgaggtccgcacgtatgcgttgggttca

SEQ ID NO: 42486 - DNA, 364 bp, Setaria italica
  Peptide Sequence Number=SeqID_108460
aattcaattgtgacctgcaggtggagacattccttttcgctctagtttgtgtagtcaaagttgtaccgatatggggaactccttaaaaaaaaatttgaaaaaaaggctaagtgaaaacagtctgcagtattccttttcatgttctggagaaagcagcaatcatgcaacttacacatgaatatgcagctgaatcaaaatgcagtgatatatctttattgctataagaaatagagatgctcatgattggaggttttaccaccttcaccttgggaaaattttctgtgtccattcatgtatacatattgatgtggcattaggatcctcaatagagaattcacataatctatggtactaataattactg

SEQ ID NO: 42487 - DNA, 2512 bp, Setaria italica
  Peptide Sequence Number=SeqID_108461
tgcaaatggctggaagagaactgaagaaacagcagcaacgaacccatgtacatcattgtctggccatcgcaggcgctcttggacccccaaaactaggctagatgggattcaaggcatgaggaagacgggtgaaaatgcatcctgaagatggttcgcagctgccaatacggctcaagtattcagtaacatttccaaaagaaatcatggtattagtgctgactgcttgcttagcatagttttgctatggacatagacacagtactgtacagtcactcgccaaggacatcactacagctctacagactttaaataaaactagcaagcaacgcatgcaatgcaatccaatatatcaagatgccaagtcttaaggtcggttgcctcatgagcaatctatcaccagagacccacatcccatcaattctgtctgatatcggtcgagtgaacttgggaacaaagcgtgacatagtcaatgacttgaaaccatgtgctttatcatcatcttcatcatctaattgcttgtctttatccatctctacatcaatagcaatttggtcattgttgacttttcgcgcgcctcgaagctgagtgacaactgctgggcttttgtcattcatttgttcaatctctgaagtgccaggcaagtttatagatctgttcagttgactggatgccctatcccggcgaagcaaccctatttgagaatccttttggctcaatgaagcttctagagcatctgatttacgcatcaattcttccattttggtcctctcaacctgtagtaaagaatctttgctttggactacaacccttaaatcatctgattcagatatcagagatcctatttttttgctcaacatctccatatagacaggaactggagtgccatcatagtcgcaatgcacgccaaactgcaaaagtgctgtttctagccatttaatgaaatcgtttatctgtgatgagtactttttgttgctctcttcagtggttagcagttcattcgtacttcttgtaacttcctgccgcagaaaagagatctctgaatctctttcttgcaattgtgactgaaggttttccacttctgcaagaagattttcagacaagctatgcaactcatcaaacttgtcgacagtcgttgcaagttttgccagagctttagtcctagaaacttctgcgctctttaaagcaaattctttttcttgcagcatttgctccaactcatgacttttgttctccatgacttcaagctctttttcttcttcatcaagtgcttgcatcaaaccttcaatttcttggtcttttctgcttagttcatcagtcaattccttaattcttccgtgctgctcacttgccattgactccatatttttaagctcatttacttgagtctctaaagccttgttctcattatgcaacatatcaacttgtttcgccaaattgtggacctccatttttgcaccttcgagctcgactgagagctgctttgcagaagattcagccgcccttaactgatatgaaagctctgaactgattgtgctgatttggatatctttagcttgaagctcctgctgcaactcaagaacagtagccttcagttcctttgtgctgccttcattactgttccgagaagtttttacagctagaactaactgttcaactaatgattttatacgttcatctgcagaatgatcaacagcatagctctggttaccagggtatatatcagtcatcccttcaatctcagcaactgaactagtacatgcttcatatagcaagctcatattcctgcgttcagatacaatctcctcatctcttcctttcatctccaactgtagttcaacaaattttgctctcaaagattccaactcattttgctgagaagtgagtctgttctgcaagttggacattacatcaaacagctctgttgctttctgttcaactgaaaagccatgctcatcaatgcttcttttgagatcattacagtcttttacacactcagataaagcacggcatgcaatagcaagatgatgcaaaatctgtctctcatcggtatcatccatcttaatttccaaaggagcatttggaatatgagccttcttgctgtttatgcggttggacaaaacatgtttagaagcaatcggtacatccatcatatttgtgccatctatccatttaccagaagacttcatgaagttttccatatagcagataaggtccacatccttactgaatgcattgacaagatgatgtgaaagttcaaagcagacttctcttagttgactgctggtggagttcaactccatcaaatgatctaattgcttccttcttgtctgtgactgcgcatgcataacatgctcaaggtgacgaacagcatcagctcttgcagattctgtaacactgtattgtttataagattcagaaagtgcagcttctgccttgacaattcctcctgcaggttgtcagccctttcatgagcttcatttaactcagctagaagcaactctgttgctcgttt

SEQ ID NO: 42488 - DNA, 1427 bp, Setaria italica
  Peptide Sequence Number=SeqID_108462
aagatgtgcaagctccctttgtcacagtatggataataataaatgaaataatcactgtgttgtacatgtaaacgaaaaaaaggcttgagaaaatatgtgggggcaactcaagggagggggacaacctgttaccatcccaaaaccctaacttccaaaactaccatgtcactttcctgtaatgtaatcctgtatcatatagtatagtagatgctagcatgtgaaacgccctccatctttctaaaagtaaagaatagagcaaacaaaaatgtatgtacatgggttcgttgctgctgtttcttcagttctcttccagccatttgcatcattgtctggccatcgcaggcgctcttggacccccaaaactaggctagatgggattcaaggcatgaggaagacgggtgaaaatgcatcctgaagatggttcgcagctgccaatacggctcaagtattcagtaacatttccaaaagaaatcatggtattagtgctgactgcttgcttagcatagttttgctatggacatagacacagtactgtacagtcactcgccaaggacatcactacagctctacagactttaaataaaactagcaagcaacgcatgcaatgcaatccaatatatcaagatgccaagtcttaaggtcggttgcctcatgagcaatctatcaccagagacccacatcccatcaattctgtctgatatcggtcgagtgaacttgggaacaaagcgtgacatagtcaatgacttgaaaccatgtgctttatcatcatcttcatcatctaattgctaacactgtattgtttataagattcagaaagtgcagcttctgccttgaacaattcctcctgcaggttgtcagccctttcatgagcttcatttaactcagctagaagcaactctgttgctcgtttcgatttcttcacttcattctgtgatgaaaccactgtttcctgtaggtcaaggcaaaattttgctatcttttcaaccttggtaactggatccgtatcaaattcccgagcaatgtccactttatttaaagcatttaataatccactcaaatactggtttgtttcatgcaagctcttctcattctcagccaatcgatccattaaagatgatttctcagtctcaagtgattctatgtgctgttttctttcattcttaagtttctctatcacagcattcatctcttctatagtttgcttcaggctgtctctgtgttgcactaggcccttcccttttctgacagcaacatttagtttctccctcaatgaggtacacttttgctcctcctgatttaactgctcctgcagattgtcccgctgcttacccacagattctagttcaagaactagcgactgatacttttgcatctgctcagcatcactttcttgcaatttgtttatttgagcttgagcatagtaaaga

SEQ ID NO: 42489 - DNA, 410 bp, Setaria italica
  Peptide Sequence Number=SeqID_108463
taagtaaatttttaaagcatttagtatgtcacgaggtacggaggtagattagtacatgcatcctcgtggatatttacctagtgtaatattatcgtatgcaaactacaagagtggctttgccagttcatcttatcatcactaattaagcatgttgatttatttgctctagtatcacgataaaactatcttttccattctttctgtccttaggcaattaagccgatgatttagttgtttaaggaatagatgcaatgtagccaatgatttaacttgttaaaggaaatgcacatgctttatgagtttagcaggatggttaacaaacaaaaagaatttgatggttctttctgcaaatggacctagatatggtgcttctagacaataaagtttcgaacattggaactcaagaacag

SEQ ID NO: 42490 - DNA, 280 bp, Setaria italica
  Peptide Sequence Number=SeqID_108464
tttttttaaacgttagttaaactatagcattttaaccaagattctcaggcacacaaatatttcataaggcgtaacttcatacacaattaaaagtatctgacctcgtcatctttacataaaaacaaaagacaaaaaaataaagtccataagttaaaagatctactccgcagcatccccctcttcattagtaacgctaggctgtgaacgaagctgagctaatcgctcgcaagccagcttcttcacgtactcctacccagaggatgaccacatacgcttgaac

SEQ ID NO: 42491 - DNA, 325 bp, Setaria italica
  Peptide Sequence Number=SeqID_108465
tcctattctctctagaatccaatcatatggcattgccagggaaggggaacaacaataacgaataagttccttaacttgaagcatatgcaaaatctctattatccagattcgtatattcctcccttgtgagaatctaatgaaaatagctactagaggggatcttatctcaaacaaactagataaaaaaacagtgaggctttaatttgctttttgatagatttttgcaaaaacttcattaagtctgaagttcaatcataatatgttaatttagcttatcaatgaatttttctaatgtttttgtaagcttaaaaatccaggataaatt

SEQ ID NO: 42492 - DNA, 237 bp, Setaria italica
  Peptide Sequence Number=SeqID_108466
cacacgtctggcaagttgctcacggtgaacgggaggtcatcgatatgatacagtgttgctccccagatcagctgcaacctggggttcattggtttcttctggccaggtgctcctccttgagtaatctgaacttgctccagggctttgcgcacgaggcgttcgacgaggagctcctcgctgcatgtttctttatgagcataaactgtgtgtgcactgacagcctttgcaatcgaaggg

SEQ ID NO: 42493 - DNA, 1046 bp, Setaria italica
  misc_feature (1024)..(1024): n is a, c, g, or t
  Peptide Sequence Number=SeqID_108467
cgaaggcgaagcgggcgcccgccaggagcggcaaggccgccaaggccgcggcggctgcggcctccgtagtggacgacgtggcggagctccaggggatgctggagcggctgcggctggagaaggagaaagcggaggagatggtgagggagcgggacgaggtcatccggaagaaggaggaggagatcgagaccaaggagaaggagcaggagcgcctccaggccgagctcaggaaggtgcagcgcgccaaggagttcaagcccaccgtgagctttcctctcgtcaagtcgctgcttgagaaggagcaggacgcaggcgacaagggcaagaggaagaaggggaagggcaaggccgtcccggagaggaagaagccctgcacggcgtacgtgctctggttgaaggaccagtggaccgagatcaagaaggagaaccctgaggccgacttcaaggaggtgaccaacacgctgggcgccaagtggaaggcgctgggcgccgaggagaagcagccctacgaggagcggtaccggcaggagaaggaggcctacctccaggtggtcggccaggagaagcgcgaggctgaggccatgaagctgctcgaggagcagcagatgcagtggaccgccaaggagctgctggagcagtacctcaagttcaggcaggaggccgaggagggcgacggcaagaaggggaagaggaagaacagcaagaaggtcaaggacccccgccaagcccaagcagcccatgtcggcctacttcgtgtacacgcaggagaggcgcgccgcactggtcgctgagaagaagaacgttcctgagattggcaagatcactggggaggagtggaagaacatgacagaagcccagaaggctccctacgaggaagttgcgaagaagcagaaggaggagtaccacaagcagatgggggtttacaagaagaagaagattgaggaagctgcgagcctggagaaagaagaggaggagcagaagaaaatcatgaagcaagaggctctccagctgcttaagaaaaggngaaggcagacaacatcatcaag

SEQ ID NO: 42494 - DNA, 1005 bp, Setaria italica
  Peptide Sequence Number=SeqID_108468
ggacaactgcagcgccagctgagcctgtcccgtctatgattgccgtcacagttgccaatgccctggagttgcttctcagggagctgtgtgttccgaggtctgcagagaccgcggtggttatgagcgcgtaagggccattcacgagcatgccggtgatgaacattaggatgatgttccagcaaagcgagatgctcccgtacatgcggtagaagaacagtgtcggtatcgcagaaaatgtgaaacttgctgctgtcagtgcccgggcatccaaacggtctgacatgtggccagcaaggatgccgcctatgacaccacctaaatcaaacaacgttgatagcgctccagcagtcgagtctgacaaatattttccaccaacagctgtgtggctaatatagaaaggaagccaatataggaacgtgtaggcgactagcttgcagaaaacaggcagagagcaaatggcactactccaggaattctcaatgcttcaatgaatcccactggcttttctgttacttctgtctgtccttccaataaaggggtgcctatttcattcttaccagaatcattcaaatggtcatcctcagatccaatagcctcagggccagaaggcaagaacagaaacacaatgagcccaactaatgcaatcataacaccaggaacaacaaatgaccagccccacccaaacttcaggagagcagctgctatcagagagcctgatatgttccctacagaagtatgagcattccaaattcccatgattagtcccctctttttcttcccaaaccaattgccgacaactgctaccactgagggccacccagttgactgaaacaggccagcaatcaattgaatgcccaagaaatagtagaagttgtgtaatattcagccagtatccagctccaaaagcagccgtgaacaaaccagttcctatcattccaattgtcagaaggttcctcagatccactctgtcaccgatatggccaacaaagaacatgccaattgcat

SEQ ID NO: 42495 - DNA, 916 bp, Setaria italica
  Peptide Sequence Number=SeqID_108469
aaaaactaccgttcctctagttggattgttgcaagttgcaactcgggaggagcagtcgccggtgcccgtcccgatcccagcctcccaccaacgccgaaaccggaagcccgcggcggcggagcagatcgtcgacccccccagcaccggcgatggagaagggcaagggactcgcccgccgctgggcggtggagctccacgacgtctcctcctccgcctcccccgccgtccccgatccgccgggcttcaccagatccgctcccgacgccgacgacgccgccggcgcgcgccagcggaaggactccgaggccgcatggaaggcgcagaaagcgtgggaggtggcgcagtcgccgttcaagaaccttatgatgatgggcttcatgatgtggatggccgggagcaccgtccacctcttcagcatcggcatcaccttctccgccctgtggcagcctatcagcgctctccgatctgttggaaaagttttcgaaccatttaaggacccaagggtggacactattgctcccaagttgctcttcattgctcttaatttggctgcgatgggtttgggtgtatggaagcttaatacgttgggtcttcttccaacaaatccatcagattgggtgtcttcattggcccctgctccggaggttgaatatgctggtggggggatccccttgatctgatgccgtttccccttttgaacttccattacttgaaagatgatctgtactaagtgaattattaccctgcgtacgggagaagtgtagttctcatgtggacaatttgtactatttttcgcttgagctgtaccaattttgcgactgcgtgccagtgccccgtggtatctactggacagcaacagacttagataaacatagtttactcgtattgcttggctccttgtttaccctttaaaaaa

SEQ ID NO: 42496 - DNA, 291 bp, Setaria italica
  misc_feature (288)..(288): n is a, c, g, or t
  Peptide Sequence Number=SeqID_108470
ccctctccattcctggctgcttttctctccgtcggcatgcggttgggtcgcggggctgtaggcgggcggtgacgggcacaagccgcacccgacgcgcacggcagccgggcggcaggcccgaggagacgcagggcacacggcagcgaacgcccagaaggtaagcacatcacgcaggggccatgatttgtttgtactgtcacgctatctccgattttcgagtgccagggccatgagatcatttcgcacacccattcgaggaataggatttgaaggtgctgccggatcggntta

SEQ ID NO: 42497 - DNA, 1747 bp, Setaria italica
  Peptide Sequence Number=SeqID_108471
tgcagaggaagcccaaatcccaaatcccccatctgcaaccccaaatcgctaatcatatcgcctacccacttcaagccctctccattcctggctgcttttctctccgtcggcatgcggttgggtcgcggggctgtaggcgggcggtgacgggcacaagccgcacccgacgcgcacggcagccgggcggcaggcccgaggagacgcagggcacacggcagcgaacgcccagaaggtggagaacaattcgtggtaccaccaatctcaactgctatcctccagcaccaatgcctatatgagaaacaaagtcaacaagcgattgcctccaccaataactcacccaaatttggataagttttgaggaacaaaaatacaactgatgcaggagcccaggagagatgatggtctgcttcggcttcacactataaaaagaaattggaaggcagcaacacaagcaagttcctggtcctccaatggccataataagatacaaaatagctgccctgccaaggacaaactctgcgtgacctgttcggaaaagggacataattctcatgattgccccatgaaggatcgagaggaaaaactcatatgcactatctgtaacaaggttggtcactattacttgcggtagactgccgactgaatgtgtctgagaaccatgcttgccatcgttgtggcgaaaaaggacactacgccagtaagggacccatgcattgtggtgataagttcatttatacgggcctcagttgctccagctgtgatacaaaccatttgcttgggagatgccctatgagcaacattacatgtttcctttctgaaggtaaggattgtgtccctgctcaatgtcacttaagtccaatactcactgcagtaaatcagcactgtcgagaaagcttccgaggtactctgaaagaggggagaacagtcacacgactcgatccacccagcggaatagagctatatgatgatagccgtgaatgccaattgaacgggaataatgaaatggcacccaaggtctcaagctgcagccttggtgagccagtcaaccgtgatggggggagccccataaaaactcatgtactagctgctgacaagaacaaccctgcaactacgacggatgagccactaacaccagcgtcaggattcacctgcttagactgccatgaagacaactgccactctgcaaatagttgttctaaaaagaagtcacctcgagaattagagccatatgattgtaaccatggatgccaatctatgggggctagtgaaatggtggtacccaatgtctcaagcatcagtcctgttgtgcaagaccgatgtgattgggtgagccccataataactaagataccagcctctgaagacaccaacgctgaagctatgacggatgtggtgcaaacaaaagtactagtagtcacctgtttcagctgccatgatgaaggccattgggcaaggaattgtcccaagaaggcacctagaaaattggttcattgtggtgtcacctgcctaaattgcaatggcaaccactacacaattagatgtcccaagaaaaagaagcctggtgaattgaagctatgtaatgtcacctgcttaaggtgccgtgacaaaggccactttgcagataggtgtcctaagatgcagcagcctagataattggagccatatgatgaaagccatggacatcaattgtgataggaagagcctatcgtaacttgcttactgtaagcctgtgttgttattgttgctg

SEQ ID NO: 42498 - DNA, 250 bp, Setaria italica
  Peptide Sequence Number=SeqID_108472
tactaaagtagattttggcaaagcaagatcaggaaattttgtctcaaattgccattgctgcaatgtaaggcgcagcaacctcaaaccattgaaagcattgcaaagccgatcctggaaagctttaagggccccacaacctgccatatccagcaacttctttgaaagcggtggaataggctggctaacaatattggtcttgtgataagcaactatttccctgtaacattcgagaatgcaatgccaaatagga

SEQ ID NO: 42499 - DNA, 357 bp, Setaria italica
  Peptide Sequence Number=SeqID_108473
ttttttttttaccttaagtacgttgcgtactacacgatgataaactgcctttagaacaccacaaacaaataagcatgtcgccaaactacagcaaccttttaacttttaagccgtctacttcacttgcaaacattgccaatgtgaggtcatgattgccaaaccatacatcataaggagtaccttaacattacaaaagatcaacacactatagcagttcgtgttgaaacacctaacaggcagcatgcaatctactgaaacacaagtttgtcaccacacaagcaacatgccaacatggtcagtggctacaatgcaaatgaagtgaagacggtctcctcttagtttttctttttgtctatt

SEQ ID NO: 42500 - DNA, 740 bp, Setaria italica
  Peptide Sequence Number=SeqID_108474
atccttacatgattagtttgatgtttctatatctagtggattttacgaacgaatacaaggctaccagcagacttaagaattgtatgattacctacttaaaatttaatttcatgatgcgcttacctggtttagtggttgctattcttgtttgtatgcgtaatacctgagtgtagctttttgttcagttactatgtaaattgcttcatgtttttaggtgcatgtgccctaggcctaaacatttatagtaattctagctgttgagttgatatccattgatgtctgcgcttatctgtgctagctaatctgcgtaattgattctgaatggtgactctagtctaattagatcacttttcttcatatgcctgtatcactttacgtaggttttgtaggactgccagctgctaatatatgaaatcttggccttactaatatgttcagattaagcttcattttttgtgatgtgactagtctatgcagctgtaggtaacatttccgtagcagaagtgctctatatggagcaattactgatatgttatggtgctgttctgttcagttagctttttgattttgtcccatttgtagagaaggatatatgtgttcaaaattacgatattacaagatatattacaagatacatgcgtttagtccactacagctgtcacaggtatcctagttttaattttttacttacctacaataagaatttaacttagtacttagtttttactaagttaaactta

SEQ ID NO: 42501 - DNA, 394 bp, Setaria italica
  Peptide Sequence Number=SeqID_108475
tttgttttggtgtggcgagtagtatttacaaacttttatcttcatgactggagaatccgtttcctggaattcgcacgcaagtgattggactctggcttttgatttggactgcattgaccaaacataagattcggacgtaacgttgttgacaaaagcaggcaaacattttttgtgcactgaagaattctgctgagtctgggagggtgagcacgcttcccaggtagcttcttgtgctactggtagtgtgagctctcgtggagaattgtcgatctgcaggtcatggattgggtggaatgccgagctaacatcactgccaaggggaagacctgctggtctgatggagctgtggtagaacctaaggtcaacacctggcattggtcctttcattgtagct

SEQ ID NO: 42502 - DNA, 261 bp, Setaria italica
  Peptide Sequence Number=SeqID_108476
ccggagcctgactctgagcaggcggtcaccggcgcgggattgggcgccccggctgcggtcgagcatccgcgcccgaacgctgcagcggaggtttcaccggcacctccgcctcctgacgcaggcgcgcaaaccggtgccgcctccgccgcgggtgaggaggcgccggaacaggtggcgggttccaatgctggcgttgaggaggcagaggccagactggcctccgcggaggtgattaccgcggccgaatctgagtatagaaga

SEQ ID NO: 42503 - DNA, 713 bp, Setaria italica
  misc_feature (612)..(612): n is a, c, g, or t
  misc_feature (629)..(629): n is a, c, g, or t
  misc_feature (642)..(642): n is a, c, g, or t
  misc_feature (656)..(656): n is a, c, g, or t
  misc_feature (668)..(668): n is a, c, g, or t
  misc_feature (679)..(679): n is a, c, g, or t
  misc_feature (689)..(689): n is a, c, g, or t
  misc_feature (699)..(699): n is a, c, g, or t
  misc_feature (706)..(706): n is a, c, g, or t
  misc_feature (711)..(711): n is a, c, g, or t
  Peptide Sequence Number=SeqID_108477
gagcagactgaagcatgatcggagctgagctcctctgcagtagtcctgggctttttgtagtgtctaagactttaattgctatatggctgtttggcctaagaacatccttcaatattctggttatgcttaaggatcttttaaagtattggtgtcaattctggtagtttggtcttatatttgaatggtttataagcttgctgagcatttgtatgtaagatatagatgtgaagtgttattttcccctaatgctacctttgctgtgttctcttaccagtttgccgtgaagaggaaagcagttggaatttggggatgcaaggactgcggaaaggtcaaggctggtggtgcttacaccatgaacactgctagtgcagtcactgtcaggagcacgatccggcgcttgagggagcagactgaagcatgatcggagctgagctcctctgcagtagtcctgggctttttgtagtgtctaagactttaattgctatatggctgtttggcctaagaacatccttcaatattctggttatgcttaaggatctctaaagttatggtgctaaaatttgtacttggttgccgttgacaaaaaaaaaaaaaaaaaaaaaaaaaaaaaanaaaaaaaaaaaaaaaanaaaaaaaaaaaanaaaaaaaaaaaaanaaaaaaaaaaanaaaaaaaaaanaaaaaaaaanaaaaaaaaanaaaaaanaaaanaa

SEQ ID NO: 42504 - DNA, 600 bp, Setaria italica
  misc_feature (573)..(573): n is a, c, g, or t
  misc_feature (582)..(582): n is a, c, g, or t
  misc_feature (585)..(585): n is a, c, g, or t
  Peptide Sequence Number=SeqID_108478
aggattctgataggatggttgaaatagcccaatcagaacttgtgttgtcgtcaggtgctgcaatcctgcctcatccttctaaggtagctacaggcggagaagatgcatattttattgcaggcaatggctggtttggtgtagcggatggagttggccagtggtcatttgaaggaatcaatgcagggctttatgcaagagaactaatggatggttgtaaaaaattcataactgagaatcacccgctccgccgccgcagccgccgtcgctacagccgcgcacctcgcttcctctaccgtcgccgagatgacgaagcgcaccaagaaggctggaattgttggcaaatatggaactaggtatggtgctagcttgcgtaagcaaatcaagaagatggaggtgtctcagcactccaagtacttctgcgagttctgcgggaagttcgccgtgaagaggaaggcggttggaatttggggatgcaaggactgcgggaaggtcaaggctggtggtgcttacaccatgaagtacgtctgttcatttcaaccaaagaattaattgtctgactcttttctaccgaanaacaaatanaanaaataaaataaataa

SEQ ID NO: 42505 - DNA, 563 bp, Setaria italica
  misc_feature (559)..(559): n is a, c, g, or t
  Peptide Sequence Number=SeqID_108479
gccgccgtcgctaccgccccgcgcctcgtcgcagcagccgccttcgtcccgtcgacgcgatgacgaagcgcaccaagaaggccggaattgttggcaaatatggaactaggtatggtgctagcttgcgtaagcaaatcaagaagatggaggtgtctcagcactccaagtacttctgtgagttctgtggaaagtttgccgtgaagaggaaagcagttggaatttggggatgcaaggactgcggaaaggtcaaggctggtggtgcttacaccatgaacactgctagtgcagtcactgtcaggagcacgatccggcgcttgagggagcagactgaagcatgatcggagctgagctcctctgcagtagtcctgggctttttgtagtgtctaagactttaattgctatatggctgtttggcctaagaacatccttcaatattctggttatgcttaaggatctctaaagttatggtgctaaaatttgtacttggttgccgttgcaaagttgacctgtcttgatcatatgcttccattcataatgtcgaaaaaaaaaaaaaaaaaangaaa

SEQ ID NO: 42506 - DNA, 624 bp, Setaria italica
  misc_feature (597)..(624): n is a, c, g, or t
  Peptide Sequence Number=SeqID_108480
cgcaactgcgccgccgccgcccgctgccgccccgcgcctcgtcgcagcagccgccttcgtcccgtcgacgcgatgacgaagcgcaccaagaaggccggaattgttggcaaatatggaactaggtatggtgctagcttgcgtaagcaaatcaagaagatggaggtgtctcagcactccaagtacttctgtgagttctgtggaaagtttgccgtgaagaggaaagcagttggaatttggggatgcaaggactgcgggaaggtcaaggctggtggtgcttataccatgaacactgctagtgcggtcactgtcaggagcacaatccgtcgcttgagggagcagactgaagcctgatctcttcatatcaggcatcctggggttctctagttgaatcactgtaggctgtttggccgagaacatgctccagtatttttggtttatgctttaggatcctaaaattgtggtgctaagattttgtacttggttgctgttatgacaagtgatctctgatgttattgcccaccttattggtgtcaaatttcctcgtggttttttcagtggcggctgcttcaatgatttgatagacgacacagggactannnnnnnnnnnnnnnnnnnnnnnnnnnn

SEQ ID NO: 42507 - DNA, 1991 bp, Setaria italica
  Peptide Sequence Number=SeqID_108481
aaagacacttcagaggtgaaggattctgataggtattactttgtttcttactttgatttcaagtgtttcagaccataaagtggtcagtaatagcttatgctgcaatgggttctgttggtgttaaagctatatatggcataagtttcctcttcattgagttatgtctgtcatgcaagcctgtcttacagcttttcctgactttatgcttgtggtaaaagcctgtgcgcttgtaattcagaactacaatatcattttttaatgtttttcgcaaaccggtgccgcctccgccgcgggtgaggaggcgccggaacaggtggcgggttccaatgctggcgttgaggaggcagaggccagactggcctccgcggaggtgattaccgcggccgaatctgagtatgagaccgagggcgacggcgtcgcagttggggcaggcgttccgacgagtggtgctgtcgtgaagacgacagggacgggtttggagcagcgcgaggaggcggcggggacggccggtttggaggaatccgaggccgcgtcagaaggctccaccgtgcaggattttgacaccgacgttgagacggagtccagcggctccagcggcgacgagcagggagcggagttcggggtccccctaccaatagtggaacgaaatagcaaggaggtggattggaaaaaagacacttcagaggtgaaggattctgataggatggttgaaatagcccaatcagaacttgtgttgtcgtcaggtgctgcaatcctgcctcatccttctaaggtagctacaggcggagaagatgcatattttattgcaggcaatggctggtttggtgtagcggatggagttggccagtggtcatttgaaggaatcaatgcagggctttatgcaagagaactaatggatggttgtaaaaaattcataactgagaatcaaggggccttagattttggaccggagcaaatcctttccaaggcagcagatgaagcacattctcctggttcttccactgtattagttgctcactttgatggccaggtccttcaagcatcaaatataggagactctgggtttttggtaataagaaatggagaagtttatgagaaatcaaaacctatggtttatggtttcaatttcccactacaaattgagaagggagatgaccccttgaaactcgtacagaattatactattgatctagaggaaggagatgcgattgtgacagcaacagatggccttttcgataatgtctatgagcatgaagtagctgcaataatctctaaatcgttacaggcggatctaaaaccagcggagatcgcggagcacttggctgcgaaggcccaggaagtgggtaggtcgggagcagggagaagcccattttcagatgctgctctctcagtcgggtaccttggcttcagtgggggcaagctggatgacatagctgtggttgtatcaattgtccggacttctgaaattcaagttatacaagactgactgatgcagagaaccaaagctctcagttatgttgaagctgtactgcaagcgagccacccttcagcaaactactcctctgtcccaaattgtaggtcgttttggcatttctatgtgcatttttgttatgcgcttacaatttggaacggagggagtagaagttaagctgtgcgtggtggtttcccaaaaggtgaacaagatcaagatgtaaacatgagcaacatacatcatgcttgatcagcaatagccaacggccaacagagcaaagctccccctgttgcccttacattgttatgctatcggaatagcaccatttagatgtagcctggtgctcctcgttgagctgtaatccaatgtcatctgtggataggaactggacattcgtgaacagtggttgaaacttgcgaagtcaagtaaaacttatatactttcgtagcactggcaatcatatgagagttttgccgatggacagactgatgctgcaagcttattacaaggaattctttac

SEQ ID NO: 42508 - DNA, 943 bp, Setaria italica
  misc_feature (878)..(943): n is a, c, g, or t
  Peptide Sequence Number=SeqID_108482
cgccgggggcggtccacctcttgcgcggtgaccgcgcacctgtggcgcgccatgtgcgtcgccaggggcctccccgccgacggcgacacgcggctccgggtgcccgccaacatccggcagcgcctccgcccgcagcttcccgcggcctacttcgggaacgcgatcgtgcgggacctggtgaccgtgaaggtcggggaagtgctgtcgcagccgctgggcttcgtggcggagcggatcaagcgcgcggtgtcccgcgtggacgacgcgtacgtgcggtcggtgatcgactacctggaggtggagtcggagaagggaagccaggcggcgcgcggacagttcatgccggagtcggacctgtgggtggtcagctggctgggcatgcccatctacgacgccgacttcgggtgggggcgcccggggttcgtggcgccggcgcagatgttcggcagcggcacggcgtacgtgacgcaggggcccgacaaggacgaccccatcaaggtgctcttcgcgctcgagcccgagtacctgcagaccttcgagaaggccttctacggggagtgaccgccgcgccgcggcgccggcctagctgcggtggcgaggcctacagaggagtaggagaggcagccccctgtggtgccgtggtggtgacttcgatcgtgtggagatggatcggcacggagccggtccggtaggtgtgcatctgttgatgtctgtatcataatatgtttggggatgctactgcatgcttactgtgacgctgtcttggatgtctgtataagtgtgataaggtgcttggttccagttttatagtacgccaattcaccaatcaatctgtccaagtgtctgtataataaaaggaaaaaattgttaattaaaannnnnnnnnnnnnnnnnnnnnnnnnnnnnnnnnnnnnnnnnnnnnnnnnnnnnnnnnnnnnnnnnn

SEQ ID NO: 42509 - DNA, 531 bp, Setaria italica
  Peptide Sequence Number=SeqID_108483
taagaacaaaactaagaacaaaccaaaataaataggacgaatggcgatgccggcgccgcaagccgctacgcgcgtcgtcgccggcggccagctcgtgtttggcaagcctgagaaggcgaagggcgggaggctgcttgtgaggagctgtgacaatggcggcggcaggaatggcagacgtgttacggtggaagctgtcaacggcgctgtcaagctgaacggcgcagcggtggcggccgacgttcggcaggtaccggcaccgtcatccatggacgacggtggcgatgccttccggctcggcaagtttgtggaagggaggcttgtgtacaggcagcagtttgtgatcaggtcctacgagatcgggcctgaccggactgccaccatggagaccctcatgaacctcctgcaggagacagcactgaaccatgtgatgtgctccgggcttgccggagacggcttcggcgcgacacggcagatgagcctcaggaagctcatctgggtcgtcacgagaatcaacatccaggtcaacaagta

SEQ ID NO: 42510 - DNA, 659 bp, Setaria italica
  misc_feature (633)..(659): n is a, c, g, or t
  Peptide Sequence Number=SeqID_108484
ccgccgaggcagaggcagagacggccgccaccgaggccgaggcgaaagaactggaggccaaggaggaggcagcgcctgctgctgccgccgccgctgaggaggccgcggcgccggcagaggccgaggcggcagcagcccctgctgccgaggcggccggcaagtccgagtgagtccagcgggcacgtcccgcgcgcgtgcgatcgacgatcttgctgtctcgtgccacgcacggcacggcgcctgtatatggtcgcggccttcgtgggcgcgtcgccgccgccgcgtcggcgttcgggttcacgttcgtgtcatagctacgtggggccgcccgtagtaaggggcgttcgtgcgttgaataatgtatctgtgtgtgtttctgtgtttgtggggttctggggcccggcgtcagcgctgatgtggcgtggcttgacgttgacggcgcattggtggggccgtgccttggagctgtctgtcgtttgattatgctggttaatacgtgtaccgtgaatgtctgtgctgtatttttctttgtactagttaatcaatcaagttttttccatctaaaaaaaatacagcacagacattcacggtacacgtattaaccagcataatcaaacgacagacattcacggnnnnnnnnnnnnnnnnnnnnnnnnnnn

SEQ ID NO: 42511 - DNA, 438 bp, Setaria italica
  misc_feature (421)..(421): n is a, c, g, or t
  Peptide Sequence Number=SeqID_108485
tttataaaactacatcctctcactcctcatatagatcttgccaagttagcaaaattgttgatgtgatatagaattaactcccatcgagacaaccagcatttcatgtgttgggcccgtgctccgatccctatttaatttcatgttgaaactagtgtgatattttggtatccaaggtaaagagagatggcaacacgaaaatattgaaactgttgcatctgtcgagcataatataatactattattctattacaactgcattgtgatgacaactttgcactacaaggatattttagcaaccgcaaacacgtacacgcgcaggctttcatcacgtcacacatctcgctgattgacacgcacaaccgctaccaacacggcattgtcattctcatgtgctgatgtacgcgtgccaccgcaaaccggngcgcgacgtgtactctt

SEQ ID NO: 42512 - DNA, 417 bp, Setaria italica
  Peptide Sequence Number=SeqID_108486
tacacaacaagaatgctcgaccacactccggagatcatcaacgcccttcatgcatatcacaccacagagctctggcatgctaggcttggtcaccccggcactgctagtcttcatcgcatcttgaatacattggtttttcatgctccaagtctgacactcatacatgccatgcctgtcgtcttagcaagcacgtacggctgccattctttgagtccactcatgttgcttcctttccatttcaactcttgcattgtgatgtatggacgagtccaataatcagcaattctggatacaaatattatcttgtgatgttggatgattattctcactttgcctggacctttcctttacgccacaagtctaatgttcttcctgctatcatagccttccatgcatttgtgtgcacgcaaatttaaa

SEQ ID NO: 42513 - DNA, 594 bp, Setaria italica
  Peptide Sequence Number=SeqID_108487
ttcttctacattccttgtacaacaatctggacgcaccagttctactacatgtttgggatcgtgttcctcgtcttcgtaatccttatagtgacctgcgcagagatcaccattgtgctctgctattttcagctgtgcaacgaggactaccggtggtggtggaggtcctacttgacttctggatcctctgcagtgtacctattcttgtacgccgcattctatttcttcaccaggctgcagatcacaaaggcggtctccggcatgctcttttttggctacatgttcatcgtgtcgtacgccttcttcgtgctcactggcaccattggcttctacgcctgcttgtggttcaccaggctcatatactcttcagtgaagattgactaggaatctataattgcatcactttactgtcggcttgagaagttagaggttgaaggtgggaaatgaaatatgatgtgaacgtagcatgtttatattcaggagtctttaggaggtttacgaattaattcagttagactgaaagcttgatttcagtaacttggtgcatgcgtgcatccttaccccactaactttgtgttcaatcaactgattaactac

SEQ ID NO: 42514 - DNA, 1041 bp, Setaria italica
  Peptide Sequence Number=SeqID_108488
attaatgcaatgtggagaaacaagcaacaaattgactaacatcgtggtacaccaagggactatctaatgctaatactagtacttctactaaaatgatcaatttccaccgctcccaagtcatcatctcttcttgaggacacatatataagttaaattggagcaatgtaacaattctaaggcgataccgatacaaattcttaaaacacggtgaatcaccgaaagaaattactggctctcttcttcttcatcgtcttcctcctcctcgtcggactgctcaccctcacttgcagcagcggcggcggcagcgtgattgttgtcatggtattgctggtaatgtgagcgtggggcattacggtgccggtcaccgtggctgatgcggtaccggctatggtgatggtgattgctgctaccaccggcatcggtagccattgacattctacgagatgagccaccaacagtggtagcaccagcagggatggtggccacgccagaagaggcgtgattcttggcctgcgtgagctccatctgcgcgttgaggaagaactgcgcgcgctgcgactccagctcccgcgcgaagtctatgcgccgacgctccatctctgctgcctgatccagcttcgcagcctccacccgctcgtacgcctcgccaaagcggcgtatcgcctgcgccaggtcacggaggccctgtgtgcggtcgccgctgctgccaccgtctgcgcggccttcatccgtcctcctcctcttcccgtttgccgccgggagagccggcagaggcgggaagccgtcggaggactcggaggacaccgaaggttcgggggaaggtggcctccgcttggctgcagaggctgccgcgggcatcagaggcgtacggctgcgctgcggaaagctcacccgcagcgctgcagggaccgggctgcggctgttagagttgtgcccaccgccgccaccgccgccggagccgggcttgttgccgtaggtgggcgcgaggagaaagtcgaggcggtcgaagactgccaggaggagaccggcttgggcccctct

SEQ ID NO: 42515 - DNA, 309 bp, Setaria italica
  Peptide Sequence Number=SeqID_108489
tcgtaattaccgccgcgccgtccccggcgtcctccgcgcaccgccgctgcagcccggcgccgtactccgcgtccatggtctcgctcacgttggggcgtatccgctccgcgaaggacccgcagtgggcgcggccgacggagtgcgcgccggagagcgtgacgagctcgtcctgcgtgaaccccttggcggcgaagagctccgtgaggcggccaagctccgcgaacggcgggggcaggctctgggtggcgtcggacgcggcggaggcgagcccgtcccggcggcccgaggggacgccgtagttgatcgccc

SEQ ID NO: 42516 - DNA, 391 bp, Setaria italica
  Peptide Sequence Number=SeqID_108490
tctggtgtactggtcacactgtcacggtgacccgagaacaaaatgctctctcatatacatcagaaccatgctgggacacatgccatcatacaaaattgacagaacatatttatccaaaaaggcacttggaatctcaaaatctacttggctagcatcttctacaaggttaaccattatcacctatattttatagttcactaaataagaaatccaacagagtccaagcccgtaaaacaaataaagtggccaacaatcacaatatatacagttccctcatctggcaaatcttaatatttcattctctggagaatgtagctattttgacatgtaacatgctgaaacagtgcaagaactcatattcaacgacatcctatgcgatgaaccaatagac

SEQ ID NO: 42517 - DNA, 1499 bp, Setaria italica
  misc_feature (24)..(24): n is a, c, g, or t
  Peptide Sequence Number=SeqID_108491
gcccatgtccggtcccggtctccnccttttccgttgcaattctgattcccacgaggacagacatcgagagccttgcgggaggaggacgccgagaccgattccagcggcggtaccgtgcacccgcgcggcgtgcaccccgtcgccgatcgccgacggccgaaacgctgggggctggggggcctcgcgctgccgccccgctggtctcccgctgctccgcctcggctctccgttgcattgttctgccgcccggctcaaccgacgcttcctcggctgctcaatctcggaaactcgtttggtttttctgtcttagtgttttgttgtaggatgtgagaacagcctttgtgttgaactgttgatgataaaagtgagaatgcttggaggtctcgagttgtggtgctttatgtaatgcacttgatcacttatttcaccaatatcattggtgtggtgaccattgctctcatctccatagtctccatcttcggcctggtctgcctctgccgctcagtgtacttccaactgtggatcaaaagaagaggctaccagcggcttagctacttcaacgggccatggctgactcggataacattgatgctggttggattttggtggggtgttggagaggtactcagactcacctttgtgaatggggagggaaggctaatttctgaccggtcatggcaagtgaatgtgtgcaaattctacatcatctcaaatctggggtttgcagaaccaggattgttcctcttgctctctttccttcttagtgcagctttgcagaagcaagagcttggtaccttgaaccggaaatggaaccggaagaccatacgtgcagcattcattctctgctcgccttctctcatctgggacgcttgtgttgttttcgttggtgctcgtatttcttcagatgacggtcagccaccaaagattgcaaagtactggtattctgcctctaaaatccataacggcgacattacatgcacatatccattgttgagcagcatatttcttggggcattctacatcattttgactgtctatgtcatgtttgtcggtcgtcaaatgctgtctctggtgatcaacaagggactccggcgaaggatatatatgctgattgtcgccactggaatattacttccccgggcgacacttcttgggttatcggttcttccttggcctggtgaagtccatgaggctcttgtgtttgtctccttccttgtgctgatgcttgctgccatggtcggtattgttattctggtctattttccagttgctgatacatttgccataggtgaccaggagcatattgagatgcaagcaagtcgtgacatgatcctatgatagccttttgacttaatgttcagctttttgttcaaggactaactggagggggactcctatgctgccttcccctggcggtggccatatttagtcttgcaactgcagctgtgactttactccggtaattttgtaatgttcagtctttttgttcaaggactaac

SEQ ID NO: 42518 - DNA, 621 bp, Setaria italica
  Peptide Sequence Number=SeqID_108492
cgtttgaataccggcatctggatccatcagtatgtgcagaagcagggatgggaactggacgtggtattaggcaccgcacttgttgacatgtacgggaagtgtgggcacattgcagaaggagctcgtgtattctctgaaatggtcgagaggaatgtctatacttggaattctatcattggggcacttgctctggctcaggatggaagaaaacagctctgcaatggttcttccagatggaaactgacggtgtacggccagatgctgtcacactgatttgtgttctttgtgcatgtgcacatgctgggtttgttgatattgggaggaaaatatttaattcgattgttcaaggtaagtatgggtttcaacctgggatcaagcactttggatgcatggttgaccttcttagtcgctctggacacctggatgatgccttcaggcttgttgagacaatgccatcacagccaaatgctgtcatctggggcttgctattgcggggttgcaaggcccgtggtgactcaatattgagtgagcatgtgacaatgcgtctggtggagcttgagcctgagaatgcatcacattatgtgctgctagccaacttgtatgctgggacagggaggtggc

SEQ ID NO: 42519 - DNA, 449 bp, Setaria italica
  Peptide Sequence Number=SeqID_108493
tattgttacagtgcctgttaattggtttgctttggcactgacacacaatgatgaaagtctccgtatagatgctgctgagtctctctttctaaatccgaagacatcaagtcttccatcctccttggaactgagcttgcttaaagaggcagtcccattgaatatgcgttgtagctcaactgcatttcaaatgaaatggacaagtttatttcggaagttttttgctagggtgcgaacagcacttgacagacaggtaaagcaggggtcatggattccatcttcaacagctagtgttaaaggagctgattctgttgatgctgctaatgctgctgttacccagagggctgaagatctgttccaattcatgaagtggctgagctcctttctgtttaactcttgttaccctcggcccttatgaaaggaaacaattgacaatggagcttattcttaca

SEQ ID NO: 42520 - DNA, 369 bp, Setaria italica
  Peptide Sequence Number=SeqID_108494
gaacaggacaaccacaggcataccaacattgttcttctccacatggcgaccgtcaagagcaacacaacgagggctatgtgtgctgctctttgcattcttgtgatggtgccttcagccgtattagctgaactcgtggtggttgatcgagttcatattcctatggaccaatgctcttatcagaaatgcatcacagcatgtatacataggatcagaagggcttacatacttgtagagggatactgcgagacaactaagatgtgtttctgcaaatattctgaggaacgacatcctcccacgttggaatagttgctgctgcagaggatgatatgataatggatttagtactgatgcgggcgttgatggaatgca

SEQ ID NO: 42521 - DNA, 354 bp, Setaria italica
  Peptide Sequence Number=SeqID_108495
ttcttgtcttgaaaaaaattagaaaatctatgcctcagaatattcttcttatgggtgtacgtgtatctaaggtacattttactatagtcctgcctactaagaaaatgaagtctttcaggttatcataccacgaagtccacgcgaggctaagggattactgttggctagcattagagatccaaatccagttgtattttttgagccaaagtggctgtatcgtttgtctgttgaagaagttcctgaggaggattatatgctgcccttatctcaggcagaagtgattaggaaaggaagtgatataacacttattggctggggagctcaacttgcagtgcttaaagaagcttgtgaaga

SEQ ID NO: 42522 - DNA, 1528 bp, Setaria italica
  misc_feature (1488)..(1528): n is a, c, g, or t
  Peptide Sequence Number=SeqID_108496
ctatagtcctgcctactaagaaaatgaagtctttcgcagctgcgggtccaagacgcacaggcagtagcagcaggctagcacacttgcacgctctagtagcagcgtcgtgagctgcttgcccaagaaatcgaattactcccactcccggctgtccggagagcgcagctcagctcggggagtccggttcttggggggtcgatggccgcgagggcgctgagggaggccgggaggaggaggggctgggcggcggaggtcgggcggcggtgcttctccggcgggagcgcgggggcagcggtgccggagcggaaggagggagggggagggaagtcggtgaacctgttcacggccgtcaaccaggcgctccacatcgccctcgacaccgacccgcgtgcttatgtcttcggagaggatgtgggtttcggcggcgtctttcgctgcacaacggggctcgccgaccggtttggcaagaacagagtgttcaacacgccgctatgtgaacagggcattgctggatttgctattggcctagcagcaatgggtaatcgagctattgcagaaatccagtttgcagactatatctttccagcctttgatcagattgtcaatgaagcagctaaattcagatatcggagtggaaatgaatttaactgtggaggcttaacaattagaactccttatggtgctgttgggcatggtggtcactaccattcacagtcaccagaggctttcttctgtcacgttcctggactcaaggttatcataccacgaagtccacgcgaggctaagggattactgttggctagcattagagatccaaatccagttgtattttttgagccaaagtggctgtatcgtttgtctgttgaagaagttcctgaggaggattatatgctgcccttatctcaggcagaagtgattaggaaaggaagtgatataacacttattggctggggagctcaacttgcagtgcttaaagaagcttgtgaagatgcagaaaaggatggggtatcatgtgagctcattgatctgaaaactctgataccgtgggacaaggaaacagtagaggcctcggtaaagaagactggaaagctcctcgttagccatgaggctccaatcaccgggggatttggtgcggagattgctgcgtctatcgccgagcgctgcttccaaaggctagaagctcctgtggcgcgagtctgcggcctcgacactccttttcctctcgtctacgaaccattttacatgcccacaaagaacaaggtcctggacgccataaaggcaactgtaaattactgaagtgcaggaccaagctactgccgcacattttccatgattagcagacataaagcctctgttcttcgttctcattcatatgtacatatgcactctcaacatttctggtcaacatattcatggccaaaaacagcttattcagtaataccattacagcaataaagttgcaagaagcaaatgttacaaaaaaaaaannnnnnnnnnnnnnnnnnnnnnnnnnnnnnnnnnnnnnnnn

SEQ ID NO: 42523 - DNA, 411 bp, Setaria italica
  Peptide Sequence Number=SeqID_108497
tgttacttactttcagtgatacaaatctggagcgtgatgatttcctgaaatctttaatggatgagaatggctgggttccagtttcaaaagttgcagatttcaataggcttaagaaaatgaccacagatatacacctgattgtagatgcattggcaaactcaagtcttcttgaagtccaggacgacaaaattagaaggcgttctgactgggcaaagtgggcctctttttctggtgcaacatctgttgcaagcccatcatctgcaagtatggatagcagggattatattaatacggaagcaaaagttgctgatgaacaagtccaagatgcacatatctattcattgaatagggacttatctgccattagtattgatgaaaagcctaagagtcttgctgcacagtctataaagt

SEQ ID NO: 42524 - DNA, 1070 bp, Setaria italica
  Peptide Sequence Number=SeqID_108498
ccatcctaccctccagcgatgcagtatcaccaacatccagggcaacctatttctaaccccgtccctgtgcttcccagtccaatgatgctacaagaatatccttaccagccatttcctgtttcagtcccgaatcatgagaggcatgttggaaaatccgggtatgagaactccgtgcctccttttgttccagtagatcaagttggtgcgaatgaaggtaacaggccaatgcctccccatccaagaggagattctcatgcctggcggcctcctgttggtactcatggtgctaggccccatcctggtcctgaaggtcatggccattttagtcagacttggcaaaatcctcagatgtttggtacaagagagaacacaaatctaccacaaggtgttgggccaagagcttttgtcagaccaatggtgcctcctcctcttgggtacatcaatggaccaccatatcctggacctatgcatcccatgtactattacatgcctgcacctatggaaccgatgagaggtccacagcgctacatccaaaatcaaccaacgcctagtcctgttttatcccctaaagctgctgagttaagatctaagatactaactcaggtggagtactacttcagtgatacaaatctggagcgtgatgatttcctgaaatctttaatggatgagaatggctgggttccagtttcaaaagttgcagatttcaataggcttaagaaaatgaccacagatatacacctgattgtagatgcattggcaaactcaagtcttcttgaagtccaggacgacaaaattagaaggcgttctgactgggcaaagtgggcctctttttctggtgcaacatctgttgcaagcccatcatctgcaagtatggatagcaggggtgagagaaatatcggtggcttttcaaataaggatgatgattctgaagatcaaaagaagcattctcagtctaaagatattaaatgtaatacagattatattaatacggaagcaaaagttgctgatgaacaagtccaagatgcacatatctattcattgaataggacttatctgccattagtattgat

SEQ ID NO: 42525 - DNA, 1966 bp, Setaria italica
  Peptide Sequence Number=SeqID_108499
taaattattcggttggtctttttctaaattaaggtattgtattgtatttcttgtaagtattctaaaagtaagtctatttcttcagttctaggcccttctggtgcaacatctgttgcaagcccatcatctgcaagtatggatagcaggggtgagagaaatatcggtggcttttcaaataaggatgatgattctgaagatcaaaagaagcattctcagtctaaagatattaaatgtaatacagattatattaatacggaagcaaaagttgctgatgaacaagtccaagatgcacatatctattcattgaatagggacttatctgccattagtattgatgaaaagcctaagagtcttgctgcacagtctataaagtcaagcaaacattattcttcttttagatctggtgatgttaaagttcagaaagtgaagtcaaagataaacgcacctgattctcaaaatgacttctctagctttggtggtgaccaaagcactttcatgcttgatgaggaattggaattggaacatgcggaccattcacgcgatgacctctattctcataaaaggggtgatgacgaggaagaggacttttttgttgatgaccaagatgttaataggctaataattgtcacacaggatactgggttagcaaaggatgacaaaagccgcacaagtatgcctcaggcattttcaacagaggaagcatcgagaataagcgatgccttataccattatgagacacttcatggtcggcgcgctaataatcatagaggttcccaggctgatactgcagatgttgattctaaaccaactggtggttcaaaggggaaccacattggctgtggacctaatggtactgaagaaactgggcagcctattccacgcaagcgccaaagtagaggcaatagaaaagcacaaagcgcacggaaacagcggttctttgctggtaatttcatgagtaatcctgaccaatatggtggtgtatcagaaagccctccgggccattcagttggatatttctacggatctactccagaaaatcacagctataagagttcgaagctgagttcttctcctcatggaattcctactgggagctcacctgttggatctatacccaaatcttctccacaatctcagcatctaaattatcatcttttagaaaaaataaactccagcagcagaggtacaataagttcaaacatcactgccttgtggaacgtaagaaactaggcaccggtcacagtgagcaaatgaactcgctgtatcgcttttggtcatactatctcagagataattttaatgaagacatgtatacgcattttaagaaattcgcactagaggatgcagcagcaagctacagatatggactcgagtgccttttcaggttttatagttatggtttagagaaaaacttccaacctaatgtatatgaagatttcgagaagcttacgcttgaattctaccaaaatggtgatctttatggacttgaaaaatactgggcatttcaccattaccgaaatccagatagcggtcctgtaaataagcttccagagctggagaggcttctcagggaggagttccggaccctggatgacttcaaggcgaaggagaaggcccatgatgccacagagaaagagacgggctgcagtagcagcaccgtggcggtgaccgcaagccatagcaaggctgagactaagtaggcccaagctcggcatccaaattttggcggttgccccggaaaggagaaagtagcgtttttttgttgctgagaactaaggatttgagtagacaagacatgtgcagattttgctataccccctgccaatacttgtgctgtggctgcccaggaaattttcctccttttttccatttccttcctggcaccaacgtgggagttgtacatagatgataattttttgcttgttaaatggacagataatagagcatggagtttaaaaaaaaaaaa

SEQ ID NO: 42526 - DNA, 266 bp, Setaria italica
  Peptide Sequence Number=SeqID_108500
tttctttctgatcctttaatggggaagatgaggaagcaccgtttaccaccaagcttaaatttgaagtcctttaatttagggccccctccagacataacaaatgctctgacatcagtaccagttaagggtgcacccataacctcaaggactgcagcagatgtattgagctttgtcatagccatccggtaaaccttgtcagggtttatggtcaaccttgcccgggcatacataccttggccatgccctcggagaggccgacgaaggtg

SEQ ID NO: 42527 - DNA, 1038 bp, Setaria italica
  Peptide Sequence Number=SeqID_108501
tgacgaagtaatccgcttttggagcagccaaaattattactttcttgaacacgctgtgaatggtgacgatgaatcgccaccgggaactcaatctcagacgcaatcttctctttgctgtgggaacactgattgctacattgtggagtgaagggaatggaaagcaggaaacaatgcacaaggtggaaaattggtacagttaatcgcgtcaagtagctttctccagattctcagcctcctcccgccgcctccgttcttcagcctcctcacgtaatctttcctcctcacgcttcaatgcttcggcttcctctcgctcagcctcctcacgctccctctgttcatcctcctcatcctccctttcatcaaggtaatcaaactccttctccgcagccatagcttttacgattgggtctcgcagctcggatatcaaacccccgcccaccttgtactcttgttcatcgccgatgaggaacaaccgttggtcaggccctgatgccattggtatgtcaacagctagtagcttcatgtcatactgtcccttttcttcttgacctcaacacttacgagaccttttctttctgatcctttaatggggaagatgaggaagcaccgtttaccaccaagcttaaatttgaagtcctttaatttagggccccctccagacataacaaatgctctgacatcagtaccagttaagggtgcacccataacctcaaggactgcagcagatgtattgagctttgtcatagccatccggtaaaccttgtcagggtttatggtcaaccttgcccgggcatacataccggcgaaggcgacaatggcggtggcgagggcgaggaagccgtacttggccatgccctcggagaggccgacgaaggtgctggcgatgccgaacatgatcctccacagcgcgacgcagacgatgacgccccggcgccgacgaggatcatgtagttgcgcctccagaaggcctcgacctgcagcccgacggcggaccggtaccgcgccgccgcgctcctcgccgcctccacgggccgccca

SEQ ID NO: 42528 - DNA, 491 bp, Setaria italica
  Peptide Sequence Number=SeqID_108502
ctgattgtggacatctcaaccttaccacttggataagaaaattttggtagtagctcatgtgttttagcaacgtttttctccaaagaagcactttgtttcctcggaattttgttctttcagctcatcactttcgcaacttgcatcagtgcttcttttataactagttaagctgatttcctgaccatggaatgcaggttccattgaaacagatgttcttgtttttttgtcaatggattctgtctcattttctgcagttcgttctacgttttcatccatactttgctctattttcccctccataacttcccgttgaattatattactgtgtaatttatgactcgagtaaaatgcaagatccaatggtgcctcatcatccatcccacttgggggccactctactagttctgaagtacctctgcaagtctcagcatcaacctgcatgccagcagactggtccaaatccttgtcctcagggcaaacaacagaaccag

SEQ ID NO: 42529 - DNA, 448 bp, Setaria italica
  Peptide Sequence Number=SeqID_108503
ttgttccttaaccgtttttctaagtaagtcttgtaattacgtaattaactcagaagatctgatgcaggtacagaagatgcgcaagcttctgtgctttccgaagcttccccaaaagcatcatggtcattccccaggtcaatcagcatagcctgttgagaaaacatacatgtttagcatggaaggtaagagaccgatacacgagccagatgtatggacctcttggtggtggccagtctcatgagaccctgatgaaggattatcagtatgtgcttcaaagaactgagtgctcataggacacatgtcatcaggagtgaagtcacttagcaattggcttctcacattatgcaactcggcatccatcatatttgcaatgttgttcatgattgtcgagactatgcattctcgagattgactttctgatacttctatttctgaaaggcctcagtgc

SEQ ID NO: 42530 - DNA, 477 bp, Setaria italica
  misc_feature (444)..(444): n is a, c, g, or t
  Peptide Sequence Number=SeqID_108504
tgcatcccggaacagcgacagcagctcgaagaggcggctgcgaatcaccacggagatgagcaggatgaagcaccgaaatctggatggagtgcagaaatggtaactgtggcaggtaaattcaggaagaaatgtggtggtaagtacttgtcgctgtacacagggacgccccagcactcgtcgtggaactgaacgtatgcctcatcagtgttcttggtgatccagctgcacctatgcatgctccccggctcactgcaatcgaaatcctcctcacccccttcaacgtcatggtcactggccttgtcgtcgtcctctctcctcatctccagagacaccatcacatcgccccaggggctgaaggtgccgccatagaggagcggcaccttgggctcccagctggagttggagctgctgagcgaggagtcgttggagttctgcgacagcganagcgacgacaatgtcaggttggagctgctcctc

SEQ ID NO: 42531 - DNA, 1469 bp, Setaria italica
  Peptide Sequence Number=SeqID_108505
tggggctacgcggcgacgttggtgatgccccaggagcgctcggcgaggcggacgcactccgggaagcggaagcagtcgacgaggtggtcgattgccatgccggcggcctgcatgaaggagtagacgatgacggggcccacgagtcggaacccccggcggacgaggtccttgctcaccgcctccgacttgggcgtccggaacgggatgtacttgtggtgcctgtacttgcccaccaccggccggtggttcacgtggccccacatgtacccgctgaacgacccgaattccttggccacctgcacgaacgcataccaattttgtctctcatgcatcgatcgcttcgagcttattttgcaaattttcaactttttttgaaaaaaatttcagggagaagatattttgcaattttttcttcaggtccatggactcgccttctgaatgcacttggcgttctcgacgatgcaccggacacggcactcggcgagcttgagctccttgttgccgcttatctcggcgacggcgtcctcgtccatcttggccaccgtgctggggtcgaagtcggcgaacacctccctgtacatgtctcgcctcttgagtatctccgtccagttgtggtcgatgagcatcccggacagcgacagcagctcgaagaggcggctgcgaatcaccacggagatgagcaggatgaagcaccgaaatctggatggagtgcagaaatggtaactgtggcaggtaaattcaggaagaaatgtggtggtaagtacttgtcgctgtacacagggacgccccagcactcgtcgtggaactgaacgtatgcctcatctgcacaatgggttaattttcagtcagacagtttttcctttttgttttgtttatatccttccattttttcatatgttcctgagtagtctattttgcacaacaaactacaccgaaccggggacaagtccctttcttatgcatttgtcagctgatctttattctcctttctctctatctcaccagcaagtgaccactgaaacttggtcaaatcagactatcactggtcagcgaagtcgacttcgccaactcttaaagaacaagtttgtcccattgtctatccaaacctcctttttcgttcagataaatttcctgatgaccaatctttttatattcactagttggtaaaaatttactttttaactactgtttctttgcgtcattcagttatccgaagacatacgcgtttctcctgtacacgaagaaaccatgtttcaaaaggtgaaaagcttacgatcattattcgaaactgttcctccagtagaaacatcatgctagtgcatgtgaaacaaatacatgaagatcagcgaatttcataccagtgttcttggtgatccagctgcacctatgcatgctccccggctcactgcaatcgaaatcctcctcacccccttcaacgtcatggtcactggcctttgttcgttcgttct

SEQ ID NO: 42532 - DNA, 1462 bp, Setaria italica
  Peptide Sequence Number=SeqID_108506
gagcagcctgaatttacatttgaatatttgattgaaaaaatttcttaacaaaaaaaccttattgttacacaaagctgtcacaggcctagtttagtaggaaatgattcctctgcactacttcagagtgattcggtgtcactagtgcatgggccatgatcgcacatgggctcattcgttagtggcacaagtcaccatgcaatactttactttagaggaggctcatccgctgcacttttaatgtgcaaagagaaaaaaataaaattattacatcataacttagcatactctacatatttcacacacacttcaaagcgttaccaaatcaaaaaaagtgtaaaaattttggagcgccgccgccgagcggctacgcggcgacgttggtgatgccccaggagcgctcggcgaggcggacgcactccgggaagcggaagcagtcgacgaggtggtcgattgccatgccggcggcctgcatgaaggagtagacgatgacggggcccacgagtcggaacccccggcggacgaggtccttgctcaccgcctccgacttgggcgtccggaacgggatgtacttgtggtgcctgtacttgcccaccaccggccggtggttcacgtggccccacatgtacccgctgaacgacccgaattccttggccaccttctgaatgcacttggcgttctcgacgatgcaccggacacggcactcggcgagcttgagctccttgttgccgcttatctcggcgacggcgtcctcgtccatcttggccaccgtgctggggtcgaagtcggcgaacacctccctgtacatgtctcgcctcttgagtatctccgtccagttgtggtcgatgagcatcccggacagcgacagcagctcgaagaggcggttgtcgctgtacacagggacgccccagcactcgtcgtggaactgaacgtatgcctcatcagtgttcttggtgatccagctgcacctatgcatgctccccggctcactgcaatcgaaatcctcctcacccccttcaacgtcatggtcactggccttgtcgtcgtcctctctcctcatctccagagacaccatcacatcgccccaggggctgaaggtgccgccatagaggagcggcaccttgggctcccagctggagttggagctgctgagcgaggagtcgttggagttctgcgacagcgacagcgacgacaatgtcaggttggagctgctcctctggattcccagagggtagatcctctgcatgtacttgctagtcgcattgttcatggcctgctggagcttcctgtcgaggttcttgatatggctgctagggctcttctcgaaggcatggtgctgccggctgtttgcggtggtgagcatcgtgctgccacgaggcaggaggcaggctggtgtttttggaggcaaactacgaagatggtttgaaacgaattaaagtaaacttaagtaaaagttaaacgtaaa

SEQ ID NO: 42533 - DNA, 530 bp, Setaria italica
  Peptide Sequence Number=SeqID_108507
aaaaaaatttccctctttgagggaaaaaaaggaattagattcggagcaatccgccattcgcgcactcctcgatcaacagttgggttaatgcatagtgagggctttggagttggaatttcccccggaggaatcggactcggaggaaggtttggggcttgggaggaagggaatgtcggcgcccatcgatcggttcgcgacgacaagagatgaaggtcatgcatgcagcgatgaaaagagagagtgcaattctgatgaagaaaactcagaaggagaaaggagggtcaaaaggggctctttcaagaagagagcgattactgcagggtataaatttaggcattccttaaggaggaagagtagaacgaagagtggcaaccatgtagtctccattgaagacatcagagatgttcaagagctggagactgttgaaaggttccgccggtgtttacttgatgagggcttgttgccagaacgtcatgatgattatcatacgatgttgaggttcctgaaagcaaggaaatttaatattgaga

SEQ ID NO: 42534 - DNA, 549 bp, Setaria italica
  Peptide Sequence Number=SeqID_108508
aattttattcttttcccttttctttttttcttttccattttttttctcttcttttttcgtgccttatcctgtcctcatccttcacgccaggctctgctccttactcctggtccactttcatcgttatccgcctgcccgggtggtgctgttgctaattcaccgccgcagttccattctcgcagccgggtgctgctgctgctccttcatcgctgcccctagattgcacccatgccgggcggcggggccacgctggtggctgacggagcgagcggatgcgctcaggccagccacgaggctgcgccgcgcctggccctcgcccttcttatccatcgccggccgcgcgccatgctacttccccgttgtgctctttctccaccgcgcaccgcatctctaccgccgccgcgcttccctggcatgtgccgttgacgagcaccgctcgggcaggggtattttttgccaaggatcacggaaggtgggggttgaagccgcggggagccccttttttcggcttcctctccgtcggaaggctcggagagcgggtttcgcggg

SEQ ID NO: 42535 - DNA, 305 bp, Setaria italica
  Peptide Sequence Number=SeqID_108509
aatggacgatggggtgaggaggacgagggagtggtcgccggcgtcgccgtcgctggtggtgcgcagacccaggcggacggtcagccgccgaccccaccgcgactgggatccctcctcgaggtccccctccttcgccgcccgcgaccacggccccaagccgtcggaggtgtacggcttcgtcggatccatcaccaccgtcatcgccaccgccgtctacctcgcctgggcctacacgccggagcccttcctccgctccctcggcgtcacctactaccctagcaagtactgggccttggcgtccatcg

SEQ ID NO: 42536 - DNA, 350 bp, Setaria italica
  Peptide Sequence Number=SeqID_108510
ccgtccaagggcttctggcgccctggcagtacaggttctcagtcatgatgattccgcttccatgccagatggtgccaaggactcgtgggtacacccaaagttgtgttgattcttctgatttctattacattgattcttctcatagtatagatatagatggttagaggacacgctgtagccccatatcaaggtgagtttcagagttccatatttccccaatttgtttactattttttattttttaccatctgatttacgtttggccatctgaatcagttagtggcttagtgctagcaaatatgtcaggtggattgtagaagatttttggggttatatttagctttaaattt

SEQ ID NO: 42537 - DNA, 595 bp, Setaria italica
  misc_feature (568)..(568): n is a, c, g, or t
  misc_feature (579)..(595): n is a, c, g, or t
  Peptide Sequence Number=SeqID_108511
ttgggtggacggggtggtacggtcggaggagtgggttttggcgtgggagtgtaggttggtggcttggcggcgggatcggccatggcgttggcggtgggtacggcaaaggtggcgggcttggaggcggaataggccacggcatcggcggtggctacgggaagggcggcggcggcggcggcttcggcaagggtttcggcttcggattcggcaacggtggcggtggcggcggaggcattggtgttggcggaggcattggtggccaccactgatagtgatacgtcggcacgcgttttctgcagttgtatcactcgaggtctcaagctctatctacatggtgtctcagatcgttagggattgtgagcgtttgcacctctgggttggattttgttgtgtacttgtgtgcgagtcctctttgtttggagaggtctgttcgtgcattatatcttgtcattaaattccggtgatggtgatactccaatcacaatatatgtacttactccgtgtaacgctccctgaatgattcgacgacgaatataaagcttgtttagttcctaaattacaaaaaaanaaaaaaaaaannnnnnnnnnnnnnnnn

SEQ ID NO: 42538 - DNA, 423 bp, Setaria italica
  Peptide Sequence Number=SeqID_108512
tttcttaaaactaaaagccaaatcattagctacactatctcagaaaaggtaccaataattgaaatggaataataacagctcaaaccaacaaataggcaaatagcacaatgagaaatgcaagctactaatattttagtaaaaaataaaatgaaaaattcagtcagtttcatttgtacagattgattggacttaagatgcaattattatgagtgcctgcctattatggggcattctcaaacatatacatgctatgctattgaatattaaatgattataccaagaacatatattcattgtacgctggatccaatgcacattcataaataagaatatgccatatctacatatgtggtattcagaggtcaacttcgtttacaaagcaaaagtgcactctgtaaagagtaaagactattgaagtttact

SEQ ID NO: 42539 - DNA, 702 bp, Setaria italica
  Peptide Sequence Number=SeqID_108513
gagagcccgaggctgagctcgacgtcgtccgagtcgccgccacccgcgcccccgggcgccgcgtcctctgcctgtggccgcgccccctcgcccccgcctcggacgccgccgccgccgaatgcgcccaggaagtccctggacgccattccctagccctcgccggacgcgggcagctactcccaaagcaaggaaggaaggaaggaaggaagcaacgagctccggcacgatcagaatcaggaatccatgctccggctgggcgggtgaaacaaatcggggagcaaacgaggtgagctcaagccccgacgggtcgctgctagcgaccacgacacatgccgccgaatctcccgagaacctgcgccgaatccgtgggcgagggcaccgaagaacaacagcagcgagcgaagggataggcggcccaggcagctagctagcccccccgcccgccccctcctcgcccaagagaatcgggggcggaagatatggtgacagtggcggattggaaagctagatggggggagcgaggagataagcccgggggcggggaagcaatcagatctctccgttccctctctctggcaggtggctgcagcttgcagggcagggacggggggtggtggtggaagggcgggattggtgagaggagacaggggggacgtggccgtccaatctgatggctcgctcgctttctttctgctgctcgtc

SEQ ID NO: 42540 - DNA, 339 bp, Setaria italica
  Peptide Sequence Number=SeqID_108514
ttatttacccgttctgctaattcatgtatgtttaaaccccagcaagtgccagtgcttggcttatgattccccttacttgcacatgttgatgctctagctaattgatagcattcagatgaaatttttcaagagtactttgtcccgttgcatgaactctggccagtaatattgcactgtactcccatgtatttactgagcctcctagtggtgggtcataaaatgttcttatcctgaacacagggaggactcacattcttttccctcgtctgttatgataatttgttataacaagttttcttctgttaacatgttttaatcatttcctgtccttctatgctc

SEQ ID NO: 42541 - DNA, 186 bp, Setaria italica
  Peptide Sequence Number=SeqID_108515
ttccagtaaactgggtattgttttgtagtaacacaaacataggttttctgctatgcttttcctctaggctgaagctctttgtagcacattccattttccctgctatatatatcaccacatgaatgaggcagggaaaatggaatgtgctacataggttttctgctatgcttttcctctaggctgaag

SEQ ID NO: 42542 - DNA, 444 bp, Setaria italica
  Peptide Sequence Number=SeqID_108516
actgtcaagttagcacaactgcatttactataatccaatatgctcaagttgtatcacctctggagcctatggccgcagggctggatccccgatcaatccaaaaaaaatcagaaacctgaatacttcaatcttctgttgcgccctgatataccagaatcgcttgacagcctaatccgcgggacagcacgactttggcctcccgtgcgcaggtcggtcctcaccagggctgccttgccgccgggatctgccgctccagatgaggtcgccagtacgggagcgtgctgccgccatgaagaaagaagggccgtcgccactcgcactgagggtagatacagacgcacgaatgcccggcagggggagggaggaggcagcggaggtcgccggtccagcaggtcgcgccgccgccgcacctagagatccatgtttgcagtcttgcagacgaac

SEQ ID NO: 42543 - DNA, 370 bp, Setaria italica
  Peptide Sequence Number=SeqID_108517
atttggagcttctctcgttttgttgcagctagctggccacagatattgaattcagatttcaaccgtgcctattagctgctccttagtgagcgcatcttgcccaggacttggcagaaggcctcatcacctgaaaaccgtgctctgcatgtactggttttcagcttggctggggcatttacgcaaacagagagcgtgcgtcatctctcatcctggtgtaagttgcactctggtgattaaaaattgccagtgatctgaaacaatttgggggaaattgatgcccaatccaatagcactcccaatcccttgtcggtaatcagatcgacggaaaaacacaatacaaatagatgcacagtaaaacaataaatcgaat

SEQ ID NO: 42544 - DNA, 281 bp, Setaria italica
  Peptide Sequence Number=SeqID_108518
ttttttttttttttgatcaagttactacaaagcaatacccagttaacgtagaattaccacaatggtgtcaagtatttacaacaaagacatttacagcaatggcataaaagttaacgtaaaatggtgtccagtttactagaatccaatacaccagatagaattacgactatgccttcagtaacggcctcacaaaatcacaggcaagtggcaagtgtactgtcatatactgagatgtaactcgttcactttgcttctgccttcctgaatcacctgggagcaaa

SEQ ID NO: 42545 - DNA, 476 bp, Setaria italica
  Peptide Sequence Number=SeqID_108519
tctaaggtccttgtcacgggataatataggcaacaacttactactgttaaatagtcattttcttgatgtgcattctgcaacaagaggtgttcctctgccatgactccaggatcccatttcaattctaactgcagaaagtaggtagaacagctcaaagtttgtcttaaagaaacaccaagtctaaaataaatggttggtaaattaggatatgatgtactgctctcaagttttatattttttaaatgctctattccacgttcaagctcctttcatttgcctcgagctattgcaatcaatgcatattcatgaagatcaaagattcaaatctggaggctaattgatgaatctaattggattgcaagagcatgtgtatgcattgaaccatttggatgttgtcgtgctgccattcgggttgcacccagcgttgccgtttgtgttgccatctgcactattagctgctcgttagactactcaca

SEQ ID NO: 42546 - DNA, 481 bp, Setaria italica
  Peptide Sequence Number=SeqID_108520
cgccattgtggtaaattgattatagcatgccattgtggcgcaatctagttactatactatatttctaaaaaaatggaccaattaccataacagcatgacccatttaccaggaactaattcgtaactactacggtggtgtcaactgtcaagttagcacaactgcatttactataatccaatatgctcgaccatgggagtatgatgtaagacaaatagacaatgattaaaaagatgtaatacaaaagtatggtataccatgacatatagattaaattgtatcacaagttatggctggaagcttgttggctggtgttcagtgagcggtaaatattaaaagagcagcacaaacctaaattgggctccttttccttaatatgtcatctagagcatggcaactggcaggtaccactttgatgctgttgttgatcacaagctcatttgcctaataaatctgctccacatacgtcactgagtcggtaga

SEQ ID NO: 42547 - DNA, 361 bp, Setaria italica
  Peptide Sequence Number=SeqID_108521
cgtgctgccattcgggttgcacccagcgttgccgtttgtgttgccatctgcactgcattgaacctattagctgctcgttagtgagcgcatcttgcccaggacttgccagaagacctcatcaccagaaaacttcataataacaaggagaatagttaaaaagtaagttcatttcacatctgtaacaagtgtttagatgcctaatagcatatatgcatgcagattaggcataaaccaatttaccaccaatttttatgagaatggcatcatcaattcaccacaaagtcatttaccaaattggaataatcaagttactataaaataatatcgagtttaattaaaatccccttgtaccagaactatg

SEQ ID NO: 42548 - DNA, 560 bp, Setaria italica
  Peptide Sequence Number=SeqID_108522
caaacaacttactactgttaaaatagtcattttctgatgtgcattctgcaacaagaggtgttcctctgccatgactccaggatcccatttcaattctaacatttggatgttgtcgtgctgccattcgggttgcacccagcgttgccgtttgtgttgccatctgcactgcattgaacctattagctgctcgttagtgagcgcatcttgcccaggacttgccagaagacctcatcaccagaaaacatgacatatagattaaattgtatcacaagttatggctggaagcttgttggctggtgttcagtgagcggtaaatattaaaagagcagcacaaacctaaattgggctccttttccttacaaaatcatctagagcatggcaactggcaggtaccactttgatgctgttgttgatcacaagctcatttgcctaataaatctgctcctgtgcctctgccttatgaggttgtctccctgtcactgttatttgtgctccagtgcctatctgcaatcgtaactcccaattcctcacgctactaatctgcaatcagtgattcactt

SEQ ID NO: 42549 - DNA, 532 bp, Setaria italica
  Peptide Sequence Number=SeqID_108523
cttactttagtttttttttttttttttttagttttaccttgtaaatgattcccaatttactagaatccaatatagtagaattaccacaatgggtaatctgtatagtcgattgttacggtaaaacattaacagaggatatggcatatatgaactacgacttgcttgaagtactgtacaataatttagaaaacattacacacatatatgtgtacatcagaattagagaatcaattggagcttctctcgttcagttgcatcaaggccagatgctgaactcagaattaatcaaccatgcctattagctgctcttaagtgagcgcatcttgcccataacttgccacaaggcctcatcacctgggcagataaatggcaaaaatatgaagaatcatgcagcgcataatgaattgacagcagccgagtagaaggaaactaacttgcaagcactaacacatagggatatttggtcctctattctgcaactttgaccacttccataccagtttcttcaaactgaataccctatactacaact

SEQ ID NO: 42550 - DNA, 968 bp, Setaria italica
  Peptide Sequence Number=SeqID_108524
tgttttacttaatttttactaactaattacttagttaaacaagttgtttagatggctaatagcatatatgcatgcagattaggcataaaccaatttaccactggcaaggggtcaacgaagctgctaatctagagctaatctgcttctaatccaaagggaatccgactaagtaaagtggatttttttgggtggctcaccacgcaccatggaaaagcgctaaaaaaattggacgaacagtgagcaaataagcgcacaagcaccaatgaaccatatgtatagtaacacaacaaaattgaacgtaaattactgactgtggcaggtgatttaccacaggtgccagggcacaaataatgacagcgatacaaaagtcagcataattgaattggtgtgtctgagaacaaaaaacattgctttcagaaaaagtgttgggtacacactgatttcagaaaaaagaagtatttactttgactaacaaccatcagcaaagatcaagatcgagccgactcatgtccagcagggagcttctagactctgttcacgggggtggtaagggttcagagcatagtgcaactacagaactgctaggctagggggaaaaatcaacacttaagtgcatcttgtcccacatgattacagattactgcaaagtatttaccaaaatagcgtcatccatttacctcaaactagttacgagaataacgtctacgatttacctcagtatgtactagaatactatcatcggtttaccacaaagtgtttaccagaaaagcgtcaccgatttaccacaaagtatttaccagtagcgttaataataccacaacggtatttaccataatagcttcatatatttaccacagagttattttgaaattctttcgtttataatcagggtccatataaaggaaaattactttaagaatagtctcttacacagttcaaagtcaaacaatatagcactcctaatccag

SEQ ID NO: 42551 - DNA, 974 bp, Setaria italica
  Peptide Sequence Number=SeqID_108525
acttaagtgagcgcatcatgcccagaacctgccagaaggtttcatcccctgcaaacctaaaaataacagggagattagtaaataatatgttcattgctaaaaatatgcagaaaccatgttgacgtaatgtattaaatttgaaataccaatgtcatttggttaggagaataacctaccagaactgcttgttacgaatccaagactttacatttaccataataaatctaccaattgtgatttccaagaatctatttaccataatttagtatcacgctacttatagaacccagatccagataaataaactacaaccctataacctggtattaatataattcaaaaaactagtaaatgatatggttaatttaccacataattgatcagtcaaaattacaataacacaacaatggcatacgtattttctgactatgatttgcgataaagaaagtgcttgacaactaaagaacatgagtccaagaaactactatggttaatttaccacataattacagtaacacaacaatggcagacgtaatttcttgactatgatttgacaaaggaagttcttgacaactaatgaacatgagtccatgaaactactataacattcagttccaacaatattaaaagtttactagtgaaatccacataagttgaatggtagtaaagtatttggttaatttaccgctgagcagggttggaagcctagtaaattacgagaattatttactatgaagcctgataatttactataagagcgataaatcatccaaaaaattatttgtacctaaaacctatgcagccagctggtacatagtgttcatagaaacagaggtctaacttgccaaaagtaacgtgctgaccagaatggtgctcgtcgtttttaagcacagtggctacactaattgaaaactgagaagtataatagaagttaataaggacatgagcaaattattgttacgtactattacttt

SEQ ID NO: 42552 - DNA, 907 bp, Setaria italica
  misc_feature (1)..(105): n is a, c, g, or t
  Peptide Sequence Number=SeqID_108526
nnnnnnnnnnnnnnnnnnnnnnnnnnnnnnnnnnnnnnnnnnnnnnnnnnnnnnnnnnnnnnnnnnnnnnnnnnnnnnnnnnnnnnnnnnnnnnnnnnnnnnnnnaccctagttaacgtagaattaccacaatggtgtcaagtatttacaacaaagacatttacagcaatggcataaaagttaacgtaaaaatggtgtccagtttactagaatccaatacaccagatagaattacgactatgccttcagtaacggcctcacaaaatcacaggcaagtggcaagtgtactgtcatatactgagatgtaactcgttcactttgcttctgccttcctgaatcacctgggagcaaatttcattttcccagccttactgatggggtggtatagcaggtaaacaacatttccagaatttgagaaaatcatttatttggagcttctctcgttttgttgcagctagctggccacagatattgaattcagatttcaaccgtgcctattagctgctccttagtgagcgcatcttgcccaggacttggcagaaggcctcatcacctgaaaactcaggatcctatctccgagatccaagggtacatcgatgacgcactggccgggaagcttgggctccgtgcgcttcacggcgaccgtcgcgaagagagtggcaggtagccgccgaggcgacgcagagccagcatgccgctgagccgccgctagggtcgccgcccgccggatcaccgctgctcccgctgacgaggggagcgcctccactgcctctccctaccgccaagatctgcatctccggcggcgaacgagcgagattttgggcggtggtggcggcagcggagaatattggggacgggggacggagctggataacgtggtggatgagccgcacggggaggggaagca

SEQ ID NO: 42553 - DNA, 997 bp, Setaria italica
  misc_feature (1)..(90): n is a, c, g, or t
  Peptide Sequence Number=SeqID_108527
nnnnnnnnnnnnnnnnnnnnnnnnnnnnnnnnnnnnnnnnnnnnnnnnnnnnnnnnnnnnnnnnnnnnnnnnnnnnnnnnnnnnnnnnnnaatccaatttactacactgcattcagtattgtaccagaactcatatgatgggttaccacaatgcagcagcatcgttttaccataacagtgaatcaatcgatacaaggtatttatcaacatggcgtgatcaagtgactataaaattgtgatggccagattactattaagtcaatataacggaagtacaataatgccttagaatgatgtaacacaaacataggttttctgctatgcttttcctctaggctgaagctctttgtagcacattccattttccctgcctcattcatgtggtgatatatatagcagggaaacagttctagtccttgtccaacgagacgctgtttgcagcacgtcgttggcatcttcaaatgcaccggcagctgcagagtgtttgtttgctgcatgctgcacgaaatattgaactcattcagttgaagctggtaggccagatattaaatctaccctgccggctacttaagtgagcgcatcatgcccagaacctgccagaaggtttcatcccctgcaaaccagaatcgcttgacagcctaatccgcgggacagcacgacctggcctcccgtgcgcgggtcggtcctcaccatggctgtcctgccgccgggatctgccgctccatacgaggtatgttgagaagaggaaaggggccccagccaggtcgttgccgggccgccgccgcttccacctggatctgacgccattgccggcaggcggcaacccgccccaaatgaggtcgccaaatcgggagggtgctgcaggcgcggaacggaggggcgtcgccgggccgttgttaggccgccgggactcctaccgacggcgtagcggcagcggagaagaaacagggcggcgactggtgcgtgcgggatggctgacgggaaggcagcggataag

SEQ ID NO: 42554 - DNA, 1228 bp, Setaria italica
  Peptide Sequence Number=SeqID_108528
ttttttgtctaccaggacagcttaatccatttccacgggacaagcttacatgcggctttccctttcgggaaaccccaagcacttagcacaaaccttgattaccttacaaaccgagggacgagctccaacggcctccctttattctagtggtggtagtacagaggtggagtaatacagcggtggattctaaagtatggtggctaattccttctctctcagagagtggtggtggaagtcttcatgagtggagtatgagtggaggtatgagtggtggagtgtgtcttcgtgattcttggtggtgatctggttgatgtcttcgtgtgattcttggtggtgattaactagccgagcggcagaccagtccttccatctgatcatgctggtaggcaccatgatggtggagagaaggcacaagggagctggagcactaccaatcagtgctgagtaggctgctctctgtacagatggtacccagaaattcgcaagaggcatcatcacctgtagtaattttttaaaaataagaacatagtaaataatatgatcatttagcaagcctgaaaagctggaactgcattcttgaattaaaaacaggcatgctggaaagagccacagttatgtccaaatttataatatgacagttgagaactggagatactaaggaaacaaattgtgataatcataagactgcggtaacaaaattaccagagacagatctctggcttgtcaatgacatactgataggagataagcattatttctgtgtaatgtgaatacactaatccattgataagtagattagaactataaggaaatttactagcaggaaattgttagtcagaaacaagttagttgagtggcagtactgataaatagacagtaggttatatgtttattttgatgcaaataatcagccatgtagataagatcaaggcctctgtgtgccccaagtccagtaagaaccttcttattgtcaatacatgttgaactagtgcatgcaagctatggtaaatgttcaggcagctagctaccaaattttaatgtcaaaattgcagtaacacaatgttgattgaaataattttttactatgatttatgagaaaaaaacattctgacaagttattaacaggaaaccatgaatttgccataacattgacaaggttccatcgtaattcaaaaatatagttttttgctacataagacccagattttagataaatcaaacactagta

SEQ ID NO: 42555 - DNA, 1423 bp, Setaria italica
  Peptide Sequence Number=SeqID_108529
ttggtagtctttcttcttcgtttttgtttaagactaggacccacagatattgaattcagatttcaaccgtgcctattagctgctccttagtgagcgcatcttgcccaggacttggcagaaggcctcatcacctgaaaacttcataataacgaggagaatagttaaaaagtacgttcatttcacatctgtaacaagtgtttagatggctaatagcatatatgcatgcagattaggcataaaccaatttaccactggcaagggtcaacgaagctgctaatctagaggtggattctatcgtatggtggctaattccttctctctcagagagtggtggtggaagtcttcatgagtggagtatgagtggaggtatgagtggtggagtgtgtcttcgtgattcttggtggtgatctggttgatgtcttcgtgtgattcttggtggtgattaactagccgagcggcagaccagtccttccatctgatcatgctggtaggcaccatgatggtggagagaaggcacaagggagctggagcactaccaatcagtgctgagtaggctgctctctgtacagatggtacccagaaattcgcaagaggcatcatcactgcatgagaaatgtctgaaaatgtactatatatcagtatcaggaggtaccgcaactttttgtcaagctgttccaggagaccatttactgtgtaagtcgaatggcaccagatgataatattttcaaaatggtgtcatcaatttaccacaaggtacttaccagaatagcgtcatcaatttaccacaaagtacctaccggaatatcgtcatcaacttaccaaaaaggtatttacaaaaagaatttcatctgagggctgtcaaaaatgggattcttgagcgtacgagcaaagacctgcatgacgcagccttcaacctcatctgtagttcaggtttgaactcttttcttgctcccgctgcagacctgcacagagaaacgaatgaactatgctctgcccgtgctggtcttcagctttgctggggtatttatgcaagcacagagcgtgcattatcattcaccccttggttaatcgtgcctgggcgacttgcagccacgctgaggatgcccgcggccacggggcgccaccgtccctgtcgtatgtcttcctgtctcagggcgatggaatccggcgacggaagcagcgacggaagacggaagcgggggatccggtgacgacggacgccggcgacggaagcgggggatccagtggcgacggaagcgggggatctggtggcgatggaaaaaggtcgcgaggtctgagaacatggaattgggcgcaatttcgggcggtgctcggctcgctcccacctcaaagccgagcagacaggcgagccgtggatgtggggagcgggaaggcgagccgtgcgggaactggagctccgaag

SEQ ID NO: 42556 - DNA, 1621 bp, Setaria italica
  Peptide Sequence Number=SeqID_108530
ccttggcagtctcttttttagtttttttttttagcagtaaacccaccggctgtaatttgaataccagttcacttgtatgtttgaaaatcagtaattcattgttctcagacgaaaaacagagagagcaacaattttccaagtgccatggcatacaaacatgacaactaaccaacatgcctagtgtggttcgttccgtagctagaggccctaattctggcaaccctgaagggaaccctcagcacaaatttacagaaatggcagcaatgctcaaagagaaaccactccacaatcagacacttggcatggaagcgcaaacgacgacgtaggccaggtactgcagggcatcttgtagcttgctgacagcgctagtctgatcggaattcagatggttggatatggacttagctttctcctgcactgacttctgacttgggagatcatcctgcttgtcagcgagagcattttgtatagctgccgcataagcttcagccacatccgagattcctgtagcaaaactagtagagaccttttccatatccacagagatggactgcaccttccatctgattgttttagcttttgaaatgggatcttcaggccaatctatcttaacgtcattttcatcatcttcattctttgatttgttggcagcagatattactgactttcctaggaccagaagctgagaaactgcaaggcagcacatctctgatagtctatgaacaccctctgagtgaatggtctctagcctattggtagttcgtttgataatatcatttggagaaagcccacccaaggcagtggcgaaccctgcagccatcttagcagccttgctaacacttgtttcacataacttcttcatctcagcatcagcatcagtatcagctgattcaatcttcttccctttgtcagagtctggtccatcttcctcggcattggtgctaagactaaatatctgttgtatttctttgagctttccatcataatatgttttctgctcagcactaagttttccctttttcctattaaacaacagtgcatagtggcttgatagtgcttccagctcctctaattgatcaggtcctccataaatatagaagcatctgtcaaatgagacttcttcaaactgctcctcttctgtctgttggtcaccttcaccggcactacctttgtcaacttccataccagtttcttcaacaataaactccattgtctcctttccaacacgttcaagcacttccatacctcttgctgtaaatgacctccctgtctctaaaatggtcggtgctataacagatgctttggcaggtagttctccttgctgaatggtttcagcaaggcttgaagctgagttctccaatttttgaacaaatagtgagccactcttccatgcagtcccaagtgcttgccaagtaccggtcgtgatggtctccaccgagctatcaaaggccttcagcccctggcccaggattgagtcctcactggccttctccagcttttccagagccgccttgcgtctctcctcctcctcctccccctccggttccttctccttatccttctccccgctgtcgggtcccgtgtcctgctcaggcggctgctgaatgtcggcggtcgtcac

SEQ ID NO: 42557 - DNA, 2825 bp, Setaria italica
  Peptide Sequence Number=SeqID_108531
cttctctcgttcagttgcatcaaggccagatgctgaactcagattaaaccaaccatgcctattagctgctcttagttgaagcgcatcttgcccataacttgccacaaggcctcatcacctgaaaacttcataacaaggagaatagtaaacaaatatattcatttcatatctgtaacaagtgtttagatgattgagagcaaatatgcatgcagattaggcatacatcaatacctgggcagataaattgcaaaaatatgaagaatcatgcagcgcataatgaattgacagcagccgagtagaaggaaactaacttgcaagcactaacacatagggatatttggtcctctattctgcaactgaaaacagagcagctgaaagatcttaatactgaatatactatactacaactgaaaaccagagcagctagaaaagcaaacaatgctaattatacccataaaaattctcatacactactaccattttgtatggtcttgtgtcttggatttgtggaaaaccaaatttacaataactaaatagcatgaaacaacacatctactataatatctttgcagttattggaagctatggcggatatctttttgttaatagggatcgcaagctccttactacaggactgctgaacaaatcatttttcaatctgcaagggtgaaaaatcaaaactgttactttgaaaaaagtgaggacattgataagacagccatgcttgtttgaatttaccacaatgacatcatcaatttactagaatggttaggttaatggcttggcaaattttacgagaatggcatcattaattaaccacaaggtcatttactgaaaacagaggagctgcaagactaatgttgtagtagtccaagaaactactatggttaatttaccacataattgatcagccaattacagtaacacaacaatggcagacctaattttctgactatgatttgacaaaggaagttcttgacaactaatgaacatgagtccatgaaactactacaacattcagttccaacttactagtgaaatccacataagtcgaatggtagtaaagtatttggttaatttaccgctgtgcagggttggagggctagtaaattacgagaattatttactatgaaccctgataatttactataacagcgataaatcatccaaaaattatttgtacctaaaacctatgcagccagctggtaaatggtgttcatagaaagagaggtctaacttgctaaaaataacgtggtgaccagaatggtgctcgtcattttttagccacagtggctacactaattgaaaactgagaagtataatagaagttaataaggacacaagcacatatgtacggcataattcatgggtcaaaattgcagtaacacaatgttgattgaaataattttttaactacgattaatgagaaaaaacattatgataagttattaacaggaaaccatgaatttgccataacattgacaaggtcccatcgtaattcaaaaaaatagttttgtgctacataagacccagattttagataaatcaaacactactctaaaacctggtgaaataggcatacttaaaaaatagtaaattatatggtgattttaccgctaccaagggtcaacgaagctgctaatctagaggtaatctgcttctaatccaaagggaatctgatcttagtaaagtggattttttgggtggctcaccacgcaccatggaaaagcgctaaaaaattggacgaacagtgagcaaataaggtcacgagcaccaatgaaccacatatgtagtaacacaacaaaattgaacataacttactgacagtgatttatgagaaacccacttcctgataagtaattaacataaacctacgaatttactataacatcgaccaagttccaacatttcacaaatttagtagtaattcaatcacaactccaatgtatttagtagtaatgtatttagtaatataattcaaaaactagtaaatgatatggttaatttaccacataattgatcagtcaaaattacagtagcacaacaattgtagacgtaattttctgactatgatttgcgataaagatagtaaagtatttggttccaacaatattaaaagtttactagtgaaatccacataagtcgaaaggtagtaaagtatttggttaatttaccacagtgcagggtcaatggaggcctagtaaattacgagaattatttactatgaagcctaataatttactataagagtgataaatcatccaaaaaattatttgtaactgctatgtcaaaaccaagcctagttgcaaccattctgtaacttatattcagcctagaccattggagaaaagaacagctatctattatcatgatgagagaaattaacaactgtcataaaacgtaacaggaaatatatgaaactgtcaaacagctcctcttctgtctgctggtcaccttcaccggcactacctttgtcaacttccataccagtttcttcaacaataaactccattgtctcctttccaatacgttcaagcacttccatacctcttgctgtaaatgacttccctgtctctaaaatggtcggtgctataacagatgcttttgcaggtagttctccttgctgaatggtttcagcaaggcttgaagctaagttctccaatctaggaaaatatcagagataaatacacagagcaaacatgttacttctccaagcaaaggagagacacttgcaggtttattcttactgaagacattgttgatattccagcattaatgatgtgtcaggaacgttaacatgatagttgatgcttgaactgagaaaa

SEQ ID NO: 42558 - DNA, 557 bp, Setaria italica
  Peptide Sequence Number=SeqID_108532
cgccagtactcctatagctgtatttgggagatggaatgacttctcctgcagaagggcggtatcccttgattttcttttagttggcagtgttaggaccttatcagactcctccatatgtgctcaacccgagaagatcctacagcatgatggctagccaaaggatatgtgcctcatattctagaccacaaatctgcgatgcttgtaaaattgtcagatttgtctcactttgtggactgcaatgcctcaaaagtggcttgacttgcaagttccgatatttcgctgaatttccccttcctcatcaattctttgtcaaaaatagcatcagataacaccactgcggatgcccctgcttccacataccccttgattgaacctatttggattccttgagaagcaaccatcggtacaagaggaaatggtttcttcagagcagacatgtacacctctccacccatcactgacactgggtacaccttaacgacttttgcgccagcactgcaggcagataaaacttcagttggtgtcaggactccagggatgtatagaaccttactttc

SEQ ID NO: 42559 - DNA, 254 bp, Setaria italica
  Peptide Sequence Number=SeqID_108533
tcgagcgccagcccgacaccgtacgccatggctcggaagtacactgggtacagcttgctctgcagcatgcccagctgctgcctcggcagcgccgccgcgagcacgtagctggacacgaacgtcacccacacgcaggtgccgtaggcggtggcgaggcccaggaggtgcatcacggccgtcgcgacgcgcgcggcctcccgtggccccccaccggcgaggaagaggtacgccgcggcgtcggaagccacgccgcg

SEQ ID NO: 42560 - DNA, 1055 bp, Setaria italica
  misc_feature (933)..(933): n is a, c, g, or t
  Peptide Sequence Number=SeqID_108534
tgaacagaaccagctgagtggtgagccttggacatcaagggacttaaggattacatagaatagctatgcaatggactcaatgatgctaatgctgttgtgcttcgcaccatctctcatggagatctctagagccttctccagcctggacacaacttgctccatggatggccgctgcttcttgtggccagtgcatgacagagcaagcttcaaactgagatcaaatgcatctgttgagtactctccattcagcctaggatcagcaaactccaatacattgccatcttggataagcgtagaagcctgggaacgaccaatacacagattcagctcaatcaattacttcatcatcccataatgagctgcaggagcaccatgcccaagctgtacacatcccctgcagcattcaccttgtggttgtggcggtattctggatcgacatagccaaaggttcctctgacttcagagcttacatgtgacacacctaggtcgatgacttttgagagtccaaaatctgacagcttgggttccatattaacccccaagaagtatattggtcggctgtcatagcaattagcaagtatgagtctgactaaatgtgaatctacagatgcactgaagcatttcagatcatgcaacaaaccttgatgtctcggtgaacaatgcagccttcaggatatatgtgcaggaaccaaaggccgcaagcgcttccgagcgctatctgaagcctctgaatccacgaaaggttcttatcttttcctgcaattaaattattgttttcttcattgaagcaaatgaagtatatactcctagagttctagccatcatgctaaatgtgtgtcatcctagtactcaccaaataaccattctgatagattaccgttgacgcacagctcatacacaagaaagcactcctcccgcccatcacagtaaccncttaaatgacaccagattcgggtgcctgacatgtgacaagcttgtaacttccttacggaaggttctgcatgctcattcttaacgtatgtgtttcactgcaacaggccagccatttgcaagca

SEQ ID NO: 42561 - DNA, 359 bp, Setaria italica
  Peptide Sequence Number=SeqID_108535
catgatcactaacagcacaaaaattactgggctgaataatctacaccttcatctgcaaactctttgtcaacataatttacgatatgtaacagagactcgtcatcatcataattagcagaggaatcagcctctgaatttggtgaaactaccactccagatgttaaatccttgaacacaccaacggatttccctccatgcagatcatgcaagcccgaagcttccattaccctaatatcctggtcagcaagctgaatagttgggtccgaatcatcttgaggaactttatctggcgagttcagcacagccgactgctctaactcacctgacatgaaaatgcgagattttcatggatttaacta

SEQ ID NO: 42562 - DNA, 1762 bp, Setaria italica
  misc_feature (1668)..(1762): n is a, c, g, or t
  Peptide Sequence Number=SeqID_108536
agagagagagagagagagctacctgctgcgacctcgagtatcatttcgtgaacacacaaagagttctgattcactgaacaagtgcagtggtcaagatgcctgcactgagaatgaagaggatgctcgaagatactgattttgctaacgagttcaacaccaagaccgttaaatccatgaaaatctcgcattttcatgtcagtgagttagagcagtcggctgtgctgaactcgccagataaagttcctcaagatgattcggacccaactattcagcttgctgaccaggatattagggtaatggaagcttcgggcttgcatgatctgcatggagggaaatccgttggtgtgttcaaggatttaacatctggagtggtagtttcaccaaattcagaggctgattcctctgctaattatgatgatgacgagtctctgttacatatcgtaaattatgttgacaaagagtttgcagatgaaggtgtagattattcagcccagaatttttgtgctgttagtgatcatgaggcaagctggggtccaaatcagtgttgcagcctgctggatatttacagcccagatggcgatttccatttcttgctggataatccagctgatcttctgcctagttatactggactatgtgaagagtttgtatcaattgatgcattcatgaacacgagcagcagatgtggctcgttcccacttattgagagtgtgacagaagccagtattgataataagccatgctcacctgaggttgatttgtgctttagtaactcagatgtgttggagtggcttaatccgcacctatctgaggaagatttaccagatcttgttgattttgccgagttgaattcaaatgctattcctgcaacaaaagagcaagggaccaggaaggtcactcttgtccttgatttggatgaaacacttgttcattcaactatggagcaatgtgatgatgctgatttcacttttcctgtgttctgtgatatgaaagagcatgtggtatatgtgaaaaagagaccacatgtggacatgttcctccaaaagatggtggagatgtttgatgtagtgatattcacagccagccaaagtgtttatgcaaaccagttgctggacatgctagatccagagaataaacttttctccaagcgatttttccgggaatcatgtctattcacagacagcagctacacaaaagatctgaccgttgttggagttgaccttgcgaaggttgccataattgacaacactccacaggttttccagctccaagtgaacaatggtataccaatagagagttggtataacaaccctgcagacgaggcgctacctcagttgatccctttcctggagactcttgctgtcgcggatgacgtccggcctatcattgccaagaagtttggcaacataatagatagttgctgaagtttttgaataagttttagggttagtcttgtttgctcacatagtggaacagaaaactacatgacatgttaacaggactagttgggacttgatttttctctttacaacaagttggtttcataggatgaagagtcttggcacggggcaatttcttagaactgtacatatccacaattttggttctttttgactttgtacatagaatgctaatggaaatgaaagactgaaagtgaatctccttggnnnnnnnnnnnnnnnnnnnnnnnnnnnnnnnnnnnnnnnnnnnnnnnnnnnnnnnnnnnnnnnnnnnnnnnnnnnnnnnnnnnnnnnnnnnnnnn

SEQ ID NO: 42563 - DNA, 1286 bp, Setaria italica
  misc_feature (826)..(826): n is a, c, g, or t
  Peptide Sequence Number=SeqID_108537
tgactgttgctgggatttggcactcatcaccaattagaacagcatgctttaaggttcgcaaccgcagagggatcagcgtttcacattctttcagctgggcagcctcatcaatgacaagcaactcaagttttttgttggttattacttttgacgagctagatacagtacagaaaattatggaagcattttcggtacaaaaatcacgaatgacacgttttgaggatgttagaggaagtttcaagcagcttaatagcgtgttcagttgctcaaggcattttaacctcgctttgccaagagtgattacgctagagtttctggaatcgggttcaccattattatacatgaaaacttccttaacttcatccccaatatacctccgctgaaacatgctgttgaaatctccaagcatttcgagaattgaaaggatattgttgtagttcacttccaagatactagatttcgggacatgaaacaataattctttgaaacatcttctaaggtatgtataaataatggtaaatctttttctgatgtaagagaaaaaggaaggcttgtcaccttccttttggtcttgtagatattggaggtattgggaataaccattctgaaaaagatcagacagggaagataggagatgtctccatccagtcattggtgcaaagcagccaagaagcttccttacacggtcgtgtaaatatatctctttgagatcaccatcaacacacatgcgttgtttattgccaatcaatagaacatctcccaagcagcttgtatcaaaagaacgctctttgatcaatctcgagaaacgtgaagcgacttgtttaanggcaaggttagttggagcacaggcgagtgtaccatgtttcatttctctcattaaccatagtagcacactgattgtttttgtctttcctgtgccaggaggaccccagataaggctaaaactgctgctgttgcgatgtattttggaaatacaattcagtacagcatcgttctgagaattgttaaggtccattgtagacaacttggtccatatgtccatgctgtcaaaagaagcagcatcctctgttctttcctgacgaatatctgggaccggcggataatgtaccatctcctgaataaggccccgatttcttctgaatacttcatagtcaaggcaacgccatattcggatgtatgtcacaatgttgagcaaataagcagcaaaaagtggcttgatttttccctcttgacacttctcattggcagcatcaattatgcccgatgatatgatcacatacttagat

SEQ ID NO: 42564 - DNA, 1381 bp, Setaria italica
  Peptide Sequence Number=SeqID_108538
ttaaagcggagacacctttggagtcgctccctcaggccccagcgaggtgatctccttcatccaagtggcgacctgcgccatctgtggtctcttcttcggatccagctcaatgcaggacctcgcaacctcgcacaatgcacgcgcagcttcttcggggaacgagctcaggcttgagtccatcagctccgcaagacacatgttaccatcgaagtagtgtgatgcccactgctccagtgacccgtcttcctcacagtagggaacttttccggttaatatctccagcaatattataccaaactgatgcacgataccatctatgtctgaaattgtggagtcatcagtggctaagctggaattggatttcaatcccttggtgtcactccagaaatcaaggtccgagacctttgcagcaaaatcatcagtgaggtatatagtactcgagtcaaaattccttggcacaataggtggattcatctgctgcatgtgctctagacaataagctatccccatcgataccctaagccgcgtcgtccagtccaggttctcagcctctctaacatgcagatgctcaaaaagtgttccatttggagcatattcaaagaccattgctctagtaaaaggatgatcttcctcacaatacccaagcagattcatgaaattcttgtggctaactttggatagagttgtaatcttcttcctgaagtgggattcacattcttttgaccaatccttgacggatgttattgagctcgacacaactgctatctcaactccactcgataatgttcccttgtacagcatgcagctagacgtagaaccaactatattgctaaagtcctcacaggctgcttgcagctcggatcgtttcaatgcaggtacacctgtcacaaatgctcgttgcagttgcccgcttaatcctgtagcccacggcctgacactgccaactttcttagctcgacagtacatcacagaagctgctgccatgacaagaaaaactgcgctccctgcagttactatcctgtagtttctccatgaatgcttgtgcggtggaggggaaggcaaagtactaagtggttctgaaggggctgccagtggatgaaatcctggagatattgcaggtatagaagcagatggtgatggcgaggctcgaggtggagcattgagtggtgagggtgatggagcaggcactggtgatagtttttgcgggcttttatgatgcttgtgccgcttcttgtgaataggaggaggtgcttggagaaatgcagtatatttatcaccaatgtgcagtaatcttctagcatgcccatttatgaggtttccaagatgatgagcagtaggtagtatggtgctgctgctgctgcttcagccgtcggcaccgatt

SEQ ID NO: 42565 - DNA, 522 bp, Setaria italica
  Peptide Sequence Number=SeqID_108539
tttaaggttagcaagaacctgacctgcacaaaccagggttaccctcaaaacttgagttggagaaggtgaggaactgccctccatttgggatctgccccaccaagtgattgtgagccacactgaactttgacaagaaggtgagctctgtcagggacgatggaattgatccactgagattattggatgaaagatcaagaacctccaaattctccatcctggacaatgcatcaggaatgctcccagatatgaaattgttgctcagatccagcacatgtagctccctcaagtttccaaactcaggccagatagtcccgttcaggccgttgtcatttagaaacaatgatggcgggaagttggagagctggttgtattgccgaccacttgtgctcctgttgtgcttcacatacagcggcatgctagtaaacgccatacccggtgactgcctggaagtgacaaggctcttcagctgtgtcaagctcttgggtatcccaccgaccaaggtattgtttgagagatccaagt

SEQ ID NO: 42566 - DNA, 430 bp, Setaria italica
  Peptide Sequence Number=SeqID_108540
acctacggagtaggtagggaaggactaaccctatctagcctctatatcttcttaagaatatataattaataaataaaatagcaaaaaaatatttttgatgaaatgtatatgaactgtacctcatcattacacgacaaaacctgagcaacagtatgtgttcatgattcaagttcgattattttggttgcacgcatcgtggatgaagccatctttgttttttcccaaaattttatttcagatctgtggagtaatgtactgtacaacacatgaaaaacacttcctccgtcctaaattattattcattttagctttttttagatagatcaattttactatacatctagacataagtttatatctaggtgcatatcaaaatgtgtatctaaacgaatagtaatttgggatggggggagtaagtaggcagttttat

SEQ ID NO: 42567 - DNA, 805 bp, Setaria italica
  Peptide Sequence Number=SeqID_108541
aatttaaaagtaaggacctactttagatacttttggcaaaacaaacccctcagccaaaaagccttgcatgtcaaagagtcggtggagtagttaccacctaacgggtaagccttgttgagtattagtatactcagtcttgcttgtggattcgtttttaggtgtggttgctggtgttgacttgtttgggacccgtcctcggtcggcgaggatcgtggtgcttgatatcatggcaggcttcaccatggtattttgtatcgacattagactatcatttacttttccgttgcttttgaaatttgaactctacctttatgcttttgaactcttggttgtaataaatgaagttgggacctgtattaatcaacttggattgttgtaatatctggacttgcctttgtgtgagtatactttgttttgattcgagagaagtggttttatcaggtgaaacccgacggaccgccattttaacttgattaaagtgtcggttcgcatataaggcaatgttgagtacactttagccgggttaatctaggtggtttctccacaataaggcctgggcatgctcatgcacggcggatgtggaggcggttgcacggcaaactcagaggcgaatccgagttcattgcgcgtggtggctggagttaggggatgacgggcagggcctgactgccagcgggagagatgcggaggtgtaggagtgggctggcgcaaggagatgggccgagctagagatgggccggcacgacggcacgctaaggcgggagctggcggttgttgggctgaaaggagaacgggagaacggaaa

SEQ ID NO: 42568 - DNA, 1920 bp, Setaria italica
  Peptide Sequence Number=SeqID_108542
ttttttttttttttatcaatcaagcttcaagctttattcagccttatagatagctgcagcaaacagcaaagacgttattctagctcaacagcgatgccaacaaagcacgcttgcactcagagcttgcacggtgacgcacctccgggatggtgcacgacgatgaggttatacgcgtccagcgtcaggaagtcgtccagctccggcgcggtgcactgccggccgaagatcctcccggcctcggcgtaccgcccctgccggaacctctcggtgcccacctccgcctccaccctggccatctcctcctcgaggacgcgcgccagcagctccggcgtggcgcgcaccgggacgccggccgcgtccagctccgcgccgtgccgcagccactgccagttctggacgcggctgatctccgcggtggccgcgtcctccatcaggttgtagagcggcacggagcccgacccggatagccacgccgcgaggtactgcacgcccacgcgggtgttgagccgcagcccgtccaccgtgcgcgcgccccgcggcggctggatgaggtcctccgccgtgatgccggcgcccgtcgcctcctcctgccccgcggcgccggcgatctggttcggcttcccgccaaggtggccctcgaagacctcccggatcgctgggatgagccccgggtgcgccgcccacgtgccgtcgtgccccgcgcgcacctcccgcagcttgtccttgcgcaccagctccagcgccgcctcgttcgccgccgcgtcgtccttgatcgggatctgagccgccatgccgcccatggcgtggacgccgcgacggtggcaggtgcggatgaggaggtgggagtaggagcgcatgaagtgctgggccatgccgacgagggcgcggtcggggaggaggcggtccgggtgggcgcggaacgtcttgacgtagctgaagatgtagtcccagcggccgcagttgagccccgccgagtggtcgcgcagctcgtacaggatctcgtccatctggaacgctgccggcagcgtctccacgagcaccgtcgcccgtatgcttcccctctcgatcccggccgcctgctccgccctctcgaacacgccgttccatatcctcgcttccctggagtgctccatcttggggaggtagaagaaggggccgaacccggcgccctggccggcgcggaaggcggcgtggttgtggaagaagtagaggccgaagtcgacgaggcaaccgatggccggctcgccgtcgatgaggacgtgcgcctcggggaggtgccaaccgcggggccggacgaagagcttggctgtccggtcgttgagcttgtactcccggccgcgcgccgcgtcgcggaagctgatggtgccggccacggcgtcccgcaggttcacctgcccgtgcatcaggttctcccacgtcggcgacagtgcgtcctcgaagtcagccatgaagaccttggcgccggagttgagcgcgttgatgaccatcttccggggctcggcggggcccgtgatctcgacggtgcggtccgcgacggccggcggcacgggcgcgcacttccatcccccctcccggacggacctcgtggccgggtcgaaccgcggcagctcgccggcgtcgtaccgccgctgggcctcccgccgctgctccatggcgtaccggacggcgccgcggaactcgcgctggagcgccgccacgaaggccagcgcgtcgcgggtcaggacggacgcgaacgccgggtcgtaccggccccggacgtccacgccctccggcgcgtcgtagcatggcgccgccgccgccgccgccgccgccgtgacgcttgcacacatcgaagcgtcgggcgttcgcgtgcgtggcgtgaacagaacaagtacagggcgctctggtgtggcagtgggaagagtgtgcagctcgagctcg

SEQ ID NO: 42569 - DNA, 604 bp, Setaria italica
  misc_feature (487)..(487): n is a, c, g, or t
  Peptide Sequence Number=SeqID_108543
tttaccggggtatataggggaacaatagaatggtgtcaaaagtatgggcgaaagaatatttaaccttccctttgtttttatcaaatcagttcaatttcatctatacccctagatagtgcaaacagtaatgagcatcaataagttgaatgtcatttggattgttatatttttcaaagatgtgcctcaataagctagagaaaggaccacaaatcagatgaaaagacactattcaacaacaggacctctgctaagacatgttgacaatagtaagtgctgactattctaatccccaacacgctaaacagataaagatgcataaagtgggattgggtaaatgtcttgaggaaagtgcaatgattgacagaatggaagtttgtagcaagcccctattaagaaagagagtatgattacataaaagggtaaaaatgatcaagaaattactaaaggcaactttatagctgttgaaagttgcagatgtccattttangccttcccgaactccgacacctctctgctgaagttcccaaattagaaacttacgatgacaaaaaagggagagaataacagcgtgactggttactcatgttaacgagattgggagaga

SEQ ID NO: 42570 - DNA, 454 bp, Setaria italica
  Peptide Sequence Number=SeqID_108544
acttaatacataattagtagcatcaaggactgtttgttttctgtttgcaagcttgttatatcctggtcaaatcaacatctgagagattgaacaatgacagaggtgcagcaatagaaatgcaagaaattagagatgagacattcgtacctcatactttcctgttagcttgagagaataaaaagacatggccagtgtgtggcttactgatatatttagagttcctgggtatcggtggacaaacctttgaagatcttgaatcttgattatcacaccagcaaaaagcatataaatgacttgagatatttgttatgcatacctgattgtcaatgagcatacttttaaaaacaactcaagggcttaggcattatgtaaactgctaggttggaatgcatcaatcacctccatggtgtgggccagcctaggatgcatggcttatcatccatatgtattgttc

SEQ ID NO: 42571 - DNA, 1321 bp, Setaria italica
  Peptide Sequence Number=SeqID_108545
acagcacgttggaatcgaaggctttctgttactgttgacagtgatgatgaatttgacagtgagcatgatgatcgccctgcattgtctgctgctgtccttgctgcacatgctagaaatgcccttcgcgcaccttcattgcagactctcctagaagatattcccgtgactcctgcaatttcccgcacggcatcatcaactggtgactcagatggaaaaagtaaatctggagataagagctcaactaggaagctgaagcatgatgtcatcgcagccattggtgatcttattgatgagattgactcatgctacgaaccgatttctgagcaagctgtggaacttattcaccaaaatgaggtaatcctgactctaggccgttctagaactgtcaaggagttcttgtatgctgcgaaagagaagaagcgatcttttcgtgtatttgttgctgaaggtgctccaagatatcagggccatgttcttgcaaaagagttggttgagaaaggtgtacaaactacagttataatagactcagcagtttttgctatgatctctcgagttaacatggtcatagttggagcacatgctataatggcaaatggtggagtgattgcaccagttgggatgaacatggttgcacttgctgctcaaaggcatgctgtgccctttgttgtggttgctggtagccacaagctgtgtcctttgtatccacacaacccagaggtgttactgaatgaacttaagtcgccatctgatttgcttgacttcggcgagttctcagattgcatgaatttcagtactcaggatggcagccccctactaaatgttgtcaatccgacatttgactatgtgccaccgaagcttgtgagcctatttgtcactgatactgggggccacagtccatcttatatgtaccggctcattgctgagtactactcagcagatgatctcgtagtgcaacggaagtcaacagcatgaaggaacacaaaagcattcaacttcgtgttctgaagagctagagatgttcggattcggttactgtcaaactgagggaaatcaatgcaagcattctccttgcggtacctgtaatggttgcggcgttttgggtgtaaactgttgaggaaatgtggatgtgatgaattgttttgactacagaagatacaaatgtatgattgatgtagagggtggctgttccatatccgtgcatcctggtctgggacagtccaaattttgcctgttctaaattccagctgtttcatgtgtatgaagtattcgaatacacactaacggaatttgctgagctatttttcattctttttttaaatga

SEQ ID NO: 42572 - DNA, 1538 bp, Setaria italica
  Peptide Sequence Number=SeqID_108546
cggcgcggggctgagctgcggaagcgaggtagcggcggcgtttggttcgggcggtgcactgggctcggggatcggccgcgcgggccggaggaggaggattatggcgcaggccgaggaggcgcgggcgccgctgctgctggacgaggaggcgggcggcgagtggagctccaggccgcgccgcattgctctcttcgtcgagccgtcgcccttcgcttacatctcggggtacaagaaccggttccagaacttcatcaagcatctacgagagatgggcgatgaggtgttggtggtgaccacacacaagggagctcccgaggagttccatggagcaaaggtcattggctcgtggagctttccatgtccattgtaccaaaatgtcccactttcgctggcactgagtcccagaatattttctgaggtgaataagttcaagccagacataattcatgctacttcacctggaattatggttattggtgctcttgctatagcgaagatgatatcagttcctatggtgatgtcttatcatacacatcttccagcgtacataccgagatacaatttaaattggttacttgagcccacatggagttttataagatgcctccacagagctgcagatcttactctagttccttcagtagctattgccgaagactttgaaactgctaaagtagtaccagcaaacagaatacggctttggaacaagggtgtcgactccgaaagctttcatactaaatatcgaaggcatgaaatgcgtgtcagattgagtggtggcgagccagaaaaaccattgataatacatgtgggccgttttggacgtgagaaaaatttggattttctgaaaagggctatggagaggctccctggatcaagaattgcttttgttggagatggaccatacagggctgagctggaaaaattgttcactggcatgccagcagttttcactggaatgctccaaggtgaggagctctcacaagcgtacgccagtgcagatgtatttgcaatgccttcagagtctgagactctcgggcaagtagttctggagtccatggcttctggtgtcccagttgttgctgctcgtgctggagggatacctgatataatacccaaggacaaggagggcaagactagcttcttgtttacacctggagatctcgacgagtgtgtgaggaagatagagcagctcctcaagtcaaaagatctcagagaatctgttggtaaggctgccagggaagagatggagaagtgtgactggagagcagcctcgaggaaaatacgcaacgagcactacagcactgcaatgtcatactggcggaagaagatgggcaaaacttaaactaggtttcgtcgttccaaccaggaatcattctgatgtctgccctctccaactagctgctgttaataactaaaagaatctgtacattgtaccgaaacagcttgcaagtttgtgtggctagctgcactcatatctctacagttatgatattgaccgactactgcttgtatgaaattcatgtacattagacaaaaaa

SEQ ID NO: 42573 - DNA, 457 bp, Setaria italica
  Peptide Sequence Number=SeqID_108547
ccacgacaacatgctgctccgcgcccctccccagacgctgcggccgtcgccgcggccgcggctgctctccccgcgccgcgatgctccaactccaacgacgcccagccgtcgccggcgccttcatcccaaacggccgccgccggcagcgttcgtcgcctggtgctcccacccgagggccgcgcgaagctggacccgcgcccggaccgcgacttctacgcgttcccgcggctcgtgacgcacgtggacgacggcttcatcgccgcgctcacggacctctaccgggagcgcctctgcgccgggtgggacgtgctcgacctcatgagctcctgggtcagccacctgccgccggaggtcccgttccgccgcgtcgtcggccacggcctcaacgcgcaggagctcgcccggaacccgcgcctcgactacttcttcgtcaaggacctcaacacggaccagcagc

SEQ ID NO: 42574 - DNA, 455 bp, Setaria italica
  Peptide Sequence Number=SeqID_108548
aaaagatactaaaaggtgttgccgtgcaccaaaaggagtgaagcatcctccaaggaatccttgtgctgaccattctagtcaacctcctgaagaggacgctagttctttcagacagaaattttcaaggtcaagcttcaaggaaaggattgacacagaaggttctcccacctgcatagttgtcttgaagccatgcctcgacaaaactgaaaacatggaaggagcgtatccactaacatatgaaatgtttcagtctggttgcagaaagcccagagcaccccttaattatggcaatgctgctccaagtcgacatacagaagaatacatgtatcagatgtcaacaggaaaatgtgatgtgttaggccgtggtggcaaagggtcaatagaaattgcccgtgaggttacaaaagaaatgaggagagctgtcaggggaggcagtaggtggaaaaccggagatt

SEQ ID NO: 42575 - DNA, 454 bp, Setaria italica
  Peptide Sequence Number=SeqID_108549
gaatgagcttcagcgaaggaatctacctgtcagtggtttgaagaatgatcttgtgaagaggctctttgaggccatccaggataagatacttgatgatggggaaaaaacaaatggtggaattcctcctgaggagctgaaagggggtgaaacccctggttctgttgatgcatctgttaaccaggcttcaatcaaagaacttgttgatgaaggtgcttcagaggttatgaaacagggggcagatcttgttatctctgttacagaagcttatgatgaaagtatattaactacttcagaagttactcaggaggctgtggttggtactccagaagctagtcagagaagtttggatgctgttgcaagattgagtcttctctagttgatacagcagcaactgatgaaaccattggaaatggacctagaatcagcttcaagtggcgacactatagtggaggaa

SEQ ID NO: 42576 - DNA, 466 bp, Setaria italica
  Peptide Sequence Number=SeqID_108550
gccgaggattccagcgccgccgctaattgcgagagcccgccgcgcacgcagccaaccagccccccgaggattggattccgttccaattccacccgcgggggaagacgaagaggactccgtcgattccaccggtaataataaggtcaagcaagcagcagatacataggcgggcgggcgcgggggatctcatcccatctcatccgcttccgctcaggctggctctgagccccgcgccgattcggttccacgcgccccaacagaaccgaatatcaccagcacctgcaagggcatgtgacagccgccgccgcagccgcaggcaatgtgctccgacatggatcagcaccaccaccacgcaaccagggaggctgcgtcggaggttttacatgctaatggtgaccatcgcagtctgcatgcaccacatcatctcggacagaatcagcctggggataccaataataatcatcat

SEQ ID NO: 42577 - DNA, 807 bp, Setaria italica
  Peptide Sequence Number=SeqID_108551
tttttttagtaaccaaaacatagtttctgttcataaagaccatgcagtacttgcataatctaaccaaagaaagcccactgttccaacagggcatagtctgcaaaaggtacaccaagtaagcattaacggtccaggacctgctaacagcggtattacatcagctatctggcaacacaataaacaagcagtcaagcgcacaaaatctctgcgactcaaaaaaggaagtaaaacgtctggttcaaatctaactcaagcgcccaagttacaaaatcctatacttcaaccccaagggacattaggtgcttcaatcttttccacccaggaagaacacaagcacacatctccatgtcactgaagatatttcacatcgtagtgcttcaaatagtcccttataagttcgttgatttttctcctgtagtcttgcaagtacttcttggctttttgacttgtgttgtgaatgctttttgctgagtgcataactttctcaacaaccttctgcgcaatgattttatggagctctgttgtcaagtgacccattttccatgttttctgaagctgttccttcacaaagttagttaatgcctttttaaaaatcctcggcactgcagcatgaccagtcacttcaactgagcgggataaatctacagggtgggtattatcatccctagtttcttgctgaatgggtggagcaggtggaggtgcagcagatgggacagagattgctgttgcttcatgcggaatgggtggaacggatggaggcgcagcagatgaatttgtcaccaaccttggatcccgattacgtccggg

SEQ ID NO: 42578 - DNA, 600 bp, Setaria italica
  Peptide Sequence Number=SeqID_108552
tttcttcgtcgatctgaggcttgtcgtgcgcatgacgacgacgtcgcagggagcggcgaggacgacggtgagcagcgacacacaagagctcaggtcatgtcctcgtacgccgcccgtgcttccgccaccgccaccgctgctcctcccctgccggagtcgatccgatcagaggcttggttgtccaagctctctgccctggaactgcgctggcctggggtaacgaagatccagcgcgcgtcgaggaagacccaatcgccgcctgcgcagatccgccgagcgtggaggctttgtgcctaggggagcgcggtagaggatccttgggtcggagggcggggcgatgctgcgaggatggggggacctgtttggttgtcgtcgccgcatcgaggtcgtcctccctcgcggacggcaccggcgtgttcgtggtggcgtaggcggcgtccggaggagatcgaggtcgtccttcctcgcggacggcagcccgaggagatcgagttcgtcctcctcctccgcgaccacgagaagctgtagagaagagaagagatagagatgggccatagcatgcgtggagtgagctgcgccgagcaccgcacccactgggaa

SEQ ID NO: 42579 - DNA, 294 bp, Setaria italica
  Peptide Sequence Number=SeqID_108553
ggtcgggggtggccgggatgtggacgtggtagctgaggaactcctggtgctcgggggagaagtcaccgatgccgccgacctcgctgtcgaggtcgtcgcgggagtagctgacgtagcgtccggagtgggtgcggcgggcgaaggtgaccatggggcggtcgccggcgggggcctgggcgccgcggccgtcctcgccggagtaggacatgcgcgagaggcggctgctgttgctgtggcggaggacgccgccgccgccgccgttggaggccatgggggaatggagctcgtatcggt

SEQ ID NO: 42580 - DNA, 687 bp, Setaria italica
  Peptide Sequence Number=SeqID_108554
tgttccaattctccataactcttgaagggatcgtatgtgttccagtctccataataactcttgaagggatcatatgtgttctggtctccatcatcatcatcaaagttggatctttttgaattcaacctaatggggcttttgacctcaaactcgtagtcatcagtgatgtcatttggaagcctcagtgtcttgatccttgaacacttgactttcagggcagcgtccaattcaacattgaaacaatgccgtatgtcgagacactccaggtgggggcagctgtgaaggatggctgccagacctctgttggtgaggttgttgacaaaaagctgaagagaacgtagctcacgcatagttgaaatcccatgggcttcctgatcattgatgcattcatcttcaaaggagtagaatcggtcgttgctcaatctgaagcgcttcatgtgtgttctagcttttccagcagcctcaattgcctccccgtaaatgtttttacagagtgaaagctcgagtttctcaagcagtgggaacccttgtattgcctcaataaatccttcactggacacactgtagcaagaaacgaggcaaaggctctttagacatgacaaccaggcagcgaggtagaggaggatccggtcgtcggcgacgcgcaccgattcgaacgcctcgcaccgcccgcgcttctccagacgg

SEQ ID NO: 42581 - DNA, 3249 bp, Setaria italica
  Peptide Sequence Number=SeqID_108555
tttttttttttgtagccaggaagagggccttatatttaaccgcaaatacaagtcaaaatccatcaaaccctaatcttacaatttacagaccaccataaccaggaaacagaaaagaattacacacatattgagtcctggtgaaggatacccatactaagaggtcaagaaaacgtgagcatctgcagactgattcagcagagagaaccatgcttttcctcagggctccccaaaccatcatatcattccagtgcatatatcctttttttgttgcgaaagatttctaaggcatagagtggtaaaaactcaagaccctcaaaacaaatgaaaactcctggatcaatcgtgaatacaagctctcaatataaatacaaactcccggaacaatccacaagggacaactgaaacgtgtggctgtaccaaaacaagccagtgtcgcacaaagattttcagaatggcttcactcttcagactgggcatttgtttcgtagatgcgacggctcttgttgtacctaatgtacctcttgccatcacaacttatgatgcgcacctcagggatctgctgaacgatgtgccagttcttgccaccgtccaggcagctcctgagtaacgaaagactgcactgcaactcaaaccgtcgcaggcctctgcacttttgaatcagtagttccagccaccgcgggaaggcaatgctccagaagatgattagctcttcgaaataaaatgtctcggtggatgggggaaacacaagtctgaggtattgcagcgcgtcaaggcctgccacatgcttcagcttggagcagtcgtcaataataagggaatgaagcatgggcaggttggagatcctctgaagagccttgttatctttgagatggagctcatcagacagttttggcaggtccttgatttcagttaggctatatgcaccctccacatgaagttcacgcagcgccacatgttttaggccttctggtagagctttcagtttaggacaggactgtatgtgcagtgacttcagacaaggtaacagtacctggctctcctccacagctaatgaccactcttccagtctcctcatgtttctgagcttcaaaacctcaagcttgggaaacgaagtggctggtgaaagtacagttgtgcccaggaattccgagccaatggtgacaactgagtccacatttgagatttgcagggacttgagctggtccaggagacctagtgaaggcagtttagtgcatgacatgcagttttcaagatccaaaagcacaaggctggggaaggaggttcctagcttgggaccttttatccaatttgggaaccttacacctctgtagttcttgattactagcttctcaatgctcttgggagggatgagctcattccatatcttttcactggctttggctgattcctctccactgcattgaccattgcttacttcctgttctttcttctcttctatcactgattcatctttgttctcttggctctcctgttcttcctgttgctgttcttccattacaggtgctttctcagagaggtatagatcctttaggaatggcttgtttgcaagtgcattagcacctgaagtagctctatccaaactctctatgtgaaggtgccttaattctgacaaagctttaaggtcatctaagtcacaaccctcaggtccgttgttgtcataaccaatgattagaccagacagatgattgagatgtttcagttcaccaacaccctttggtacatagcttagggaggttccctcgagacgaaggcatctaagctctagcaatgccctgatggaccaaggaagtctctgtaacctttggcaaccttgaaggctcaaggtctgcaagttaatgagaaatccaatggaagaaggcatatctctgacctgagttccatcaagattgaggtacctcaaatgtaccaagttgccaatggatcttgggagtgcctctactgctgtcttgctcaaatctaatacacgcaacaatggagctgactcgatgagaggatctattgctctgacatttgggcttttgaagagcatcagtgaccttatgcttatctgctgcttcagcgaaattggatcctccgagcagttttccatgttacagaatgtgaggtgccggggctttgacaatgaggtgctcaatttctgctgaccatgaattaagatactctcgtctgctatcaaaaagcgggctagtgagcggagaagatcatgcgttatccagcaccgttcaacattgtcaggatcaggttgtaacaagtttctgcttattaattctacataatgctcctcagctgattcttcaagcaacttgttgtctccagcatttacgatgccttcagcaatccaacgccgaacaaggtcaaagcgctgaatggagcattcttctggatacagagaacagcggaggaaacactccttcagctcggaaggcaggtcagcatagctcacgtacagagcttgtggtacttctggaacgattggaggcatggaccaagaatcattattcaggaccatctcccactccgccttgctgttgcctcttgacctcaggacacctgcaatgaccttgattgctagaggatggccgtcacatatctctgcaatcttaatcccgacatccttcaatgctgcaagctcctctgaattgcattccggatcaacttgtttgcacaataatgcccaggcattctcagtgtccattttatcaacacggtggacgacagccttcatgcttgacgccacttcctcattccgagttgtgatcagtattcttcctctcgccacaccatctcccaatggatctttgagcagattgtcccatatgcctggattgtccaagtcatctaggacaatcagaaatctcttggaaagagcagagctgaggaggccaaggagctcctctctgttctctgtatccccaacattagcaccggcaccggtgatgatcttcttcaagaaagctacctccgacaaatccttggacatcttaacccacacacagatggggaaattttcagtcatcctgtcatcattgtagatctccctggcaagcgttgtcttgccgatccccacggcaccaacaatggcaaagacatccaccttcttcttgccctccctaagcatccttggcacaaggccacccacagccttgtggacctgtgaccctactgcttgcagcttagccgcatcataacagttgttacagacgctattatgactggaccaatcccttt

SEQ ID NO: 42582 - DNA, 932 bp, Setaria italica
  Peptide Sequence Number=SeqID_108556
ctgtgatccagaaactactcttctgacataagccagctaaatgtagacaaaaacaatgtgaatgttacaaaaccttgtttgcctgaagagtacaagcctgagaagtggatgttagctgatcaggagtcaggggtgctgagccagctaaaccttgcaatagtgggtcatgttgattctggcaagtcaacactatctgggagattactgcatctattaggaaggatatcgagaaaagatatgcacaagaatgagaaggagtcgaaagagaaagggaagggatcatttgcttttgcatgggccatggatgagagcagtgaagaaagggaacgaggtgtgacaatgactgtggctgtggcttatctggagacgaagaaataccgtgtggttttgcttgactcacctggccacaaagattttgttccaaatatgatatctggcgcaacacaagctgatgcagccattcttgtggttgatgcttcaactggttcttttgaagctggcatggatggtgaaggaggaaaaagtgttggtcagaccaaagagcacgctcagcttattagaagctttggagttgaacagcttgttgtcgcagtcaacaagatggatgctgttgcatactcaaaagaaagatttgagttcatcaaactacaacttggtagttttctgcggtcatgcaacttcaaagactcagctattacttggattcctcttagtgctgtagaaaatcaaaatttgattaaacctccttcagatgctcgtttggcctcctggtatcaagggttctgtctcttggatgctatagattcactgcagcttccttctcgggatgttacaaagcctctcattcttccaatctgtgatgttatcaagtctcagtcaacagggcagctggcagcttttggaaaattggaaactggagctattcaaattgg

SEQ ID NO: 42583 - DNA, 921 bp, Setaria italica
  Peptide Sequence Number=SeqID_108557
tatctatctgaaccaatgtacgttgtcttttacatttagatctatctgtggcctcctggtatcaagggttctgtctcttggatgctatagattcactgcagcttccttctcgggatgttacaaagcctctcattcttccaatctgtgatgttatcaagtctcagtcaacagggcagctggcagcttttggaaaattggaaactggagctattcaaattggttcaaaggtgttagttttaccttgcgggctagaggcgacagtgaaaaccattgagcgggacactaattcatgcagcatagcaagagctggtgacaatgtggcagttaatttacagggtattgatgggaatcaactaatacctggggggttctttgccaccctggtttccctgtggctgtagctaaccacttggagcttaagattctagtcctggacatcaccattccaattcttgttggttctcaggtggaatttcacatacatcatgccaaggaggccgcaagagtaacaaaaatcattgcattgcttgacaagaccgggaaaccaagtaaatcagcacctcgatttcttaaatcaaaacagaacgctgttgtacaggttaccctcgatgtggcggtctgcgttcaggaattctccaagagtcgagcacttgggagggcatacttaaggttgtctggtcgcacgatcgctgttggtgtagttaatcgggtaattggccaatatgagaactagaagacctactcttcttgtgacctgaaccgaatcgcagtcgttcctagggatactatgtaaagatcttatcagaatcctggcgctggcaaattttgttttgctttatcggcattatcgccattccaatgtattgagatttggctaaggttgtcacagattatcgtctttttttttttctttaaaaaaaa

SEQ ID NO: 42584 - DNA, 670 bp, Setaria italica
  Peptide Sequence Number=SeqID_108558
agtcgcactagtcgccgccgctcagcatggccgggtgcatgctctccagcctcgctgccgcgaggcctgcgccgtcgccatcgacgacattcttcagcggcgccaagataggcattgacgggcctagcggtcccaccggtaccatgggcttttcgccggcgggctcggcgagcatgtccgcgacggcgctgctgcagaaggccgcggagatgggcgcgaccacgagcggcgggtacggcgcgggctttcccaccaccgtcggcttcgggcccatgttgggtgggcctgaccgtttccccagtccgtttgggcctctgaaggctgccatggagccgccgtatgatgggcagccgttgttgggccagacacagctagttgggctcgacgtaggcaggctactgctgcctatgccgccgggtcagcagctctacggcggccatggtggtggggtcggctcgatgaccagggccatcggatcgctgatgcacggcggccagcagcagcagcagatggtggagcaccgccggccggacgatctgcgcgtcgtggattacctcggcgtcgatgagcaaaggagctttagcggtgtgagctcgttcgggcctcacatcggtccatggacctaatatccttgtaggatgcttcacatgacataaaattcagtactgtg

SEQ ID NO: 42585 - DNA, 487 bp, Setaria italica
  Peptide Sequence Number=SeqID_108559
tttccccagtctggagctgaccattgccttgcggatttgagaagggctcaataactgatgctggattgtccactgggaagacagacttggcgagttgagcctgctgctgactaaaaacgccattatccaagcaaactgaagaactctggtgttctgaagcgagataaggctgtgtaatctgtaagtcacctgagccattatttatattctctggaggatgatcgtgggactgaagagggcctgccaactgccatctgtctttctcaccttttgctactcggtcatttaggtccacaaaatcttccacatacatttgtcctccataggacttaggtagtattgtagaactgtttgatgtaatcatcataatgttctcagtttcttcttggtccacaattacagtgttcatcttcagatgactcttttctgaagaaatatttgcactatggtcacaaactgtggttcacaatagcattgctaatgcttt

SEQ ID NO: 42586 - DNA, 663 bp, Setaria italica
  Peptide Sequence Number=SeqID_108560
gcatcatcttggttcgccatcgaccgcgccacaacggtgggcggctgagctcgacgagaagatgctgcgtaggacgcggcgactggagcagatcgacaacgcccaggctatatcttgtcttcttcctaaagctggtggtgcgctgccgcggcgctctcaggcaagcagccccccgccgctgccgcggctcgcgatgctggcggcggcgggggagaagaggctgtcggacggtgagacggcgtcgtcgacaacgacgcccaactccagcctcagctcggccagcggcgccggcagcctgccgcggtgctgcagcctctcctttgactgcttcccgtccgccgccgtggccgtagcatgctcgccgccatccgcgccaccagccgtaccggtctggcgacgcagcgaaccgcacggcgccggatctgagaaaggacgaagaaggcgccagatcaaggtgaggactcaggcgtcgccagatctgagtgaggagtcggccgcgtgcgtgtggcggggcttacctcctgcgcggccagctccagtcacggaacgtcgcgctccgtcgaaatggacggcggaggtttcttccccgacacagctccgtccctcgcgctccgtcgacatggatggcggaggtttcttccccgacacagctccgtccctttg

SEQ ID NO: 42587 - DNA, 319 bp, Setaria italica
  Peptide Sequence Number=SeqID_108561
tttttttaacttttttcaattgaactagtgtcattcccgtgattgcatccttgtcatggcaatcgctcgaaggacacatatctatacccgccagccggctagtgctacatatgaaaatcaaaaccaaagaactacaaatccacgcggccaatttccccatccatggccgcctacggctgcgccccgccgcggccgcgcaccatcggtgagggcgactcgctggtggtgtcggagccgccgtgcctggagacggcgaagacgagctccttgacgtcggtgccggaggagcgtaggtgcgcgaggatcttgctgaacttgg

SEQ ID NO: 42588 - DNA, 1115 bp, Setaria italica
  misc_feature (4)..(4): n is a, c, g, or t
  misc_feature (60)..(60): n is a, c, g, or t
  Peptide Sequence Number=SeqID_108562
ctgnaccggcgagaagggcgtcggcgccgacacggcgtgacctccactacaagggctcangttttcatcgcatagtcaagggttttatggtgcaaggtggagatataactgctggtgatggaactgggggacagtcaatatatggattgaattttgaggatgagaatttttgtcttgaagcatgagaggaaagggatgttatcaatggcaaatgctggacctgacacaaatggatctcagtttttcatcactaccacccgaacacctcaccttgatggaaaacatgttgtttttggaagggctataaaaggaatgggggtagttcgtgcaatggagcatatttttgttgatgaagctgaccgcccgactgatgatattgttattgttgactctggagagctaccagaaggtgccgatgacggagttgtcaactttttcaaggatggtgacatgtatcctgattggccgattgatctcgatgaaaagcctgcagaagtttcttggtggattgatgctgtggagtctgcaaaggcttttggaaatgaaagtttcaagaaacaggattacaagacagccctcagaaaatacagaaaagccatgcggtacttagatctttgctgggagaaagaagatattgatgaagagagcagcacagcgctgcgaaaaacaaagtcaattatattcacaaatagctctgcttgcaaattgaagttaggagatttggagggtgctttgttagatgcagattttgcactgcgtgaaagggaggacaatgcaaaagcttttttccgacaaggacaggtacgcgtggcgctcaaccatatcgatgctgcagtggagagcttcaagcaagcactggaattagagccaaatgatggaggaattaagcgagaacttgccgctgcaaagaagaagatttctgacagacgagatcaggagaggaaggcgttttcgaggttgttccaaccttcaggaggattagagaagagtgagaaagagaatagttgatctcttgtgttctcttgcgagtcaaaatgttcaggagggagcttgcacaacaggaaaaactcccatcagacgacccaaaatagtggggtgacaccagagccttttga

SEQ ID NO: 42589 - DNA, 233 bp, Setaria italica
  Peptide Sequence Number=SeqID_108563
tccaccatgtgctcgatagtttgcctacgagggctgatgttgcttattcttctcagttctcccccatgtcccttgcagttgcagccttgcagggtgcaggttgctggagatggcagatatagcagcgagtgaccgggttatctactatatggtgtaacaaaacattatttcaataattgttccatcctgcttagtgctcataacaatgcattgattagaatgacttaccaaaa

SEQ ID NO: 42590 - DNA, 459 bp, Setaria italica
  Peptide Sequence Number=SeqID_108564
aacacattagacagtgagaacaagtatacatgctttccattcttctttgtgtgtatggcatgacatgcatgtatacttgctatcatggcactaaagttgttgtgttaacacattagacagtgagaacaagtatacatgcatgtcatgccatacacacaaagaagaatggaaagcatcacagagggcaactgagagtaacgaagttagcccagcaaacaagagcacatatagttataaagaatcattgtagaaacaacttgacaggtgcaacacttagcatactaaacaacagagtcatgttgataatgattgcaagttaagaaataataaattatttgaaaataaaagcaatctcggaccaaaaacaaaatgctgttttgagtgatgaaatatggaatacaataacagttaaaacctcaagccccaaaaagttagaaaccacgagtactgacaaaacac

SEQ ID NO: 42591 - DNA, 508 bp, Setaria italica
  misc_feature (483)..(483): n is a, c, g, or t
  Peptide Sequence Number=SeqID_108565
taccgaactacaagtcgcactagtccgtggaagcaattttactgaagtaactaaattgttgaagggcaagggagttgaccttgataataatcgctttctcatcctccagggtgaggttgagcaaatatccctaatgaaaccaaaagctcaaggtccacatgatgagggtttcctagaatatcttgaagacataatagggacgaaccagtatgttgagaaaattgaagaagcttacaagcaacttgaagtgctcaatgaaaaacgaactgcatcagtgcagatgctaaaattggctgagaaggaaagagacagtttagagagtgcaaaaaatgaagccgaaacatacatgctgaaggaactttcacttttgaaatggcaagaaaaaagcaaccaagctggcttctgatgatgctatctcacgtgttgctcagtgtcaagagaatgtggcagatctggaaaaagaatctttcctctgaaaggganaagattcagcagaattctcagactg

SEQ ID NO: 42592 - DNA, 523 bp, Setaria italica
  Peptide Sequence Number=SeqID_108566
ttttttttttttcttaaccaaatgaatgtactcgttgagagctatatactcggtaccactacacaccacacatcatcccttgcttcatctctagctcttgatttccattgattcactaaatcgccgatggatcagaggccaaaacaagcagcaacccgcccgtgtttacaaaatttcatcatccaagaaagaaaaaaggtgaggaggaacctgagaccgatcgaatgatggaaagggcaaaacggaatcaaaatccaagctttgtcgtcgccgtcgccgccgtcgtcatccgtcgaagcccgtccggctccagacggcgtcgcgcacccgcgacatgtcccggcccttgagcgtccgcccgacgccctccaccaccgacgcccgcgcctgccgccgcgccaggtacacgtgcggcggcacccacccgccggcgccgtccttgcccggttcgtccctccggcatctccatctcgaacagcagcgccgggtccggcacggcgaagtggctcggccacgcgggcac

SEQ ID NO: 42593 - DNA, 653 bp, Setaria italica
  misc_feature (393)..(393): n is a, c, g, or t
  misc_feature (439)..(439): n is a, c, g, or t
  Peptide Sequence Number=SeqID_108567
ttttttcctcacataggggttttacgtttgcaaacattttgtacaaagattacttctttgtctgttccagcctctagtgcattcaccttttcctttggatggttgaacttgcatctggatttaaatctacatgtattagacttcacaagatactgcaaagtcaagatcaatattatgaatatcaaatcaaacagattctaaacaagaatatgaattgcttacaggacaatcaggttcccctggtcgctcaggataagaatcttcaacatttgggacctctttccagtttggaaccccaccctctggaacccattgtggatggtcaaatttgcaggcctctccatacttacaggttctggtcctcatatagtaaggccacagtccttttccccnggtcgttgtggatatataggaaggctgctttcgagccttccgcggntcgcctcgcaccgaagcgcgaatcgaaagcaccaacgcgcgagtcgaaggcgccgatgtgcgagtcgaaggcgccaacgtgcgagtcgaaggcgccaacgtgcgagtcgaaggcgcccacgccagagtcggaaagcgccgacgtgcgagtcgaaggcaccgacgccatagtcgaaagcgccgacgtgcgaatcgaaggcgctgacgtcggcggg

SEQ ID NO: 42594 - DNA, 365 bp, Setaria italica
  misc_feature (350)..(350): n is a, c, g, or t
  Peptide Sequence Number=SeqID_108568
tacaaacagtctctccaggtctctgaggatatattggcacaggttcaatcggcacatgagtcacatgaaaatcaaagctttgcagaacatttgtagccgggtttaacatcggcgccgagataatgggtgctggagtaggaagagtagtttgaaccagtggagctatcaatgctatatccacaactgtgcatggcacaaaacaatatcagaaaaaaaaagggttaacaacgattccagatgtgtaaaaagttgcatcaaaattggatgccatgcaattgaagcactaatgctgctgtgacattgaagttgataagtaccagtctaaacatcgaaaatggaatgaaaaattntcttgtaatcgctgt

SEQ ID NO: 42595 - DNA, 318 bp, Setaria italica
  Peptide Sequence Number=SeqID_108569
aacctctaaaccgagcctggattaccgacagaatctccagtaggcatagagcatgttttaccttgttactttactgcatattttgcaacagacttattgatacggtttccaaatgaaaaacatgaataaaaccggaacttactgtatctagtgccaccataagacaggtacagaaataaagtttactgctctagctaaagtaaaacaccacttggtaaacacatactggtcttataggaagcccctttgggttatgtgcctcagatggggcagttggtgcatgaatctttgctggaaccagatcatcagctgcaccaa

SEQ ID NO: 42596 - DNA, 914 bp, Setaria italica
  Peptide Sequence Number=SeqID_108570
tggctgctcaggatcccagtttccgttggcaccaggttcagagcggttcataggatggtgaaacttgcatttctgagaatacttgcaaaatcctgtcttcatgtaaaaatcacaaacagtctctccaggtctctgaggatatattggcacaggttcaatcggcacatgagtcacatgaaaatcaaagctttgcagaacatttgtagccgggtttaacatcggcgccgagataatgggtgctggagtaggaagagtagtttgaaccagtggagctatcaatgctatatccacaactggccgataaggatggttgaagcgacaaatagaaccatatttgcagctgcctgtcttcatataaaacgagcagtccacttcacctggtcttataggaagcccctttgggttatgtgcctcagatggggcagttggtgcatgcatctttgctggaaccagatcatcagctgcaccaatgtgtgctgctgcatcagttgttgctgtatatatggtttcctttgcaatcacggatggcattgggtgattgaacttgcaatttgcaccaaatttgcatttgcctgtttttgcatagaaggaacaaacaggctcagaaggcctcactggtaagatggcgctatcggcgattagagaatgttcattgtctgttccagcctctagtgcattcaccttttcctttggatggttgaacttgcataggacaatcaggttcccctggtcgctcaggataataatcttcaacgtttgggacctctttccagtttggaaccccaacaactaagtagacgaactgaagtcggaggttctatttgtcgcttcaaccatccttatcggcgccgagataatgggtgctggagtaggaagagtagtttgaaccagtggagctatcaatgctattattc

SEQ ID NO: 42597 - DNA, 1924 bp, Setaria italica
  misc_feature (7)..(7): n is a, c, g, or t
  misc_feature (14)..(14): n is a, c, g, or t
  misc_feature (21)..(21): n is a, c, g, or t
  Peptide Sequence Number=SeqID_108571
ttttttnttttttnttttttntttttttcagtttggcaaagccaaagaatgcgttgctgcaatatggcaacatgaccattatgtgccaggttactgttatctacggcaacaaacgaaggtaactcgctagcaccaccagcactgctccgatagactcttcttccggtggtactcaaacttcacagctcagaagcccatcaagacccagacaaccatcaacccgacagcgcgtttcgctatgtattacaagtccgaggcaggtggcaatcacgggacgacgctcccttcctttgcttcaccttctttcttctcctcatcttcttttccggctgcctgcagcttggcaatagcctcctgtgggggagggtggtcgaacttgcagtgcgcgccatacctgcacgtgccagacctcatgtagaaggcacaggcctcggcgctctctctccttggaaggccagcaagagtaagtgtcacaggctgctcaggatcccagtttccgttggcaccaggttcagagcggttcataggatggtgaaacttgcatttctgagaatacttgcaaaatcctgtcttcatgtaaaaatcacaaacagtctctccaggtctctgaggatatattggcacaggttcaatcggcacatgagtcacatgaaaatcaaagctttgcagaacatttgtagccgggtttaacatcggcgccgagataatgggtgctggccgataaggatggttgaagcgacaaatagaaccatatttgcagctgcctgtcttcatataaaacgagcagtccacttcacctggtcttataggaagcccctttgggttatgtgcctcagatggggcagttggtgcatgcatctttgctggaaccagatcatcagctgcaccaatgtgtgctgctgcatcagttgttgctgtatatatggtttcctttgcaatcacggatggcattgggtgattgaacttgcaatttgcaccaaatttgcatttgcctgtttttgcatagaaggaacaaacaggctcagaaggcctcactggtaagatggcgctatcggcgattagagaatgttcattgtctgttccagcctctagtgcattcaccttttcctttggatggttgaacttgcatctggatttaaatctacatgtattagacttcacgagataaggacaatcaggttcccctggtcgctcaggataataatcttcaacgtttgggacctctttccagtttggaaccccaccctctggaacccattgtggatggtcaaatttgcaggcctctccatacttacaggttctggtcctcatatagaaggcacagtccttttcccttggtcgttgtggatatataggaaggctgctttcgagcctagggcgtttagccatagtatttggtgaatataaagcctcattctgggcaacagtactatgacttcccataaaagattgatgatagagagcttccgcggatcgcctcgcaccgaagcgcgaatcgaaagcaccaacgcgcgagtcgaaggcgccgatgtgcgagtcgaaggcgccaacgtgcgagtcgaaggcgccaacgtgcgagtcgaaggcgcccacgccagagtcgaaagcgccgacgtgcgagtcgaaggcaccgacgccatagtcgaaagcgccgacgtgcgaatcgaaggcgctgacgtcggcggaggaggggtagggcggcggggtgccggtgtaacgggccgcgatgaggtcgacctcaaggtctgagtaccgcggcggcggcagcgcgccgtcgccgcccggcaaggcgccgcgggagtacgggtagagggggtccgacatcacgggcggctagggtttcctctcgcgccgcggtgtggggagggaggcgccgctctgcccctgagagtggaaagcctttatcaggctcgcgcttgcgcag

SEQ ID NO: 42598 - DNA, 342 bp, Setaria italica
  Peptide Sequence Number=SeqID_108572
gcaaaagaaatatctcaagacccttctcttttgtatctgtgagaaggaggaaggcccaatgattgaggagtatgccttctcctttagctaccccaacaccagtactgaggaagttgcgatgaacatgagtcgtacagggagcaaaaaagggtagcactacatttacttcaaattcttcagaagtaactcctgatcagatgaggtactttcttacctttttttttcctcaaacaagatactttcttaccttggatactgtattttttttttggcatgaagttgcagtcttagtaaaaaagtagtgttgcattcagattgttaatttgttatgatttgaaacaa

SEQ ID NO: 42599 - DNA, 734 bp, Setaria italica
  Peptide Sequence Number=SeqID_108573
gtcccaagacctgcagggaggcttttcaagtatttgcggcacaggcttggtgcagcttgaattaccaagcttctctgtgacaacccactcgtttacgctcccaagctcgagcaaaccgatgactgccgccttcgtccggtgaaaagacatgacattctcaaagaggatccagaatggtatgaagtggagcgaacttggatttctgattgcgtagagaagtgttattgttgttgggatataaaccaccccccatacaggaactgtgacctcaggaatcaggactgacagcgggattactacacaatagagcatgaaaggtaccacatgggcaacaaccttcctaatgaaaaagaagctatagatcaaataaagcttcctccacaacgacacctccttagtcagaattatctctgcacccgtcttcctgaataaatttgctgccccgcacgtccaccgatgttgctgacggcgatacgccttcagattgcttggcagttcacttttgaccttaacatctccgacatagatgaatttccatcctttgagacctgctctgactgctaaatccatgtcttctactgtggttcgatcctcccagccaccggcttccttaatggaagaaattctccagacaccagccgttcctgcttcctgctctaaggcaaacgtggatgaacctgcttcctgctctacttgaagtgatagtctaatgtcatctttgtatctcgtcataa

SEQ ID NO: 42600 - DNA, 1558 bp, Setaria italica
  Peptide Sequence Number=SeqID_108574
caagtctgttatcatccagcgaggtggttttgataggtccttaaagttggcatccagattctacaaactcattccattgtgccgtggcaccagataactcacgcatcatgcatttctctccaaaacattctaccatggtcaaactttaacacaacctaggtaggctccgtatggtgtctatgcgttgtaattgtccaagcccaggtccctcaatgctgacgaggcagcatctttgcagcttccatgcatcaccttggcctttctaataagcttctctgcaccatcattaagtaggatggtcctgttctcagggtttcggacaacaagattgcgaatcataaggcaagcttgcttctgagtctggccggaggaggggaaccgttgcattgcctggatcgccagagttccatagcctatttccattgcacgcgctgcattttctggtgacctcaatgtaagaaccgtcaccatagacatcacctcctgtagtatagaaggatcttctgaaaatctggatgccaactttaaggacctatcaaaaccacctcgctggatgataacagacttgtttgcatcgctcgcagccaacttagacaacaaagaacaacaagattttgcaataactttgttcttctgttcaccagcctcatcgatgcattgaagcagcacatcagttcccccattttcagatatcgaacggcatatttcatcattgacagcgatcgactttaaagcagcacaagcagatggcaagctggaaggagcaacttgttcacgaagtgcactgacaagaacttctgcaatcccaatttctgcaaacctccgggagtatccatatacttgagaagccaccactcggttgtcatcaggcgtcaacagaacacgtatggcatcatacaagctttgcacattagtttttgatttctccctcataacatgtagaatgagttcatcaaccttcaagtccataaaggattctttcacaacttcattgccagcagaacctgctgccacaacactaaatccagcatccagtaaatctgaactttctgagccacctttcaagatatccatgacaattttgggcccctcgctttgtctgaacttctcggtgcttccaatgtccctgagcagggagctcaacgcctttaaggccgacccaagcagtctctcctgcgcaactcgagccgacgcgcacagggcgacgagcgcctccacgccgccattccgcaccgcgatcgctgcattctccgtcccatctccggagcagcacaggccgcgcaactcatcgattagagagaccaagccgtccagatcctgccccaacccgccactggcactgtgagaagccttcaattcgtccagcacccgcaccatcgggctcacctccgccgcggcggcctctccgggcacgcgcttgatgatcccggacagatcagcgccctggagagtgagggcttcgacggcgtcggcgagggcctcgtcggcgtccatgccgaggtcctccatgttctcccggaccatggcgtcgaaggcctcctgcgagatcgcgatcgcc

SEQ ID NO: 42601 - DNA, 960 bp, Setaria italica
  Peptide Sequence Number=SeqID_108575
atttcaaatacaaagagttacatatcatatatacgttagtaaaccttataatattctttctactaccccccgaaagactattcgtttagaaaaatttagatgagatagtagcaatgctaaaagttcaaagtacccctaataacttttcttaatcgaatggattaccgagcataattaattatgcatgcacgcttgcagtaattgtcggacctattagccttccttatttagcgagtctggcttaagcatcgatggtgggagtaaatgattgattcgttaactgggccagaagatattatgggagcctttgttggattgtctgaaagttatatggacactctttgtgggacaagttttgaaggctaaacaaatagtctttgtgggacggagggagtacgtagaggaggagatcgagaaggaaataaagaaaagagagaagttactaatttagctacacactttaaacgtacccatattagtttggaagaacatgctttagttagtccattggagatgctactatatatcttatactatcctattgcttatttagatgaaaagtttacagctagcaaggtagctagatcagatgctcctctaatgtctaattatgtggcaaattgttgtaactaacatatcaatagtcaaaactgaaaaaattaatggggacatgtaaaaaaattgaacatcttatttatatacggttgggatacataccgcaatagttagaatctaggtattgtttggatctatcctaaaccatgaaatcttgtttttataatctttagctgatccaaataggctagcttttgatctagaattaatccaccaatctagattgtaacaatccgataaggtacttcctcctagtttttatatagtggttctgcaaaagaatcaaaataccctccgaactttactctaaatcacacaccaattagtcctttaactaaccccctt

SEQ ID NO: 42602 - DNA, 304 bp, Setaria italica
  Peptide Sequence Number=SeqID_108576
gcgcactcctcgggaacgggacagaggagagagaagcgagcaccgcaacgagacgcggcgctgacacccgcgcccattgcttctcccattccctctcctccgcagcccccgcttcgcctcccacctccacctcctccccacatcctcctcccatcaccaccagcaggctcgctcttcctctcctctctcccggagcctcaatccggctagcatctgtgcgtgtgcactggtttctgcaggaagcgggtgaggaaggcgagcaagcagcggttgagattcgtctgagcgtgaaagaacgaagcgg

SEQ ID NO: 42603 - DNA, 689 bp, Setaria italica
  Peptide Sequence Number=SeqID_108577
cgtcacatcattatcactgctaattcttatctacaccatgattaagtcacaataattaaaaaagtactacactgtaacattgccatcaccgtcatcacatcatttatcactgctaattcttgtacctgatctccaccatttgccatcaccgtcatcacatcatttatcactgctaatttcttgtcctgatctccaccgcatagagagttagggcctgcttgcattggttgcaaaccatggtctgccaaatttgtgtggcgacaccacaaaacggtggtgcaaataaagagcgtcacaatttaggcgtgggaaggcgtagaaatgaactgcatctcgtgtggcgcgctaaagctttgaacccaaccaagcactggccagcatcctgtggcgacatccatgaggcttggcgaaatgtggcgtgcaaccaagcacgcgcttaaaccaagtaagcaatctgccggaagggattaggcatttaggcatgtatacaagagatagaactagctacgagatctctgtggataaagccaaggccgtgggcataggccatgccacgtgcaacatgtaaattcttgagagatccaccctttgcaagaatcatcacttcccgggctgattgctgcccaactaactgagctttctcagggtcatcctcagatccatccacaagatgatggcagcatccatcc

SEQ ID NO: 42604 - DNA, 1073 bp, Setaria italica
  Peptide Sequence Number=SeqID_108578
tgcacccgctcgcctacgacggcgccaccactggcgcggacctcgtcctcgtcaactacgggcgcgtcacctgcgggaacagcctcttcggaccgggattcaccagggaccccgacgcgttctcgcgggtctggcaggcggacgtcgatttccggaacaacgacctcagctacgacgccattacggccggcgggaggaagatcttcggcagcaaccagccgcccaactacttcccaacaaagctgtacgagtcggcggtcaccacgggtggcgacgccaccaatgagatcgagtacctcatgcccgtggacacgaggctgtcgtacatggtctggctgcatttcgcggagatcgacgcggggattggggcagctggccagagggtgttcgacgtaatgctggcgggggagaatgtcacgaggatcgacatcttcaagcaggtcggtgggttcaccgccttcaagtggacctacattgtggagaatctgacgagctccacgttgagcgtcaagcttgtgccggtggtgggacggccgattctgtgcgggctcgagaattatgcgatggtgccacttgagatgaggacggtgccgagccaagtggctgcaatgaaggcgttgaaggagtcgctgaaaattcctgcaaggatgggctggaatggtgacccatgtgctccgagggcgtgggatgcatgggagggagtcacttgccatcgtggtgacaaaggacttgtgatcacccaactggatttggcaagtcaaggactaaaaggtttcatcactgatgaaataagtcatctcaaagacttggtaagcttgaacttgagctataattcactgacaggaagcttaccacctggtttaggccaaccttcacttgtgtcactggatctgtcatcaaatgagtttactggaagcattcctggcaccataggttcatcaaagttacagaccgctttactaaacaacaatcaactcgatgggcaagttccagaaagactttactcgattggtgtgcatggaggcattatagatctctctggtaataaaggcctctgtggtgtgcctacgtta

SEQ ID NO: 42605 - DNA, 280 bp, Setaria italica
  Peptide Sequence Number=SeqID_108579
agttaccgactaccggccgagttggaaacggagacgatgctgcgaggaccgtgggcgtccagacctgtggtccgctggcagctggggccagggggttgtcaccaccgcctcgatttggtgggcccattcttatcctcatcatcgctcaaaacaaaacagcagccgtgacccgtgagtgatgagtcatgatcctaatccacaagcaaaacaaaaacgttgcgttccccgattgtgacgttgccttactggcattggttcaattttgtgaaaggtttttaac

SEQ ID NO: 42606 - DNA, 408 bp, Setaria italica
  Peptide Sequence Number=SeqID_108580
cccacggccgacacgattcttcagcacccagaagaggccccggcacgagaacgccgtgccgccgacgagcgccacgccgtgcacggccgtgtccgcgaggccggcgagggtggcctccttgcagagcaccagcgccggcctgcgcgtggccgcgcggaggtagtggagcaggaaccgcgtcagtatcaggttcttgttctcgatgccgtagcacccgagcactcgcatcaccttctcgatggtctgcggggacagcgacgtcatgtcgtcgaaccaccactccctgcccacgcagggccacatcgactccggcgtcttggtggacgacgaccggccgaagcccaccgtgtccggcgacgaggagcatgacgacgaggagcggttcggcgtccccacggcggcgatggg

SEQ ID NO: 42607 - DNA, 440 bp, Setaria italica
  Peptide Sequence Number=SeqID_108581
aaaaaaattcagaacaccaaaggttactattgaaattgataagaaagccatcattctttacatacctagtactgtcgaagagttggtccagtttatggatagaccgatctcttaatactcttctaatacatatagaatttctcctaataataggaccatcttcatttttcgaatcagtaaaggaaagggctctactggacatgatctaggtagagctgatcaggcaactgaagcagaccctgctcatccagcttcgacttcttcactttgtcaggtcctaataagctgctttgtcaatcttcacccatcctttccgatcataagattcatatgaaaaataactaaagcaattgttcagaatatccaataaatatagagggcaagtaattctaccaaaggaagacatgatggattgatagaagcagtgcttgtgctttgat

SEQ ID NO: 42608 - DNA, 1475 bp, Setaria italica
  misc_feature (1439)..(1439): n is a, c, g, or t
  Peptide Sequence Number=SeqID_108582
gtcccgtccgcaccaacaacgtgccgcggcctgacgcggcagatgatttttgagccaacaaaccacgctaggacccgggcaaaaccagctaatcagccacactgacaggaggcttcctacccccccttaatccagctgaccagctacccagctgggacagagtccccgacgactttcccctcccattctccggttctccctcctccctgctcgatcgattccttcctcgccaggtccaagctccaaccgcatctgttcccgcgggatcgattcgccgtgaactcgagcacgcgagccgggacaccgccgggatgaagtctatgggcagccgcgacaagctctcggcggtgtccgcggcgtcgggccaccgccgcgcgctcttcgccgtcttcgccttctgcttcgccttcgccaccttcctcaccttcctctacaccacctcccacttcacctccgcggccgccgccgcggggggcagcgacgccagcttagcactagcagcagggtccggctccgggtccgacaacaagctgccgctcccggtgttcgacgccctggtccactacgcctccatctccaacgcgacgcaccgcatgcccgacacggacatccgcgccatcgccgcggtggtccgcgcgcgggcgccctgcaacctcctggtcttcggcctgggcgccgagtccccactgtggctggcgctcaaccacggcgggcgcacggtgttcctggaggagaacgagttctacgtcaagtacctggagcccaagcacccggggctggaagcctacgacgtgtcctacaccaccaaggtgcgcgacttccgggacctgctgtcggcggcgcgggcgtcccgggcaaaggagtgccgccccgtccagaacctcctcttctccgagtgccgcctcgccatcaacgacctgcccaacgacctctacgacgtggcatgggacatggtgctcatcgacgggccgtccgggtggaaccccaactcgccggggaggatgccgtccatcttcaccaccgccgtgctggcccgctccggcgcaacggcggccaagggccccacggacgtgctggtgcacgacttccagttcgaggtggagcaggtgctcagcaaggagttcctctgcgacgagaaccgcgtcgccggcagcggcaccccgtcgctcggccacttcgtcatccccgggggcggcggccggagcgacgccttctgctccgagtccgcccagggggagagctcgtcggaatcgggagacaacaaccgccgcaagtgaattagccaatcttgccacggaatcgttagcctcctctcctctcctcagctgttacttaatttttcaatttttttcttgcatatatgtgtttgttgttttgtggggcgataattgtaacaaaaaacccaagataatacgattgcctccatcaccaaaaaaagngacaagtgacaatgaaaagaaaataggagctttaac

SEQ ID NO: 42609 - DNA, 424 bp, Setaria italica
  Peptide Sequence Number=SeqID_108583
ggacgccgcgcgcttcagggcggtgctcgagaggctgcacgcgcacatgggcaccaggctcaaggtgccaattatttggagggaaagatttggatcttcatcagctatacaaggaagtcacatcacggggtggtattgataaggtgaaggcagagaatagatggagggaagtgactgcatcatttgttttccctgccactgcgacgaatgcttcttttatgttgaagaaatattatatgtcactcttatatcattttgagcagctatacttctttagagtgcaagggtggtatcaagaagaaatagattccagaacgaattccattgaagtaaaaactaaagcccaagcttctcataaaagaaaaaggggcaccaattcatctccttcagatccagcttcgtcttcagatagtgttgatgtaga

SEQ ID NO: 42610 - DNA, 447 bp, Setaria italica
  Peptide Sequence Number=SeqID_108584
aattacttaatgcactaggcggcacattacttgacttgctattttggctattgcactatctcttatcgtgatgaatagaaaggtatagcacttgtcagtgattgccagttttattcaacagtatgcctgagcggctgagcctggaagtaatgctgtttttgtattgtcttcaattaagggcagtaatactgcatgacagtgagataatttcagtgctttatgctatagctgttcagatgcctacgctgtggcatcagtgcaagtgcgacgcctcatatgcgtcgtgggccggagggacggaggaccttatgcaatgcatgtggcatagcatgggcaaaggggaaaacgagaaaagttattgattctgatgcccacatagacgatgccacaattgcaaaagtggtgccagaagtcggcatggaatttgacaatgaagataaagcatat

SEQ ID NO: 42611 - DNA, 546 bp, Setaria italica
  Peptide Sequence Number=SeqID_108585
aaaactttactcagttcaataaagattctcttcagttgaaccataacaattagcaatcgcgcactgaccctcagactacaaggaaaaaaacaaaagaaaactaggaataccagtttacaggttccaaacgaaggcaaaaattaaagtcatatatggatcacaattaatactaaaaaaggacagtattattgtgattgcaagtgcacaacaaacaattttttataagctcagctttgtctgtagtcaatggttctcacgcttaaacctgttctcttctggattatttagggtaattttagagttgatgcatgtcagaatgtgcattgacaaaaaggcaatagggcactaaagcagaaaaacacccccaaaatctgtattactacacatctaacgatcagaacatatttggcaacatatcattacttgctaggggaaaaaaggaaagacaacttcccaagaatagaaagaacaagggggaatatcaattaagtgacacaggtaagtgtgactggttgtatcactgttttatgtgattgacccccattc

SEQ ID NO: 42612 - DNA, 541 bp, Setaria italica
  misc_feature (506)..(541): n is a, c, g, or t
  Peptide Sequence Number=SeqID_108586
ttcttggcataaagcttacattaagctcatactatggcgacggtgaaaacagctgcaaccatggtcatgaaggtcctggtgctgggcttagtgctccttgcttatgccgggctgatcgctcacgctcagccgcagtgcggcagccagggcggtggcgcgacgtgcagcaacaacctctgctgcagccagtggggatactgtggcctcggcggcgactactgcggcaatggctgccagagcggcccatgctacactacctagtcagggccgtcgtccaccaccggatgtgcaacaacaacaggaatatatatatggtcgacttgtgcgcagtactctacctatatatgatgaaataaaagtgctgctactacagtaagtacgaacttaagcttgtgtaatgtgcaagaagtaccgaagggcgaggagtatatgcacgcacgtgcatttattaaagcccgtatgtactatgtatgaataaagttgtgatgcatcttgtgacaacgacnnnnnnnnnnnnnnnnnnnnnnnnnnnnnnnnnnnn

SEQ ID NO: 42613 - DNA, 370 bp, Setaria italica
  Peptide Sequence Number=SeqID_108587
acaacccgacgtacaaggaccggaactagacctcacgccgctgaggatgcgcgcgttcgagcaggcccgcgtggtgctgctcggccacggctgcgcggagttcctgctcgtcgtcggcatggacgtgccgtcgggccgctcgctgtccttagtggggctcatggacgagcagtttgatgagttcaagtacaggatcgaggtggtcggcaaggacggcgtgctcgcgctgttcggtcaggccgcgcgcgtggatcggctggccaggccgtaccatgccagcgccttcctgttcgtcccgaacgccatctgggactcttatccggaggacatccccgtgttcatccacctgaagtgaagtacccgggggctc

SEQ ID NO: 42614 - DNA, 542 bp, Setaria italica
  misc_feature (496)..(542): n is a, c, g, or t
  Peptide Sequence Number=SeqID_108588
tacgtggacgcggcggcgcgtgggggtgaccgtgctcgcctgggaactcgctcggcgacctcatcgcgaacgttgcggtggcctcccgcggcggcccctgcggcgcgcaggtggccgtgtccggctgctacggcgggccggtgttcaacgtcctcgtgggcctcggcctgtccttgctgctttcgtgctgggccgggtacccgcagacagtgaagattccgagggagtccgggctttaccggacgctgggctttgtggtcgttgggcttgtgtgggccttggtgatgctgcccaggagagggatgagggtggacaggacgctgggctttgggctcctggcgatatacttttgcttcatatgtattaacatttcacagctcaagaatgaacggtagcatattggattcattcgttgcatgaatcagaggtggctgctttgaaaaaatggtggccagccctggatacgtatctttaatccaaatagattaccggcccnnnnnnnnnnnnnnnnnnnnnnnnnnnnnnnnnnnnnnnnnnnnnnn

SEQ ID NO: 42615 - DNA, 408 bp, Setaria italica
  Peptide Sequence Number=SeqID_108589
ctagaagcatgccgatcaacgcgatgatcagcccagagcccatgcgttggagatcggtgatgccatcggggttctttgtgaaccttgacgccatgggcgcaatgacgaagcggtaggcaaggacggagaggatcacgctgatgatgtcaaacactgacatgcttgcggcaggcacgcggaacttgccaaagaggttggtgtccatggccgtaccttgctccacgaatgtggaccccatttgggtgtactcaagcgagtagatgatggtgcagatcaatatggggatcaagcccaggatgcacttcacctcctccacctgcgtcaccgtgcacaacctaccacggattcttggtgttcccagcatggtagtcctcctcagtcgctatagctgccttatcaagacacctc

SEQ ID NO: 42616 - DNA, 379 bp, Setaria italica
  Peptide Sequence Number=SeqID_108590
aagaactaaggagctggttggacgtccgatgcctttgaggacatcatatagcgcaggtgaagaatgaggaggacagcagtgtttttctgtttcgcagaacttcataaaaccaagccggtgtagttcttaggtatttgtcttataagtacttctctactgaactccagatgcagctgacgtgaatgagaatgttctcttttccggtgcccgccggatcagcttctgcttgcactgccttacagtcacagcatcccttccaacaggctgctgatttgatcgttcttgttaggccaggacaacctcatgtttcttgttctgagcccaggtccgaagactatcccaatcctgaaacctggaaagtcacctgatcatacattgt

SEQ ID NO: 42617 - DNA, 331 bp, Setaria italica
  Peptide Sequence Number=SeqID_108591
gtgaaagctagatcgctcgacggaatccggaagccaccgaggcgagcggcgagctcacgcaccggcacaacaccggcgttgccgacttgaccacggaccaccaccacccaacgcgtggaagtgcgagatggcggcgtcgggatcgggaggcaacggccccggcgggcggccctggacggcgacaagcacgtgggcgccggcccccgacggcggggtcgtggaggacgccatctcgttcgagacctccgacgaagacgccgaggactcccccgcgggcgtcttactctcccgcccgctgcccgatggggacgggaacgcccctccctgcgag

SEQ ID NO: 42618 - DNA, 1742 bp, Setaria italica
  Peptide Sequence Number=SeqID_108592
caaagaggaatctgcaattaggctagagcagaataacggacgtagacgaacccgaggagcaaatccaggaacagcggagacagacagagaaggagagatcagatatagtgcgggagactattaaactgaaagccatgtcagaggcgcaggcgagaatattagaaacaaaagaaactgaagatgtgaagcggcgattgcttgtggatcagataaaagctgacagggagaagtggatcgaagtgataaatacaacctttgagcatataggaggtggtttgcagacgatattaactgatcaaaataagctagttgtagcagttggaggtttaacagcacttgctgcggggatatacacaacgagggagggtgcaagggtagtctggggctatgttgaccgtattttaggtcagccatcattggtaagggagtcatcacgagggaggtacccctggtctggttctttatcacgtgctacaagtagcctcactagcaaactgaagaatggaagcaacccggggaagaatgggaatgggtttggtgatgttattctaaatccttctctccagaagagagtgaagcagcttgctaatgccacagccaacacaaaacttcatcaagctcctttcaggaacatgcttttctatgggcctcccggcacagggaaaacaatggcagcacgagaactagctcgcaattctggattagattatgcactaatgactggtggagatgttgcaccattgggatcacaagcagtcaccaagattcatcagttgtttgactgggcaaagaaatctaataggggtttactcctcttcattgatgaagctgaatgctttcttgtgcgagcggaataagacttacatgagtgaagctcaaaggagtgccctgaacgctctcctcttccgcacaggtgatcaatccaaggatgttgtccttgcactggccaccaacaggcccggtgaccttgactctgctgttgctgaccgaattgatgaggtcctcgaatttccccctgcccggggaagacgagcgattcaagatcctgaagctgtacctggacaaatacattgccaaagccggtgacaagtatgagaagagttggctccggttcttccgacgccagcctcagaagattgagatgaagggaatcactgatgacctgatccgggaggctgccgccaagactcaaggcttctccggaagagagattgcgaagatgatggcaagcgtccaggctgcggtttatggcagcaaggactgcgagctcactccagccctattccgtgaggtcgtggattacaaggttgcggagcacgagcagcggagaaaattggctggagaggagccgaagcagaatgcttaggatgaccattttttgcattcacccccttttgccgtggcatgaagctgtgttttcccgcgggatagatcacctcatcggggcaggtgttcgtttgctccgtcgttattctttgctgcactcaccccactaggaggggggtatttggtggtaggcgatggtaacttgataagagatgaggattacttcggcggtaggtcacacacaacaagctggcctttttgtgaacgggcatttgcctgcaatggtctggttcgctgaccaataatccatagtggctgctatgtttaggggtggttttacagtttctgcagctgtatcacagttcaggcagtgaatgaattgtagtctaattttctttttcttaccttaaaaaaaa

SEQ ID NO: 42619 - DNA, 484 bp, Setaria italica
  Peptide Sequence Number=SeqID_108593
gcagatggtgtcacccttctcgttgcaccaacgctgaatgcatttccggtgtgcatacttgaggctgccacagcaggcgcagggagcctccatgctggagtcccagtcctcctcctgacaaatcctgcactccaccaccttgctcgccgagccgccaccgccgccgcctacggcgcgatggcagtactcgacggccaccgcctccggatgcagatcgaccatctgcttcccgccgccgatcgccgcctccagcgtcgactccgtcagcagccggtccacgagcaacgcgagatggtcacccatcagaccttgtcctaagtaccaagaacagagccccgggaggaagaggaagcttcgaaggctggattcggggcggggttaaggcacggaggggattgggttggattgggggagggggttaagggacgcaagagatggagtgccctcggatgtaatgcagcgatggaaggggaaggaccaaaga

SEQ ID NO: 42620 - DNA, 734 bp, Setaria italica
  Peptide Sequence Number=SeqID_108594
cgcggatggtctggtgaactccccggaggagctagcaggtgaaccgtcacactggctttaccctcctgcagcttcctttgcctttcttccatagcaaacaacttcttcctcagcgtagctgcctcatcttcagcccttcttttagcctccatggcttccctcaaagatgtcttcaaggctggcttcctgcgtcgcctggttcggcgggactccagtccgaagtcactttccgagccttccgttggcttttgacactgttcacggaatcgctcaatggtactagctgctgccttcgccattggcttcccatccttgggtttgtgagtcaatatgaacaaatcctcaactgtaggctcatcattatgccgttgttgcctctcctcttcaattatacgtgcaaagctcttcgttcctgagctatggtaagtggttacattcgcctgacaagccttatttcgagcacttgcagcctgagctttttcagtactccaatatgcaactaagaatcgccactgttcttcaagaacacgaggattccgatcagcaaggcgctcctcttccgtttcatgtgtatcaaaatgcttttgttttaatatggatttccagctcttccacttccttcctaaacttttcacaatccataactcaccaactggagcgatgtcaaatttgagcttgacaatatgaaacatcacatccttgttttctcaggaacacttctccaatcaagatgt

SEQ ID NO: 42621 - DNA, 2972 bp, Setaria italica
  Peptide Sequence Number=SeqID_108595
aggatgaagtctcagcatctccattattagatgtgttaaacagtactggtagaatgaaaatcagggctgttggtaaccagtcaaatgaagaaatatccaatcatgcatttatagacatggagctagagcaaggcacggtgctaccaatttcaagtaggcggcaggttgaacggttggattacaaaaaactatacaatgaggcatatggaaaagaatcatctaaatcaagtgatgatgaagagtggtctggaaaagaactattagaaggcagcgaaacagattcacttggtgagcaacttcagcctgcaaaacggtgctctagaagagcaccagcagggcaacagaataatgaacatacaccacagagggagcggcttcgtggttctgaaagtgagcagcaaactgaagttcttcgctccaatggcagcagtagcactggacggaagtttggtcctatagtaacccagaaattgaaggtacattttgagaaagatccatatcctggtcgcgtgacaaaagaaaatctggcacaagaactaggattgacattcaatcaggtctgcagatggttctctagtactcgtcattattcaagggttgcttctgccaagaacgaaaagcatcaggacaaccatactagtgagaataatgacagcacaaatgcggatagcatgcaaacccatgctggggtgatggaaaagttgactgcggatagaagtgtcattgttcctgaaaaaccgacgatgcagaataatcttaaccaatgtaacaaagaagatatgccactttctggaacagaaattgagatggagtcgtatgggcaagaatcatcagactcgagtgatgaagagtggtctgcatttagcacaccacggaagtcaagattacaagacaatgaaacagcatcacctgttgagtcacttctccctccaaaacggtgttctagaagaacaccagctagagagcagaataatgaacatactcctcagagtgagcagcttacaggttctgcaagtgagcatcgaactgaagttctttgctccaatagcagcagtagcaaagcctccaaacatcattttggtcctatagttagtcagaagctgaaggcacattttgaaaaagatccatatcctagtcgtgcaacaaaagagagtctggcacaagagctaggactgacatttaatcaggtcagtaaatggttttctgctactcgttattattcaagaggtgctgctgccaagaataaaaaacatccggggaaaaatactacagagaatgataatagcttatcctttgatggtgttgaagtaagagaacccaatatcgtgttgatggaaaaaccggctgcagatataaatgacacgatttctgaaaaattgatgatccaaattaatctcaatgaagatattgaagaagatatcccacccagtcaatataccaggtgtgaagagagagctactatgactcccactgccatctcaacggaagttggcccgccgggatatgggcctggagaaaactttcttcaggtcagttcaaggaatactagctgtgagcagaatgtgataatgactcctcctgccatcttaagagaagttggtccaccaggatatgtgcgtggagaaaaccagggcaataatgctccaaggaatatgagctgcgagcaaggagtgtttacgagtcctacaactatcacaagagaaatcggtcctccaggatatgggcctgaagaaaaccaaggcagtggcatttcgtggaatatgagctgcgagcaaggagtgtttatgagttctccgaccatatcaagagaagccggtccaccaggatatggatctcgagaaaaccagggcagtggcacttcgtggaatacaagctgtgagcagggaatgtttattaatcctgcaaccatctcaagagaagctggtccgccaggatatgggcctggagaaaagcacggtaatggcacttcaccgaatacgagctgcgagttgaggatgtttacaagtcctacgaccatctccagagaggtcggcctgccagggaatgaacctggagaagaccaggacaatggcacttcatggaatatgagctacaagaagggagtatttcccacagccatagaagttgttcctccaggatttgggcctggagaaaaccaggactatggcactgcacggaatataaggtgtgagcagagaatgtatacgagtcctacgaccattcccagagaagtcggactgccaggatatgggggagaaaatcagagcaatggtgcttcttggagtacgtgttatgagcagggagtgtttacaagtcctacggccatctcaagagaaattggtcctccaggatatgggcctggagaaaatcagggcaatattaccctgtggactacaagctgcaagcagagaatgtttgctaatcatacgaccgtctccagcgaaggtggtccgccaggatatagcattatagaaaaccagggaactggtggttcaaggaatatagacttggagcagagagcagttgtgactcctggcaccatctcaagagaagtctttccaccaggatacgggcctggagaaaaccaggacagtggcgcttcagggaatgtcgggagcccacaaggtaggtctgcacagaaggtcgaattttcagatgaggctcggaagaaggctatacagcgggagctgaggaggagacagaagttcaggtgatcctcatggtgtgaacaatctgatgcagtgcaacaaattttgaccccgaatcacttaagactgcagatcctgtcttgctggctaaatgagtgacgaccttggctgttgagaagcaaaacccttgttgatgttgttgtagcagttgcgtgcgttcctctttagagacttgctttggcatgtcaagaatttcttatgtgaacctgaagtatttaaacgtgctgtaaatctatgcagtttcctctgttgtaccaaaaaaaa

SEQ ID NO: 42622 - DNA, 318 bp, Setaria italica
  Peptide Sequence Number=SeqID_108596
atctcggctgccgtccgctcctccccgccgaagaatggctggatcatgatggcgccggcaaggcggaggcggagtggaggcgacgccgccgacatggccgcccagcgctgggccacgtggtgaaccatgttgccgcccgagctgtcgccggcgaggaagcagctggagaggtcgacggggaccggtgccaggtcggccggaacggcaatgccgtcgaggtattggagcgcggcgacgccgtcttcgtaggccgccgggaagcggtgctcggggacgaggcggtagttgacggacacgacgacggcgcccaccccgcgg

SEQ ID NO: 42623 - DNA, 236 bp, Setaria italica
  Peptide Sequence Number=SeqID_108597
gggggtggttggtgatgtcgcacggcggcgggtgcagcgacgggaagtgcgcttggcatgctaggagcatgtaacccaaaatctcgatggcggcgaatatgaggattgtgtagaagcgtttgatgtaggagtcggagatgaaagcaccaaacaaggtgaagacgcagattgcaccatacaagttagtggctgtggtggaggcgtcggcgatgcccatatgcatcgtgccatgcaag

SEQ ID NO: 42624 - DNA, 1022 bp, Setaria italica
  misc_feature (988)..(988): n is a, c, g, or t
  misc_feature (1006)..(1022): n is a, c, g, or t
  Peptide Sequence Number=SeqID_108598
caagcgggttcggcccgcgctgtgcctcgccgcgtgcggcgtcgctggcggccgggaggcctgggcgctggcccccgcggccgcggtcgagatggtgcacacgatgtccctcgtccacgacgacctgccctgcatggacgacgacgacctccgccgcggcaagcccacctgccacgtcgtctacggcgagcccatcgcggtcctcgccggggacgcgctgctctcgctcgccttccaccacatggccagcgttggctcctacccgccggacgtcgacccggacaagcaccccgcccgcgtcgtccgcgccattggcgagctcgcgcgatgcatcggctcggagggcctcgtcgccggccaggtcgtcgatcttgagatgaccggcacatctgaaattgtgccccttgaacgcctcgagtacatccatctccacaagaccgctgcattgcttgaggcctcagtggtcattggggcaatcatcggcggtgccacggatgagcaaattgagcggctgcggaagtatgcaaggtcaatagggcttctgttccaggtggtcgatgatatacttgatgtgaccaagtcgtcggaggagctagggaagacagcggggaaggacttggcaagtgacaagacgacataccctaaattgttggggttagacaagtcaagggagtttgcagaaaagttgctttctgatgcaaaggagcagcttgctggtttcgacaaagagaaggcagcacctctattgcatttggcctactatatcgcccataggcagaactgaggtgatgcttactctgctgttgatcttgttgatttgtaactttgtaaggtcattgaacctgggtttcaggaacatccgaatcatcatgtgatgtatactagctgtagctttctatctttggtgtaaggagtctgtttagttgaaaatatgaatatcatatcaaattataaaagtgattgaagccaaccaaaaaaaaaaaaaaanaaaaaaaaaaaaaaaacnnnnnnnnnnnnnnnnn

SEQ ID NO: 42625 - DNA, 262 bp, Setaria italica
  Peptide Sequence Number=SeqID_108599
ccgcctaacacgggccggcgttcgacgacaactacgacgcgcagtatggcgcggatggtcatcatctggtcaaccgggggactcgtccttgatcgaagctctggtaataagttcttgccgaggcggctgatgctgacgcaacgcactagtagctagctagttgcccgtacgttcttgagaccctaccgatcggtgacgttcataggtgaccgtgcaggagctgtgggttccgctccaagtccgtgtacgggtcgggcctctt

SEQ ID NO: 42626 - DNA, 1124 bp, Setaria italica
  Peptide Sequence Number=SeqID_108600
taggtttgtcttgaaagtgcctctttatcaattgatttgcggagagagttgcaaggccgccagcttgtcaaactgctaaccactgatccacttaatggtggaggtccagccgcagcttcaagatttctgtcaaccttaagagattccaatgacgctcttcctgtagccattggtgctatgaagctattacctgacttgcgttcaaagcagcttcttgtacattttttccccaagcgtacagttgggagtctatcagatgctgagattgcacggcttaattcatgggcattaggtcttcgtgttctttccttattgccattgccatcgcaacagcgttgctcttctcttcatgaacaccctcagttgatcgtagaagtactattgatgatgaaacaattccagtctgcttctttgattttgaaagaatttcctacactgagggatgataggttaattatttcttatgccaagaaagcaatctccattaatgtcagttcaactcccaaggaacgtcgaccgagcatctctgcatcaagagcaaaacaaaaaaaggccaccactccagctaaaacaaattttgtgcagagttttggtaacttccagagggaagcacggaaagcattctcgtgggtcccccgtgacagtggcactaaaacacccccaaaagatagccttcggaaagaaaaagttcaggttcaggaggtgatagatcctcttgggatgcattgcctggtgtacaggaggagcgcacacctgtatatccttcagaggggcaagataaacttcctttcgtctctgctcctgatgagtgggtgttgacgggagaacctgacaaggatgacgcaactcgttcatctcatagatatgaaacctctcctgacatcacactgttcaaggcattaatttccttgtgcactgatgagtcagtagctgcaaaaggtgcacttgaactgtgtatgactcagatgaagattgtgcttagctcccaacaattgccccttgatgcctctatggataacatagctcgagcttatcatgcgacggaaacttatgtacaggcccgctctcatgcaaaaaatctacttaagaagctcattgggagtagtgatttgtcaagtggttct

SEQ ID NO: 42627 - DNA, 382 bp, Setaria italica
  Peptide Sequence Number=SeqID_108601
tcgacggcggatcagcggccggcgacgagcgtgctgcggctgtcgtgcggcagctcgtggtccgaggatgatggcatgaggatggctcactgggtcaccacggattccgactttgtcgtgttggagctctagcgatggagatgcgcaacaacaaggactgatcgaggcacaacaacttcgcaagaagattgatttcgttgcaaaacctgtgcatgggcccgcccaatccacagaatcaagcagccggcctgcctcgtctggtccgatcgcgcatatgggctaggctaagtgaccatcgaccttgggcttttggaggccttcccaaggctggctggctggttgttcttcctcgctgaatgggccgtaacacacctaccgaatc

SEQ ID NO: 42628 - DNA, 250 bp, Setaria italica
  Peptide Sequence Number=SeqID_108602
ctccctgacgcgcatggccacctgctccctcctcacctcgtcatccagccggacgccgacgccccacacgtcgcaggcgtacttgcggttgatgtactggtctgcgaaccccggccagcacaccatcggcatgccggcggcgaggctctcgcacgtcgagttccagccgttgtgcgtgaggaagcagcccacggccgggtggcgcaccacctgctcctgcgggcaccacgccgccacgcggcaacgcccc

SEQ ID NO: 42629 - DNA, 765 bp, Setaria italica
  Peptide Sequence Number=SeqID_108603
gtactctcgattccaaccgcgtccccggaggccggagccatgaaggccggcgtcgaccaccaccaccacggcctccactcccccaccccggcggcggcgaccaagatctcgatccccatctcgtccggcgaggcggccctgttcgggaagggcaggtacaaggcgtgggccctcgcggccatcgcgctcctcgcgctctggtccatgttcgccgcttccgtcaccctccgctggtcctccggggagctcgctacgttcgggaacgcaagcgacccgctcatcgacgaatttgatccccttgagatggaggaaagggaaaagctagcgcgccggatgtgggacgtctacacacgcacgggcgatcatgtacggcttccacggttctggcaggaagcatttgaggctgcatatgaggagcttgctggtgatgacacacaggctagtgatgcggctatatctgagattgctcgcatgtcagtccataggcctgaggttgagcagtcgtggaataagaattaggagtggaacaggatgaacattcggaagagttggaactggtaggctgaagcagaacgggatgggcagttggaagagctgaactggtaggctgaaggtgaagatcgttttgtccctgtaaatgatgccatcccgtctgaagatcactcgcaaagtctggtgtccgcagcagttcgagtttttaagctgcgctgtatagttgttgacttgcttgccagtgcaaaggatgcattttgtccttgttagtct

SEQ ID NO: 42630 - DNA, 804 bp, Setaria italica
  Peptide Sequence Number=SeqID_108604
aagatagctagaacttagcagagatgaagcaccacaacagcagataccttcctcaatcttcaccttctgatcacccctcttttgtttccgaccaccggtcggcgatgaaggagatagccagggggcagtctctggtgacgcagctgagggccatcgtccttcctgcgctgcaggcggaccaacgctgcgagcttgttgcccagatgttccagaacattctggattgctccagcaaggccataactgagctacagcttcaccatcagtctaatgctcgagctgatgacgcactggtggatgacaagaagagggtgagggatttctctctgatgactgcatcaaggaggagggtgctactgctaacctcatcatcagcacaagagaagcaggaaatctgatgattcggtgtcactcgaaacgcctgttccacgctatgatggccgccaatggagaaagtatgggcaaaagcacatcaacaaagcgaaacatccaaggagctactacagatgcacctacaggcatcgggcgcccgtccccatccttgtctcacccatccctcatctcgccctccgccagaaagccacgcgacctcctccaagatccaggttcaggtgcgccacttttgtttccgaccaccggtcggcaatgaaggagatagccaggggccagtctctggtgacgcagctgagggccatcgtccttcctgcgctgcaggcgtaccaacgctgcgagcttgctgcccagatgttccagaacattctggattgctccagcaaggccataactgagctgcagcttcaccat

SEQ ID NO: 42631 - DNA, 366 bp, Setaria italica
  Peptide Sequence Number=SeqID_108605
cttacaaaacgggatacaaataggcaatgctaataactaacatgcatgtatagatctttgagggaacaatcatccaagaaattaagaagaaacaaaaaccttgccaaagtcttcaataacagctccccgggtaatctcccacagcttgacagaaccagcagtatcctgcagaaaaggaaatgggtgcatacaccatgatgccactccttgcagttgaattaacaacaggacacgtaaaagtaaattttgaaatctacctttgtcagtacatgcctcctattattcattatctcatgctgaattattgctggaactcctgggataaccaaagatggttctttgtatacaggcacaggtgctgatccc

SEQ ID NO: 42632 - DNA, 2872 bp, Setaria italica
  misc_feature (1)..(29): n is a, c, g, or t
  Peptide Sequence Number=SeqID_108606
nnnnnnnnnnnnnnnnnnnnnnnnnnnnnttttttttttttgggggggaaaaaacaattttattgttaccgaactttgttcacctctttccctggttcgatccaaataggtccaagaggaatgaacagggtgaaaccaataatcgatggcaaaacgccacaccatctgagatgagcatccgcatttcttacaaaccatatatgtaaaaaaaaccctaaaaaaccatatccatttaatctttattaagcacccagtctctacatttacaagcttggcggccagcagagaaccttatacctgtgctatgatacatcttactagcagggcaagatcaggaactttacaaagaagtcacgttttcaggaacagctaaggcataatatttctgtaagatgatagtttcctctctaagccatgggcatcttcaacaccaccaaaataacaccacccactgtgcaaacatgctgaacgcttctggagaacaaagtgagcatgtacatctggagctgcgatcatctcgactgcaccactctataatgaagaattaagtcttccggcttcttccaaatatatgttctcactgtagccaaactcatctctggcgatagaacctggttattgcacaatatctctacacatggctttagtttttgccatgcctttagtccaatccgcgaagaactatctagcgctgagagctgcgattgaccagaactcaatcccatagcaaatgtgctgtcagagcctccgtccaatggtttttcaagaacgagtttctcgaccacataattagctactttgtgaatccgcaatatccgtggagcactcagcttgccttgagttatgttcggtgctggtgatccctcagcaggatgcaaataaaagccgcattttgtattctcctttggataacgattgtgcgtgacacagtcaacacaccaccatgggagatcaccctcagttccatccaaatcagtaattctctttctccagggccctccactagaaccttccgtgataattgacggaggcgaaaccgtggaaaactcaaatgacggaagcacatgagttgcatggttttcggtcccatcatccacctcggatcttgaccgcggtgagtcttttgaaggaagatccttccctgatgaactatcaccattcgacaagctatgtgaaccagacttctgttttcttttactccaatgaactagcaaaccacgaagggtctcctgagccaaattaatcttaaggtcttcttgtgctccagaaacgtttaggtcaaccgcatatatttctgcagaaaagcattgtggagtatccaggtgtacagacaagcatcccaatcgagcatccatggtgaaccaggcaggtatgcttaccatctcaaacaactcttttttcttatcttcaaaagaaaccttgccaaagtcttcaataacagctccccgggtaatctcccacagcttgacagaaccagcagtatcctttgtcagtacatgcctcctattattcattatctcatgctgaattattgctggaactcctgggataaccaaagatggttctttgtatacaggcacaggtgctgatccctctaaagaagctcttgcccttgagaatgacaaattcccagctaagaatgagccacccttttcgaagaccttttggggtgtgtgtccttcagctggccatccataaacagaagaatcggttgttgcaacccatattgtgtcatcttgcagagacagctgtagaatagggtattcatttgtgcagagtaagacactctctcttgttgacaaatctgtcaggtatacagattggtctcttccaccactgtagacatgaccaaatgaaggagtgcttgcaagtgcccaaactgaatcagtatgcacagcataagaatggacacaacgctgctgtcctagatcccatagtcttatcatcgaatcagatgatcctgatagacaataccttcctgtagaatcaagaagcaaggtcctgatattgtctgtgtgccccctcaatttcatcttttttgaacctgtcctgggatcccacactcgaacaaccttttcagtgccaccagagacaagaagggttcctgtatcattcatagccagtgcataaactgaatctttgtgacctttggcggcaattggactgtacccatgtgattgtccattagaggaagcaatgttactactagaatttacattgcacagagttgtcaaagcaggtccggagtttccattaggaacttcatcctcttttgcatccgcagatttggctacaggagcaagagcagcatcaaggtcccaaatgaagacctcaccaccaagaccaccagaggcgacaatgttactattcttctcagcagcagcaagacaaatcacataatcagaatgctggcggagagtcctggtacaggcaccatcagagaagcaattccacaccttcagggtggtgtctgaggaacaggaaacaagcttctcaccaactatgatagcatcattaacccaatcgacatgtgactcaaaagttgctgagaaacttgcatccccattatttaattcccatcgtttcaaggtaccatctcgactcccgctaaaaagataatcacttgtactatttgcagaaccatttagataagccaagcagttaatccctgcacaatgctttttagcatcagcatcatttagcacatacgtgaagcgcttctcctttctcggtcgagtcgagccggccgtgttaccagcactcccaacacgatgcattgaaggaagctatccaaactaggggcaactaaacctgggatcgggcgacgggcggcgatcggccggtcgtattcggtcggtcgtcgtatgcgtcc

SEQ ID NO: 42633 - DNA, 333 bp, Setaria italica
  misc_feature (216)..(216): n is a, c, g, or t
  Peptide Sequence Number=SeqID_108607
cgcggcacaatctttataccctcagtggattgatccggtgggtttggtggtgagctaaagatggaatgatccatctccctctccagatgcttggccagaaggaagaaaagcaggatccgaaaagggcgtctagtctccatccattgttcgtatgacttcaggataggcctgcctaaactatcagccactacctcccatcaaaatctagcttttagngcatctgaccaggttcatgaccactatcattatgggtgtcatcttggtgcctgcagaatctggtcccaattgctgcgcccctgtatatgctcctcactttcatgggttataatcaag

SEQ ID NO: 42634 - DNA, 423 bp, Setaria italica
  Peptide Sequence Number=SeqID_108608
aatgaggtaatggactttacacaaatgatgtttgaggaaacatgtaatcgtctaatgaaaaactgtatcaaatgactcctttgtatcagcctatataatgacatatgcaccaattgtcgatgtcactgccatcccaaaatcacactggtaaagctacatcgctgagcagtcccaggtagtctcattcatagagagatgatgtgactagccgagttggcccctgttccccatgcattggccgtcatcggtctgcctaaagatttagctccatggtccttcatggtgttcaaagaatcaggtcatgacattacgactccgagaaggatttttgcagatgaacattaagcacactgcccctcatattctggtagcctatagaacaccaatctcaagcctcaatggaacacagactaatagattaac

SEQ ID NO: 42635 - DNA, 336 bp, Setaria italica
  Peptide Sequence Number=SeqID_108609
cggcctacgtgcgcggggccgacaaggagctggtcatcggcggcgacgacgacgtgttcgggcggggcggcatgatcggcaggaggcagctggacgacctcaacggcacgagcgccgacgcgaacgccacgagcgccgacgccaactcgacgagcgccgacgacgccacgacgacgacggggtacatcagctacctggcgctgtacagggacagcgtcccgtgctcgcagcggggcgcgtcctactacaactgcggacccggcgcggaggccaacccctacacccgcggctgctccgccatcacgcagtgccgcggatgagctaggccgctccgcc

SEQ ID NO: 42636 - DNA, 450 bp, Setaria italica
  Peptide Sequence Number=SeqID_108610
ccctacaaacgtaaatttgcttggcatacctgcatgtcatcttgcggtgtatggtacatataaaatgatctgaaggcattcataagctatctgaaaacaagtatcaatgtatatggacaggaccgcacagtcccgcgccgctcctgaaccaaacacaaccttaagttccatactatagtgttctctaacagatatagttcatttattgatatcaaccaaactcagaaaatctgtttgaaaacttaaataatatgaaacttaggtgcagcacgcatatacaagctacagggcattaccatgttacacaaattattgagattgatggacaaacaaacttccatctacattagttactgtaggaggcaagattatcatcaactctactatataagggaattcagcagtagaacaccatgtacagaggataattggctaatatgttagttgatg

SEQ ID NO: 42637 - DNA, 569 bp, Setaria italica
  Peptide Sequence Number=SeqID_108611
gggagcagaagtttctagcaacatatccgagtgttgatggcatagaaaattaccacaatttgatggcacacgaagtcgccatgatttgatggcatagataccggaaccgaagtagaagcccagactgcacagataagagaaggaaattttaagtagtagaatttttaacaatgttagatgttcctttgtcatatcaaattccataggttgtaggcacatgagcagacatgaatccatattctaatatgaattatgcaaaactgctctcatactaccagtgcctatgatgcatactgcaagggtgacctagattcccagcaagtttaactcaactgcgcaaccttactacttttcagttttcatagaaaactttttcagttctcaacagatatagcattttcttgctgaataatctatagttgataggtatgggatgataaataattttgatagcttgtgtagcaatcagtataatcaaaacagaaattcatatatgatgattactgagcttttattagccacaaatctggggaccgaaaccaaaaaaaaacactgagagagaaccttca

SEQ ID NO: 42638 - DNA, 540 bp, Setaria italica
  Peptide Sequence Number=SeqID_108612
tttttttttagaaacaaagaacaaacgtagctgaaccagcacggtaattctatatagtatatagtacttgtacattcaaaaacgaacagggtgcttgatataataacaccaaagacaacaagctgcatagacataagatggcaacagcctaatgctcaacctggagttctttttcaacttttcacttaaagaacataaatctaaaccaattttgttaatacatagttgtgaccagcggataatagtcatcacaggagtgaatgaatcctgtcggaaggtagaggctggtaatcattctctgctagggaagctgctatatgatgcttgattgtgtacagaactgacagtgcccagccctgcacttggtctccaccgggaccaaaggcatactatggctgatcagcacgtctacgggccgggcatcctgattgggaatgttactgttttgcacatttgcacctatagcatgataaatgtcatgaggctccccatcctcagttgtgtatgatgcagcaatggaagatgcaattgacaaagccc

SEQ ID NO: 42639 - DNA, 575 bp, Setaria italica
  Peptide Sequence Number=SeqID_108613
cttcaggcagcacggggtctcttgctgttcgaggaaatgaagtccaagcaaggtctgtccttcacattattcaccaaggaagagctcgaagaggcgaccggcaaattcgatgagcggaatgtgcttggcaaaggagggaatggcaccgtctacaagggagttctgaaagacaaaagattagttgcgataaagaagtgcaagttaatcaacgagagacaggagaaagagtttgggaaggagatgctcatcctgtcccaggtcaaccacaggaacgttgtgaggctatacggctgctgccttgaggtggaagtccctatgctcgtctacgagttcatcccaaacggcacgctgtaccagcttatccatggccggccccatgggtctcgcatttccttcacgacacgcctgaagatcgcacatgagaccgccgaaaccctcgcgtacctgcattcctgggcttcacccccaatcatccacggcgatgtgaaatcacccaacatactaatcggtgaggattacaccgcgaaagttgcagattttggagcttcagcattggctccgacagatgaggcaca

SEQ ID NO: 42640 - DNA, 478 bp, Setaria italica
  Peptide Sequence Number=SeqID_108614
ccggccttcggggaggtcgccgtgggcaagtacagggccgagacccactccatcgacttccagaaaaaggctgatgaagctgctggccaagtgaactcatgggtagaaaaaatcacatctggtctcatcaaagagatcctccccccaggatcagttgaccacaccaccaggcttgttcttggtaatgcgctctatttcaaaggagcttggactgagaagtttgatgcatctaaaacaaaagatagtgagttccaccttcttgatgggagctcagttcaagcaccattcatgtccagcacagaaaagcaatatattgcgtataacaacaacttgaaggtgcttaagcttccataccagcaaggtggggacaagaggcagttctccatgtacattcttcttccagaagcacaagatggcatctggagcttggctgaaaagttgagctctgaaccagagttcctggagaagcttatcccaa

SEQ ID NO: 42641 - DNA, 920 bp, Setaria italica
  misc_feature (879)..(920): n is a, c, g, or t
  Peptide Sequence Number=SeqID_108615
ttttctaaaggtagtctttggtacttgtagtaagttttgtattgtctattcttagaactttgagtattctttgacaaaagatagtgagttccaccttcttgatgggagctcagttcaagcaccattcatgtccagcacagaaaagcaatatattgcgtataacaacaacttgaaggtgcttaagcttccataccagcaaggtggggacaagaggcagttctccatgtacattcttcttccagaagcacaagatggcatctggagcttggctgaaaagttgagctctgaaccagagttcctggagaagcttatcccaatgcagaaggttccagttaagcagttcaaggttcccaagttcaagatatcctttggatttgaggcatccaaattgctcaaaggtctagggctccagctgccattcagcccagaagcagatctatcagagttagtagattcacccgagggacagaacttgtgtgtttcgtccgttttccacaagtcttttgtggaagtgaatgaggaaggaactgaggctgccgccgcatctgctgcaacagttgtgctcaggtcgttcacaatgcccatggatttcgtcgcagatcaccctttccttttcctgatccaagaagacatgactggtgtggtgctgtttgttggtcacgtggtgaatcccctacttgctccatagtgtctgtgtgtgttcaaaatcgccgccttggtgtgatttccatcatgtcgtgtttgcagggctgtgataattgatcgtgccttctgtgtaatctgacttttgtttgtttctgaataaatggatggcttgatcgttagtaaacgatgtagcctccatggccggcatcatggtccttcctgttaaaaaaaaannnnnnnnnnnnnnnnnnnnnnnnnnnnnnnnnnnnnnnnnn

SEQ ID NO: 42642 - DNA, 594 bp, Setaria italica
  Peptide Sequence Number=SeqID_108616
tacataatagcgttgtaatcttgagacctaaaaccttggtgataaaggcacccttgggggcgaggaacattgtagcgaggcgcagggcgtcgatgaccagcgccgactgcgatgtggcttcctgcgcccaggcaccaccgacgttgggtgacccgtcgtggagcacgacgtcgaacgcggagacgccgttagcgtccatcagcctccgcaccgcggcgcggcacttggtggtggtgatgtcctcggtgagcgagtgggcgccgcggatggggcggatgggcacgaggtcgacgcccacgacgaaggctcccacgggggcatggttgacggccacctggacccaccctcccggcgcggcgcagaggtcgagcaccgagcgcgccgtcgggaggaagcggaaccgcgcgtcgagctggagcagcttgaaggccgcgcgactccggtacccttgctccttggcgaggtggtagaacttgtcctgccggctcttccccttcgccttacccatctccgccccgctgcttcacccgccgccgacgccgaagggacttctcagcgaggacgaggaggtgggcgctagggttttggaggtgg

SEQ ID NO: 42643 - DNA, 339 bp, Setaria italica
  Peptide Sequence Number=SeqID_108617
tgcctagcgatcacgaaccagagtgaattcgtcaaaccacaaattttcacaaagtatgttacaacttagaaacaaactaacagacaaattaggtactgtattttcgcttctgctgtcaggaatcaagagactagacatgaagaagcaaagactgttgagatcagacacgttacatcttccgacttgttactaataagatgaagcatatcatgtcaaagagcaacgatcatacacagcaagatggttcatgtgaataaggaatcatgaaggtgtcaggttttgaaaactagcataggatgcattgcatatcctacctaccgttagacgagagctatttag

SEQ ID NO: 42644 - DNA, 604 bp, Setaria italica
  Peptide Sequence Number=SeqID_108618
aaaagtcaaaatatcaactagggatgcaaattttcatttacaaccaactcatatgcaccaagtgcaactggtagaaatctgaatactaaactagctgttggctgctctgataggtaacttctccacagtcttgggcactcaagtgtaataaaaaagagagaggagtcttaattgctgatctcttcaagaacaagatattgtagcgctactgagtacttagcttttcttgctttcttggattcgctttctgaactgccaatattcttaagtatgtaggatcctgtgccgtcacctcgtattgcatatatggaatttatccatcttttgtaaatgaacagcgatcttggggtatcaccttgcagtacatcagatagtaatagattgcaagaaccaagggttcccagctttgcatttgcatgcccaatagcattgtggcacaaagctaacacgcggaccatcgcaagatctcgagccctagtagtcccatatctttgttggcagctcctttcagagaagaaatctgcaaaatcatcaacaatgactgcagcgggaagttgtcaagaaggtgaaatgcagcaaagtactttctgatctcgtcaccatc

SEQ ID NO: 42645 - DNA, 493 bp, Setaria italica
  Peptide Sequence Number=SeqID_108619
aaatcagaacccaaacttgtacccttgtttccacagtctgcatcgaacttaggagacatcactttagatatttctggaaccaactcttcatcatcatgaactacttcagaacaggtctgaatataggcagtttgtttctgtggcatgggcattccagcttccagatgacaagaggtaacaggtatatcactcccatcagaaggcaaactcttgttttcacaatcttcatcatgttttggcaagatatccatggtttcaaattttcccaggaccaatattttatcaccattaaccactcggtggcagctcctgatgctttgggtttctttctgttggagggatgtttcattttccaaatgaccagcagccacatggctctgcgtttcgtcttccgacgaagtcttcctatccccaaaactgtggttgcccaacgcgtccatggttttagaactttcaagcatcaatgatgaatcacatgtgatttcttgaacgt

SEQ ID NO: 42646 - DNA, 653 bp, Setaria italica
  Peptide Sequence Number=SeqID_108620
cgtcttgtcacgcagacgctgaggggcctggccagggatggcaggacagtgattgcctccatccaccagcccagcagtgaggtgttcgagttgttcgacatgctcttcctgctgtccagtggcaaaaccgtctacttcggccaagcatcccaagcatgtgagttctttgcttcagccggtttcccttgcccgcctctgaggaatccgtctgaccatttcctgaggtgcgtcaactctgacttcgacaaggtgaaggccaccctcaaaggatcaatgaaagcaaggattgagatatcattgactttctcccttgcggcgtagtaatactgggacctgctgtatgatgcaatcaacttcctgatggcttctgatgtggtcatcctatccagggggtcgtcagacctctcaatccttgctttcattgatcctttgagggtggccttcaccttgtcgaagtcagagttgacgcacctcaggaaatggtcagacggattcctcagaggcgggcaagggaaaccggctgaagcaaagaaactacaacaatagacttagggaatagacttaggaaccgaaagtaaagaaacggttttaagaaccaaactaaggaaacaaagaacaaaggaaaagaaagaacaaataagtaacgaaaacaa

SEQ ID NO: 42647 - DNA, 1345 bp, Setaria italica
  Peptide Sequence Number=SeqID_108621
ggaactgaagctaatttgggtacaggtatacatacatgtaatgtgagcaaagtggcatcggaaaatgccctattcctgctaccacccaaaacaacagctttatcctctagccctcgttggagccaagctctggatcaacaacatagcctcgtagggagggtgtcttgccgaaggtggcgcttgggcctttgttctgcatccttttcctggcgacgtggccacggatccatggcagcacgtcctcgttgatcttgatcatgaggaagaacaggatgcggtagatgaagatcatgctgaagataaccgacagatcaatccacttggaccgatccacattgatctggaagatgtacttcaggatgaagtcaccagggattttgggttgatccgggtactggttgtcaaatacgaggcctttcatgtcattctggcattggccctgcagtgcccagtaatggaagctgatgtactgcatggggtatctccaaaatggctttgggatgtcatacggaagtctgaagtatcccgagaccagcataaatattccctgtccaaggaaaattgtgagaatttcttcttgctaagccccagagctggagctttctatggaaagtaaattgatgtttgttttgtggtggcatgaaactgttcaacataactgaaacattggactactgttaaatatcttttgcagtaatagctaaagcaagccaaatatttttgccacagatagtaaatacaagttcaatggtaaattgctgaacttgtactggaatatgtagtaaagctccaaataatactggtgaggagtggttatatgacaagctggatgccttacaagcttacaacccttactggatcagcacaaggtaaagtccttcgtattgtggtcccagaaaaccttaccaagtttaggggctctataattcatgatttcatcttaaatgtcacatggtcgtttatgtcaacttgtgccatattgtaggggcatggaaaatgacatgagaaagggggtgaaaatgccatacctgaattccagctcctatgatgatacccatgagaaaattgggaatgacactggcaattgccatcattaagctttccaccacggtgacactggcgtagaggttcaacacgaaaaagatgtagtgttcaaaacccggatgaaggcgcaccataaagtaacatatggttcccgacaagaagcatattagaatcaggaacggcgttgctgagatagtgttgctgatgacaaacgatgcaacaccatagtgcccattgagccgttccgctggaaaaccttcatttctcgacaaatgaagggaaccctcaatggacatgaatg

SEQ ID NO: 42648 - DNA, 450 bp, Setaria italica
  Peptide Sequence Number=SeqID_108622
atactacaaaggacttggagaacataaagaacatgatattggagaacctctcaaggatagaacatgttcccagcactcagttccatgacaggccgtcagatcctgaagctccagaggagaaagaggaggacatggacaagaggccacctcagcgcagcagattatggagtggaggagcttatgattctgatacagaggatcctgacaatgtgaaaagtgagggaggaaccgaatgatggtctgtagaagagcccccgagcaagttctcagcactcatgatcgttgatgtgcatgctgaagagtggggaagcatctgaactcgtattgataccttccccggagcatctgtagaacaccgatcgtttcggctggttctaactcctgcgtgtgaactcgatccggccatttggcgtgtccctcaaacgtgttggactagagaggcaaggtcta

SEQ ID NO: 42649 - DNA, 1909 bp, Setaria italica
  Peptide Sequence Number=SeqID_108623
agtactgtataccccaaatcgaaaggggagcaaactgcaaagaaaagggggagagagagaaaaaaaaaagactcaggcgaaatggcggcctccggcgagggcgcgtcgctgccgtctccggcgggcggcgaggacgcgcaccgccgccgcgtgagctacttctacgagccgtccatcggcgactactactacgggcagggccacccgatgaagccccaccgcatccgcatggcgcactcgctggtggtccactacggcctccaccgcctcctcgagctctcccgcccctacccggcctccgacgccgacatccgccgcttccactccgacgaatacgtcgccttcctcgcctccgccaccgggaacccgggcatgctcgacccgcgcgccgtcaagcgattcaacgtcggcgaggactgccccgtcttcgacggcctcttccccttctgccaggcctctgcggggggaagcatcggcgccgcggtcaagctcaaccgcggggacgccgacatcactatcaactgggcgggcggcctccaccacgccaagaagagcgaggcctccgggttctgctacgtcaacgacatcgtcctcgccatcctggagctcctcaagttccacaggcgtgtgctatatgtagacattgatgttcaccatggagatggtgtggaagaggccttcttcactacaaaccgagtcatgacagtttcctttcacaagtatggggattttttccctggtactgggcatatcactgatgttggggcggccgaagggaaacattatgctctgaatgttccactgagtgatggtattgatgatgccaccttccgtgatctgttccaatgcatcatgaagaaagttatggaggtttatcagccagacgtggttgtcctccaatgtggggctgactccttggcaggagataggttaggttgtttcaacctgtctgtgaagggtcatgccgactgcctccgtttccttaggtcgtacaatgttccattgatggttttaggtggtggaggctacaccatcagaaatgttgcacgctgctggtgctacgagactgcagttgctgttggagttgaacctgataacaagttgccttacaatgattactatgagtacttcggccctgattatactcttcatatccaaccaaaaagtgtggagaacacgaatactacaaaggacttggagaacataaagaacatgatattggagaacctctcaaggatagaacatgttcccagcactcagttccatgacaggccgtcagatcctgaagctccagaggagaaagaggaggacatggacaagaggccacctcagcgcagcagattatggagtggaggagcttatgattctgatacagaggatcctgacaatgtgaaaagtgagggtaatgacttaatcgccaactcgcacatgaaggaggaaccgaatgatggtctgtagaagagcccccgagcaagttctcagcactcatgatcgttgatgtgcatgctgaagagtggggaagcatctgaactcgtattgataccttccccggagcatctgtagaacaccgatcgtttcggctggttctaactcctgcgtgtgaactcgatccggccatttggcgtgtcccgtcaaacacgttggaggagagaggcaaaatgattgtgctggcacgagttgcgttcttatggatttggtgctctagtgcgttggaacaatgctgtagtgagtataaattagcccattgaatttgagatttttgggtgtctgcgatgcttctaagttgtattgtttgatttactgcatggatggatgcaagccgtattgttggccatgtgtgtggccgcctgcaggatgttactgttgaaatagggcgttcctgaaggaccaataagccatccagccccga

SEQ ID NO: 42650 - DNA, 444 bp, Setaria italica
  Peptide Sequence Number=SeqID_108624
gacaagtgcttcagtacagtgggaatgctgtattttttaagagcattgacctttcttacaacaggttagtcggaaaaatacctgaagaaataggctcacttcttgggctaataaatttggatttatcatcaaacttcataaatggaagtatcccatataagatatgcaatctacaaggcttggagtctctcgacttgtccaacaaccaactttctggtgaaattccttggtgcttgtcaaatttgacttcactgagctatctgaatttgtcctacaataacctatcaggtaggataccctcaggacatcaattagacactctcagggcagatgatcctacttcaatgtacattggcaatcctggtctttgtggacgttcactgccaaaggtatgtcctggagatcagccgccagtacaaagagatcccgtcatatcgcatgaag

SEQ ID NO: 42651 - DNA, 639 bp, Setaria italica
  Peptide Sequence Number=SeqID_108625
tgcgcctaatcgaggcgaccgatctaccgaagctgcactaccttcggtgcatcatcatggagacctttcgtctgtacccaccagcaccactccttgttcctcatgaatcctcaacggactgcacggtggacgggttccatatccccaaggggacaatgctcctagtgaatacgttcgcaatccatagggatcctgagctgtgggatgaaccggaaaagttcatcccagaaaggtttgagaatgggaagagtactgaaggtaagatgttcatcccattcggtatgggaaggcgacgatgtccggcggagaacttgggcatgcagatggttggtcttgctcttggaactatgatccagtgcttcgattgggaaagagttggggaggatcttatggacatgacggagggctctggcctaaccttgccgaaagaggtgcctctggaggccttctatgaaccccgtgcttctctgatcaatcttctttcagagatttagtttttccttttgagaaaatctcagagatttactagtaatgttgagatgtaatgttgttcatgtttgctgtgtaaggccaccgctactaacgttctttatgtgtgtgatagactgatagcagtaccaatgtattaggccccggccc

SEQ ID NO: 42652 - DNA, 382 bp, Setaria italica
  Peptide Sequence Number=SeqID_108626
tttttttttttttacagtaataatgtcagtaatacttgcaataatccatattcattactcatgacatataagaggcatctactcttctgcgcaagctatatatatcaaccacctgcgtttcttcttgaactcttatggggcttataagaggctgaatacacagcacagggaaaatgatcaaggacatatacaacaacggtacaaaaaatccatttggcgttatccactgaatgtgaggaagatagttggctggccccaaggcatttgttgagttatggctccgattaactcgggccaaaggcctgttcgaggagaaaaatcacatgaagatttttctcggcgtggaaaaaggaatgcgggcatgccagtgtactaagtacac

SEQ ID NO: 42653 - DNA, 456 bp, Setaria italica
  Peptide Sequence Number=SeqID_108627
agtaagactaagttacgaaacaaatacaaatacaagctgaacatctgctcggcaatcgccaagtgcacggaaatgaaacacatgatgtcactgctagttctggagactctgaaacgtttaatgatattgctgctcgtgctgacaatcaaacagctgagcatctctacagcaaagtgaacagtcaaggggatggaaatgcaacacatgaaggaaatgctaaatctggtgatggtaaaaatgtttaagtgataatattgcttgttctaacaatcaatcttctgaacatcaccatagagaaatggacagccaagggaatggaattgcaacacacaaatgcaatgctgattctgatactgtcggtgatcagggcaatgtcaattctgaagctactgataccattggtgagaagagttgctattctgggtgcctctccttacctgatcatccaaatatcta

SEQ ID NO: 42654 - DNA, 329 bp, Setaria italica
  Peptide Sequence Number=SeqID_108628
agggtcttctccctcgccttctcagcttttgacttgtggatgctctccatcagcaccctcttgttcttgaagctatttcccttgaccttaacatacatctcatgatacatatgtttatcaatcttctttgcctccctgtacttgcggagcctagcctccctggtacccctgcgcttaccatatccagagtggcgtcccttctgcttggcctcatgcgccctccttgcacgggacctggagtggatcttctgaggcttcctgatgatgaaaccatccttaaccaacttcctgatgttctggcgggagttcgccatggagatctcgctgac

SEQ ID NO: 42655 - DNA, 249 bp, Setaria italica
  Peptide Sequence Number=SeqID_108629
ctactacattgatccaactacaacaataaacgaagatatgatattcagagatatcgagacacgaaagcttggacatatgtaacagcaaaacagttcagaggcgctccaaaattaggctactcctggtaccagaaagctaaagctggggatcgatccttcatttcttcgccttctttggtgccctgaaacattggagaaagcaggaaaaacacatcaacaaaacataataattgaacctactccaggaaa

SEQ ID NO: 42656 - DNA, 188 bp, Setaria italica
  Peptide Sequence Number=SeqID_108630
tctcaaactgattagacaacgtcttctctctggccttctcagccttggacttgtggatactctccatgagcaccctcttgttcttgaacatgttacccttgaccttcatgtacatgtcatggtacatgtgcttgtcaattttcttggcttcacagtacttgcgcagcaggcgcctcagaacacgcatc

SEQ ID NO: 42657 - DNA, 640 bp, Setaria italica
  Peptide Sequence Number=SeqID_108631
aagggacaaacaattttaagaaaaaataagtcaaaccaatgaaccatgactgatagacaataaaactataacattcaaacccatggatcaccaattcaccatatgccatagtaaataaattttcagaacatactttcatttcaatggatcaagaagcaacaactaaatagaagttcaaatttggtagtccttaagaattatagtatcacatggacacaaaacgaaattccagcatccatattaccaatcaccaggatcatcaccactcagagataaatgcagattgaatctataagacactatcttacctgggccaacctctcctccctcctggcaatcttcctctgacggcttgccttgctcttggcacgcttggcctcaaactgatcagaaagcgtcttctctctggccttctcagccttggacttgtggatactctccatgagcaccctcttgttcttgaaactgttacatatgtccaagctttcgtgtctcgatatctctgaatatcatatctcgtttatgttgagttggatcaatgtagtagacttgtttatgcagagttttctttgcaacagatctcagaaaatctggttatgtttatggatcgaagttatgggttctaaacctaaaaaaaaaa

SEQ ID NO: 42658 - DNA, 920 bp, Setaria italica
  Peptide Sequence Number=SeqID_108632
ccgttggcggctccgcccccctccgtccggcttgttcgggaagctgacccatctggcgatactcttgcccgcatggaaggcagcgagctcacatccctcgtgtgcacgcaatgcccgtgcctaagagacctcaatctcttaatcatgttggtcgatgcctccaacctctccgtacgctctgagtcactgcaatcgctgtggttcagtgtctggaaaacacgacagctagagatcgtggcaccaaggctggaaaagctgtctgtatctaacgccattgatgaggcgcgaatctctgccctgaagcttgcagagctatcctggtccaacgccgcctacgaccctcggtgccaccagtttgatgttggccatcgcctccggctgctagaactcggtcaaagttctacggtggcgtccctgatgcagcaatttgacgaagttgatgagttgaaactgggcatctccattccacagggaatagatggctacgaaagcttcttgaatgcaaccaacaagctgcccaagtgtaagatcttgagcatatcctcagcatgggaacaccatggcttggtaccaggcatgttgcatctcttgaggagttgcaacagtacgaggaagctttccctatttgattgctgtgactccgcatcgaagcatacctgcctgccatcttgcccttgtcgcttggaacagagtcacaggattgatgctatttctctcaattcacttgaagaggtagaaatcacttcctatacaagttcgcatgaagtactggaatttgtggagtaactatccaaatgcaatgcggcaatcctcaaaagggtgtcatgaaacataggatgaactctgcgacaaggaaggttagacgttagaaaaagtaattaccgtactaagtaaattagtttacctaagtacctaaatta

SEQ ID NO: 42659 - DNA, 725 bp, Setaria italica
  Peptide Sequence Number=SeqID_108633
aattgaccaggagtcaaaccttgcaaagaaaacactgcataaataagtctactacattatccatccaaccaaactgagctatgaagatatgatattcgagatatcaagacacgacaacttggatatatgacagaaaaaaacagttcagaggtgctccaaaattataggctagtcatggaaccagaaagctaaagcttcggatcaacccttcacttcttcgccttctttggtgccactgcaggcggagctggagcagcagctgatggtgctgcaggttccctcgggccctgggccaacctctcctccctcctagcaagctttctgtctctgctcgccttgctcttcgcacgtctggcctcgaactgatcagagagggtcttctccctcgccttctcagcttttgacttgtggatgctctccatcagcaccctcttgttcttgaagctatttcccttgaccttaacatacatctcatgatacatatgtttatcaatcttctttgcctccctgtacttgcggagcaggcgcctcagaacccgcatccgacgcatccacaatatcttggtgggggagcctagccctccctggtacccctgcgcttaccatatccagagtggcgtcccttctgcttggcctcatgcgccctccaggtcccgtgccaaggagggcgcatgaggccaagcagaagggacgccatctggatatggtacccctgcgcttaccat

SEQ ID NO: 42660 - DNA, 1287 bp, Setaria italica
  Peptide Sequence Number=SeqID_108634
gaggccaagcgtgccaagagcaaggcaagccgtcagaggaagattgccaggagggaggagaggttggcccagggcccgagggaaccggctgcaccagcagctgcagctccagtgccggctgcagcggcaccaaagaaggcgaagaaatgaaggatcgatccccagctttagctttctggtaccaggagtagcctaattttggagcgcctctgaactgttttgctgttacatatgtccaagctttcgtgtctcgatatctctgaatatcatatctcgtttatgttgagttggatcaatgtagtagacttgtttatgcagagttttttttaaacataaccagattttctgagatctgttgcaaagaaaactctgcataaacaagtctactacattgatccaactcaacataaacgagatatgatattcagagatatcgagacacgaaagcttggacatatgtaacagcaaaacagttcagaggcgctccaaaattaggctactcctggtaccagaaagctaaagctggggatcgatccttcatttcttcgccttctttggtgccgctgcagccggcactggagctggagctgcagctgctggtgcagccggttccctcgggccctgggccaacctctcctccctcctggcaatcttcctctgacggcttgccttgctcttggcacgcttggcctcaaactgatcagaaagcgtcttctctctggccttctcagccttggacttgtggatactctccatgagcaccctcttgttcttgaaactgttacccttgaccttcatgtacatgtcatggtacatgtgcttgtcgatcttcttggcttcacggtacttgcgcagcaggcgcctcagtacgcgcattctcctcatccacagaatcttggtgggggagcctagcctccctggtacccctgcgcttaccatatccagagtgacgtcccttctgcttggcctcatgcgccctccttgcacgggacctcgagtggatcttctgaggcttcctgatgatgaaaccatccttaaccaacttacggatgttctggcgggagttggccatggagatctcgctgacttcattggggtcgagccagaccttgcccttgccgcacttgagcacgctcgaggcgagccgcttctgcagcttgagcgacaccatcttctccgccgccgataggctctcctgccggctggttgtgtggtggcgcaaggtgctaggggaatgcggcggcggcacgcggagggttatatacccaacccggacggggggattag

SEQ ID NO: 42661 - DNA, 428 bp, Setaria italica
  misc_feature (348)..(348): n is a, c, g, or t
  Peptide Sequence Number=SeqID_108635
aagcgcttggatggcgcaagtttaacagattccataaggaaatacctcagagcaagcaagcatttcagcttagttactagtagtacagcataaaaggtgtccattcctttcttttgtgatgaagaaggttatccctctggtgaagaaaccaaaggtgttgcatgcattttgctctgtttttatctgcctgctgtactgctgctatgctctgtgatcattcacaaatgcagtcaggttggctactgcatacagtatattggtctttggaatgattgatcccttgtatgcttgtgcacagtgttgccagcacatactgctagatcgtgttgcagaaaatgatcaattaangtacaccttccctgtttgctacattgtttggctatgctggcaaacactatcttgttcatgtgtttcttatagtcttgtta

SEQ ID NO: 42662 - DNA, 309 bp, Setaria italica
  Peptide Sequence Number=SeqID_108636
ccgaccggaaattccaatctccccttgccttgcgcctaaaccctagctcgctcccgaatcccgatggcgccgaagaagcgaaaagccgatcccgccgagtccgccgccgccgcggagccagccgccggcaaccaccgccaggaaccggcatcctccgagaacaagccccgcggcaccatctacttccccatcaccgacgacccgcccgagcccaccgccgccgccgaggacgaggacgagggcgtcggcgacgatggggacgaggcggaggacatcggtaagctgctcgagccgctgtcgcgggagcag

SEQ ID NO: 42663 - DNA, 471 bp, Setaria italica
  Peptide Sequence Number=SeqID_108637
tgattctatgatccagaggggcccaaaaccagatgccaccgcctatagtgttctgcttcatgggtatgccactgaaggatctctttttgatgtacataatctctatgatttgatggtagaaaatcacgttgaacctgataatcatgtcttcaacattttaatatgtgcatatgttaagcatgatatggttgatgctgcaatggttatatttaacaaaatgcagcatcaaggcttgagacctgatattgtcacctatggaacattagttgatggactttgcaagataggtcaactggatgatgctatgttactattcaatcagatgatcagtcgcggattgcatcctaatatcataattttaacaccctaattcatggtttttgtacctgtggcaattgggagaaggccaaggcattatttttgaaatggtgaatagaggtatatgtcctgacatagtgttcttcaatacaa

SEQ ID NO: 42664 - DNA, 562 bp, Setaria italica
  Peptide Sequence Number=SeqID_108638
taataatttcctacagcttacctggctcttgtcaccccactcgccaaagaaagtaatagagaatgcctttataaaaattggtgagaaaaactgcaacagaaacggcctttgctgtttctttgtatcctcatttgcctagcattgacaaagtaaacactggtaaacaaggttttcacaactgccttgtcctctaaaataacaactgtctccaaaaagcaataaaaaacagaaaatacatgtgcagacgagaaaataggcaatacaaagaaaaggtttctaatagatacacatcaaaactgcatgtgttggtgcatttatgtaaagacacaatgcatgcataataaactcatacttgcaaggtagatgagattactgagggacaatgacactcagaaaaaaagagtaaaaatgtaaattcattttcctctcgtttatgttttctatttaactatgcaagcagaaatgttctgcgagagaatctggccgacaaaggcaatgaacatgccacttgtgtactgaccttagatttatttttagattcacctttgttactcttaaaggc

SEQ ID NO: 42665 - DNA, 434 bp, Setaria italica
  Peptide Sequence Number=SeqID_108639
cgacgccgacgcttcctcggcttctgcctcctccacaccggcgccgccgccgccctcccgctcgcggcggcgggacgggctggccgagctctgcacgtcgctgctctccttgtcggtctccttcgaccgggccaccgactcgccagagacctcctcccgcttcacggccaacgactcgccggccgcggcctcctcctcctccccttcctccttcgccgccgcggcaccgtcaacggcggcggaggccgtgccggcgtcgtgcacgggccgcttcagatctgaagagttggactccttgcacgaccgcccggactcgccgccggagacgcggtcctccccgccgccggcgtcgtcctccagcgatcccttcccgccgccggctcctcgccctcctccgccttcaccgccggcagattggcctcgccggagatgct

SEQ ID NO: 42666 - DNA, 337 bp, Setaria italica
  Peptide Sequence Number=SeqID_108640
agggctaattttttgtattttagtagagatggggtttcactgtgttagctaggatggtctcgatctcctgacctcatgatctgcccgcctcggcctcccaaactgctaggattacaggtgtgagccaccacacccggctttcatttcttatatcccctgtagtgtcccacaagcctacggcagagcatggttcgcacttagcactcaacagatatttgcgagtgtatgaatggatgagcaggggacttgacaaaatctccaactcagagaagcgacagcagagaacacaatcaccagctcagccatcacagcacctgccaggcactgtggcagccca

SEQ ID NO: 42667 - DNA, 709 bp, Setaria italica
  misc_feature (1)..(30): n is a, c, g, or t
  Peptide Sequence Number=SeqID_108641
nnnnnnnnnnnnnnnnnnnnnnnnnnnnnntttaatagatcacgctgcataatccaaaatacctctgttctacaagcaagacagcaaaagaaaggaaaaaagaaaaatcaaaaaaatctaatctcgaatgctaaatgaaatggagtgtgcacaaactaacacactgcacctgtggcctgctacaagctctgttacaccgtacgtgatcataaaccgatgattaccaacaaacaaaccagcaagagttaccgatcaatcagagagcaaagtatatcacaccgaactgaccaacttagtagctgtacgtatttgttacgtatatgcaggtaggatagaaccacaccgggagcacgcgcacgtacgctacgtcagaacgggtggtagctccggcggaacacggcggtgttggcgaacagcccgacgaggtcctgcttgtacggcaggaacgacctccggcgcgcgccgccattgccgccgcccttcgcgtagtggctccaggcgtggccgccgagagcggcagcgacgccaccgtcgccgccgccggtcctccccttacggccggaggcgctggtgctcaagaacacgaacttctccttgccgtcgctctggctccgcccgacgagccgcggccgccaccggaggaccgaccccgtggagccgctcttcttgcaccgcgccggggacgccgccgccgccgcccacccggggg

SEQ ID NO: 42668 - DNA, 667 bp, Setaria italica
  Peptide Sequence Number=SeqID_108642
ttaaagaatgtaataccataattgcaccatctatgcaaacgcaagtctctgttctctacggaaaccgaagatgaaatttcagcacaagcagttcgagggcgcgtagatcacttgccatcagcatcagcatagaacatgcttgggtacacccaaaagggctgcagttgggtgtaccagttcctcttgaacacaatatcatcgtcattgtctgcatgccacacagcatccgcctcatcaccaagcccgtgcaagacccagggtacatcgtaatatgcgtaatacaagcagttgttcctcgtgccccatcttcctgggctgacgcaagaaaatgccgggctcctcacatcgcttccaataaagagcacgtgattctccagcttctccacctccacccaaactgcaggtacagttgacatgtccaggcggtaagctttgtagttgacaggtgctccatcaaatggaagaattatgtagtggtcgacaatgaggagcatgtctccgcacaccacgagccatggccttagatatgggcattcatccatgtcatcccaccacacagttgctatctcctgcagaccaagcgtgggggccaaggacagtgtgtggagcctgtacttatagtccaatgcgatgaactgaccattgaactcacaatctgctcaatccg

SEQ ID NO: 42669 - DNA, 385 bp, Setaria italica
  Peptide Sequence Number=SeqID_108643
tgaggtctcatcgtggcaacgtatggacgaaatgttgagagagcttttgacggcaacaatgtagtagagctgatgggaatgccaaattctttgccacctaaaaggaaatagtcatagaacttctgggcatgaatactcacttcgaatgtatatttgctgtcagctattttctcctccaagatctaacaagatttgtccatttggagaattattttttttactctgtatgctcgtagaacctagagggtaccatgcacatgtttacaagctacaacacgtggcaagtggacaccacttgcagcaaaaaagctatactagtgttaataattcttatttcctagatattagagatgatttagggcaaatggtcgcgtcaggttgcata

SEQ ID NO: 42670 - DNA, 298 bp, Setaria italica
  Peptide Sequence Number=SeqID_108644
gaagaggatgatgtgcgcatggaggacgtggagacggagttggccatcggaatcggaaggagacggccgagtaatactagtgttggcgacgatgcatgatgatgactagcaatcaatcaactgatcgatgatgatgtgtttatatatgcatgtatgcccccgtgctcttggattaagatatacatacgtgttgataaagaagaggacacggtctctggtcgatgaataacataattttgcatgctggggatgcatacatatatatattctggttgcagtcatttgttataaacaccta

SEQ ID NO: 42671 - DNA, 443 bp, Setaria italica
  Peptide Sequence Number=SeqID_108645
ctaaacgaaatttcatgaataaattaccatcccaaacaacacaagcctgctcttgtactctgagaaacaaaactactcagaaaggagatcgacaatgagctctagtgtaatggtataaaatctccaaaaactatggtcatgttacttgtgccctatgtacgtcccatccaataagctcctcttttcacctcccggagctgagccaccacatgcatccttcgacctcttttccactcacaaatcgctgaactgtttctggagtgtgggattgatgcacgcaaatatcgatttcttctttcgctttgttccaaacaggaagttccgcaacggtactctggtcctacttggaaaacgcttgaactgtttctcatagctactttcagtctctggccgcagcaagcgctgggatgaaacctcaaaactatcacgcagctcccgcaggg

SEQ ID NO: 42672 - DNA, 624 bp, Setaria italica
  Peptide Sequence Number=SeqID_108646
acaagaagaagtttggatcgcaaggaacttcaaggggttgcaagacaagattcagctggttgccattgatctgcaggacaagcctgcgtggtactatactcactcgcacccagtactgctactaactgactatactactactaacctgtctctatttgtttctctttaatttctttccatccatccgattaactgatgcatccatctgatgaactaaccaaggttccttgagaaagtttacccgccgggcaaggtccccgtgctggagcacaatggcaacgtcatagcagagtccttggatctgctcagctacctggacgccaactttgagggccccaagctgcttccccaggacgaccctgcaaagcaagcctttgccgatgagctgatcggcagcagcgaccccgtcatcgtagccttgttcagggcaggccgtgccgctgccggtgccggtgccggaggagatgatatcagtgagctagttgcgcctgctcttgacaaggtggaggaagccctggggcgtttctctgacgggcccttcttcctggggcagtccatgagcgcagtcagtgatcgaccaatttgttttctttgtaccttgtccttgtatttggttcttttgtt

SEQ ID NO: 42673 - DNA, 620 bp, Setaria italica
  Peptide Sequence Number=SeqID_108647
agagctacctcagctgcccaagaagagccttccggcaatggccacggcggcatctccagcagcaacctccggctccggctccgccgccgctggagagaaactgatgaaggaggaggtgcttcccccaaccctggcttccaattcccaaccgccaaatctcttggatggcacaacaaggctttacatctcctacatatgcccatacgtgcagagagtttggatcgcaaggaacttcaaggtaccgatcgatggaggtgtaccggccggcctcatcatttcctcatgcttccgctatcaaaatcttgaaaattttcttgggcaggggttgcaagacaagattcagctggttgccattgatctgcaggacaagcctgcgtggttccttgagaaagtttacccgccgggcaaggtccccgtgctggagcacaatggcaacgtcatagcagagtccttggatctgctcagctacctggacgccaactttgagggccccaagctgcttccccaggacgaccctgcaaagcaagcctttgccgatgagctgatcggcagcagcgtaccccgttctattcgttagtcctttgtttctagggtctaggtccgtgccgctgccggtgcca

SEQ ID NO: 42674 - DNA, 308 bp, Setaria italica
  Peptide Sequence Number=SeqID_108648
atcttcaggcccaggctcaagtgggctcctcaatctccagacggagaaaacccataggacgttttgcattacctgcgtcggtgcctatccaaatcagtcctatctcttcacgtacactatttatattattcattatattcatggtaattctattcaataattaaggttccttattcagtaataaagctatatatatgtatgcatccatgcatttgagttgatcatttaattttctgagctactctgcaacttgtaatttatttatcatttgaagaaataaattattgtttatttacagtctaaaaaaa

SEQ ID NO: 42675 - DNA, 345 bp, Setaria italica
  Peptide Sequence Number=SeqID_108649
gggcactccacaagcatatgccgcatcagctgcttgtaacagcacatcagtcgtcatcatcagtatatctaattccggagttgcaagacattctactgtgcaagacaactgtgcctcagtgcctgcatggaaacctgcagttgtttaatcccgtaaaaaccggtaagcagatcccaagagcaaagccctcgcctgcctgtcgcgagtactcgctcactcactgctcccccacaaccggtggagtcaggccaatccagcggcatttgcaggtggccatctcaccaccccatcgccattccgctctctcgaagcaacgcaatatggcagtgtgctgctgctgtgccc

SEQ ID NO: 42676 - DNA, 398 bp, Setaria italica
  Peptide Sequence Number=SeqID_108650
taacaacgtttagttgatagggtagtttaacaacagtaaacaagttaatggagattgaaaatacagcgaaaccgtttaaagaccttcagtgttctttactcaatttatacttcttgtttaaattttcccgctgatcatgtaaatcaagtggcagtcatttgcttggtagtatctgtcacatctgcttgtgctgctatttcctttcctgatattgtgggggcatgattcttcttttgcttcatgtagatttatttgttttccttaatttgcaggctattgtgacgaaccatttagtgctgcgtggaacttatcgcagcctcactcttgtaatttatggtaataccgctgaagatcttggtcaattcaacatagaactgggtctggaccattctcttgcg

SEQ ID NO: 42677 - DNA, 455 bp, Setaria italica
  Peptide Sequence Number=SeqID_108651
tgttgcttcttgacagatccagtaagcaagtgaacaagcacctggccgacaaccatggaaagattgaaatgcttgctcaaagatacggtgtcctgctgaatctaatccgtcatggagatggcattactatcaaccctggaaggatcctgctgcgccgcgcacggagatggagcgcttggaagaggagcaggcatgccgaagcctcctgatcctattttctaatgccttcagtgcctccctgccggaatttccggtactgtcactagatgatgttgaaaaatctggcctgttccagtgggaaagggagtcgatggttaagcagaaacattgcgattagtttgctgaagcagtaagctgatatattcccacatttgatttgacctgtgtacaagtcatagaattgttggtgtttaaaggaatgcttggtcctcagttggatcaagttagtagtcttc

SEQ ID NO: 42678 - DNA, 2285 bp, Setaria italica
  Peptide Sequence Number=SeqID_108652
gcctaggagcatttaaaaaatcccttgagacttctcagagaagcaaggaaacatggcagcttcagctccttttgacatatcttcaaaatgggatatccgaacagtggcagaggataccttccattattactgtttttgccgcagaagcatctttgacgctactggatagctcacatgctcaattcactgccattagcaattttttaatgcattccacctctgccagtctgcagagcattccgttatttccaaccttgttgcagagtagttcagttcattttaaagctgaacgtttgtggatgcttcggttactatctgctggatcaaacctagctgatgatgccaaaatatacaagagaggaagagtcttagagcttgctcttgcgttctgttcttcacctgtttcagattctgaatcgaaggttttagtccttaagatgttgaagaagtgtgtcaagctgccagttctagctcatcatctagcgaaggagtctggccttctgttgtggttatcctctgttatttcaattgaaggatccgatggtgctgaaagctcctgttctagagtaactgagttaacgttggaggtagtcaatgatttgatatcatcaagactaattacagattggctccaagaatctgcccttgagcaactctcggtgatatcagcagacctttgtgtccttctaattaacaatgccaaattattgaaaggaaatgttcccttgttgacttcagtgcttagtgtgattacatcaacaatgaggttgtctatgaaaaggaagatataccaaccgcattttaccttgtccctccatggtgtatttaatctgtgccaagctaccgttggcagctcaagaagtgcagagcataagcttacaatggaacttggtatcgatgccattcttatgaatggtcctatgccaattttatctgaaatggataagtcaagaatatcaatggttgtttcttgggcaacttcaaacatcttctggttgtactctaaccaaaggtctatgttggaaatatcctcaaaagagtcaccaataaatgagtctccactttcaaagcttttgcgcttgttagtggcttctgtaatacttgggaggatatccagcatctctcatggaaagagtggagatcttgcacggagcaccagcagtcttggaactcttcattctttcttgaacgatgcatatgaaagggttgaaacggtagaaagttgcagtgcgaatgatacgctagctgtcattatattataccttcaagaccatgtgcaaaagaacagtgattctttgccatcagttgtgatggctctttgcttgttgcttcttgacagatccagtaagcaagtgaacaagcacctggccgacaaccatggtaagattgaaatgctttgctcaaagatacggtgtcctgctgaatctaatccgtcatggagatggcattactatcaaccctggaaggatcctgctgcgccgcgcacggagatggagcgcttggaagaggagcaggcgtgccgaagcctcctgatcctattttctaatgccttcagtgcccccctgccggaatttccggtactgtcactagatgatgttgaaaaatctggcctgttccagtgggaaagggagtccacggttaagctgaaacattgcgattagtttgctgaagcagtaagttgaacctaagactgctatattcccacatttgacctgtgtacaagtcgtagaattgttggtgtttagaggaatgcttggtcctcagttggatcaagtagagctccgtgcacagagcttaacgggactgccgaacgcaaccatgttcgacacttgaacaattttggtctggcattcactgctgttctcctttcgattgtatagggcatctactgttgtacaagtcttggcaaacagagtggtactgcgcctgtgtaataggttggaatcgaaacccatgtcggtcctgatcggcggcaggaccttcacggtgagcggcaccggccgcacccgcacggtgctgttcctccccgcccaaatcattcatgggactctcttcttgttgcccctatgcccactgcttccactattagaaaccattctgtgtactgtagttttcctaatttaaagaagatgccatatgtattttaatgtctctttttgtctgattactccagcctttggcattgctcagtaactgcaatattcatgtcatcttaattagtagctcagttttcctttgtatcattccatgatggttataactaagatcgagggaattgtttaact

SEQ ID NO: 42679 - DNA, 704 bp, Setaria italica
  Peptide Sequence Number=SeqID_108653
gactttgagagagagccatggccaaaggtgtcagataatgcaaaagatcttgtcaggaagatgcttgatccgagcgcctactctcggttgactgcccagcaggttctagagcatccttggatacagaatgccagtgcagctcccaacattcctcttggggaagcagtgaggtccaggctgaagcaatttactgttatgaacaagttcaagaagaaggccttgcttgtggtggcagagtacctaccagccgaagagcttgaggcaatcaaggaactattccacatgttggacaccaacaaggatgggcacttgacaatcgaagaactcagaaagggactgcaaacgatagggcacaatgtccatgacacagatgtggatatgctcatggaagctgcagacatagatggaaatgggaccctggactgcaaggagtttgtgacagtttccattcacctgaagaaaatccgtagtgaggatcacctgcccaaggtattcagctacttcgacaagaacgggagtggatacatcgagatcgaagagttgaaggaggccctctctccaagaggcgatcagaaggccatcgacgacatcatcctggacgtcgacaaagacaaggacgggaagatcagctacgaagaatttgagctgatgatgaaagctggaatggactggaggaatacatcgcggcagtactcgagagcggt

SEQ ID NO: 42680 - DNA, 659 bp, Setaria italica
  Peptide Sequence Number=SeqID_108654
ttttgggggggggggggggggggttctagtctagtttgtgattgatgcctacaacagtgactgctccaataaatccaagaaaaaaacatgatttatcaactcttggagtcagcaggagatgccttatctccattccccttactgtttggttgtgcggtatttgctgaagcatttgcagcacaattgctgtccttactcttgactgtaactggctgagtatcacttgcactgcttttcaaatcggaagccttgcttggagatacttcatctttcttcacaaccccttctttggtttgtatatcagcagaaggaactttgtttttgtcatccacaatttccttaacgaccccctctagtgtatctagcctgtctaatacctttgaaagctttgagtcagcatcctccttagcagattcctcctcgagctgcttttgtttctcaagttcctcatctttttccttttctcttctgcttccgcctccatcgttttgatctctctccgtgcatattgggccactaaatagacagctagtgagggcatgcagacaaagaagagctgcacaaggtggaaatcaagcccgaaaatgaagatttttgtgtgccaggcattgcaatacaagatccaatctgctagaaaaattaaaaacaggaaaaaacaa

SEQ ID NO: 42681 - DNA, 373 bp, Setaria italica
  Peptide Sequence Number=SeqID_108655
actaggcttcaatatcttcccaggtacgatgacccccaatgggggctccgggatgtgtttgtgatactgaggattaagatacgtagcattctggagatgttacagtgatgctataccagttcctttcagataaacaaaggaacccattcattccaccactagcagcaggatcaatgggaataacataaggatctgttcttggtagatggttgtacatccgatacaggaacgcaatctgagcagtcaatggatgagtttcccgaacatatattatgtcaaacattgtcgtgttcctgaatttctcttcttctgtcaatgtatcttctagttttcttgtttcggcaagcagacgtgtttcatcaataaaggtaac

SEQ ID NO: 42682 - DNA, 431 bp, Setaria italica
  misc_feature (6)..(6): n is a, c, g, or t
  Peptide Sequence Number=SeqID_108656
ccaaancctttgccaggtattcacgcaacacccatatgtgaagaaactggtatttctttttatggataggaggtagctccacagcactatcaacctggctagggcctctgcattcagcagccaaatgcccaacttgaccgcacaggaaacatttttcttgttgccctctcttaaaattgagaagtggacctcgtgagttgccagagcaagcataatcaaatcagcatccaggccatataagcaatgacgtgtattgggatcaaagccaggaagattgcgctgcaggcggatgtatgacataattttgtgctctccctcaccaagggaacaattggaatagacaagaacaaataattaaccttgaacaagaactagaccaataccaaagtagatgattcaatctcagttgtatgtagtactgaagcgccgta

SEQ ID NO: 42683 - DNA, 3058 bp, Setaria italica
  misc_feature (1)..(11): n is a, c, g, or t
  misc_feature (34)..(34): n is a, c, g, or t
  Peptide Sequence Number=SeqID_108657
nnnnnnnnnnnttttttttaggccaaatatactnatacaaaaaaaacagaatattgcatgaagtcgaggtttatttaccttcgctccgcggaagggccaagaatacctgcccgcaactctttcacaagatacagcagggcaggtgattcatccttcgcgccgagcaagggagattattcagcagtcagcacaaaagtttcagctatccaactaacagctctactacagcagtgcatgcccatatcctgtcctaacaactaacaaggctccttctaaatcccttgtcctaaatgtaaccaactccttttcaggtaatacaacaaaacaattcaacaatcgaatataaattacagggatacatggaaacactatgcctgtttacaccacgagcttgtttatctcctggcagcaggatgcccgcaacacagcattcggatctccagcagctcagcagcccagttatgctgcgggttcttcctgtttacctgactctgacaaaccgttaccattagtagcttgggttttgacacggtataccttggtagcctgttgtctcttatcctgttgcgatcttgggttatcctgcttaagctgtctatccggagctgtccttggatcatgctttgcaggaacacctggggggcctccagttggttgcttgccaatccagttactgggaggtaatggtggtggaaccccatttactggtcgctgctgcgggaatcctccagtttggaaaggccgctgaggtgtgaaactgatattctgcataggctgctgaggtgggggtccagcatagtgattaggatgtggttggttgggccagtacccggaattctgcatcctgttattctgatgaagccttggcccttcatggattgtcagttttgacattgatgcatggataccagcttcatggcttccggagtttggacgttccagtatccgcataggctgtctgttagcttgagcatcaccaaagaactgaggatgagagttcgggacacttctggacgtgtgtgcatggtgtgggttgtccacaaaacccctctcatatcccaatggtccagcaggccttggtctgtttccagggccatagggtgcacctctatatggcatctcaagtagcccagcagcgctaccagatttgatctgaagggagtttttcaccagacggtgtgcagcttgtcctaagagagaacctgacaaagctccagaaacctgaggcctttctcttgcttgccgacgactattatcttcatgccacaacacaggaaagggtttgaaatcactaggcttcaatatcttcccaggtacgatgacccccactgggggctccgggatgtgtttgtgatactgaggattaagatacgtagcattcaaaactctgttttgggcaatgccgttgaagcacttaactggagatgttacagtgatgctataccagttcctttcagataaacaaaggaacccattcattccaccactagcagcaggatcaatgggaataacataaggatctgttcttggtagatggttgtacatccgatacaggaacgcaatctgagcagtcaatggatgagtttcccgaacatatattatgtcaaacattgtcgtgttcctgaatttctcttcttctgtcaatgtatcttctagttttcttgtttcggcaagcagacgtgtttcatcaataaaaggtaactttgcaacaccctgccatgcaaaacgttttccattcatgtctatctcaaaatctttgggatagaaagacttcaaaggtgaatttggatcagtcattaaatccccatagtactttggcagtgcattggagctggcagctggtagtgttcccataagctgatcaaatggcttgaaaggttgacccaagaaaaaggtaatctccaattcagccaagtcttttaggtcagatgcaaaaggcgcataatgatatggatagaaccactgccatgaacaaacaccttgatagtagtatctcataacccagcaaagaccttccacatatttctggacgacatctctccgaacttgatcaatgggttttgattctgcctcttctttaaacttttcagcatagtaccgctccctgtatcctggctctcctaacttgaccttgtccacatattgattctcctcggtactttctctctgtattttgtttctctcttcattgttctcgcgtgcctgttgaatgcgtgcacgtttctggaaaatttgttcttcattgaaagcaacggactgaatgaaatgttccacacggtccaatacaacctcgcccccatcggtcaggtaaccacccattgatatgaactctgccctgtagatactcatcagaagattaatggcaccctcacgaatttccaaagtcggcatgtgaggcagaaagtcgttgccaacaaagaaacacataaacacaaaatcatcgataagccgttcaaagtttatcttgaatggagcatctacaatttccaaatcctttgccaggtattcacgcaacacccatatgtgaagaaactggtatttctttttatggataggaggtagctccacagcactatcaacctggctagggcctctgcattcagcagccaaatgcccaacttgaccgcacaggaaacatttttcttgttgccctggcatggagatcacctctcttaaaattgagaagtggacctcgtgagttgccagagcaagcataatcaaatcagcatccaggccatataagcaatgacgtgtattgggatcaaagccaggaagattgcgctgcaggcggatgtatgacataattttgtgctctccctcaccagggacattggaatcagacaatattaccttgacagactgccatccaagtgtatgattcaatctcagttgtatgtagtactgaagcgccgtagatagtacaaacatgaactgcgtcccgggagtaatgacattcgagtcgattgcctctgacttctccttctgggctagagtcctaccctctgcctcaaattccttcctcagcctctcctcctcggctgccgcatcagctgcgtcc

SEQ ID NO: 42684 - DNA, 398 bp, Setaria italica
  misc_feature (379)..(379): n is a, c, g, or t
  Peptide Sequence Number=SeqID_108658
tctaactaattcacacatttaaagtacgttcagccattactaccaggactgtaaaacatcaattaggtttcttacatatacatttattactatgggtgacctgattatgcaaaacatagatattttactaacagttgttcttgaacatgtttttaggctgatctgacagcttctatgaaggatttgatagagatgctatagaatgtgctcagtccaatcaagatctttcggtactgcggcctcaatacttccactattaccaacgaaagaaggttttttgttgctgtcacaacatttgttttcttcagcagccttgcatctcctatttaagctggatttcaactacttcaaggtcggaggcttctgtcctcaaataagntgttttgtgttctgtcctt

SEQ ID NO: 42685 - DNA, 435 bp, Setaria italica
  misc_feature (4)..(4): n is a, c, g, or t
  misc_feature (25)..(25): n is a, c, g, or t
  Peptide Sequence Number=SeqID_108659
tggngttacaggtttgctactgcanatttgaacttgaagagcttgctggacaacagaacaactgatgaggctcttcagtaatgatgatctaaatgaaatgggatatctagacaaggccaaggggtacttagctagcaaaattgcccgctctgaaactttttggaaaggagttaatagtgctgtcaatttctttgagcctttggctattgtgctaaggagaatggatagtgatgtaccagctatggggttcttatatggttgtttgttagaagcaaagaatgaaatctcagcaaggtttgataatgatttgagcaaggttcagcaaatctttgagataattttagaacgatggaactaggagttgaagacaccgctacatagggctggttactacttgaacccacattattatatccaaacaaggtggatattgag

SEQ ID NO: 42686 - DNA, 427 bp, Setaria italica
  Peptide Sequence Number=SeqID_108660
aaccaagtggcttttggcaaacccctacttgcagcagcccttcattggtggtgccatcttctaaatgatgtatgagtttgtactccaataataaagtttcacatgccaatagtcatgaattatcataaataataaacaaagatgatttattggcatcctttcttagtttatgtgtgtcttataattgtctgtgtcaaattaagaatccacatctttgaatcgtaaggtaaaaggcataaagtttattgtaataagtgccaagtacatggtgaggtggtgggcagcttagaataattcaagcttgactatacccaaagtttgggtaaggttctatacatggttacatcttagtaattactcttttctcgccatggaacgtttgaaatcttctgtgcatcacgaggaaaaactaatactaataatgatg

SEQ ID NO: 42687 - DNA, 378 bp, Setaria italica
  Peptide Sequence Number=SeqID_108661
cttttcttattcaccccctttacttttcctttttgtttctttctcccctctccgtcctcgtcttcctctccctcatctcctcgtctccctgatgctaacgctactgctcgtcaatctcccctcccacacggagcagtagataaatcccatcgcggccccttgatttccgctccagccccctccgcgaccgaatcaaacctagacgtggtcggaggagttggattgctccccggaggtcgcttccatctgttaatcaagaaatcccaaacttctcctcgcccgaatccgtgcgggcgggtgaaccggggtgaattgggccaagagacgtcggtcccggcctcggagtcctcgttcctcgccggaattccaagaaagccg

SEQ ID NO: 42688 - DNA, 481 bp, Setaria italica
  Peptide Sequence Number=SeqID_108662
aaaacaataatgttcctattgtgaacctccatattgaatattgatactatcatctggtaagtaactgtactcataacttaccggaccaacataagcaacaagactcttaattagacctctttgaaaaattacatgcccttactcagcaaggtttatcgtagtggtgagtgttcctgtctcaacaggtcctgacctcctgggttcgattacagctcttgtgctccatttttggtatttttcggtcaatgacagatagatgcaggaagttactaatatgctaaacaacagtcccctttaccatgcatgcgcagctgcagacgctttccgaaggagtgcatatttagtcattccagggaatctgttaggaggagtacgatagcatgggcaagcaacaaagcctacagctcggctagtaatcttctcttctcatcaacaacctgaacctgttaactttccttgcaggttcctctgatatcccttt

SEQ ID NO: 42689 - DNA, 333 bp, Setaria italica
  Peptide Sequence Number=SeqID_108663
cggaaagggggatcgcgcgaaatggagctctcgccggcgccggtcccggcggggagatgggccgacctcccagaggacatcgccgtcgccgtcgcctcccgcctccaggaggccgacgtgtgcgcgctcggcggctgctcgcgctcctggcgcaccgcctgcgacgccgactgcgtctgggagcgcctcttccgctgccgctggccggccgccgcggcggaagcagcggtggcgtcccgtgtgcagggatggaaagctctctacatgaaccaacacagaagaatggctgttgcaatatctaatgtggttgaatttgtggggagcagcttaaat

SEQ ID NO: 42690 - DNA, 873 bp, Setaria italica
  Peptide Sequence Number=SeqID_108664
gaaagggggatcgcgcgaaatggagctctcgccggcgccggtcccggcggggagatgccgctggccggccgccgcggcggaagcagcggtggcgtcccgtgtgcagggatggaaagctctctacatgaaccaacacagaagaatggctgttgcaatatctaatgtggttgaatttgtggggagcagcttaaataatgggtcgcttgaatctgaatattatctgaaagctattgctgatctagcattgatagctgatataggatttctcgatgtccagtttttcttgttttcaaggaatcacagtgcaataataaatctcattggattgcactactcaatttcatctttgcatgtgccgccaactgaagtcagtaaagcactccaagcttgccaagtagcaggaaggaaagtatgtgtgaacttgctcaagcttggtaggtggttctatggtttccgattgcgtgatgaacatgagtctcgtaaaatatcactgaatgagctcaccatgtctgagggagcagaagttttagccattcttaaccgtggagctgttcatgaggtatttcgtctccgggtcagtttggcggacatggataagtgatctgaaagtatgcacaccataagtacttcagtacttggcttattgtgccctttgtaaatatgtatgacttttgtgccctcgtggctctgcttagttgtaaatgcaagcataggtatagaaccatgtaaacttttattacatagtcttgtataaaataaataataaagggccatgtgtaagttggtcctacacatttcgccatttatttgataagctctgttgaatgttttctatcttctaaaactaaaaaacaaaaaaaaactaaagagact

SEQ ID NO: 42691 - DNA, 477 bp, Setaria italica
  Peptide Sequence Number=SeqID_108665
aagtaactaacggtctcgcacggtacatatgaacttccaggcatgcaactacagagaacgtaactacagacaaagttcacaccttgatcataagacgaagtgttgcatctcatcttgatgtcttccgtataaaccaagagcagtggtaaatatgggagaattacaactgccgtgaagaaaccagtcagtcccagaagtgagcaaaccatatcaaacaaattgaaggacttgggatcgccagaagaagaagaggtccagttctggtacttcacaataataaattagtgagggggcacatagaagctaaggccaatatgatacataaactccctcgtccgaactgcagttcgaaggtgaacaaggtaccaacaccgaaactaaaacagcatccgttcattgttcaatctttttccaacttccaagcaatcaatccacacaaggcccatatatatgcgcactgcattgctgcttaactgt

SEQ ID NO: 42692 - DNA, 660 bp, Setaria italica
  Peptide Sequence Number=SeqID_108666
tagaatgaagttcatcaggcaagcggttgactttctgatcattccacataaaagcaaaaagacccttgagcagattaagaggaatatttgcccggcattaagtgtgagacagatatatcgtatatgtacgatgtactgggatgacaaatatggtacccatagtgtatctgctgatgttgttgccaaaatgagggacatggtgagcaatgacactcaaaatcctgtgtctaattcatttcttctagacgatgacttgagcattcctttcacaactgaggaaatagcagaggaagtaccagacgttgacatgtcaaacatcgaaatgccctcaacgcttcgtcatgttcactctgcccagttcttgatgcagcacctccagtcaccttacttgtcgcgatgaattgcctaggtttgctaaccttggtagcatatagtggtggcccgggagctaaattagaggaatgataggtatccttcttgtttcagttgttgctgatattcatccaccatttgcttttaattttgttatgtctcacgccttccatctcaagccatcggctatgttatagatatagtaggccatattcttttaggttattgcaaggactaatttgtcgagacacattctctgtgatttatattcatggactagttttgacc

SEQ ID NO: 42693 - DNA, 458 bp, Setaria italica
  Peptide Sequence Number=SeqID_108667
aaaggcgtccccccacccggcgaagccgtcgtcgcccccggcgccggcgccgaacccgcgcttggcgcggcggaggcccacgtggatcctgccgttcgcttcgcgcacgaagacgacggagtcgccggccaggagcctcttcttgttgacgaagttgctccagcccgtggtgagcaggtggcggcgcggggtgccgcggtatatgtggcggaacgaccactcgacgccgtgcacgtccctggcgtagacgctctgcacgggcggccgggcgcggtagtccagctccgggaagattgtctcggcgcagaaccgcggcacggagaagccgccgccgttgttggcgtcggactgtgtcagcgtcttggcgaaggcgcctggttgggctgctgcggctgctggtcgccccccgcggcggcggcgtcgcccacgtccaccaccggctccccggagcggagcgg

SEQ ID NO: 42694 - DNA, 280 bp, Setaria italica
  Peptide Sequence Number=SeqID_108668
gacattgtccttagtcttggtctcacagcgcacatccagttgctgcagcctgagcgtgagatgaccagctacacgcttcccgatgaaccagggcatgcagtggcaccctggctcaagcacgctgtcaaacttgccaaactgctccctgatggccacggtcgactgatcaacttgaacacagcagcacaagttgcccatagctgcagtccacggatcacttctgctggtaactgaatgcttcatgcatcataggtccaagtcgaggcgaggaagacgacgg

SEQ ID NO: 42695 - DNA, 711 bp, Setaria italica
  misc_feature (707)..(707): n is a, c, g, or t
  Peptide Sequence Number=SeqID_108669
ccacttaaaagattcactaaatcacagcatatagaaacaaatagatagtgaattagttacttcaaaacaaggttgaagcaacaatggaagaatgcaagaacagaacttgccctagttgaaacggcagagcaagagagaagatccagctggcatcaggacaaggctaaatgacagggtggtattgtctgtaaggcaggcaaagtatctgtcctctgcatttgtgcaccttaaatagtagcatgttggcagtagagcctgttcaatcatcaccatattacctgtctccacgatggattacagcataaaaaaagaaaccagtttgggcgggtctacatcatctaggaggttgactaatctccaattacacaatttgagcaaccttgccagtataacatgtcgctttaataattataaattgacatggaatagcgtacgaaatgatcagcttagacgttgacaaatatccgaagactcatggcaagcgattgtaccacacaaaaaccttggaagtttcagtatgtactaccaaggaaaatccggtgctacgctccagcttggtgaaagatatgtggggcgaaattgcaggcgcctacacatctgtcagctaccaaaagaaaaaaaacaacgcatgattggttggtgtcgtaatcataaaggcagaaacaacgagcttgttgtcgattgcgtctactagtactccataattnttat

SEQ ID NO: 42696 - DNA, 1223 bp, Setaria italica
  Peptide Sequence Number=SeqID_108670
agtttatactgcaaactcatgctgcattatatttatcttgccacttctctaaaaggttagataagtttgtcgatccccaagcattctagcagtagcaggtaacactcgagagccattatatacggttccacgctgagatcactccagataacacacatgagcaatatagacaggcaccacactgaccctgactgacagtggcaagcataaatggtatagctagcaagctccttccttgtgactgaatggatccacgcccaccacgctgctccagcaccagcgaactagtggtgggagacggcggagccctgcaggaggccgtcgcggatctgcgtggcgatgtcgcgcaccgcgccggggccgtgcgggatgaacaccgatgaggccttggacgacgcgccgatctccttcatggtgtcgaagtactgggtgatgagcaccatgtccatcacgtccttggcggtggtgcccggcacgttgacggagaagcccagcacgctgtcacgcagcccgtccacgatcgcctgccgctgccgggcgatgcccagcccggacaggtacttggcctccgcctccccctccgcgcgcttgatctgcacgatcttctcagcctcagccttctcgttcgcggccaccctcagcctcgccgctgcgttgatctcgttcattgcgcgcttcacgtgctcgtctggctcgatgtccacgatcagagtctgcacgatctcaaagccgtaagctgacatggctttctcgagctcctcctccacagcctttgcgatctcatccttctgctcgaaagcgtcgtctaggatgagcttggggacacttgctctgataacgtcaaagacgtaagcttggatctgggaccttgtgttgctcagtttgtagaacgcatcgcttgctttgccagccagagcgcggtactgaatagatgccacgacgttcacaaagacattgtccttagtcttggtctcacagcgcacatccagttgctgcagcctgagcgtgagatgaccagctacacgcttcccgatgaaccagggcatgcagtggcaccctggctcaagcacgctgtcaaacttgccaaactgctccctgatggccacggtcgactgatcaacttgaacacagcagcacaagttgcccatagctgcagtccacggatcacttctgctggtaacctgggcttcgaacggtcggagaagaggcgaggaagacgacgg

SEQ ID NO: 42697 - DNA, 686 bp, Setaria italica
  Peptide Sequence Number=SeqID_108671
tcgaggaagtgccagatgttgcagatttcaagcaagtcctggccgtaaacttctggggcacagtgcatccaactcattgtgctcttcctcatctgaagaagagcggtggtaagatcttcgccaactcctcggctgcagcggtgttggcaatgccaagaatgagcttctacaatgccagcaaggctgctgtcctcaacttcttcgagaccctgcggatggagctccgcgacgaggtcggcatcacgatcgccactcccgggtggatcgagtcggagatgacgaaaggaaagcacctgtcgaaggaagggacagtggaagtcgatcaggacatgagagatgctcaggtcggcttgttcccggtggtgcgagccgagcggtgcgcggaggcgatcgtcgacgccgtctgccgcggccggcgccacctcaccgtgccgctgtggtaccgggcgatgttcctctggcggatgcttgcgccggaggttgcggacttcagccagcgggtgttctaccgccggaccgccggcggcggccacggtgaccggcaggccaaggccaggaggttcctggaggccaccggcgccaaggggggtgctacagccggcgtctctgcgcagctccgatatcaaacgggactagatcaagacgctgcagtggggagctgatctggaagaagcagagtggtttcg

SEQ ID NO: 42698 - DNA, 231 bp, Setaria italica
  Peptide Sequence Number=SeqID_108672
ggtggagaggtggtggtggtgggcagggcactctgctttggacccatcgacttagcttgtagtacttgcagacagacctcttgttgtcaccacaaaaaaagctcgatcatcaaatgatgatagttacaggtaacacaacagtagtgctagctactagctgttgttgttcactttgatttttccttttcattatgcgtcttttattgaatgattataatgaaacaattaaac

SEQ ID NO: 42699 - DNA, 2012 bp, Setaria italica
  Peptide Sequence Number=SeqID_108673
gctctctctctctctctctctctctctctctctctctctctctctctctctctcatataagttaccttttgttagttgcgggtaagtaggttagcaaagttttgagcttcaaaatcctccacctcttatcataacaccacctgtggttgacattagtagatcatactcgagagaacgggcttcacgatactgatcttccatagcaaatggaagcaaggtagaggttcttcgaccatttgtccttgacatgctggctggggaaagcagatgttctcaatgtctcctgtgtttcatcagtaggctttctcctagggacgctcaagataaaggctgcctggtcccacgtggcagccgttgccgtgatgcgataaccattgtcccaacgcatgtggatgccctcacttggatataagaagtcaagctccactacctgagcactgaaaccagcattgcgggacatgacaactgcccatcggctcccagctgtcgccatagcagtaacataaaagccctccttccattttttgtttatccatttgaagggaaatgaatcacttactttgtaggactgctgcgcatattgcgtccctcttgacatgatcaccagagagctgccattattcgcaccggccagtgcggtgatatagaaatttctctcccactgctccattatccattccttgtgaagaaagtgatgagagagttcgtatacttgagatgtaaaaccggttccagcatccataattaaagcccacagatttgagcatgaggcaactgaactgataaacaagccatcttcatttcccttttgaatatgctgtagtaatctattatcagctacattgtagtggtacctctgtttcataggtcgacgggcattgtacacactaatccactgagttgcaggcatccccattctgatctttttcttgggttgctcatcatcattttcatccactattaagcggcctctcttctggccaacctgatatattagcttctgagcaccatctgtgtttattggtcttatgtctggatttgggccaacaatgccatcaaaaagagatatgcacttcgcatagtttggttcttcatcaaatttcaagttcacgacatactcaacaaaatgccggaaaggttgtgggcaaattccacacaaagactctggaggtgttgacatctttttcttgcagacaagaaaacctttgttctctccctggtatccttgccaagggaggcgaccacggagaagaaaaataagtgtgtatgcgagggattcaaggtcatctctcctgctcccagttcttcccaagtgagcatgcacactagcgtagcgaacagtacccctaaaaatatcaggtctctgatcatagtcaacatggctccccgtaccagcatccttccatttagttgccaatccaaggtcaacaagaaaaagcttcttctcatctggggtaccaggaggaccaagcaagaagttctcaggtttcacatcaccatggacataccctttagagtgcatcttctccagtatggagattgcctctatgcctatgcaagcaaccatctcaacagacatcgagtgggaattattattccaaacatcccataggcttggccccagcatgtccataaccatgatgtaaaactcagcctgttttcctttgtagtgtacccgtggaacaccatggtttccactaagagtgttgtaaacttgccactcataaggagctccatagttgcaacctttgctggtttgatgttcaaatttcagcgcaacctctaaagcatttgaaccagggttccggtcactgagacggaggggcagaaatacgtcgaccgacatatacttgtccgaatccaccctttccaagtttcctttcaagcttataggttggcgaatttccaatttgtaccgtcaggggcagcggcggggcgcccccgtcgtcgcccgcgccggcgcctgccttatccccgctccggccgccgctgtcgaagtcgtccatcccttc

SEQ ID NO: 42700 - DNA, 362 bp, Setaria italica
  Peptide Sequence Number=SeqID_108674
cttggttttctacgccagcgcagcaagcagcgcaacgcagcggccggcattgattattgcatctgatctccgcgccggagccggaggggaggagaggatcgagagaggatgtgctgcggcggcgacggcgagtgccggcccctggggtggctcctgggccttcccttcgcgctcctcgccgtcatcgtctccttcgtcggcgccatcatctggatcatcgggctgcccatctcgtgcatctgcccctgctgcctgtgcgtgacgctgctgctggaggtggccgtcgagctcgtcaaggcgccgctccatgtcatgacatggttcacctccaagataccctgctgatcatcatccacttcgcc

SEQ ID NO: 42701 - DNA, 263 bp, Setaria italica
  Peptide Sequence Number=SeqID_108675
gcaaccgcttgaggagaaggagaagaaggtggtggacaacgccaagcggcagctgcggcggtacgagcactactacaatcggttccagaaccacggcgtgtcgtgcaaggcggaacgcgagaagttagggccggccgtcgcggagagcgcgaagaagctggaggcgcacgacagcatcttgatcaaggacgcgtcatggctggccaacgcgcaccggagcctgctgctgtgccgccaggtgctgacgtctagttcgttacgtt

SEQ ID NO: 42702 - DNA, 530 bp, Setaria italica
  misc_feature (23)..(23): n is a, c, g, or t
  misc_feature (39)..(39): n is a, c, g, or t
  Peptide Sequence Number=SeqID_108676
taagattttgtccatcatactcngtttccatccttagtnagggcctctcatatttctgctattgtcttaagctttctctgcctcttctgtacagacagagacatctctctatccaaaactagcttgtatccaaacaagcacagctagaaaagggctcatgtgcaacacacaagtgttcctaagggttgatttgaaatgggggtgtcaatctattcttgatcaggaaagaggcatcactgcctaaccattcaacaccacatgacaatcaagtatttctcgtggttccacgtctagagtaaaatcaaaaagacctggagtcatgtaccaaaatagtcagggacgaaaattgtgatgcacttggcttcttagaaaagctccaaacttgtttgctgctgtgccaatcagctccataatctctaagggacagaaatttggataccaccagctccataatctctaaaggccagaaatttgggtgccatcagctccacaatctccaagggctggaaatttggatgcaatatgctagt

SEQ ID NO: 42703 - DNA, 1451 bp, Setaria italica
  Peptide Sequence Number=SeqID_108677
gtttggcactgaaagtgatatttcccttacttagcttataactaaaaaaactgagagattaaattcaatgttcattgaaggctaaacaccattagacagaagtcaatacccgaaccaatcatcatcctctgctgcggctacaaactagaaaaaagaaataatgggagcggcaaatggatggcagaagctatggagtggagatagatggggggagacagggaaagagagagagaaacagaacagctgacggcagcaagaggaatgtgacgagcctggtgcgttcttgactcctccgtttcatgcaaagcctcgcaaagcaagcaaacttcaaaccctgtaaacagagacgggacacctagaaccaagaggaaaagttatcatgcatgcatgaatggcagagggagagagagaggtcaagagagggagtcgaatgaatgaatgatcatgggggtggtgatcggacggcgcagcaacggcggcaggtgaaccccaagcgggcgacaactccatggcagcagcagccccgccctccatgaatggccagcattgaagcgccccaaccaaccaagagctccgtcgcgaaaccaaacgccttgaagggaattcactccccgcagcaggcggccggccgggagggggagacctacgcagggggggcatgcatgcatgcatgcatgcatgcgcgcgagcatcaattccccatcgatccatccatccatgaatggctggcgcaattcaaggccgccttaatttgctccacagtggtgctgatgaggctgttgaccgtcgccaccgactcggcgttcagcttcgacgacggcaggctgctcacaaggatctggaacgccaccgtcaccagcgaccccgccgccggggagcccagcgggcccgcgctcgacgacgacgcgccgtgccggccgtcgggaaggatggtgaaccccgacggcaggagcgggatcgccgacgggtcctcgccgctcatcaccacgttcgccgccgggacgtcgatcggcgcgtacaccaccagcgaccccgacgcgtcggtgcagctctcctgcaggatcaggatgctgttctggctcgcgttcaggcctcgtagcaaggagatgcaattcccagggtgcgagccgttggggatgcgcgacacctcctgcacctggttgccgtgtgacagcacgtcccactgagagcgcgtgttctcgtcgcggacgaaggcgaacacccggtcgcacgggacgggcagccagatggaggtggcggcgctcagaaccacgccgctgggctgccccgggtcggtgctgcggtgcaccatgacgcggacgcccacgtcgttgggccccgacagcatcgtccaccggtggagctgcgacgagctcaggctcgcgcagaagctgctcaccatccgctgcgacagcttcatcatgcttcgcttcccttccggcgtcactcct

SEQ ID NO: 42704 - DNA, 504 bp, Setaria italica
  Peptide Sequence Number=SeqID_108678
ccaccgcctcggcgcgctcccttgccgcgctccaggccgagtccgccgcctccgcccgctccctcgccgcgctccaggccgaggcctccaccgcctcctccatgctctcctccggcttcgagaggatctccgccaaggcctcgccttcctcggcccccgccccgctcccgacctcccagaagtactcctccggcctccccgccctcgcgtacggcgtcctcaagcgcgccaacgacatcgtcgacgatctcctagcccagatcgacgccgccaaccgggaccgcgaccgcgcacgggagcagatggaacaccgcaactaccagatcgccatcgaggtctccgagctcgaggcatcggtcgcgtccaggtccgccgattgcgaatccctctccaagtccctctcgcagcgggaagccgagatctccgagctccgtgacaaaatcgcatctctcgaggtaaagcttgacgcgcagaggcccgtgctcgccgagcagatcggctgcg

SEQ ID NO: 42705 - DNA, 952 bp, Setaria italica
  Peptide Sequence Number=SeqID_108679
ttaaccttaagttaaaccaagaatacgaccaatacgaaggttccgtgggctcgaggcatcggtcgcgtccaggtccgccgattgcgaatccctctccaagtccctctcgcagcgggaagccgagatctccgagctccgtgacaaaatcgcatctctcgaggtaaagcttgacgcgcagaggcccgtgctcgccgagcagatcggctgcgcctccaagctgtacgatgaaatgcgggaggtggtcaagctggtcgatgctgatgctgccagcacgctgtcagactcggtttttgtctggaaggagacggacgttgaggaaagcctcaaggtgtccctggaagggacgaaattggcctatgagcttgcagcaatggccctggagaaggttggggcatgcatcgatgacaaggagagcaagctgaggggtttggaggacagggtggatgaactgatcaaagagaaggagcacattggggtgctgctcaggagtgcactgcaggcgactacgagcgaggtgttaaaggttgcagaggatggactgagggaggccggcattgagattggactcgacgagcggaaggagcacaggccagggagtgtggagaaggacgaggtctataccctggcaggggcactagagaataccatgaaggagtcccaagttaagatcatcgagctccaacatctcgtcgaagcactaagggcggagtctggtctactaagaacaaggctggaagggcaggaaaaagagattgtccagctaagaaagcaaataaagcatcttgaagagaaggaaagggtggcaaatgaaagtgttgagggtctgatgatggatgtgacagctgctgaagaggagattaaaagatggaagatggcagcagaggaggaagctgaagctggtagatcaattgagcaagagttccagattcagatctcatcccttagaaggatt

SEQ ID NO: 42706 - DNA, 717 bp, Setaria italica
  Peptide Sequence Number=SeqID_108680
tttgttttcttttacttttaagtttaacttaaggttctttggtaagggcaggaaaagagattgtccagctaagaaagcaaataaagcatcttgaagagaaggaaagggtggcaaatgaaagtgttgagggtctgatgatggatgtgacagctgctgaagaggagattaaagatggaagatggcagcagaggaggaagctgaagctggtagatcaattgagcaagagttccagattcagatctcatcccttagaaaggaattagatgaggcaaagcaagctatggtggagcttgaaaacaagctgaagttcaaggaagagacagcagccgcagcgatggcagcacgcgatgctgcagagaagtctctaaaactagcggatttgcgatcatccaggcttcgagagaggctggaggagcttaacaggcagcttgaagaatcagataatagaaccgattctgttaatcgcaatggccatagatacatgtgctggccatggcaatggttgggactgaactatgtgcggttacctcctgcggagatggagcagacatccaatgagatggagctatctgaacccctaataatatagttgtgccatgtctatacagtttacatatacggctcctgctccttcatttagagaaggggaacggtaaattttgtttgatttgcgttcttgtgtagatgttttcccaatttgtttgattgtctattgtt

SEQ ID NO: 42707 - DNA, 652 bp, Setaria italica
  Peptide Sequence Number=SeqID_108681
acacatatgacgtgagttagtttgtctgagcttcaagcttttcttttgttgtttgtacttctattcgtgtctgaatgaacagggccaacactctttctcgaggtggtgagtaggaccgaaacctcccatttgatactttgtcaattatgacttcaagattttctgtttatctttcgaatggtactccttttctcaattctgatgttaccaaatgatcctcatattcaatgctggtatcaagaaatcgtgatcttttgtttagtgtcatgcttgctgttactttaggcacagacatgcatggacttatttttgcctaagattatagtgatcggtgattgcacgattcctgaacaaatgtgtttttactattattgctaccttggcatttattcagaaggcataatcaattgctaactgattcatgtatgtctttaaccatgcataagccatactcaccatctcttataccaatgatgctcttcacctgcagagtgtgtatattatctttttttgtgtctgcatccttagtccttactttctgcggcataattgttgtaattattatttatccttcaggttatgcgaagtggtattccaaatttctgcgcagtggctctagcactacatgatttagggtacaaagggcatctgg

SEQ ID NO: 42708 - DNA, 1665 bp, Setaria italica
  Peptide Sequence Number=SeqID_108682
ctttagggaagttgactgctctgatgtagaggtgtactccattcctgagggctcagtagtctttccaaaagtgcccttgatgagagttgagggtccagttgctgtggttcaacttcttgaaactccatttataaatcttataaattatgcctctttggtaactactaatgctgcgcggcatcgtcatgttgctggaaaatcaaaggttctgttggagttcggtttaagacgagcacagggacctgatggtgcaataagtgcctcaaaatattgttttatgggaggttttgatgcaacaagtaatgtgttggctggaaatttgtttggcataccacttcgtggaacacactctcatgcttttgttagctcgtacatgagccttgatgagatccctgacaaggccctcaggagtaaagatggttcaagagtctgccaggattttgttagtttagtgcaagaatggcttcaaaagatacaggtagcagattcattaggtggtgtatttggttatacaaatccaagtgagctggcagcatttgcatcctatgcgttggcttttccaagcaacttcctagctcttgtggacacatatgacgttatgcgaagtggtattccaaatttctgcgcagtggctctagcactacatgatttagggtacaaggcatctggtattagattagattctggtgatctggcctatttgtctattgaagcacgaaaagtgtttcgtgctgtagagaaggagtttaatgtacctggttttgggaagatggtcatcactgctagcaatgacttgaatgaggaaaccattgatgccctcaacaagcagggtcatgaggttgatgcatttgggattggaacttatcttgtaacgtgttattcccaggctgctcttggctgtgtctttaagctagttgagatcaatagtaaacctcgtattaaactctctgaggatgtggcaaaagtttccattccgtgcaaaaagcgatgtttcagattgtacgggaaagaaggctatccactggtggacatcatgattcgtgaaagtgaaccatcacctaaggcaggagaacgaatcctctgccgccatccgttcattgaatcaaaaagagcatacgttgtcccccaacatgttgaggagcttcttcagtgctattggcctgggagatcagataagcccagagcagagctgccctctttggacaagatcagaagccgctgcatgcaacagcttgaaaagctgcggcctgaccacatccggcggctaaacccaacaccctacaaggtaagcgtgagcgcaaagctgtacgatttcatccactgcctatggctgaacgaggcgccagtaggtgaactgcagtaggaggatggtcacatgaagttttgggccatcttggaggtatagcagcaatataccgcgaaaaaggtttagagatcttgtgcagctgtgcacaacaccagctcattgctcatcccttaggattttgctcgcccagctctcatcttgtacaacccggttatcgttgtagatgcaggcctgattaatacaccccttgattggtggggatatactatatatatacatcgttgtggaaaaaaaactgaacacatcagttatgagtccaatgggaaaaaaattaacaagccaaaaagatgttgagatcc

SEQ ID NO: 42709 - DNA, 330 bp, Setaria italica
  Peptide Sequence Number=SeqID_108683
tttttaatttagtattaataacctcttgcaaccaagtgtttttaaacttcaaccagaaacgaatagacagaacatcaaccggttcacaagttttttaactgacaaatagacagaacatcaaccggctcacaagtttttcaaccggcaaatagatagaacaccagaaacacgccccacaagtttttttaactcaccgttgatgcatacaagttttttttagaaacgaagccaaggaacataccactcgaacagcagtacagcacaaacacgctgcactcatatacaatctcattgacctcaaacatgaagctgctagtggagtggccaaag

SEQ ID NO: 42710 - DNA, 377 bp, Setaria italica
  Peptide Sequence Number=SeqID_108684
ggcgcagttggcaagatcttatttagtagacgctgctactatattagtatgctgctggggggcgcttctccttcctcctcgcgcgccatggcgccgccgggatggagagcagcagcagcagcagcgacagcacgtacggcgaggcggcgtgcggcgttgccatccttcttctctctcgaacgggaggaaggtgatccccggaccccgatcaaccgacaggagacgacgggattggaaacaccaagagcaatgaaaatccccgcgattcaggaggggtttctttccctgctgggatcggatctcgcgggcattaaccggaggaaggtgggaggaggggtaaatcagggaaccccgcggagcagagcaggatcaggaag

SEQ ID NO: 42711 - DNA, 589 bp, Setaria italica
  Peptide Sequence Number=SeqID_108685
gagaaagttggactcgattttctaaagaaagatgccatcatccacaaaccacttcctatagataaaagacctgttgtaaggacaaagcacaagcgcaagaacccatagtaggggcatccgccgccgaccttggggcaaatgggccgctgaaatccgtgatcctagaaagggtgctcgtgtttggctaggcacgtataaaacaccagaagaagctgcaagagcgtacgatgttgaggcccgcaagattagaggcaacaaggcaaaggtgaatttccctgatgaggcgccaccaaacatgatgagtaatacaacaaaaccaactgttattgcaatgccaacaataccttttctagcagagaagtttagcaccaattccctagtaagccattccaaaaactcaaatgaagatctattctctgtggtgaacttcaatggaaagaatgctcgctcaattcctactgacggattcgggttaccctctatgaagatacctcatgcgtcttatgaaatcccaaggatgggtgggtgtgcaagtcaaaatagattttcaattggttcttcaagcaacggtattggcgagattcgatgg

SEQ ID NO: 42712 - DNA, 736 bp, Setaria italica
  Peptide Sequence Number=SeqID_108686
tcggtccctcggttgcgccgcccgccgctgtcccgtccgccgccagagcggagcccccaccattggacggtgccccgcttctccggccggctgaggaaggtacgcccgcgcgctccagtcaccagatccgtaggcttcatcgatggcttcgccggggccttcctcccccctggacagtcgatccacgcgccgacgaacccccgtcgcctccaacaccggcgtgctgcccccggacgtgctgttcgacgtcctgctacggctcccggccaaggagctctgccgcctccacgccgtctgccgcgcctggcgctccctcaccgtcgatccgctcttcaccggcgcgcacgcggcgcgccacccgctcttcctggccaatttccgggatgaccagacgcacatctgtgtcgttgatctgttaggcatcgtggtgaagcggattcccaatgcggatggccacctcctgctccacacaagcctagatctggcctgcgcgacgacagtaaggaacagctgccaggtgcttgatccggctactggaaatgttcacgtcccgccggagagcccagcggtggagcatttggatcgagagaatgtacgcatgccatacacctctttcgcatttgggaggattgccactactggagagtacaaggtgataaggattttcaaccggccgactcttgctggctttcatcagccccatctgtttgaggtgtttacaatcaacatcagtggt

SEQ ID NO: 42713 - DNA, 316 bp, Setaria italica
  Peptide Sequence Number=SeqID_108687
taacaaatttaaattttgattgcagataacaaaaaccaaaggtgcacctatgcttcctggtgaataagatggaactccagtatcattgtcctcaggctcgtagttaagacagagcgctaaccatccattcaatgcttttacaaagttcctttgtgcattcacccaagaggaaaaactgatgatccatttaatcagctctacttcaagctctattgccaaatcctggccatttgcacctgacacaatcgaagtcaagttttggcttctgatatcacttgacactgactgtggtaggagtctagtttatcttgccaca

SEQ ID NO: 42714 - DNA, 231 bp, Setaria italica
  Peptide Sequence Number=SeqID_108688
cttgatgctgaaaatgctccattcttcgtggccaaactggcaataaaaacattaccatgcatcatattgttcaagaagggtattgctgttgaccggttaattgggtttgaagaccttgggaggaaagacgacttctcaacaagagcattggaaaatattctcaagatgaaaggaataattgacgatctaaccctcctgttcttagactcgctttcatcatcttcatcatcg

SEQ ID NO: 42715 - DNA, 1082 bp, Setaria italica
  Peptide Sequence Number=SeqID_108689
ccgcttcgctctcgttcccccacgaaaccgaagcaaatccggcgaggcgcagcggcggcagcggcggcggagtaggagggagaagccggcgcgagcaggaacaggaggaggcagcagccatggatccggacgcagtgaagtcgacgctctccaacctggccttcggcaacgtcatcgccgccgccgcccgcgacctccagaaggaaatggtggctaaggacaaggctcaaggtgcacctgcaagccatgatgaagttgatcttgatgagttgttggatgacccagaacttgagaagttgcacgcggagagaattgctgccctgaagaaagaggctgagaagcgtgaggtgctaaaaaggcaaggtcacggtgaatacagggagataactgaaggagatttccttggggaggttactggcagtgaaaaggtcatatgccatttctaccaccgagaattttaccgttgcaagatcatggataaacatctgaaggcccttgctccagtctatgttggaacaaaatttgtcaagcttgatgctgaaaatgctccattcttcgtggccaaactggcaataaaaacattaccatgcatcatattgttcaagaagggtattgctgttgaccggttaattgggtttgaagaccttgggaggaaagacgacttctcaacaagagcattggaaaatattctcaagatgaaaggaataattgatgagaagaagaaagacgacgatgatgaagatgatgaaagcgagtctaagaacaggagggttagatcgtcaaccgcccaagattccgactcagactgaagatgaaatgggagtgcaccattttgtaacttttagtttacgtttgctgctctgtaatgtaattgtcaaaatctctttgtgatttgttcgatcagcgttgtatcaataccggttaccagaaagaacaagagagtttctgcatgtagaagtgattttttactaactcagcatccatattgtgtaaaaaactgtgttttgtggttgccttggactactaaaattgacgatctaaccctcctgttcttagactcgctttcatcatcttcatcatcg

SEQ ID NO: 42716 - DNA, 359 bp, Setaria italica
  Peptide Sequence Number=SeqID_108690
agccgccggcgaagagctacgtgatcgacgcggcgcctggggtgaagtgcatcggcgtgcaggagggcgcgtggccaggggtgtcggtcatcggcaacatcctgcagcaggagcacctctgggagttcgacctcagggaccggtggctccggttcaagcacacgcgctgtgcccaatgatgctgacgacgggtgcacacgattaatccatccatcgtcttgataaatttgtaacggccttcgagtgattggcttctctaaatggaaagataatttttagcgcgatggggaaatgttcagctgagatcgcggttctgctcgtgatgtgcagctcgaatttgctcgcgtgactgcagacag

SEQ ID NO: 42717 - DNA, 855 bp, Setaria italica
  misc_feature (814)..(814): n is a, c, g, or t
  misc_feature (845)..(855): n is a, c, g, or t
  Peptide Sequence Number=SeqID_108691
catacgacggccagagcttccagtcatccgatggcgtgctcagcctgggcaacagcaacatctccttcgcgtcccgcgccgccgcgcgcttcggggcccgcttctcctactgcctcgtcgaccacctcgccccgcgcaacgccaccagctacctcaccttcggcccggggcccggggacgccgccgcgccggagcagacgccgctgctgctcgaccgccggatgagcccgttctacgccgtgacggtcgacaccgtctacgtggccggcgaggcgctcgacatcccggcggacgtgtgggacgtcgaaaagaacggcggcgcgatcctcgactccggcacgagcctcaccatcctcgccacgccggcgtacgcggccgtggtcgccgcgctgagcaagcagctcgcggggctaccgagggtgagcatggacccgttcgagtactgctacaactggacggctggcgcgccggagatcccgaagctggaggtgcacttcgccggctcggcgcggctggagccgccggcgaagagctacgtgatcgacgcggcgcctggggtgaagtgcatcggcgtgcaggagggcgcgtggccaggggtgtcggtcatcggcaacatcctgcagcaggagcacctctgggagttcgacctcagggaccggtggctccggttcaagcacacgcgctgtgcccaatgatgctgacgacgggtgcacacgattaatccatccatcgtcttgataaatttgtaacggccttcgagtgattggcttctctaaatggaaagataatttttagccgaacgaaaaaaaaaaanaaaaaaaactaaaaagagaactagaccaaannnnnnnnnnn

SEQ ID NO: 42718 - DNA, 460 bp, Setaria italica
  misc_feature (1)..(48): n is a, c, g, or t
  misc_feature (459)..(459): n is a, c, g, or t
  Peptide Sequence Number=SeqID_108692
nnnnnnnnnnnnnnnnnnnnnnnnnnnnnnnnnnnnnnnnnnnnnnnnagtttaaagtaatttccttgcaaaccataaatggcgagagaacgaatcattgaagaccactacatgtcgaacattttctagacccaagcaggggcacgcatcacatggaaacaacaagaatattgtgaagtgagcagagcctaattgttcgatctccacagtcaagttgtactaactccatatcatcactatatagcacgttggtcgtaataactgatcatcaatcatcaaagggagggggcgcagacgacgcaggcgaggaggagcatggcagaggatgcggcgtcgtcctcctcgctgaagctgctgcgcttgaaccggcacgccttccccttgttgcacggcagcagccgccgcagcaccagctcctgcgcctgatgctgctgctgctggtgccgcctcccggcgccnc

SEQ ID NO: 42719 - DNA, 510 bp, Setaria italica
  Peptide Sequence Number=SeqID_108693
ctggcttttgttcttggaatgaattgcctaagtttcttccactttgcatccttatcggtagcatgacagtgatcagtatgtgcggtgcctttgccccagaaggcacagggaggcaggagaatcacagacataacagtggcacatattgcaatgcctcgcgtgagaactggtgctgaacggcaaggtagcacatagatggcgtggatgagggaaatccctgcatgctatctctcctttctctgcaacaatctgcagttcatcctcagcggcatctcgccggggtccctcctccttcgcaacggcaaccggcttatcagggtcaccgtcaaggatgacgcaatcatcgtcgttgtcctcgtcttcgccatcacgaacggagttcgagttcttgtcaaccactgcactctccttgtcacccatcacaatccccgtcgcgtccatcagagaatccagcaattcctgcacggccgctggatcaaccaggccgccccgcttacaccgaagtcctct

SEQ ID NO: 42720 - DNA, 3304 bp, Setaria italica
  Peptide Sequence Number=SeqID_108694
ggaagggatggagggcggtatagaacataacacaagaaatgaaggtaaccttcaacaaacatacaccatgatcaatggcaggtgctcaggactcccctgggacaacagaattcaatggcaatatagttgcccccgaatgatttacttgtatatcaatggacaaaccccagaataggataattatcaccaacacaccagaaaaagtttccagtttgataaaagtactgatcatgtatcaatagttccaaattttagtaggaaaacaaggattagggcaaacctcttcttgatgcttacgaccagcactctgcagaaaagaaaccaaatcagaaccaccatactccaaaagctcattttctagaccgagctcgatcagtgtcctgtatagatgctcatggaaaactgtgtccggccattggacgctaagttggatgatctgtttgatatacttgcttcgagaagctggatcaacagcagttgctaaaccagatgacttatctgcaccttgcccaacacccttgagggtgcgtagagcattcataactatttcatagcactgttcacgctgcaacgttatcatatcatgatgccttggatcaatttgaccattgataacatcagcattggagtcaagtgcttgagctttctgcagaggcaaccggactacagcctcataaaatcttaggttctcaaatctcttgcagatggcactcaaatctgcagagtctggtatcttagttaagaggttgaaagcatctctagcaagaatatctctttcatcagggttattagtcatagatgctctctcaagacattccactgccaagtaatatttgtagtctgactcgttgaagtaactagggcaaccctccctcaatttagtactgatttcctcaacagttcctctgccctctgggccaatatagtactccatgagtgcagaaataagccgcatcgcaagctggtcgccgtcctctgaacataccaattgatgaaacgttaattgaactaatttcttgcgtaaatcattgcccagtgtctgagccaagcggacaacattatgatggcaaataagttgaagcagaaagagtgcttcaccagatctcctaagcaaccgcctaagacattccattgccctcacctccatagccgctagttctgctgatgtataaaccagccttggctttttacttgatgcagattgatcggtggggttcatatctcgaatttgggagttgtacggactccttccattgccacgccccccagaacccataataggccctgttttgtagagtattgaaccagaatcgcccaggccagcaacataaccatacaggcctcttctcttgtttcttctagatcttaaaaatgtttccagtgaacgaatcttactctcaagaattttcaaggccccagctgacagcctgcaaacaactatgccatcctcgtgttcattagcaccagcaggtcctcgaatcaccataataggaagctcccatatgggatagagtagtcttgaagagcacaaacagagcccttcatatgcaccggaaaacaaaggttctgcttcttgaacaacttgacccatactaaagcctccagcctgagttcgtgtattagataaagcagtggtgccatcaatttgaggcatcccaacaagtccagggtcctcaaatgcctcagcagctttctcagaaacagcattgcttatcagactatcttcagcataaagtagcttcgcggctagcattaagcacattgctgcagcttctccagcgccaaagcgattaaagaattcttcaatttgcgatctcaaggtgttcccatcaaacaattttcttagaatatcaacaggcctgttaaaaattacctccatcaaacccattgtattgaatacaacaaccctcctccgaggtaagatatgctgggtaggaagatctcctttcgcccacagttttatagatgctttctcagaaggttttctgaaacttgtgaagcattccacatcagcatataaagactgcaccgtgaaagcagcatctggaagtgggagaacatcagaggcacaaagcattcgaccctcaacaggcaaagcagagactgtttctcgtagagctcgggagcttctagaagctgttccaaacgtactcggaagggataactgcgcagctgaatctttctgcacagccagaagagatgacatggctgtagcagatgaatctgacattataagagcaccagcagaatagaacgcagactcaacttttaaagctagatcctcaggatgagctctgccagccgcagaaacagcaccaaatgtaagcccaccaccaacccccaggggtggggacggcctagtagcaacaatttttaaacaggttggcctctgcaaactactgctcaatccaactgaagaaccacttccacctgacgtggtaagaaataatctcttcccatctgacaaaacagcaacagcatgaagccatttcgattccatagacgatagaggtgagatgcagacaattgatggttttggtgatcgtgcagatctttgtgcgttagaccttcgaccaccataaggtgcatcccgtggatcaacaatgttcttttcttctgtaacttttgtcaaagggccatcgccattagctcctaaatcaaataactgcaatttcatgccttcggtgcgagcatagatagtgttcctctcgtcatcgatgaccatatcaacaataggatcaacagttgagaatttgaatgcatttggcaggacccacctggaaagaaggctgccaataccagtagtaagacaaactttacggcagcgtttacgccagcctgagccagttgtatactgcaattcatatatatgcccatcacgtccagctaggaaaatttggcccttatccgtacatgtgatgcatgtcacagtgacaccatcagtggcaatcatgtactcaggtaaaggttgtaatgaaagctcagcatacggatctgttccatcagcactagcagaacagcaaactccaacaagtaccagctcaacaggagttgacttaaaaactaaaaggtattgaatggcttcaacgaaaatcccaggctttgccctagcaaggccaacagcacaaattgcttgctcatccacattataatcttgacactgcccatcccatttgtcaaaacgccagatgaaaaatgaattatcaaccgttgcccaggcccggtgtatgtcagaaaagatcccacaaagggctgtgccttcaccggctgcagcattgtatctttcaatcaacataggagggag

SEQ ID NO: 42721 - DNA, 515 bp, Setaria italica
  Peptide Sequence Number=SeqID_108695
cttcagtctttggtatcgtatcacctgaagggaaaatctaggaggttatttcagtgcctctctatatttctttcaatttcaccatttcatgtttgcgacaaactacatcgcagtactgcattaattttgctggccttctgcaaagattttggcgtggtccgtttggtttcccagatgcattactgtaaagctgttgaataaaaaattatgacatgccaatgtttctgctaaagaagctcttgctcactctgaaaaagtctagaacccctacatgtatatgtccaatgccagttgtgtaaccttgttgatgctccatttcaggcccggcccttgttcaaagacaggaggaaatttcccctgatggcggaccctgcactagagggtcagtatccatcaaggggattgtaccaggcacttgctgtcgctgcgatgtgtgttcaagagcaaccgagcatgagaccgctgattggagatgtggttacagccctcacttaccttgcctcccagacctacct

SEQ ID NO: 42722 - DNA, 1657 bp, Setaria italica
  Peptide Sequence Number=SeqID_108696
cggttccccacgcggacgcggacgcggcggagcgcccctcccccctgccctctcctcggcacggagagaagaagaccgagcgggccatggaaagctgcttcccctgcctcgggggcgccaagaagaagaggccgccggagaagccgcagattccgcccgcctcagagaaacccaaactgggcccgtcgtccagtgtgacgaagcaggactcgttcgaggtgaacaaggaagctgcaaacagggacatcatcttgagcaatggatctgaccaccaccaaatcgctgcgcagaccttcactttcagggacctcgcggtggccacaaggaacttcaggcccgattgccttcttggtgagggtggctttggccgagtgtacaaaggctatctgaactgtgtcaaccaggttgttgctataaagcagcttgaccgtaatggattacaaggcaacagggagtttcttgttgaagttctgatgctgagcttgctgcatcacccaaatcttgtcagccttattggctactgtgccgatggcgatcagaggctcttggtttatgaatatatgcctctaggttctcttgaggatcaccttcatgatccttccccagataaggcacgtcttgactggagtacaaggatgaagatagctgcaggtgcagcgaaagggctagagtatttgcatgacaaagccagtcctcctgtcatataccgtgacttgaaatgttcaaacatcttgcttggagagggttatcacccaaagctttctgattttggactggcaaagctcggtccagtcggtgataaaactcatgtttccacaagagtgatggggacatatgggtattgtgcccctgagtatgctatgaccggacagttgaccctaaaatcagacatttatagctttggtgttgtccttttggaaatcattacaggacgaagggctattgacaacacccgagctgcgggggaacaaaatcttgttgcatgggcccggcccttgttcaaagacaggaggaaatttcccctgatggcggaccctgcactagagggtcagtatccatcaaggggattgtaccaggcacttgctgtcgctgcgatgtgtgttcaagagcaaccgagcatgagaccgctgattggagatgtggttacagccctcacttaccttgcctcccagacctatgatccggaagcacatggcaattcacgcttggtggctccagggacgccaccacggactaagaacagcagtcgaagccatggctcggtagatcagagaggaagcagctaagcaaaagcaaggtgatggatggtttgggacagcccagaattttggtaagcatctaatcttaagatgtgtgggagcaggagctagcggtgcgtgcccgtggagaaatttgttttgttggaacggaaggcaccagtctggagagaaatggatggtctggtctggtctggtctctggtgtgttcctctatgagatgacgaagtatgttaaaaaagctgggaatgcctctagtgcgttccattcattaaaggcaaggggaaacaagtgctgtacatatgtgatccctcggtctgagttgggtgtatttcatttccatctgcagaacaacaattgcactctttactatatatataagtgcattattctctctttta

SEQ ID NO: 42723 - DNA, 358 bp, Setaria italica
  misc_feature (302)..(302): n is a, c, g, or t
  Peptide Sequence Number=SeqID_108697
ttgtagtacccgaaaggtaggtagtagtgaggcaggggctggagtggctatatgggcccatgccatagaggagacacagcatcccaaggtacagaggtggttcttctcattcccagtggccaaccctctgactgcagaaatgaaggtgccccatattgctcagcacaccagagcaaggaggcaagacaaagaaacaccaaggtagatgaatgggatagaaagaacatcctgagcctggggcccaagcttacccttggacacggaagtggatggtgcactcctcaatctctccaaaaaacggngaacctctgtttcagctctgatcgagtcatgcggccaggtatctttccaatgaaga

SEQ ID NO: 42724 - DNA, 376 bp, Setaria italica
  Peptide Sequence Number=SeqID_108698
tatataaggctatagaaggattttggactgagcatgttgatgaaagtggtcagactgcctacagcgccatgctacaataaccctcacctaactcctcgtgaactgtgcttatactacagtaaagagcttagttcaggttgctacacgcatttggttcatgctttcattctgattgatcagatctcaatatctcatcatccgtcgagtggtggctcagtaaacaggaaatttccattttaccttttcagcgtttacctttgaactgtgaatctatttgtaacttgttttcctcttctttttattaaacacatgccgtgcatgttctagatgaaaagggtctgtgtaatgccccaccctccaaagccgcactacccac

SEQ ID NO: 42725 - DNA, 235 bp, Setaria italica
  Peptide Sequence Number=SeqID_108699
agctacacaggataaaactatggaagcaagtgctaccacagctgtgagatacacataccagtacatgcaggccaagttaccccaaccttgtaggacagatgcccaagcagaaccagtgaaccacatcagatcacggatgaatacagcacgaggaatcataagtccatttccaagcattgcaagcaacatgctgaaagctgacaaccctttgatgttacttgggttgaggtaattt

SEQ ID NO: 42726 - DNA, 977 bp, Setaria italica
  Peptide Sequence Number=SeqID_108700
tttttttttagttagacaaattttgcacgccagcaagggctgaatgaaatctttattcattggaaaagaaggaactgaagtcttattcaggacaagatgggatggacattataatcttttttcttacatctactaggactaacttgcgactgtaccaaccctgccggatgtacaagctgatcacgcggtggattctgtagaggcacatggcgctttctgcaggttggggaagttggggctccatttcagcgtttcaccgtggccatggcaatgtttgtagccttcaactgaccagtgtttctcacggtttcacctcaaaatgccaagactgaaccaccgttctttagaccaaaggggtaactgaaccaccgttcttgacagtgacccgatgaattattgcaggagagcttcctacccgggaacagttagctgcttcaagtgcaaggtaaatgaagttgccgacggcttatcacttccctaaaaacaaattccttcaaagaagtcaagggcgagctgttgccataagcaatggtatctctccagaaagtgaatcctggcaaagcaacaaaaaagcgacatgtatggtcagaaagacaatccggcagactgacagccaagaaacaattcagttctgtactgatctgaaatgctgctctcttcacagaaactctgaaatgtctgtgctcctcatgaaaataccaaaagtttgaaatgcctcttataaagacatttatattgggaaagaaacaaagtagatatcggaaagagacaacacctagccatagaaggagcccagatgttgttgcaaagaaaaattctctgctgatgctaccaaagcagtacatgcaggccaagttaccccaaccttgtaggacagatgcccaagcagaaccagtgaacccacatcagatcacggatgaaatacagcacgaggaatcataagtccatttccaagcattgcaagcaacatgctgaaa

SEQ ID NO: 42727 - DNA, 793 bp, Setaria italica
  Peptide Sequence Number=SeqID_108701
ccatgtgcctctacagaatccaccgcgtgatcagcttgtacagcgctcctgcaggttggggaagttggggctccatttcagcgtttcaccgtggccatggcaatgtttgtagccttcaactgaccagtgtttctcacggtttcacctcaaaatgccaagactgaaccaccgttctttagaccaaaggggtaactgaaccaccgttcttgacagtgacccgatgaattattgcaggagagcttcctacccgggaacagttagctgcttcaagtgcaaggtaaatgaagttgccgacggcttatcacttcccgaaaaacaattccttcaaagaagtcaagggcgagctgttgccataagcaatggtatctctccagaaagtgaatcctagccatagaaggagcccagatgttgttgcaaagaaaaattctctgctgatgctaccaaagcagtacatgcaggccaagttaccccaaccttgtaggacagatgcccaagcagaaccagtgaaccacatcagatcacggatgaatacagcacgaggaatcataagtccatttccaagcattgcaagcaacatgctgaaagctgacaaccctttgatgttacttgggttgaggtaatttgtccacatctgtgccactggcatccacatgaatagaagtgtggctgtccaaccagacaatgacccaacaaacttaacccctgcatcagaaagcttgcccatccttgccatcgcaacagctgcaacagccaaagaaccagatattatgccaggcaggacactattgggggg

SEQ ID NO: 42728 - DNA, 667 bp, Setaria italica
  Peptide Sequence Number=SeqID_108702
agctagatgaactggctaattattatagtacaagaaagtaattctggttacctcttgtcaattaagtagtctctcattttgcgtatgagctgctccgtctcccacctttccgactggtcaaactcgctcttgcttactatttgagacaatatatctctgagtagcttcttcagatccagagtctgagatacagacacgaaagccctgcaatcaaatgcttttgtgatttttcggtatacctccatggctagagtagtcttcccctgcccagaggtaccatagatggacaccaccttgtgctgattttcttcaacttgtaatagctggatgatttcctcgcgaggaccatcaattcccacaggatccctcgcctcctgaaagagggcagttgctcgaggatccaagcgcaccggctgaggtgaggcggcgagatagtgaggcggcgaggatccaagcgcacggtagcgtttggcccgctcactctgctctgtcacgagtatcttgagtttttggatctcctctgctatgccctggtccttccacaacttcttcaccttacgcatggctttgcgaacaaagttagccttggaacctccatggctgtgattgagcatgaagcgatcgacgcaatcctcaatatcgaaggatagctcacgcaccttgttcc

SEQ ID NO: 42729 - DNA, 540 bp, Setaria italica
  Peptide Sequence Number=SeqID_108703
cgcactaatctctgcagttgggtaatgctagccggtagtttttcaatgccggacccttaacatctagtgtctctagatgttgcagcttttctatatcttttgggagtttgcattcgcatattaatgaccaattttctaacctcaagtacttcatttgaccaaaacttttgacatgtccaagatagcaatcttcatataactcctcccaaatataatctcctttatttagcacattcaccactcgcaagacttggctacttaaaaccatagagatgtttttaaacaccagcaatgaattagaggcaaaaatattaattgatcgaatatgagctgcatgttcttttatcttgaccatctcttcagcccgcctagaaatgccatgttggatagataaacggcgaatcttgttagaagaataattttcagaaaacccattacgattccatatagtaacaaaattgtcctccacagcctttgatacaatgaactcaagtatgacatcatgaactctgcattctttcactgttgcaccatctgccc

SEQ ID NO: 42730 - DNA, 2608 bp, Setaria italica
  Peptide Sequence Number=SeqID_108704
ctaataacagtcgaaattaaacttgactaaacactggaatccttgactgctgattgtatacctgattccagaattacccaaaacgcgaacagtaatagagaggagcatgggcaaacttgctaggatatttatcccttcctggcttactagtccaatactgaggcgggtcaggttgactagcgagctgatgatttgatggggcacgacacttggtccacaactatcgtgaaagacgagcctccgaaggggtggtggagtagagccacacgaagccatgaatgaaagtctgtcatcacgagcatcctgcacgacgtgcagttctcgaagggttgtgacaagcttggagagtgacgagatacatgcttccttgtggccttccacgtccacgtgacgtaataaataatgatcgtacctccaatcaattccaagtaccttcagattggtcagatcgccgagcccttggataaacttgatagagttttgtaaaaccctaaactaagctcttgtctaggtcttccaatgcctgcagatttccaatcccatcaggtagttttaccctagcaccgacaagaagacgcactaatctatgcagttgggtaatgctagccggtagtatatcaatgccggcacaaaccgtaacatctagtgtctccagatgttgcagcttttctatatcttttgggagtttgcagccaaatgatattaatggtcgaaatccaaagctcaaccccaacctcaagtacttgatttgaccaaaacttttgacatgtccaagattgcaacccacccgagtttctgtattcagcactcgcaagacttggctacttaaaaacatagaggtaattagcagcattgacatagggtcaaaaatattaattgatcgaatatgagctgcatgttcttttatcgtcatctcttcagcctgcctagaaatgtcatgttggatagataaacggcgaatcttgttagaagaataattttcagaaaacccattacgattccatatagtaacaaaattgtcctccacagcctttgatacaataaactcaagtatgacatcatgaactctgcactctttcactgttgcgccatctgccccaaccttggttggctggaccaagcttctattgatcagctcattcaagtaactcctcccaagctgctccatattttctctgctttgtccacgaatcagtccttcggctacccataacaataccaactgtctacaatcaatcacataatcctccgggaacacgctcagatataacatacagctccttagataaagaggaaggtcaaagtaactaagcagaaaaattcttttcattttatcaatgtgagaatctttgtcaactgcagcagaaatatacttcaatgcattgacccagacttccttggttttgcttctgtttgctaataaaccagctatactgattatggctaatggtaatcccccacatttcctcaaaatatcactggatactgccatcaaatcttggggacaatgttcagttgagtgaaatagccttttaaagaataatctgcgagattcgtcatcaccaagtggctttgctttgtacatttgtgcgtcaataccagcacatgtttcggctactgttttactgcgtgttgtagtaattattctgcttccgttgtcattgcgaggtaaggcagcttctacaagctcccaatctgatacattccagatatcatcaatcaagatgaagtacctcttgtcaattaagtagtctgtcatgttgcgtatgagctgctccgtctcccacctttccgactggtcaaactcgctcgtgcttactatttgagacagtatatctctgagtagcttcttcatatccagagtctgagatacagacacgaaagccctactatcaaatgctcctgttatttttcggtacacctccatggctagagtagtcttccccagcccagcggtaccatagatggacaccaccttgtgctgattttcttcaacttgtagtagctggatgatttcctcgcgaggaccatcaattcccacaggatccctcgcctcctgaaagagggcagttgctcgaggatccaagcgcaccggctgaggtgaggcggcgagatggtgatggatgcggtagcgtttggcccgctcactctgctctgtcacgagtttcttgagtttttggatctcctctgctatgccctggtccttccacaacatcttcaccttacgcatggcttcgcgaacaaagttagccttggaacctccatggctgtgattgagcatgaagcggtcgacgcaatcctcaatatcgaaggatagctcacgcaccttgttcctccaatctttagccattggatccatttggtcgtcttccttgtctgcgagcttctgcagcacgacatccatggtgctcagctcatccttcaggaagcggatcccttgctccacgtctctggcgaactggtacttgtcgccgagcatggcagtcagcttgccgatgacggaccccatcacgctcgtggcggcgctcgccatcagttcggccatctcactctaccgctctgctagcttgtggtggtgtcagagaggaagggcgcttcaattctgagg

SEQ ID NO: 42731 - DNA, 396 bp, Setaria italica
  Peptide Sequence Number=SeqID_108705
tttgatccacaacaaactaaagtcgatcttctttaccaatttgtataggataaacatgttggacacttgacagtcgatcgaatgtgacacctaaccgcccatctgtaccaatatatacctccaaataaaggctctaatcattcccaagtctatcacaatgtcgatccacgacaaccaccgccaaataattcatactacaacaacatcattaacaattcaaaagaaatatactccgaatcacaaaggtctacccgtaaaactagtaattaatcatgcaccgccacaacggctgattaagtaactaaatcctccatctcggacagcttggtcttgggcgggccgaacctcttctcgagccggcggagctccgccggggagagcccgaacgccctctcg

SEQ ID NO: 42732 - DNA, 441 bp, Setaria italica
  Peptide Sequence Number=SeqID_108706
ccgcgtcccccgtgctgtccaggcttggccgcgggggagtaggtgttctgaccaaggggtttcgtgtgcgcgtggtctgttgttggtagggaaggtgggtcgttacgcgttggggctggggtgcagcttgctgcctcgttctgacagttggggattatcgtctgttccgggtgcgtggctgcggatttggaagttcgttgtccgcttttgcagcttaggctttgggatcctctgttgtgttgtctctgacccgtttgggtaacaggaacggacgagttggcgtgcttcaagttttgtgtggagatttcgcgttagttttcgttgccttggattagtgggagtttggctcgagatgcaaggctgcaagcggctagccgtggggagtatttgtttctttttggtgtctggtgcagtgatgtctttgttattgtcattgttcta

SEQ ID NO: 42733 - DNA, 400 bp, Setaria italica
  Peptide Sequence Number=SeqID_108707
atgaaatgaagagttgcacatgatcgtcaaagattgaaaaacacatcggtaacatgataatagtaagacatgtagaaaccaaaagagtatgttcccaccaaagaaatcttattattttggcctgatcagaatagcaagcacaagtaataaatacacaacagttttctcccaaatgaaaagtacattatctattcactaacaaaatgttcgtgcgttgctacggtaaaaatcaattgtgtttttaatatcatggaatttttttattcctagcactaaaattttattgcacttattggattggatgtctgcacatttgctagaaaaccaaaataattttgacttaattatttctttcgatcaaatactcattaagtttctacctttgttatttaagcaagag

SEQ ID NO: 42734 - DNA, 431 bp, Setaria italica
  misc_feature (414)..(414): n is a, c, g, or t
  Peptide Sequence Number=SeqID_108708
taacgtacgggcgcgcctccacgagcttctgctctgctacctcgcgctcaacgacaggcgcgcgcacaagtacgtcgtcagcgcctttaccgacctcctcctccgcctcaccgccgccacaaacctcgacgacgagcaccacgattgactcgtgctagcatgcagcaactctctgcgatgcatacggacgacagatttttgggtaccgtattcagaattctattgcaatatttggcaagtaacttagaagccacatgcagatcatggtgtctgaactctgaagatcatctaacgactgtaaatacgtggtggtgtgaaatttcgtagctggaatctgtcagtatgcatagcattttgctctgacttttctctgggtgtgttgtgacttgtgagcagtgagcgtgctggctaagntagaatatgtccagctt

SEQ ID NO: 42735 - DNA, 352 bp, Setaria italica
  Peptide Sequence Number=SeqID_108709
acctaaatgatatgttgatattgatatgcaaccttgtaatcaggtccctttggtgtatgaccagcagggaaggaagcatcctactgtcaagtaaagcttaaaataattttacaactctcgtctcctcccatggatgctaaatctttacactgctctagcattgtatatttaggataagtttacagaaacaactttcacagtaacccataaaaatgaatgggtaataagatgaccaaaaccaactaaccaagattgaaatgggcaccttatgtcatcatgacagatgcaaaaagtagaaatagggaaaacatcatgatacaattaacctccccacatacaatttgtgttagtg

SEQ ID NO: 42736 - DNA, 462 bp, Setaria italica
  misc_feature (24)..(24): n is a, c, g, or t
  Peptide Sequence Number=SeqID_108710
tctgctgctgcggctgcgcgcttncggctgctgctgcgtgtttccatacaaggcaaggcgcgcgaggagatgggggcggcggccggccggccggccgtgactaggcggcggccagcggcggcggcagcggggtcgaatcgatctgcgggtgcgatggttcgattcgacccaactggatgcgggattccttaaattggagcctcctcttctcttctcttctcttctcaagaggaggaaattggggatcggaggggaatggaagggattccttgaggatttcaggatttggctggttccccaaccctacccttccttccttggtgtggagactgggtgatagacggaggcaaccaggcgaatcgagtcgactgctgctggattcgatgccggttgccgttgccttgccgatttggggagaagagggggcagagagagagaggagagagagagagaggaggagaa

SEQ ID NO: 42737 - DNA, 375 bp, Setaria italica
  Peptide Sequence Number=SeqID_108711
catggacacggacctcgccacctttctcgactacctcagctcggccgagggcaagcacaagtccttcctccagaccaggaggctcctcaccagctgaccatatatgcacgggcgggcccataggcagccacccgcttgaaccacctggattggatccgtcctaactgttaagcgtatgattacgtacgacgtgggtcccaccagtccgtgtctgtcgttttggtcagcagcaggagaaaagtcagcacgtatagtacctgcggttgtggaccaagttgaccggtcaaacccgtagcccgactggtcccatctactgctgctgcatgctgtctaccctagctagctaagctatgctactttattttcagactaaaa

SEQ ID NO: 42738 - DNA, 490 bp, Setaria italica
  Peptide Sequence Number=SeqID_108712
taattcacctctatagcagtctcagggtctaatggataagtctcatgattctctggcgataggcacttaatcagtgaatttaaagattgtcgaagagcatagccttcttttagttcaaacccaatgccagcagaaaatcttgattcagtcattttttgacgtttggcacaactgctttgctcattctgtgatgttcttttctggccaacttttggcaagtcatttttttctgatcttgcctgaggactgctttgacctttaccatcatccagagtaaaaaagttttgaccaaatttgcttatgaccactcgaatgcagtcaatcagtttgctgcaaggttttggcaagcagagcaacttcagaaggatttctggtttccatacttgtgcagagcagagttcaattattctcttgtatgcagtgtacattgcaacctgaagttctgcacttctgctggtctttattgcttctttggagcacattaacaata

SEQ ID NO: 42739 - DNA, 472 bp, Setaria italica
  misc_feature (59)..(59): n is a, c, g, or t
  Peptide Sequence Number=SeqID_108713
agttactctatgttttgcttctcaggatgagggtggtcatagccatggtggcctgacangtttttgctggctcgattgtctgggtgcttggtgatgttcatgagcagtaggttcatcagctgcccctggaactttaccaggagcacgttgattagcaacacttgcagaactcccttcagtatcattaccttgcgacactggtggtgcaacacggttttgctcatagagctccaacatttggttgctaacctcttctgctttattcgctgaactgcagcaggatcctttttgtggatgatctcatatgaaatgagtatgacatccttcagaggtctgggtgtttcttcaacttttcccgccaagaacatacacactgttgcgattgtcctcctgtcatttttcgcatgagattgacgaagaaaaaatcgatgacaaaacactatagcagtagcaatttgttctaacttttgta

SEQ ID NO: 42740 - DNA, 540 bp, Setaria italica
  Peptide Sequence Number=SeqID_108714
tttttttaatttcaacgaaggcaaaaataaagtggccatccaaattcaggtgattcactgtcatacccttgtctatttcagaatgtaatatgctaaaaaagccaaagattcccttgcagcatagaatgcaaaatggtgtcttcacctaaactagctccacaatcattttgaacaccatattcgggtgctaatctatgtgtcccaagatagctaaccagcagcagcaacagctgcaactaacgatgttacaaattacgaacccttaccaaaaatgaataccctaatagtgcagtgcaggtattccctactgactttgcatccagagaccaaccttccaagtgccgtggggtaacatcgaactcttgccaccagaccttctcgccatctgatggaagcttgactttaagaaacttcgcagccaggaagattgcaccagccgcaatatggtggggcttaaattgcaggcaaagcgacgtgcggagcctgtacaccccttttaaggcgtagtaaataggcatatttgaggattactctttgtaa

SEQ ID NO: 42741 - DNA, 674 bp, Setaria italica
  Peptide Sequence Number=SeqID_108715
ttggccttctggagaggctccttacattaccatgaaacgtacaacaatcagctcttttatcggatgtctccaaacattcaacaatctgtttgctataaactcccccttggggcccaactctcaaatatcaacataccccgagtgagctcgatgcttattcgacacccgtgaaagaaaaaaaaaaataggatagttgtatatagtctgaagcctacagacaacttcttcccccacgggcccaactttcatggccttaaccttttaatgtccctttcaccacgatcgtagttcctgtgctcatggacgtcatttctcctccgattgtcaagggctggggagtggtgttcttggctatcagtggacagctcgccctcttcagtgcttcccatcatgcgagcagccctctgctgatcctcccggtgtgcaggatggggccaactctgccttctctcctgcttgaccttctcaccctcagcagccaactccacaccatgctccagctccctctcgatcaggtcatcatcatccatgacatcaacctttctagaaacatcacctttagatttcctccgcttctccagggccgctttcaccttatccttgtctatcttcttcatcgcgtccatcatcaaggatgacacgtcgttcctattctattcttaaggttattgtta

SEQ ID NO: 42742 - DNA, 1048 bp, Setaria italica
  Peptide Sequence Number=SeqID_108716
gatgaatcagatgccattcacaaatttcacttcagatagccgtacgatgcagcttctttaataccgttcccggtataaaactgcgcgagctcataacattatctcaatcagcgacgtcgccaagtcctaacacatacactctcccccctccaccgtccggggaaacatgttatctttaagttatacagtatataacagttcaaatcccccagcacgccaaaatatgcatcaagtacacttgtgacagaagggttcgtatgatcgtgtcatagcccaagccacatgcggtaccctgagaggaactcccacaaaggtgtatgactctcatgaccttagccttttaaggtccctttcatcacgatcatagttccggtgctcgtgtgcatccttcctcttccgattgccatgctccggggaacggtattcctgactgtccatggacagctcgccttcttcagtattatcacgattggtgttctggtgatcctcccggtgtgaaggatgaggccagctctgccttctctcctgcttgctcttctcatcctcagcagccaactccactccatgttccagctccctctcaatgaggtcatcatcatccatgacgtcaacctttctggaaacatcacctttcgacttcctccgtttctccagggccgctttcaccttatccttgtttatcttcttcattgcatccatcatcgaggatgacacattggggccttcgttgctgtttgcagcgctatccctagcttcactatgagttactctattttgttttgcttctcaggatgagggtggtcatagccatggtggcctgacatgttttgctggctcgattgtctgggtgcttggtgatgttcatgagcagtaggttcatcagctgttgctggaactttaccaggagcacgttgattagcaacaacttagacaagaaactaacccttaacaaagtaaataacaaattaaaccttaagaacgaaacaaaataagaaattaaagggtaaacttaaaccgtaaactaaaacgttaaacgtaatttaagtaa

SEQ ID NO: 42743 - DNA, 1709 bp, Setaria italica
  Peptide Sequence Number=SeqID_108717
tagaagagcaagcaggagagaaggcagagctggcctcatcctcagcagccaactccactccatgttccagctccctctcaatgaggtcatcatcatccatgacgtcaacctttctggaaacatcacctttcgacttcctccgtttctccagggccgctttcaccttatccttgtttatcttcttcattgcatccatcatcgaggatgacacattggggccttcgttgctgtttgcagcgctatccctagcttcactatgagttactctattgttttgcttctcaggatgagggtggtcatagccatggtggcctgacatgttttgctggctcgattgtctgggtgcttggtgatgttcatgagcagtaggttcatcagctgcccctggaactttaccaggagcacgttgattagcaacacttgcagaactcccttcagtatcattaccttgcgacactggtggtgcaacacggttttgctcatagagctccaagatttggttgctaatctcttccaagtgccgtggggtaacatcgaactcttgccaccagaccttctcgccatctgatggaagcttgactttaagaaacttcgcagccaggaagattgcaccagccgcaatatggtggggcttaaattgcaggcaaagcgacgtgcggagcctgtacaccccttttaaggcgtagtaaataggcatatttgaggattactctttgtaacaagaagagtaattttagcatacccatcattgacaaagttccaggcaacttgagcaagggcattttcagcaaccttgaatctctttattgcttcaaccaagggcttgtacggatggtggatattcaagtcaaaaccaagtgttacaagaacaagacgctccccaagtaaaataagttccttctgttgttcatatacttccttctgcttaattcgctgaaccgcagcaggatcctttttgtggatgatctcataggaaaggagtatgacatccctaagaggtcttggggtttcttcaacttttcccgccaagaacatacaaactgttgcaattgtccgcctatcattttttgcatgagattgacggaggaaaaaccgatgacagaacactatagctgtagcaattgtaacttgaggcctacatcctcattcccaaatcctgaagaaatgtgcagtatgacttgcgaaggcctccttcagatcaatgccatctctcctagagagggaattctcctctacctttaaaataccatgaagcaccaagttggccccttctgcatgtctatcatatggaactctatatgggctgttttctacaattccatgatgtgaagagtcactagtttgcatgatatccatgcttatgttcctcttatcaacaacctggtgggtgctcgtcgccggcaaagagggcggccgaagacttggcgaaaggcgccgccgctcgcccagtcgtcgacgccaggaagggaaggccaagcgaggagagagacagagagagaagggaaagaggtattttgtcttcagaaggggaaagtatataaactatagaattcataaaataggacagatactgctccctccgttccaaaacgtaggtcgttttagttttgtcctaagtcaaacccctctaacttcgaccatatttatagaaaattatattaacatctacagcacaaaataaatgcattaacaagacatttcatagtgga

SEQ ID NO: 42744 - DNA, 643 bp, Setaria italica
  misc_feature (1)..(32): n is a, c, g, or t
  Peptide Sequence Number=SeqID_108718
nnnnnnnnnnnnnnnnnnnnnnnnnnnnnnnnaattctgtaagctcgtaataagagcatatttaaccgcacgcattacatgaatactgatacacagctgagtacagaatcagaatgcaggcagttcacaaggaattcataatagtcatttatgtgggcttaaagcccctggatgagtttcagtaaaagagctagatcagaatgacatgtattcgatgggcttgagagatacacatgaaaagacatgaagttgaaagaaacttgtgggacttccctaatgcttaaggttgcttctacaggtactacttactggaccaaaagctaccatattaggaagaagcctaattttgttcagaaggccccttggaactgacctgagacccaaccaagtcctccagagagaagttgagagtatcagtcgaacctttcttgacctcttctccttgcgccgctaggaagtcctcaatgctccctggctccccaaaccagcccagcctatctgctatgaggtggaggttgttgcagccaccacagcgcgcaaccacaactccattctcataggaatcccggctggccatcttcatagacctggtctcgcagaccttgcatgtgaagaccatggcaaggtcatgcctgggtgaaga

SEQ ID NO: 42745 - DNA, 1969 bp, Setaria italica
  Peptide Sequence Number=SeqID_108719
ttttgaatttcgaatttctttaggcaaaattggccttctggagaggctccttacattaccatgaaacgtacaacaatcagctcttttatcggatgtctccaaacattcaacaatctgtttgctataaactcccccttggggcccaactctcaaatatcaacataccccgagtgagctcgatgcttattcgacacccgtgaaagaaaaaataggatagttgtatatagtctgaagcctacagacaacttcttcccccacgggcccaactttcatggccttaaccttttaatgtccctttcaccacgatcgtagttcctgtgctcatggacgtcatttctcctccgattgtcaagggctggggatggtgttcttggctatcaggagagaaggcagaggctcgccctcttcagtgcttcccatcatgcgagcagccctctgctgatcctcccggtgtgcaggatggggccaactctgccttctctcctgcttgaccttctcaccctcagcagccaactccacaccatgctccagctccctctcgatcaggtcatcatcatccatgacatcaacctttctagaaacatcacctttagatttcctccgcttctccagggccgctttcaccttatccttgtctatcttcttcatcgcgtccatcatcaaggatgacattttgggaccgtcattgctattggcagcaccatcccttgcttcattctgaggcgtctggtttgaggtttgcttctcaggatgagggtggtcatagccacggtggcctggcatgttttgctggctcgactgtctggatgcttgatggtgttgggcagtagatgcacccacggttcctggagctttcagaggtgcacgatgattagcaacgctagcggggctcctatcagtatcatttccttgcgatggtggtggcgcaacattactttgctcatagagctccaagatttggttgctaatctcttccaagtgccgtggggtaacatcgaactcttgccaccagaccttctcgccatctgatggaagcttgactttgagaaacttcgcagccaggaagattgcgccagccgcaatgtggtgcggtttaaattgcaagcaaagcgacgtgcggagcccatcattgacaaagttccaggcaacttgagcaagtgcattttcagcaaccttgaatctctttattgcttcaaccaagggcttgtacggatggtgcacgttcaagtcaaaaccaagtgttacaagtacaacacgctccccaagcaaaataagttccttctgttgctcatatacttccttctgctttattcgctgaactgcagcaggatcctttttgtggatgatctcatatgaaatgagtatgacatccttcagaggtctgggtgtttcttcaacttttcccgccaagaacatacacactgttgcaattgtccgcctatcatttttcgcatgagattgacggaggaaaaaccgatgacagaacactatagctgtagcaattgtaacttgaggcacttgaagcctcattcctaaatcctgcaggcaaatgcagtatgtcttgcgaaaatgagactctttcttgagatcaatgccatctctccttgaaaaggaatattcttctatttcttttctactaaaataccacgaattaccaagtttgccaccttctgcatttctgctatatggtattctatatgggctattttctacaattccatgatgcgaagagtcacttgtctgcatggcatccatgtaggatgttcctcttctctgctcagcaatcttttaatgaccttccaaaggtattttctgaaagtcgtgatctctcgatgatgtcgaatgaaattttcccaatcattacgcctaattcctaacctgagaagtcgatacgagccctcctcgcgcgcaggggttcgctgatgcgcgcggcaaggcagagcggaacgaaccggataagcgccgccgg

SEQ ID NO: 42746 - DNA, 292 bp, Setaria italica
  Peptide Sequence Number=SeqID_108720
tttcaatgcaagaagcagagcaagtgaagcaagcagaggccagagcagagagcaaagcgagcagctgcggcgttccatcgcatctccggcacgctggcgaccgaggccgatcaggatcaggcaggcaagatggtgcatcaagctcccaaggaggtgatcccgctgatgacgccgtacaagatgggccagttccagctctcccaccgggtggtccttgcgcccctgacgcggtgtcgctcctacggcaacgtgccgcagccgcacgccgccgtgtactactcgcagcgcgcca

SEQ ID NO: 42747 - DNA, 475 bp, Setaria italica
  Peptide Sequence Number=SeqID_108721
tacaagtcgcaactagttaacaccttcaacccttgacgagacgaacagaggcgcacgcgaacgccaacaccaacaccacatcagcagttcaggcgcgcggaggcgcctgcaggttcctggcaaggatgccctcgaaggtgatccccgggccgaacgccaggatgagcccccactcgcagtcatccccgtcgccgtccccggacgcggccgccgccttcctccggcgggtctcctccaccatgttctccagcacgtacacgatggtgttgctgctggcgttcccgaagtccctgagcgcgcaccggctggcgcggagcttgtcgccgccgagccccagccggccctccatcttggtcaggatcgccggcccgccggggtgcaccgcccagaacatgtcgtcgtagcccatctcctcctcgccgccgccgccctcccgctccgccactcagcttccggcagaactcctcgacgtgcg

SEQ ID NO: 42748 - DNA, 1661 bp, Setaria italica
  Peptide Sequence Number=SeqID_108722
atcgtctctgtctctgcatgcgcctgcctcgctccctcctctgctctgatcgtgccatggtttcctctgcctgaacattacaagctgcagcgccaccgcaactaggagccatgctcaccaacttcccaaagacgtaccagctccagaacgacaagttattgcttcccaagaaggagttcgtcacctacaccctctacgcgctcatcgctgtcgcgctcctctacctcttcgtctacccagctgctccggcgtcgtctaccaaaccatcagtggcggcgccatggatacaggaggagctgccgccgccatcgccacctccttcttaccaaggaggtgaaagatcacggagttcaccgcagccgcaagcagtgtcatcggcggcgacaccgtgcgactactccgacggcgagtgggtgccggacccacggccgccgccctacaatggcacggcctgtgaggccattaaggatggccgcagctgcatggcgaatgggcgggcggacaccggctacctccactggcggtggcagccacggcggtgcgacctcccggacttctccccggaggcgttcctccgctggctccgcaaccggcacatggccttcgtcggcgactccctggcccgcaaccaggccgagtcgctcatgtgcctgctctcgtcgtggtccccggcggagctcgtccaccgcgaagaggacggcaggttccggcggtgggtgttccgcgagcacaacgccaccgtgtccatcttctggtcgccgttcctggtgaagggcgccgagaagtcggagcacgccggcgtgcgctacaacgagctgtacctggacgagttcgacgagcggtggatgtcggagctcggcgccatcgacgccgccgtggtgtccgcgggccagtggttccggatccccagcatctaccacgatggcggcagggtcgtcggctgctacggctgcgcggcggagctcaaccacaccgagaccagcttcttcgccgtgttcagggacgtggtcaggcggacgctcgccgaggtcgcccggcggcacgagcacggcggcaagctggtggcgctgaccacgttctcgccgtcgcacttcgagggggaatggaacaagggcgcgccgtgcacgaagacgcggccgtacaagaagggcgagaaggggcttgggtacaccgagacggagatgaggaagatcgtcgtggaggaggcggccaacgccgccggggctgcgtcgtcgtcgtcatccaccgtgcggttcgcggctgtggacgtgacgacgctggccaacatgcggccggacggccacccggggccgtacatgcgcaagaacccgttcgccgcggcggacggccggccggtgcagaacgactgcttgcactggtgcatgcctgggcccgtggacacgttcaaccagatactgctccagaccatcctccgctgatcgttcgacgtatttttgctccatcttgtgttcagttcatatctgcgatctgcatgggaaatcgatgtggattgtatactatcgacagcagtacaagtctgcgaaacatttactttatgcatgtgctgtgggaaagttttgtttccaaattaacatacaaatgtaattaaactatttctaaattctggaaaggaatctctttcgacctttctttttacagct

SEQ ID NO: 42749 - DNA, 1174 bp, Setaria italica
  Peptide Sequence Number=SeqID_108723
ttttaagttactttacttttacgttaaaattttggttgtagtttggcgagttgcgtattgctctctggcaaagtctgaatgccagggcagttgattatctcaagcttcatgagactggttaggtctcccaaccagtctggcagcactgtaatgctttcgcaatctgtcaaagaaaaagtctcgagggaggagagaccttgaataatgtctgttgagctacatgtgaggtcactgcaatgctcaatgctcaagtaactgatcccagagaactcaaggagcaacctccactcatgcagaggctgctggctgtagtgcacaaaaagaccttttggacctgggtaggaggattcagggacatgacatctctcttccaattgtgatagtagtacatcattacaactccttatgtccaggaagtactcacctctaggcaggcatggtttaatcgtcagcttggggctgtctcttatctccaaaagggttagtatagggaacatgagcacacgtgaatcatcctcgccacaggagtatgccgtgttccactcttccaggttttccattctgaataaacgaaaggttctcagcttgggaaaagctctcgcgcagccgtacaagtccccatcaatcttcgtaatgctgtccatttgctcgatatgcagctcttgaagctttgctaattgaccgagtggtggtaacgccttgcagctgggcaactccataatggtaacactgacgacaagaggtaaatagcttgcaatgctcgtcgcccagggtggaaagcttatgctactataacctcgtatctccaagtattctaaacaggctggtggcgttagttcttccaaaactttaatgtcctctacaaatctctcagcatcttttgtccattcaaatttattttttcaagattttgttttaccgacaactttattttctgcgcctctgtggaacacttgactctttcaatcctgcttatctccaagataggaggattttcatccttgagcttaataagattgctgctagattcaccatcatcggcatggaccataaaatgaggtaataagacagaattatttctgaactgaggtaacgtggactcatcaaacctgcggcaaacagccgtattcagaaatttcagactgccaatttcagatatacttactggcagctt

SEQ ID NO: 42750 - DNA, 385 bp, Setaria italica
  misc_feature (9)..(9): n is a, c, g, or t
  Peptide Sequence Number=SeqID_108724
ttcacgacncaaacatcttacgcgagcactataaagcaaattagatttggatcgacacaagcgcacaatgaaaaactagacaaaagcgagcccccacgcatccacactcctatacacgtcagcatcacgcggactaaaccgcgtaccaaaccgaatcagcagtagaacaaaatccagatcggcgcatcgagacgtccgcccgcccagatccaatcccccgaattcccaaatccaaaccccccgcgcgatccggctcgcccccgcccgcgctcacctcgcgacggaatatgcccagggcatgacgggcagctcctcgtcctcggcgtaggggtccacgacgccgccatcggccgccgccaccccttcctgcgtctccgcggcggtg

SEQ ID NO: 42751 - DNA, 476 bp, Setaria italica
  Peptide Sequence Number=SeqID_108725
ttcttatttccattattcttgacagtgtgccaggacagcatcaggttctcgagctgctcctaagcgcccacatcttgtggggcgtgcgcaggtcatcattgccagccctgccccgggccccggcgacggcggcatcgtgtgggatctggacgaggttgggagttgggactagctgttgggttaacccatgggtctaatggattttacccatatccatctgatgcatatgtcacatgttttaatgggttgggttgagtttaaggatggtgggttgggtggattacatgacccatgaacaaccctagttatatctgtggttccctacctagtaaatcctgtctatagttctgttattcctattaatggtgatgagcttttgcattatttactagtgcattgcagtacagttaagtcatgttacttacttgaataaaatcaaaactgcaactgatttcatgtgttgatagatggatgaa

SEQ ID NO: 42752 - DNA, 207 bp, Setaria italica
  Peptide Sequence Number=SeqID_108726
ctctcccgaagctcccgctcacggacatcaggagtaaccttgagatgatgatcgcgtcgttgaaggctacggcggaggcagcggcgaactcgcccgataaccttgtgggagaaatgcagggtcttctggccaaggttgacaagaagctgcagggtcgttctgctaccgctgctcgtcaccattaagctcagcagcccagcaagtcag

SEQ ID NO: 42753 - DNA, 459 bp, Setaria italica
  Peptide Sequence Number=SeqID_108727
cgctctccgccgtcgtcctccacgagagctgcacatcggaagcatggtaggcgccgtcgctgtcgtcgccggcctgtacgtcgtgctgtggggcaaagcagaggacgcgaggaagggagggggccggaccagagcaaagactcgacggacgggaccgcacggtctgacgctcagctcgacgtggagcacactctcgctgcgcctctcctggcaggcgccgcacgctcacaagcacccagctgatcgaggaacagaggatccctttcagctctgcagtctttctttgccatgaaaattgctgctgctcctgctgctgcaagttgctgcctgatatgatttgtcggcaataaactgaagggttgatgcgcgacaggtacactgtgcgcacatgtggtggagatgctacctgcaaaatggtgacgggatccaagtagaagaagagaaatcgagcaagtttgc

SEQ ID NO: 42754 - DNA, 531 bp, Setaria italica
  misc_feature (472)..(531): n is a, c, g, or t
  Peptide Sequence Number=SeqID_108728
tgtggtaggtagttaacggtgagattgttaggaggcccccggagaggcagaggagggttgaaccagtgccacagagaactgcagatagacctaggtacaatgacaggacccgctatgcccgtaggagggagaaccagcgatgagctgatcaaagaccagtaataacaagccaggggtggtttcagctctcaaattaaaggataatattacatctactgaaacgggccattttcagttgcacgtgcactttattcactctagaatatttgttatctgggtgcttgtgttgtgctctgtaattacaagagattgaaagtacctggtttgacatgcattgctactagcacacttcagcagccatttgcacttgtaaattcttttggtgatcgaagttgtgacttgtcagtgccctcataaactaagaaatgcagtgatcatttgtttgagtgaaacaaaaaaaaaaaaaaaaaannnnnnnnnnnnnnnnnnnnnnnnnnnnnnnnnnnnnnnnnnnnnnnnnnnnnnnnnnnn

SEQ ID NO: 42755 - DNA, 1000 bp, Setaria italica
  Peptide Sequence Number=SeqID_108729
cccctctcctcgctcctccgccgtgcgcctgcggcgggggcggcttccgccgagcagtccatgctgctgcgctcagccgccgtcgcggtggcctcccgcctcggcttccctcgcgggatggcgcgtcggccgggcggggacgggtactccccgatgcggtccggcggcgggggcggggacctcgcgcccaccgagatggcgccgctgttccccggctgcgactacgagcactggctcatcgtcatggacaagcccggcggggagggcgccaacaagcagcagatgatcgactgctacgtccagacgctcgccaaggtcctcggaagcgaggaggaggcgaagaggaagatctacaacgtctcgtgcgagcgctacttcgggttcgggtgcgagatcgatgaggagacgtccaacaagctcgaggggctccctggtgttctctttgtgctcccggattcgtatgttgatcctgagtacaaggactatggagctgagctctttgttaacggggagattgttcagaggcccccggagaggcagaggagggtagaaccggtgccacagagaacagcagataggcctaggtacaatgaccggacccgctacgcccggaggagggagaaccagcgatgagccggtcgaagaccagaataacaagccaggggtggtttcagctcacaaaattaaaggataataccgcatctacctgccctaatggacaatcttccagttgcatgttcactttattatgcagtctagagtgttttgtttctgggagctcaacttggatgtattgtgctctgtaattactataacttgagattgaaagtaacctggcttgggattgcattgatactggcacacttttacaaccttttgcgcagcacatgtaaatcggtttcatgattgaaagttttaaactgctaatttgatagatggactatggaatcctataatttcatttaagtttttttagtaaccctttaaaaaaaaaaaaaaa

SEQ ID NO: 42756 - DNA, 2973 bp, Setaria italica
  misc_feature (2931)..(2973): n is a, c, g, or t
  Peptide Sequence Number=SeqID_108730
gctaatttaggcatcatttgctgctccctgtacatgatgtgccacagtcaacatttgccttagtattgctcttgtacagtgagcaaagaatagcataaagaaaattatacaaaacatgagcagcaagggaactgcacttttgcaattccaagcagcaaatgaaaaaggtcattcaattgtgtataaactggtgaaagaaccgacacatctcttagagggtctgtaactttactccaaaggtttcacgctggtgtcctcctgatatcttagatgctgagttgctgacaattgcaaggttttgcagaggacatttcagtttattagccttttgggatttgagcatcgccttcgcaggggtgtatttgggtcatctgtaggcctggagtgattttctagttaccataaccttgtcaattcattaagtccatgaggtccgcggttcaaatgcacaaaatggtagtatttggtgcatttcatggtactgttaattagtggatgttgcattccatcatgaatttctcccctgtagtcatgtacttcctccagtagcttttataatcgtgtatccccaaatcaagccaaggtttcatgacaccattgtagtgtagagtaggagccttttctatatcgtctcgactaattccataatcatgtccaaggcctgactgaacccatgagtcttccaaagggtatatcagatcttgaaaggcaagtatactaacagggagtgctttcagttgctttgatgtcaggttctccttttgcagcttttggagtgattgatgatacaaactggtgacacggaggtctctccatttttccaattcaatgacattcagaccagacaaccacacacatgcatcggagttgaaactatgttcggcaatataagctcttaactgtcctaatgtaactccacagaactggacagcaccgaccactttaccatccatatcgaggttccacagagatgacaagtcttttggacaatcaaatcatcatccagaactactactctattcaagctacgaagaaggtcaggcaacaggaaatgtgaatggccaaaaacagatatgtactcagttttcatctgcctctgggaagattcagaataattacgaattgtaacacggaattcctctgaaggccataattgttgcatctcaagtgaatcttcatgctttgggaacttcagatgatcctcaatgttagttacatgaacagtagcctccaagtatgaatttctgtcgaaccaatgcttcatcgcgtaaaagttttgcgcatcagtgaacaagtggaaaacaatactgccagaatcctgggaattcaaaactgttgaattaatagtggttgaaactgcaagcacgtttctggaaaatattacatagtgctggaaggtaggactttcaagcatctgcttatttagttggtccgtgcggattgatcgagatttgaaatattctaatgtcaatctcatgttcaagcaatggtgagttttcggcatagtctggacaccaagatgatatagaaatgcactctgtcttgtatggaaataagcttcatcttcagttatatcaagtagctgcctaagtttccgttcaacattagagcatcctacttcacaagacttggttctctcaattgtgttctccattttctctagcttttctgtaaaaattggtggcagatcagcatctgtgatggtgtcactcagcatgcgttcatgttcttgaatgctttgttcagttcacgtgtaaatctttcatgctgctttatttttgcaatactaggataatgagctcttgcaatgatcaagcctcttcacaatagcatcatcgctcagtttccgaaacccctctcgcctcgccatttcagcttcacctacgcccctcctccacttcgcggccggccaacccacctcttccctcggcagccatggccaccgcagcgcgcgccgtcgtcgccgcccgcccggcgcggccgctcctcccgtctcggcgcctcccgtcctattcctccgcccgccccccgcggcaaagcggcggcggagtcgggtccgtccgctgcatggcacggcggccggactcctcctactcgccgctgcgttcggggcagggaggtgaccgtgcgccgacggagatggcgccgctgttccccgggtgcgactacgagcactggctcatcgtcatggacaagcccgggggcgagggcgccaccaagcagcagatgatcgattgctacatacagaccctcgccaaggtcctcgggagcgaggaggaggcgaagaggaagatatacaacgtctcgtgcgagcgctacttcgggttcgggtgcgagatcgacgaggagacgtccaacaagctcgaggggcttcctggtgttctctttgtgctcccggattcgtatgttgatcctgagtacaaggactatggtgctgagttattcgtaaatggggaaatcgttcagcgatcaccagagaggcagagaagggtggagccagtacctcagagagcccaagataggccacggtacagcgaccggacccgctatgtgaagcggagggagaaccagtcttaccagcggtgatgttgccctttttgaagatagaagatgttgtcatttccacaaagtgtctaaatgcaatgctggaggtgcagcagcaacttccacaaggccacaacccacatgacaatcactattcactcccattgtgttagctggcccttgtaacgttgcgtgcttatgcatttggacttgtatccctagtctatatgaagttattatgaactcctgaatgtttttaacctctgtctgtctgcctccttgtcaccctcccttttgtgtacttgcatttgcatgttgtagcaagtattaataataatcagatattcagatagaaaaaaaaaaaaaaaaaactaagagaactagccnnnnnnnnnnnnnnnnnnnnnnnnnnnnnnnnnnnnnnnnnnn

SEQ ID NO: 42757 - DNA, 649 bp, Setaria italica
  misc_feature (646)..(649): n is a, c, g, or t
  Peptide Sequence Number=SeqID_108731
gacaaaaccctagagttcggcgagggagggcggaggcgcggctgctggtcggcggtcgctacatcggatctcgacgacgccgcttgaacccaggcctttgttcttcttccccgcgaggtgccgcaatggctgcgaaaggcgggccaaccaacttggagaaggagcagatgtttgggatggcggagaaggagatggagtacagggttgatcttttcaataggcttacacagacctgtttcgacaagtgtgttgagaaaaggtataaagaagctgagctcaatatgggtgagaacagttgcatcgatcgatgtgtttcgaagtactggcaggtgacaaacttggttggtcagatgctcgggaaccggcctcagatatgacctgagaagcattagttgcattttgtagcgtaatctgtcgctctgtttctccattttggttggttttagaatgcctctaccaattaagtacaccaatgcagcaccagtgactggctgattcgtggaccgctcaaaggaaatcccgatgtcttgcactttccagggatgtgccttgtctatgaatcatgaacagggaacatgcctgtaataatttgatacagctcgggagaataattctgttgctaaagctgtacctgtttcatagtttnnnn

SEQ ID NO: 42758 - DNA, 622 bp, Setaria italica
  Peptide Sequence Number=SeqID_108732
ggcaaccacattcctcacatttgaaatcttaggtgcctttgcatagggggggatattttcagagctgcttcttgcacttggaggtgcagatgcacgcatgtatcctctcttcctgttattttcatccagcgctgtgggtgtgctcagctgcttccttttattttgtgatccattgtttatgctagtaggtcctgctgatctttttgatgtaacctgaacagttctggatgttcttgcactaacttgagatgaactgggcatcaccaatgttttggcagctaatttcccagtggcagtactgttggtagatgcaacatgagaaggacttgatcctttacaaagggcatctgaacgttgcacaccttttcgatatttatgagaagcttgagcagttaatttagaaggtgccaaaactctatcagtgttctgacgcatactggatctggaagatgttgtaagtctatcagcattttgatatgacgatctacatgaggtcatagctgatcttgaagaggccgcagtcttatcagcatccaacctatcagataaagcacgcaatttcatctcaactctcttgtggaagggatccttcaggtcttggagagggcctgttctctgaatt

SEQ ID NO: 42759 - DNA, 1057 bp, Setaria italica
  Peptide Sequence Number=SeqID_108733
ctctctcgttttctgcctgtaaaatttggtacgatcctagatcatttctcttcaactcgtctaatgctcgccataaaggtcaaggggctgcacgagtgagcatgaacttgatattttacctgctgatgggcgttcaaggaatccctatagttgtaaggggaaggcgaccattcaccgaacagcagaagcatacggagacagaaaatattccctaatccgtgaggcaccatcccttgctagcataccctccaggtctccaagaatccttgccagccaaatctccaagcttcgctggatttccttgaagttattcctaattgaacttagtgctcttcttgtgcacattttggcttctgctgttagctcatcaccgaagctgctttttgcggtctctgcttgcagtgcgctcagcttctgccttgtttcagttgctcggtgctgaaggtggaatgcttctagcaggaattctgtttgccgctgcgttctgaactccgagctaagtgttgaatcacaagggtcactagtttgcatccgtttgcaaagatcatcaattttcccagcgagagtttggtatcttttcacttgttttctcatcaccaatggaatcttggataaatctccattcactaccttttccaggttaattaattcctgctcaagcaacctaagctttgcaggaactcctgatgattctacgtccaccttccagggtgactctctccttggtacattatgctttgtgttgtacgttgactcaactgcatcatacttcaggtcctgccagcctttcgatgggtccatccacggcggcattcccgacgcggccgtggccgccgtgtagaagtcgtcgctatagccgtcgtgcttctggcgctgctgagcgtagagcgcggcggcggcggccagggcctccgcgtcggtggtctcaggcggatccaccggcggcacgggcaccgggtcctgctcgtcctcccgcgcgtcgcggagcaagcgttccccctcctcgccggcgcgtgaggtcgcggcgaggagcgcggtgagcagctcgtcccgctca

SEQ ID NO: 42760 - DNA, 473 bp, Setaria italica
  Peptide Sequence Number=SeqID_108734
taaatcaattctgccttgtatttcttcagaagctgaattaaaaagatctacagccttgagaaattgcctattgccaatgatacgggtactttcaaactcatcaggatatctgcagtacagaaagacctgggcctcgtccatagcatagttcattcttcccattgcacgtactatgattgaagtcacaaggaagaccagtgtctatacaaaatgttcccaggacatttggactaacatctccacagtttgactgacagaatgccgaaacaaatttaggtttgttttgttgagtacttctaatgcgcctggtgatacttgaacctgataatcgcctgccacctgaggcctcgtaggatgatgccaattgaactaagtcatcagttatctcagttggttcaggaattattgaagagactcttctcggcagtccagatatcttgtgcaaagattctaaaccatcattagttacatga

SEQ ID NO: 42761 - DNA, 1503 bp, Setaria italica
  Peptide Sequence Number=SeqID_108735
gttgacccttaacgtactacaaatgcactagaggtccctgtaaaatattttacagacccaatcagcggcttggacgcaccaaaatgcctgaatctgtaaacacccgatggggcatcttcaggaattgtccacacgagcgtcgcaaaactgattggactcaatggtaaatgcctcgaccacttgaagcgcaacgaccaatcgtcgtcatcatagacaggaacccaatcgttgctgccgtccagcttctcaacgagtgcgaaggtaccgtcagtgagaaggtcattccttgggcaggctgaatagaatgtagcgttcactacgctgcccttcctgaaagttgagttcgcaggaacatctgaactgacatctccaaacgtgacgccaggaggtgcctcgtcgactataacacctgggagtagctcaatttgcctgttcagcatatcaggaggctgcaaatttgttgggacctcttcgtttgagaccatagctgtagcaagtctctgaaactcttgaatgtaggcactcaaggtgtgagggccatacaacgttgatgctccctcgtatctttgcatctgatattcttcaaaagttgtaatatattgggaataggtgtttgttagccccgcaagaacaacatgaatattgttatgaaattgaccactctttgtaagtacatttttgacagcatcacgcagccgcctcccagccattgttgtgaattctccagggacacacaagataaccagctgaccgattcttataatctgaattggaagaatcgcaggtgcccaatcatatggaaccttcatttccccggtgtctagaagtattggctttggagcctgacatttcacttgttctggccctggtggcctaattacgtctcgtactaacctccagaaagcgctgtgcctggtgtctccttgttaaaatcaaaagctcctggtccatctgtagttccagcagcaaaggcaaaccccatggctgcaggacatgttttcaccacctgttgtcctcctgtacttgtaggaacattaacttcgagttgcgagaaatctaggtaagtatgcctataatcaattctgccttgtatttcttcagaagctgaattaaaaagatctacagccttgagaaattgcctattgccaatgatacgggtactttcaaactcatcaggatatcctgggcctcgtccatagcatagttcattcttcccattgcacgtactatgattgaagtcacaaggaagaccagtgtctatacaaaatgttcccaggacatttggactaacatctccacagtttgactgacagaatgccgaaacaaatttaggtttgttttgttgagtacttctaatgcgcctggtgatacttgaacctgataatcgcctgccacctgaggcctcgtaggatgatgccaattgaactaagtcatcagttatctcagttggttcaggaattattgaagagactcttctcggcagtccagatatcttgtgcaaag

SEQ ID NO: 42762 - DNA, 336 bp, Setaria italica
  Peptide Sequence Number=SeqID_108736
taacaaaatattccttgttgtacatcaagaccagcatgggagggattgcattcctgatggctagttccttctctgttcttctgatcatttcttctctctctccgtcctgccatgcgtcatgcatcggccgcctgtgtccaccttgcatcaagcctccgagttacagagactgtaacaaacattactgccagattctttgccaaatgatgcgtatgccgtcggatcatgcctactgccgaaatctttagttcattggacgtgctgctgcccacagccttaactgatgcaacaatgcagccatcctgttgatggaaattaaataaaatttgtttagtc

SEQ ID NO: 42763 - DNA, 439 bp, Setaria italica
  Peptide Sequence Number=SeqID_108737
gcctctgtcttcttcacctctactgttctagcaccattagccactttgtttgtttttggagatttgttctgaggattgtttgacgatatatattgcagcttagtgtggatctgacgactggaaatactccttgctgagcggggactgttttcttttgactccttctttgctagcttctttggaacccttgaaactctctttgctttagtatcttcattactggcagcttcaccttgagatgaaagggaatctctacttggctcatagtctgattcagctcctttcccttgtttaccatctctttccacatcggttgaatgaccatctctctcttcccccttctctttggcacccatttcagtatcccttacaaagttctggaaattcaatatcggagttcccgcggtcggttgccgcgccggttccggttccttcgcgt

SEQ ID NO: 42764 - DNA, 962 bp, Setaria italica
  Peptide Sequence Number=SeqID_108738
tccggaatgcaagtcgaggcctgatagtggtctttctgcaattacagagttggaccctggttatataacaggtcctctctcttcagtatggaaagaatgggtcaaatggtgtgtcgagtttggcattgaagctaatgcaattatcgctgttccttatgattggagactacccccatcaatgctcgaggagagagatctgtacttccacaaattaaagttaacgtttgaaatagctttgaaactcagaggagggccatctttggtttttgctcattcgatggggaaataatgtgtttcgctactttttggagtggttgaaactagaaattgctccgaagcactacatccagtggcttgacgaacatatacatgcatactttgcagttggcgctcctcttctcggatctactgaagcagttagagctgttctttctggaacaacttttggtcttccagtcagtgagggcacagcacgattgatgtttaatgcatttggttcttctttatggcttatgccattctcaaaatactgcaaagctgataatatttactggaagcatttttttgagggaaagggaggttgtccccacagacaacaatgcgatgaagcagaatatatttcagactactctggttggcccacagacctcgtcaggatcgaggttccttcagttcgagatatgggggcatacccatccattatggatataacggagaacataacatcaagcatggagtgcggaaagccaactctcctgtcattttctgccagagaagtttcagatggtactttgttcaaaacaatagaggattatgaccctcagagcaaggcacttgtttatcagctagtcaagtactatcagggtgatccagttctgaaccctctcacaccctgggagagacccccaataaagaatgtattttgcatttatgggattgattcaaagactgaggtaggatat

SEQ ID NO: 42765 - DNA, 319 bp, Setaria italica
  misc_feature (210)..(319): n is a, c, g, or t
  Peptide Sequence Number=SeqID_108739
attctttaatttttcttatactaactaacggatcaattcgttaaggatattcttggtggtaacaagtatccatttaccattggggattatcggctaagggtagtttctgttacttggaaagggattattgtactgtatcatactcattggaggattctttctgatgtacatatatacatgacagagaaattgatatgcaatttggttggnnnnnnnnnnnnnnnnnnnnnnnnnnnnnnnnnnnnnnnnnnnnnnnnnnnnnnnnnnnnnnnnnnnnnnnnnnnnnnnnnnnnnnnnnnnnnnnnnnnnnnnnnnnnnn

SEQ ID NO: 42766 - DNA, 226 bp, Setaria italica
  Peptide Sequence Number=SeqID_108740
taggtgaggacatgtgcagccttctcgcggggaattcgttgatggtactccataacatcagcatctaatcatatcacatattgattatagagcgaccagcaagcgtcgccatacaatacaataatatagtgagatgtgacagcatgtcttgagtttatctattcaaatttaatgtgtgagacaggaactcctcctaaaattaaagaattcagaaattgttggtcgg

SEQ ID NO: 42767 - DNA, 237 bp, Setaria italica
  Peptide Sequence Number=SeqID_108741
atcgaatcacaatccaagcagctcagcatctgttgcaacaattggattgtgattcgatcatatttggatcacattctcctggctgtctgacaagggcctcaggttaaggacttaaggttccaagttgtagcctccttccacatcaggtgatgggagtcttgaacatgtggcgtagtttggcaaggaggctgtcgttccaatcggtcggaagctggatttgctcttgctggatgggta

SEQ ID NO: 42768 - DNA, 1074 bp, Setaria italica
  misc_feature (1)..(52): n is a, c, g, or t
  Peptide Sequence Number=SeqID_108742
nnnnnnnnnnnnnnnnnnnnnnnnnnnnnnnnnnnnnnnnnnnnnnnnnnnnaacttaagtaaaagctttgcaaatactatgtacttgcaagaaaatatatatattggattacagtatttggaatacaaattctctgctcttcaacgaataaccatggtatttacaaggcaagttgaagaaacagaaaaggactaaaggagcatataaaatacagaattctaatttttctagggaggtagccaggtttgattttcttaagtatactgtacacagttagtatagcctcagcttcacatgcccactctgttcagcaaaatctttctcaatgaacctatataaaagaagaaagaaatataaagcccaccgcatgaataagtttgctaactagcatttatctgttcttgcaatcctcagtttctttacacttgcaaggaagagctcccaaggtacatccccaaccatcatccagtctccatcctggtcttcataggtgaggacatgtgcagccttctcgcggggaattcgttgatggtactccataacatcagcataggtgatgggagtcttgaacatgtggcgtagtttggcaaggaggctgtcgtacccatccagcaagagcaaatccagcttccgaccgattggaacgccttccatatacaccttcacgaacaatgtccgccgtcggcgtgctgacgccgtcagggcgcttctgaggaatggcttgatcgggggccaatcagggagtacttggttccttggcgtagaagggatgctcttggtctctgcgacgaggagggaggatgacgccggcgacaggctgagccctagctggaggtcggtgctgaggtcccgccggctcgccggccggcagcccgacgacgtcgtggagagcaccgggtgggtgctgctgtccatggacgaagacggcgacatgccgccgccgtcgccgcgcttacactccgccatgctgcctggcgtgcatacactagccgctgttaattgcacgaagccgaggtagctggggagcgatgtagaaacggggaggggtgtggagtgaatctcacaactaatcg

SEQ ID NO: 42769 - DNA, 582 bp, Setaria italica
  Peptide Sequence Number=SeqID_108743
caggttaaggacttaaggttccaagttgtagcctccttccacacaaggtgatgggagtcttgaacatgtggcgtagtttggcaaggaggctgtcgtacccatccagcaagagcaaatccagcttccgaccgattggaacgccttccatatacaccttcacgaacaatgtccgccgtcggcgtgctgacgccgtcagggcgcttctgaggaatggcttgatcgggggccaatcagggagtacttggttcctgcccatcatccgtccgtgttgacagtgttgttaataaatgtagatgatgtccacaaggaaactaattagatggagagtactgttgggatattaatcggggatgctgtatatctctgaaatatgataacgacaacatgaatctgaaagttgttgcgaagatggcaatgatcaattaaggataaaattgcccttccagttaatcataacaatgaaagaagcttatgccctcacgaaaaataaggaaaattgatgcaaaattaagtgtttgcctgattaaaactcactaaactcaagaccacaagtcgtttcccacgtgagagttcagatcgcag

SEQ ID NO: 42770 - DNA, 251 bp, Setaria italica
  Peptide Sequence Number=SeqID_108744
ggttatgacccctatatatgcgtatctgtctcgatcttgggagcaaaatcaaatttgtaccagcagggcggtccaaataaatgtccaggtttctccgtacgccctggcatgttgacatgttgtgtctgtataatccaaactggaacctcacaggaagtttcagcaagtccacgacaggacagacaggtgggttccatgcacacactgctcaacttgacccacttgatgagaacttgacaatgtttcatccg

SEQ ID NO: 42771 - DNA, 486 bp, Setaria italica
  Peptide Sequence Number=SeqID_108745
ttttttgcggaaacagataaacacatgcaggcaggtgtggcaaacgagcacgtacatcaaatatgacgcgagcacgtacaatatacaaacaacacggcatataactacaaaccgatcgatgcgcgcgatcatacagcgggtgcaaaaccaatcgagctagctcccagcacggcgtccctactgcgacgccagcgcgctcgtctcgggcttggacggcgggtacccgatcccgtggcgcgtgcaggggaacacgatgaagacgacgctggcgacggcgccgaccacgacgggcagcgccatgaccaccttcttctgctggtccttgagcgacgggtagaagcaggccaccgtgttggcgtcggcgagcagcgccaccgccgcgaacacggccacggcgaaggccgagtgcacgagtccgcgaaccgcagccgatacttggagaagtcccgcccgtcgccggcggcggcgccgccgtcgtcggagaaa

SEQ ID NO: 42772 - DNA, 481 bp, Setaria italica
  Peptide Sequence Number=SeqID_108746
catccctggggttatggctctagcttttggcaagatggcacttgcaccacctgtcctggcagactcacgatccttcatgccgagaatggatggaatcatcacaaaggcacaagacactcgccagtttctgtcttctcttgtttggtcaatctgggagggcatgactttgcttattagagcagtgcatttgacattcctattcttccctgcaactgcattagctccatttgctgacaagttcagtgttgcattcagaagaaggtggcttagccttgtgcgccggaccctcgaaaaggctgggccagcattcatcaagtggggccagtgggctgcaacacgccctgatctttttccaagcgatctctgtgttgagctggcgaagcttcacagtgcagctccagcgcatggctttgcttacagcaaggctgccattgagaaggcattcggtcgtgagctttctgaatattcgagtcctttgatt

SEQ ID NO: 42773 - DNA, 393 bp, Setaria italica
  Peptide Sequence Number=SeqID_108747
tagacaagaccaagtacacaaacatagaaataatgaacactaatggcgtgtggtatctgtagtgataagtttgttcctagttctcataatatgacttgaatacgttatataaactaaaagaacactaacaactaagcttgacaaaatttagacgctctaaggagctaaatgcaccagagggaactagatgttcctagttctcataatattgtgtctattgctttttcagcacttgcagtgtgaacatatatgaacgtaatgaaataaaaagttatactactcaatactaaaaaatacatgtttcctaaaaaggcaaacaattccatgcttacttgcttagggcttaaaattttcaggtggatgattgcttactatatccaaaaagcaatgtag

SEQ ID NO: 42774 - DNA, 520 bp, Setaria italica
  Peptide Sequence Number=SeqID_108748
ctaaaaaattgcagtcttttgccatctctaccacgccacatccaaatctccgtgccggaggcagccgtggcatccgccgtttcttcctcgcttcctttcttggccccgcgtgttagctgtcatccttggtgagagtggctgtgtggccgcgcgcgtggtgatcctcgtgctggctaccatggccgtgtcctagaagggggcaggtagccagggggaaagcggcgatctttgtcgcggagaaggatcaagagcgagagtgtggggaccaagcaagcatggaggcgctggccgccgcattggccgccggtctcctccttgctctcgcggcggcgccggcgggagccaacaccgactcggccgacgctgcggcgctggggaatctctacgcctcctggaacggaccgtcgcagctggccggctggtcggccggcggcggcgacccctgcggcgccgcgtggcaaggtgtcacctgctccggcgccggctcaccgaatcaagcttccgagggatagggctagaa

SEQ ID NO: 42775 - DNA, 242 bp, Setaria italica
  misc_feature (238)..(238): n is a, c, g, or t
  Peptide Sequence Number=SeqID_108749
tctaggtaaggcccttagtagcctcggcagcagccatggcgctggaacagcagcaactccggagccgtgcggcggcggcggcggcgccaggggatcagcagggagcagagggagcgcaggcactggcgaggcgcggtgtgagacggcgagatgggcagagatgcacacggattacatctacacccaagacgtcaagcacccatgaactgctaactggggtaggacggtctgcagttcngaac

SEQ ID NO: 42776 - DNA, 405 bp, Setaria italica
  misc_feature (4)..(4): n is a, c, g, or t
  Peptide Sequence Number=SeqID_108750
taanaaaagttcaaagttatccatacagacaacctaacaaatttcagctctacatagcactgaagaaatagaagtcagtaggaagctagacctaagttaaccaaaagacagtaaacagccaaatcaaagtactaaaccaagcatgtctccaaccaccgttcgattaaatttcgacagaatcaatagaacagccaaaaggaaatccggcaaacggatcagcgtaagaacaaataatatcaacgaaagaaatactgctcctcccagatacgactgggagtgaggcacaacacaattgcaaggctaccagcaataaaagtggaaccgcacactataaacagactaagtcacaccattcaactcatgactgcacactaccgattatccatgccatcaacccagcagatt

SEQ ID NO: 42777 - DNA, 441 bp, Setaria italica
  Peptide Sequence Number=SeqID_108751
agaaccggtcctgggccgcgtcggccgagctcttctccatgatctcgtaggccacctgggagtagacgaggccgatggcgaggagctggaggaggacgaagaggaccgcgacgcccagcagccacgtcggggcgagggcagggccggagtccggcatgaggctcttgaggacgttggactggacgtggctgccgaaggcccagtaacccgtgatcgacgagagaaagaacgtgaagacgatgacggagtagcacagcaccagcgccttcatcatcttccccgccgccggtggcgccaacgtcgcctggatttcaggcagtatgccattgccgaagacggaggcaaggatggaaatggatagaaaagcatcgaacgtctgctcggacttggacgagcttagcgagtagtccttcggaggaacgtttttggacaaacctgcac

SEQ ID NO: 42778 - DNA, 284 bp, Setaria italica
  Peptide Sequence Number=SeqID_108752
tacgggagtggaagtggtcctgcttcaggccgtgggacacgtacacgtcggacacgtcgatcgacgtgaagaagcaccacgagccgacgacgctcccggacaaggcggcgtacctgatggtcaagtcgctgcgggtgcccatggacctcttcttccagcgccggcacgcgagccacgcgctgctgctggagacggtggcggccgtgccgggcatggtgggcggcatgctcctccacctgcgctcgctccgccgcttcgagcacagcggcggctggatccgagcg

SEQ ID NO: 42779 - DNA, 528 bp, Setaria italica
  Peptide Sequence Number=SeqID_108753
ggcaggcgtacttggagaacgggctgatcagcgtcgtgtagatggccagcttcgagctgatgttgccctccggcaggttcagcgtcacctgggacttgacgtcgtctccgtacatgaggtagccgaggatcgccatggatccgtagttcagggtgcaggcggcgaagcatatgacaagcacctttgaaaactttttcttttccttcatggagttggagagcgtggggaaaatggcatggccgcagtagcagaaggtgtacaggcccagagcagtgggcaggccactgacgttgagcatcctgccctgtccccggaacccgacgccatctgcaacggcggcccacagcacgcagacgaccacgaccgccgacgcgagcacgccgctggccgacacgtacgcgaggacgcccaggctccggagccacgtggtgggcaggatgacgagcgcgacgagcacgacgaagagctgcttcccggagacgacgaggaggcgcccgcccccgcccccgccccgcgccgagcggcagg

SEQ ID NO: 42780 - DNA, 603 bp, Setaria italica
  Peptide Sequence Number=SeqID_108754
ttgtcttggtagttgtattagtcttgttagttagttagtctagcacctgtgctgctagcttgaacagctgcggaagttgcctgacttgtgctggtgctggtggctgatgtgctagcagctgtattagaaacaccaaatgacgatgaggtagaagctggcgtagttgtttgaagattaaaactaggaaaccctgttgttccagtcaaaggagacgtggtggtcatgcctgcagatgtagatgcacttgtgacagtggtggtagtggctgtagctgccgctgctgatgacgatgatggtgctactgaaaactgaaaccgctggtagaagcagttgggaacaacgatcccgatgttgcagcagctgcagtagctgatgccacagtggatgcaccagttacagagacagaagctaaagttggtgtagaagctgccgaagatgaaacaaaggagaagccagacgtagtggcagacgtactacctgctgcactcgtattagagaacagtgatggtgcaggtgcagcctgcgaagtggccaaggagaccggcgtggtaggcgtggcagatgtgctcttagcgaaagcaaaggcaggggccgacgaagcag

SEQ ID NO: 42781 - DNA, 1151 bp, Setaria italica
  misc_feature (1126)..(1126): n is a, c, g, or t
  Peptide Sequence Number=SeqID_108755
agttactgtcaagcaattttgtttatattgaaaacacatataattggtgcagagcagagggttgataaccagcaatctgagtaacattgaatagtatcaatcaaagagtgaaccagctagagctacatcctacatggcagatggcaccgcagggagaaaatagcgtgaaacctttgctgtggggcagtggagcaaccaagcacagcacgcttactagcctcgatcagcttaaccaaaacctgggaatcccagagtcgcgttcagctgaagcactgttgttaggcagcctctgtattctgcctgagaactcattaaccttctcatcaatccacatcagggaccgcagttgattatccagtatacggacagcaacatcaaatggtgtcatactatcagcggcctcaagctcagcaccctgagtagcgttcatagtctgaatgatggattttacttgttctgtcatatgttgcaattcatgctccacaacttctgcttgctcatacattgtatctcttgccgaagcagcctcatcttcacgaagcaacacccgttcatcctggaatatgcgttcagcttcctcctccataccctggagagccttgtctacctctcgctgatgagtttctatcaactcaagttgacgctctaagcctgtttgtgtttcaacaactttagccacctcagcctcaagcctgataagaacatttctgttttgcagaattctcctgtcccattcagctattgcagtggcatgtttcctgaatttcgcagttcggtcttgaagctcattgttccagtccctaataatctcctccacacttttgccaacaatttctgatggtagcttaggtgcttgggaagctgctggagtgatagctgtagtagtagcagcacctgtgctgctagcttgaacagctgcggaagttgcctgacttgtgctggtgctggtggctgatgtgctagcagctgtattagaaacaccaaatgacgatgaggtagaagctggcgtagttgtttgaagattaaaactaggaaaccctgttgttccagtcaaaggagacgtggtggtcatgcctgcagatgtagatgcacttgtgacagtggtggtagtggctgtagctgccgntgctgatgacgatgatggtgctact

SEQ ID NO: 42782 - DNA, 1073 bp, Setaria italica
  Peptide Sequence Number=SeqID_108756
taaaaacttaagtaaaaccgtacttaggttaagaaagaagcagttgggaacaacgatcccgatgttgcagcagctgcagtagctgctgcactcgtattagagaacagtgatggtgcaggtgcagcctgcgaagtggccaaggagaccggcgtggtaggcgtggcagatgtgctcttagcgaaagcaaaggcaggggccgacgaagcagaagagaacaaggaaggagccgcgctccctgtcgttgcgctcgctggtgatggcgtaaagccaaaggacgggccggatgttgttgttgctggcgaggcagagaagccaaaggatggagtggtggtggcagcaggcgctggagaagaggcgttggtggtgctgaagagtggcgcagaagtggtggatgcgaacagcgacgagcccgtggcgcccccaaaccctaatgccggtgctgatgccgtggtggagggagtgcttgacacggccgcccctgagctgaatgaaaagccaaatgctggtgccgaggcggcggccgtggtagtggtggagccggacgccgacgagccaaagccgaagcccgtggaggctccagagaagaggcttggcgtggacgcagcggaggaggcggcgccgaacagactaggtgtcgtcgccgcggcggaggtggccccgaataggttcggtgtggtcgccgcggcggaggtggccccgaataggcccggagtggttgccgcggaggtggtagcgccgaacaggcccggggtagtcgtcgcggagccggtggcggacgcgccgaagaggcccgggctgcttgcgggggcagaggcagcgccgaagaggccggggctgcttgtggcggaggtggcagcgccgaataagctaggggttgttccggcggaggatgcggcaggcgttgcccggaagagggatggcgctgacgcgaccgatgaggcggctgcggtggcttgcccgaacgagaatccggtggatccgaagccgaaaggggaggaggccgcagcagaggcgggcgcggcggcgggcgaggccccgaacagggaggagccgaaagtgggggcagaggaggc

SEQ ID NO: 42783 - DNA, 395 bp, Setaria italica
  Peptide Sequence Number=SeqID_108757
tttttctcctccctaccccgtcccttcccgaggcggagacccgtgccgccttcgtcccttctctccggttgggtcgggtcgggttctcgacgccgccgcgaacgccccgctgctcggctcctgcccctctcgccggacggcggcgcggggaagctcgcaaccacgagatggaaagccataattcatcacatcatcagattgctgaagtgaaaatggatatctcaccatcagcttctggagcagcagggaacaaaatctgcagaggtgctgcctgtgatttctctgatgccagtaacacctcgaaagatgccaaggagagatttgcatccatgaggaagcttataattgctgtgatcctttgtatcatattcattgacagtggaagtggttggagg

SEQ ID NO: 42784 - DNA, 541 bp, Setaria italica
  Peptide Sequence Number=SeqID_108758
aaaattttcattctactaccatattgaattgtttttctgctatttctcaattccatatcatcaacaaggatgcatttggatggtttgaatgtactacaatgatgtgttgatgctgagcctgttgaagttatgtggagttactctgtatatcgtgttatgaaagactgttcattgtgcaaatttgtcttcaagtattttttttttcctttcttgcattgttttgcattggttatcatgaagggaccgtttttcagtatttacattgaacctgttatgtaactgttactattacatcattgctatttagttttttactcctttcacttgacacaaataaattgcttgcctcttccttcttttccatgctagttgtagcaggttttcctatagcatatggcatttcaacagtgcatctatcatcatctttgtacctgtgtattgacttgtatcttgttttcagatggaaagccataattcatcacatcatcagattgctgaagtgaaaatggatatctcaccatcagcttctggagcagcaggg

SEQ ID NO: 42785 - DNA, 653 bp, Setaria italica
  Peptide Sequence Number=SeqID_108759
ttacgttaacgttaccgttaccgttcgttaaacgtccccgtcttgtcttcggtcttccttgtccccttcatcgtccggacggcggggctgggaagctcgcaaccacgagatggaaagccataattcatcacatcatcagattgctgaagtgaaaatggatatctcaccatcagcttctggagcagcagggaacaaaatctgcagaggtgctgcctgtgatttctctgatgccagtaacacctcgaaagatgccaaggagagatttgcatccatgaggaagcttataattgctgtgatcctttgtatcatattcatgacagtggaagtggttggaggcattaaagcaaacagtcttgcaatcttaactgatgcagctcatcttctttctgatgtggcagcatttgccatatcgttattctctctctgggctgctggatgggaagcaacaccacagcagtcttacgggttcttccggattgagattcttggtgcattggtctccattcagctcatatggctgcttgctggcatactcgtatatgaagctattgtaaggctcattaatgagagcgacgaggtgcagggctccctcatgtttgctgtatcagtcttttggattgtttggcactaactattcggctgtactgctaggc

SEQ ID NO: 42786 - DNA, 692 bp, Setaria italica
  Peptide Sequence Number=SeqID_108760
aagtactgatggagagcatccccgtgagattgatgccaccagggctcgagagggggcgtctgtgagatggatggtgtggttgccgtccacgagcttcacatctgggccatcacagtggggaaggtgcttctagcatgccatgtaacaatcgcaagggaagctgatgctgatcagatccttgacaaggtgattgggtacatcaagacggagtacaacatcagccatgtcaccattcagatcgagcgcgagtagggttgtctttaggctgtcagggcataaatggtgtcgcgtcttcactggttatcttgttctgttgggtactagtttttgcaactgggaagacgttggacagtcacccaagccataatgtgttcacaagttcatcttgattctagctttgaatgctgggtagtatcgtctattactagtctattaggtgaaggaaatattcggggtggtgtagtcgtcagtcagtgcattcacatggatgaaattttcggacttgctgttaactccttgtgggttcatcgaatttgcacctgtagtttagtaccctgtttcatcacctttatgtaagatgatgtttctggcatggaagatatgaagttagtgcttggcctaaaaccgtttgtcttgaactctgctttgcttgttgcagttgaattggaagagccgaccacgcaacgacaaaa

SEQ ID NO: 42787 - DNA, 1207 bp, Setaria italica
  Peptide Sequence Number=SeqID_108761
tactaagtagtctagggtcctattgttgtctattcgtcctattgacgggttcttccggattgagattcttggtgcattggtctccattcagctcatatggctgcttgctggcatactcgtatatgaagctattgtaaggctcattaatgagagcgacgaggtgcagggctccctcatgtttgctgtatcagcttttggattgtttgtcaacatcataatggctgtactgctagggcatgaccatggacatggccatggacacagccatggtcatggacattcgcatgaccatggccatggtgattcagatgaccattcacaccatgaagaacaagagcagggccatgtgcatcgccatgagcacagccatggaagttctattactgtcaccacccatcaccaccaccacccaagcactggacaacatcatgatgctgaggaaccattgcttaagcatgaagctggttgtgagggtacccaatctgctgccaaagctgctaagaagcctcgccgcaatatcaatgtacacagtgcttatcttcacgtgattggggattccatccagagcgtcggggtcatgatcggtggggctctcatctggtataagcctgagtggaagatcattgatctcatctgcaccctcatcttctctgtggttgtactgttcaccacaatcaggatgctgcgcaacattcttgaagtactgatggagagcactccccgtgagattgatgccaccaggctcgagagggggctctgtgagatggatggtgtggttgccgtccacgagcttcacatctgggccatcacagtggggaaggtgcttctagcatgccatgtaacaatcgcaagggaagctgatgctgatcagatccttgacaaggtgattgggtacatcaagacggagtacaacatcagccatgtcaccattcagatcgagcgcgagtagggttgtctttaggctgtcagggcataaatggtgtcgcgtcttcactggttatcttgttctgttgggtactagtttttgcaactgggaagacgttggacagtcacccaagccataatgtgttcacaagttcatcttgattctagctttgaatgctgggtagtatcgaatattccttcaccacaaaactaagggaaaagaaacgttaaggaaacaaaagtaaacaaaaacccaaaaaaagaaaaccaaaataaaaataaa

SEQ ID NO: 42788 - DNA, 302 bp, Setaria italica
  Peptide Sequence Number=SeqID_108762
ggcggaggtggcgttgtagtctatccaggcgtggcgggtggcggtggcagtggcagtgggggaatagttggcctggcgggcggcgcggccggcgaggtcgacgcggatgcggtgctcggagaagacgacggcgagggccgggggctcgtgggtggcggcggagggcgtgaggaagaaggctagggaggaagcggtagcggggagggcgaaggcgaagtatgtggagaaggttagcccgggggcggaggagaagacgattggggtcctgtactggacacgggcacccggggagggcatggaga

SEQ ID NO: 42789 - DNA, 420 bp, Setaria italica
  Peptide Sequence Number=SeqID_108763
tgcccaaactacaaaggtatcaccttactttcaaaccacagtccaatagcgatgatttcaggtttggtctcgagcaccttgcaagcctccaaaatgtcacagtggttattgtccctacttgtgctagaaatgtggacatatcggttgcagagaccaccatcaggaatgcaaccaatatacatcctaatcaaccaatagttgaaattcatacatggcagtaggactacgaagctatggattgaaaacatggccttgtcactgaaaggtgccggagcagggtcacattaacagaagaatgcagaatttgaataagaatgtagaattattaccatcaaatgtgcttggcgtggtgaacaaagaagacaaaagacctaggacaaaactctttaatttggatctgtaggtcttctatgcccagtt

SEQ ID NO: 42790 - DNA, 349 bp, Setaria italica
  Peptide Sequence Number=SeqID_108764
ttcttcgtcagggttatctgtaaaatttgagtgcagagcatttccaacaatgtccactattggagatgttgtcgtggaggattcaatgcacaatatggcagcaatggcgtctagttgttcaacctcatttctgaacattagccttgcatgtgcttgtgcaagccttatcaaactttcaagcatgcgtaccgttgttcttgctgcattatgtgttcctgatcttctctgaagctgataatagctcgagataactctttctgcctcctttgtcaaaactggtttaaaccgctttacataattgatgtaccttctcaacttggggagcgtccattttacatcagaagcattt

SEQ ID NO: 42791 - DNA, 452 bp, Setaria italica
  Peptide Sequence Number=SeqID_108765
ggtgctgatgcattggttccatattcaccggacagcaatctccagcttcagcttatagacgacgacgatattggggttggttctgagaggtatggccatgaaagcaagagggatatgggagtcatgcgtgtcatgatattcctaccacctaggtatcacctcctcttcttgatggaagtaggttgtgcctccacattggtcaggataaggactgatcattggccttgccttgcatatgtggatgaatacctggaagcgttgatttcttagaggacttctcttgccaacagtgttcagttttgtaccttatgtaacactaaagagtgaacagtgagattttgttcttctttaccattgagtttggagcggcattccttttttgtggattctgagttgggagctgtaacttccggaagagagagcagttttgttactgctatcatcaagataca

SEQ ID NO: 42792 - DNA, 556 bp, Setaria italica
  Peptide Sequence Number=SeqID_108766
tgcagcgcagccatgggcttgtccctgatgccgccacttatggcccattccttcgttctgcatgtgcagcaaaggatgctcgtgctgctcttcgtgtgctagataggatgcatatgcacaacctgacaccaaatgtattcacgtataatgctgtcatccggttactctgcgagttgggagaggttgatgaggcttataatatcctgaatgagatggcaaacaatggggaaatgcctgatatttggagctacaacactcttcttaatgcacattgcaagctgaaagaagtgaacaaggcgttacgtcttatttcaaggatggataaagagtcatgtctgcctgaccggcattcttacaacatgattctgaagatgttggtttctgtaggaagagttgatagggcaattgaggtttgggatggaatggaaaaacgtggtttccatccaggggcagcaacttacgctgtcatgattcatgggctatcttgcaagaaggatagagcagaggaggcctgcagctactttttgaggatggtggatgagggtatcccggcctt

SEQ ID NO: 42793 - DNA, 925 bp, Setaria italica
  Peptide Sequence Number=SeqID_108767
agtccttgcttcattcagtcactcgtccctggagtcgttgatgatgacccgcattgctcttgaaaaggaactatagcctccacaagaccgttggcaatggagggtgctaggtcccaagggaggacgcagcgcctgcagcgcggcgccacgagcttgtgggcatccttgacgaaccccacgacccgatgcgcaggcacatcgaccccaaagaggctcctccttaggaagaagtagaccacgttggggctcctggggttcacgagcacgatttcagggatcatcttcggcagctgcgtgtccttatagctggggtcgttccagatctccttgaagctcatctcgtacgtcttgagccaccggacgctgcaatcgcggtcgccgctaacagggtcagggatccccgtccacacgaccaccttcctttcggcggcccggccgtccagatcaaggtcgcgggcgatgtccacgtaccgcagcatctggttgctcacgctgatgcagcggatggtgtggaggaacggcttggcctcatggatgtagcggcccggcgggaggttgtggaagcgcaaggcgggcaggatggttgtcgggtcgcagctgatgagcccccatgaaaggtcgaggaaccagagcctcccctcgtgggcgaccacgccggagggagcccactccctgtccatggaggacaaggggctgggcaggtccgtctcgatccaaagacgctcgcgggagaagaagcggaggagcttggcgcggcgcatgccgacctggagctccgcgatcacgtagtcgccagcgaacagcccgggagtgagcccgacgctcctgaggttgcaggtggcgggcatggacgcagggcgccgggggatgtgctcggcggatcccggtggtcggatagcgagacggatccccgggaggcgggagg

SEQ ID NO: 42794 - DNA, 390 bp, Setaria italica
  Peptide Sequence Number=SeqID_108768
taggtttaggaagaataataggtgtgttgctcacttgctctgttgattcgagcttggagtctggtgatgctactacgaagcagacatggacggtgccttctgatgatgctccatcaggagagtttattagtataatctactagtgtcttcttagtaatgagtcggtgtcagtagtatggtcaataaattgcaagagagacagacgctagctcgcgtggtcgcgttgtctggttggagcagctgcattgctgatgctgctgtgtttttatttcctgaactgaggtcgggtgtgtttgaactcgagtcatggtttggtacacagatatctgcactgtgtgtacgcttatgacgtccgtggtattaagacagatttacttaataccacggacg

SEQ ID NO: 42795 - DNA, 476 bp, Setaria italica
  Peptide Sequence Number=SeqID_108769
ttttgtgggaatcagaagaaggatagtctgttgcttggtacgagggagaggaataagattgtgacggagaaggatgctggggttgtgagggtgctgggggtgaatagttatagggtgactgggtagagggatgatcattgaactctgtattttgtcgatgcacattatttcctggctgcagagcagaaaagctatcccgcctactaaaatcctgtgcacacaaagataattcaagaaaactgaagctatattttgttcaaataaatcatctaaccatgtaaaaataatgtgagtttcaattactaaagaaaaagttggaaataaccttgtctacaggtggagatggtgcttcagtgccatgctgcatactgttgaaggactggcttcgccccatatcctgagaaattgtggtggtactgacaggtgtttcatccttatccccaccaggagggccagcttcaggcttccgtccttct

SEQ ID NO: 42796 - DNA, 432 bp, Setaria italica
  Peptide Sequence Number=SeqID_108770
ttccccccgccgcgccgccggccggccgccaaggcgcaggtggtaggatggccgcccgtgcggaactaccggaagaacaccctcgccgccagcgcctccaagaccaaggcgccggcggaggaggccgcgtccggaggcggcggcccgatgtatgtgaaggtcagcatggacggtgcgccctacctcaggaaggtggacatcaagatgtactccagctacgaggacctctccatggcgctcgagaagatgttcagctgcttcatcactggtcaaagcggtctgcgtaaatcatctaccaaagacaggcttaccaaatggctacaggacggataggcctccaagaccaggagtatgtccttacatatgaggataaggatggggactggatgcttgttgggatcttccctgggatttgtttagcactatctgtcg

SEQ ID NO: 42797 - DNA, 1590 bp, Setaria italica
  Peptide Sequence Number=SeqID_108771
ttttttaccagacctcaagaatatgtaaattgaatataatgggttgcaaagccttgtcacaaaactctgataacaaataattcaattttacacaagaaagtttcctgcaaacagcgccattgattcaaaaggccacacggaacggctcccttattatctcctagattttgtgtggcggcccctgtaccttgtatgtatgcagcccggtaacatctccatgtggtggtataccaatcttgtatatatacagaagatgcttttgagaaatgtgcggcaaagccaaaagagctaatgagtttcagcagaagggtttgtgagaagatccagcgcgcgtttcaggtgatccacagcaacagaaacgtcatcgaatgcaagagcaccaaccgcaaatcttgctgccttgtgtgcctcggctatcttctcaactgctggctggtaagtgctatcatacttatattggctagctggtggcacagctggagtaacttggggtgaagagtcagcagtagagtggtaatgtgttggggcagagggatttgacgcaggggagtatgatgtagctgcagggccatcacttgcactgtagaatgaagattggtgtgttgggactgaaggtgattgatgtgttgggacagaaggcgacgtgctgtcctggaaacttggatatgactggaaattagggtagttgtatggagcagctggggcttcagtggagtaaaagttttgagaggtgtgctgaggttcaattgtgtagggtgggggttggtatgtctgaggatatggcgaaacatctggtttatcattgctatgaggattgtagccatcattggaagggtagtctgtcctggtgtaagggggtggtgaataattggatggtggtttgtggacctcattggtagggtagtctgtgcttgtgtagggaggagatgaatgattggggttttgtttgtgggaatcagaagaaggatagtctgttgcttggtacgagggagaggaataagattgtgacggagaaggatgctggggttgtgagggtgctgggggtgaatagttatagggtgactgggtagagggatgatcattgaactctgtattttgtcgatgcacattatttcctggctgcagagcagaaaagctatcccgcctactaaaatccttgtctacaggtggagatggtgcttcagtgccatgctgcatactgttgaaggactggcttcgccccatatcctgagaaattgtggtggtactgacaggtgtttcatccttatccccaccaggagggccagcttcaggcttccgtccttctttgagagctttccttatttcagcagccttccagatggcatatttctgcttctgctcaatatcaggttgaagctcgccaaactggttaagaatctcgaagaagatgctcgcagcatagaaggtcttagctgtgtttatgtcagctcgtccagcacggtcctgtttatctgctttagcaaaaacatttaatgcaaatccctccaaatgaaggttgtcgtctggccccaaagtcaaggttttcttgtccttctcgagctggttcatgagggagatgaggatggagtt

SEQ ID NO: 42798 - DNA, 711 bp, Setaria italica
  misc_feature (667)..(711): n is a, c, g, or t
  Peptide Sequence Number=SeqID_108772
accaccccagcagtttaggcatagtactttgtgatgagaatatttacttagcctgtgatcatcactggtcaaagcggtctgcgtaaatcatctaccaaagacaggcttaccaatggctcaaaggcggatggcctccaagaccaggagtatgtccttacatatgaggataaggatggggactggatgcttgttggggatcttccctgggatttgtttagcactatctgtcgaaagttgaaaatcatgagggggtctgatgctgttggaatagctccaagaaccatagagcagacaggtcagaacaagtaagcttggccatcgtctgcgaccacgaaagactttgagttagctgggagatgatgttgaaggctgaaatagttcctggggattatctaaaattccccttatgttagtttagattcacgtgttcctaagttgtgcatttgtatgtctgtaatgtgagtcattcagatcgtgcaatcgtatgttgctcttgtgcccttcaaaggccaaacctgggagcactctgttttctgtgtgtgcttgctttcctgcattccctgttactctactctgaaatcacccatcatgccacaagaactgatgcttcgtaatgtcaagaaagctgtcctaattgttcagctgaaaaaaaaaaaaaaaaaaaaannnnnnnnnnnnnnnnnnnnnnnnnnnnnnnnnnnnnnnnnnnnn

SEQ ID NO: 42799 - DNA, 561 bp, Setaria italica
  Peptide Sequence Number=SeqID_108773
gcacatcacccagcgccgtggaaaccgccgtagccgaagagggcaaggaaaaacaaagcctacacgcccaatctcacgtctcgccggcggccgccaccgtcaccaccatgatcagcatcctcgcacaggagcgcctcctcggattcgccctgggctccgtctccatgggcggcttcgtcctccaccagcgccgcgccatctaccgctccctcgccgaagccgacggatcgtcttacttctaccagcctggtgagatcatcagtcgaaaaagttcacctgaactggctcgtgtatggaacaaggcggtggacgagactcttggacgacttgttgtataccttagctctcgtgggtggtgattcaagcaccttgttgaacatgacaggtgaagaagtgcgcagggcggcttgtgaccgtttttacgccgttgtgctcaaatgccaggaatgtactcaacatttctctataccctgagttgaacgccttttgtattaaaaggttctccaatgacctatttattgcgaacaaagttgattttgctatactgcagtactaaaaaaa

SEQ ID NO: 42800 - DNA, 245 bp, Setaria italica
  Peptide Sequence Number=SeqID_108774
aggagcagaaagcagatcactgccctcaaacaagtgcatagagcgcaactccatcccacgatatcccttttggcttgaagtgtctctcttcaccattaacaatctatttgaactccacacaagttgaaggaatggattatctgcaaggcacctttatcaaagataatcaactgaaaattgaaattttgccagagaagctgaagtggcagaaccaggaacataactcatctagtttgtgttttgtg

SEQ ID NO: 42801 - DNA, 645 bp, Setaria italica
  Peptide Sequence Number=SeqID_108775
aagcaaatgaacaaggaaacggtaattcaactcttttaagatttcaattcagcgacatctagttcgtgtatttacaagatctttgaaagcctcacttaaagcatggttacaccgcttattttgaaaacatacaacagcagaggagcagaaagcagatcactgccctcaaacaagtgcatagagcgcaactccatcccacgatatcccttttggcttgaagtgtctctcttcaccattaacaatctatttgaactccacacaagttgaaggaatggattatcagtcacccctcctccttggcgacggaatttgcgttggtgtcgtgtggctcggcacgggaagggagcgggttggagcccttgacgagccacccgagggcgaagaaggcggcaccggcgaggatggcggtgccccaggcgtgggagtaccagcggctgtactgccgcacggcgaaccgccattggtcccgcagagtcgccgcgtcggggaccgcggcttccggggggttagggtatccagcgcccccagcgtgcgccccgccgacgccaggcaagcggggtcgggcgcctccgccctccgccgcctgagattgcagcggcgacggcggcggcggcgacgtggtgggcttctcctggtggttcgcca

SEQ ID NO: 42802 - DNA, 717 bp, Setaria italica
  Peptide Sequence Number=SeqID_108776
caggatgcgacgtacgctagggagctcactgaagccaacgagcctgtagggaggactgtgaagcctgctggagggcctggattcaaggacgtgaagtggctactaggtggccacaagcatggtggcgggtatggaaatgaaggtgggtacggtggaggatacggaaacaatggtgggtacggcggaggaaatgatccacctagctacggtggtggatatgggcctggatacggtggaggatatgatgggcctggatacggtggaggatacaagcaccatgtccatggcggtggtggctatgggcctggatatggcggtggctacggacccagttatggaggtggaaacagttgccctccatgcggaagtggtaatgctggtcctgggtacggaggcggctacggtggtggcaacggtggaggataccgtagtggcagcggatacggtggaggtggcggctatggaggtggatatggtagtagtggcacttctccatgaggcagacatggcagcagtgcgtaggaacaatggtggatcctactaagaatttgaagcataagaatgtatgctagcttttatgtcaaataaatcgatcatgcagggtgatgtttgtgaccaatttatatatgggatcatgtccgattcgtgtggtattaaacatcgactgtttccatgactgaagaaccataataaaagctggcctttgtgtgttgtcgt

SEQ ID NO: 42803 - DNA, 484 bp, Setaria italica
  Peptide Sequence Number=SeqID_108777
ttgtttttgaaaaaattgatccataaagtttgatttttatttcttattcaaattttgttctaactttcttttcccatattttttgaccttgctacgtgcagaggtgggcgggacgagcaggaccgagccccgcgcttctcgtgtgggacaacgacgggccatggcgtgcggcttcagcggagcgagcggccacggtggagcggcagcgcgggtggctggagcagcggccgccgacaagcgtcgcgctgcgaggcatgcgctaagtgcaatggaatggatgtgcaggagaaggatctgtgctgatttctgaaaaggaatgatgcgtaaaaagtagtccaaaaaaggatggttggagatcgacggtaaggtgtcctccttactgcgatctaaacttgatttcctcgatccggagggaggaaggtgtggtgagaaatgaagattcgctcccaatgttaaaatcggtagtttatcacatcttggtgcg

SEQ ID NO: 42804 - DNA, 356 bp, Setaria italica
  Peptide Sequence Number=SeqID_108778
tatgtattgttttttactttttcttgttttagagctttttttacaatgcttttaaactaccaatggtacttgcaggtactttcctttcttatccttcttatcaaaaaagaatgaaataatgaaatagatttacatataattaaaagaatgaaataatgaaataatttacatataattaaaagggtatcatagtaatttcttactatttttgatacttgttccaccaaactgggacttcttggtacttgtctttaggtacttcatggtacttcctttgtttccactgttcgattttgccggatggacggctctcatttttttcaaacattttaaaaattctactctgtttatcatat

SEQ ID NO: 42805 - DNA, 582 bp, Setaria italica
  Peptide Sequence Number=SeqID_108779
gagttttgtttgtcattggggatgtgtcatgcccactatccagccaacgtctaagagcatcagcttcgtaggtgaagccatccgctgccacctgaggatctctaatgagaacctgagatattgggcaaaggaaataggatggcatggcaacagttctactgctttcactgaacatggatcgaaaagattgtgacaaaggtacatgatcttcctttatgataggtccaatcaccctccacacgtcgcgttgaagatcagggcgtttctgcctgctgagctccgagcactgcagcccgattcttgcgagctgctccgcctgcaccagaggccactcacctgctgagtgatccaacacagaatgcaggtcatcatcgttcagtgccccctgcaccacccttatgaggcgtagaggcgccattccggtcaagagccgcaggatggtaacaccaaaggaataagtgtcagactgtggagtaagttcccctgtgccaaagaactctgggtccatgtatgccggtgtccccataggctgggaggtgaagtgcgcgtcgctgccagtgacactggactccagcaaaagac

SEQ ID NO: 42806 - DNA, 620 bp, Setaria italica
  Peptide Sequence Number=SeqID_108780
tgtgaagagcgcattggtggacatgtatgccaagtgtggttgtattggtgatgcaaaggcgggtttcgagcagttgtgtgatgttgatgacgttgtcctttggacggcgatgattgctgggcatgtgcagaatggggagcttgaggaagcactggtggtatctgccaagatggacaaagagggcatcatgcccagtaatttgactatcactagtgttcttagagcatgtgcatgccttgcagcattggagccagggaagcaactgcatgcccaaattattaagtgtggttttggtttgggtggttctgttggaagtgctctgtctacaatgtattcaaagtgtgggaatcttgaagatggcatggttgtcttcagaagcatgcctgataaggatgttattgcatggaactcaatcatttctggtttttcacaaaatgggtgtggcaatggtgcacttgacctgttcgaggagatgaagctagagggcactgcacctgatcatataacattcattaatgtattgtgtgcttgtagccacatgggcttagttgatagaggttggttttattttagggcaatgaccaaagattatgatttaattcctaggcttgatcactatg

SEQ ID NO: 42807 - DNA, 505 bp, Setaria italica
  Peptide Sequence Number=SeqID_108781
tttaattttagaatagtacaactaaggcatgaaaacaaacctgtggccaaaggaaacttagtgaccactgatagcacacatgtggttggaggaaacatgcttgggtatgaatacgtcgctgttgctgttcacattgttagtgacattggggatgaggatttgcctagaccatatgacaatatttgcacagtaagagatgccataggctatgttattgcttggcctcgatcacgtgtaagtttatctccatattgataatgtacattccaattgtcgtaattgcaaaaaacttttactgatttaaatgggatccacatgtttttaggtgaaaagacctaggggttcagcacctaaacgtccataacaacttggtgagacattcttcaattgttccaacaaagtttgctatgaattccgaatgatcactcgacaaaacaaagggttctcacgactgaagatatggagatgcttcagctaacctatactttctatgtcaagaaaactt

SEQ ID NO: 42808 - DNA, 436 bp, Setaria italica
  Peptide Sequence Number=SeqID_108782
ttctaagcatcaaacactttggggttggagaaaaccaatttactggacctcttccactgtcactaactaatctcacaaggctccaggttcttcttgttggtgcgaattcctttaccggagttgttccttccaaactgggaagattgcacaatcttcaagtgtttgttctggaactaaacaagtttgaggcaaataatgagaaaaaatgggaatttatttcttctttggcaaattgtagcagattgcagatgctgagctttgggcagaatagattcgcagggaaactgccacgttcattggcgaatttgtccaccaatctacagcggctaaaggcttccagcgtcaacatatctggtttcatcccaaccatgattggaaatctggcaaatcttgagaacttgattttagtttaaacttactcactgggttattcctg

SEQ ID NO: 42809 - DNA, 669 bp, Setaria italica
  Peptide Sequence Number=SeqID_108783
gatatttccaatccttctcaacgcttcctcacaaattcccattccatgcaaattgaagcccccagttgccatatgtgaagtgcacggtgctagatttggaggagatggctggctgcgagacatccgcacttctcctgtgggctcatctccgtgtgtcgtgcggtcatcagatccggagagctcgagcttggtgcggccctcgtgcatctcgacgaagatgtagccggcgccccggaaggggaagaggaggcggccaacgacggccaggtcgctgctacttcctcttggtggcttctccgaccttctgcagcggctcgagcatggagcgtcgaggccagcggcggggtcgagggtggcgagccgcctgaagatcttgtggacctgctcgacctcggcgcggctctgaagatggcatctcagacgaagatgcagccggcgcgccagagatcgacgatggcgcccaggagcaattccgacggctccgccacgcaggttcggtgggagcagcaatgataggggagagaaagttggaggttgcaggttctttgtctgctccagataggagcgacctcgcaatgtatgggagcgggtccaacgcgtataggagcgcacattggagaggcctcgctcatcatgcgttgatccgacgagggaagatcaaacaagcaa

SEQ ID NO: 42810 - DNA, 370 bp, Setaria italica
  Peptide Sequence Number=SeqID_108784
tctttggcttggcttgtgcctttcccaactttctttctttatctccagaagtagggggcagtgatcagatctagaggataccagatgaaatagagtagcatcgccgaatatttccctccaatttgtatctgcaactgctctgtctagcctatccttcacatttgcattgccatctcgtccattatcatagatgaaaggcaggccaacaaatcccaaatcagtgaggccacaatatgtcagaacttctctgaatgccgccatttgacgctccggtcgcgggcatgcagagaaatgctcataaccccacatcgtttcattgaaatctctgatgagaagccatggagcagtagatgcacctcgaagtcgccgc

SEQ ID NO: 42811 - DNA, 438 bp, Setaria italica
  Peptide Sequence Number=SeqID_108785
ttacaaagaagttaattaatggagactggaacacatacgatcccttcaagagttatggagaatggaacacatattttctttttcacgaccatgccttagcatatgatccctctgagagtgatgatgatgtcctggatgactatgaaatgtatcaaattgaggatgaagatgtcgatgaacccattgatgaacattccatgcgcatggaggagcccggagaaatccctgaagacgaggaggctatgatgttagattacgacgccatactctatgagcaagaactagacgaacacaaacctgatgaagatagtaagatgatctaatgagatcggtgccctttatatctaacaattggtggtggataaccctgctcctagttttttgttttttcaaaataacctgctccatctgaaatcatttgcttggcttgctccgagg

SEQ ID NO: 42812 - DNA, 1117 bp, Setaria italica
  misc_feature (918)..(918): n is a, c, g, or t
  Peptide Sequence Number=SeqID_108786
tcgaagccacgcgcctcgctggatctgacggaagacccctcccctacatgccttcttctatccgcgtctcactcccaaagaagccgctgcttccgcacacccgcactctgtcctggtcgctgccgtgctgtggaggatcagccaacgtagggtctgaacactgagctaccatgctgtggaggatcagccaaggcagggtcttaacacttgtgtttcaggggagggaggcagttaaggagctccatacggcagctacacaagggtacattccatagatcatcatcaaactcggaagaggtgaaatgtctgcctggtggtaaggccaagaaaaaggttgttccctaccgctactgtctgttagagttttagcaaaatggggtatctgtggatagcttttttcattggtggtacagagaatttcttcagtgacaagatgttatgattgagaatattctattttataaaatctttgtatggtagcaaagtcgtctcctagcattttccatactcacttgaaagatattatagacatttggtttgggtgctgggataaggaggagaatatgcttcctagaactgctagaaaaagttattctaaaggtcaagtaatacacttacctatattgctttggttttatattatgtgggaaatggtcttgttataattattttgacctatctatcttacagaacacatggatcacaacgtggccaacatgcatctcagcatcaaattctcacatggaagcaggtgatagcattcagggatcgcactatagtatgtcagtttgacaattttggaattatgtgctccattccagtagcaaactacagggtaaatttgagtgatttagtccacggaactgacagtgtgtctgttatctgaactgacagtgaaggagggtccactgcttttcngattgtggatcaactgatgaagctgctttttggacggttaggactttgaggatctggaagggcatcttcaggtagaaatgattctattgaaagtggggatagcatatgtctatgtctgtgtgatgcgctttctggtacaaggatatgtataatggcctgctcatcttacctgaatagttccttctatatctaactttat

SEQ ID NO: 42813 - DNA, 597 bp, Setaria italica
  Peptide Sequence Number=SeqID_108787
actggcgaacgacgaacgcgccgccgccgttcccggaggagctcatcgagacggtgcggcggaggggcaagatcgtggcgtggtcgccgcagagggaggtcctggcgcacccggccgtcggcgggttctggacgcactgcgggtggaactcgacgctggaggcagtgtgcgagggggtgcccatgctcgtgcacccgtgcttcggcgaccagacggtgagcgcgaggtacgtgacgcaccggtggggcacggggctggacgtcgggagggtgttcgagaggacggccatggcgaggacgatcaggaggctgatggcgcgggagctggggccgcaggcgccgagggagagggctcgcctcctgatgcggcaagcgaggcactgtgtggaggaaggagggccggctagttcggcactcgatgatcttgtggagtacatgtggggtctttgaggttttccagctttgggcatggtttgatggtttgggtgtaataaacgactgaatggtatgttgatgctgttcagctttgagcatggggataggatgctctgaataatgagctgcatgtcgtgttatgtttatctactatgtaataaag

SEQ ID NO: 42814 - DNA, 2232 bp, Setaria italica
  misc_feature (2205)..(2205): n is a, c, g, or t
  misc_feature (2216)..(2216): n is a, c, g, or t
  Peptide Sequence Number=SeqID_108788
gtctcgcctcactccccatctccaaaaccccactacgccaaagaggggagaggggaggggcgcgccagcgccatcgatcgatgtctggctccggcgatcgccgcggcggcgggcctcccggctccgacgctggctgggaaacgatagggaagaagtcgaagaaaccagggcaagcagctgggaaacagtgggcaccgtggggttccacaaatgctgcacctaacacaacaaggccagcatggggtggcaatggttcctcacaaccttctggaaccagctgggctcaatcttcagaccgcagtgctgctaacagaggcaatcctaggctgccaccacaaacaagggcaatggaaagagaactgcaagcaccgcgccctattgtgactccacctctggcaaatggttggcagtggcaatccaggtctcgcccatctgcttctgaaggtcagcaggatgatgctcctccacctggtggtgaccctgaggaggagaatgtcgatggtaatgatacatcagatgatgatgatgatttgagtgatgatatcagtgatgagtatgattctgatgcaagtgagaaaagttttgagactcgaaaaatgaacaagtggttcaaaagtttctttgaagtcttggacacattaagtgtggaacagataaatgaacagactaggcaatggcattgtccagcatgcaaaaatggacctggggcaattgactggtacaaagggctgcaacctttgatgactcatgctagaacaaagggttctacaagagttaagcttcacagagaattggctgcattgctggaagaggagctatctcgcaggggtacttcggtggtaccagctggtgaacagttcgggaaatggaaaggactgcgagaaagcactgatcgtgagattgtgtggccaccaatggttattgttatgaacaccttattggaaaaggacgacgatgataagtggaagggcatggggaaccaagagctccttgattattttggtgaatatgcagcgactaaagcacgccatgcctatggtccagctgggcaccgtgggatgagtgtgttaatatttgaaagctcagctgttggctatatggaggcggaacgtctgcataggcattttattactcaaggtacagacagaaatacatggcagctccgcagagttccgttcttacctggtggtaaaaggcagctatatggtttcttggcaaacaaagaggatatggagacgttcaacaaacattgccaagggaaaagccgtctgaagtatgagatgagatctcacaatgagatggtggtaatcccaatgaaacagatgagtgaagacaaccaacagctgaactatctgaagaacaaggtggttaagactgagcaacgctctaaagcagtggaagaaaccttgggtgttgttaccgagaggcttcgtgagactatgaaagatatgaaaattgtcaaggataaagtccaacagaagcacatggagcatgagcaagagatgaagtaccaggaggattttttccatagtcaaattgagagtattcacaagatcacagaggctaaagaaaaggagtttgagaagttgctgcaggaggagcgctcgaaggctaggcgctttgatgtggattctggaactaccgaagatcgcaggctaaggaaggaacatgtgcagaagttcatcgacggccaggtgaaggatgtggcggagtttgaggccgagcgggacgagctgatcaaagcccacgaggagacgaagatgaagctcaagaaagagtacatggagaaggaggttgagctggagaaggagctggacgctgccctgacaagcctgatggagaagcacaagccggacaccttccaggcctccagctcgtgaagagcaagctccctcagcttacctttgggttccccgctcagaaccaatctcgtagatgttgatgctcggtatgcataaacgaatgcgtagacattccctagacgttcggtagatgatgctaaaacatggtccatgtggtggccgcgtacgtgatctggagacttgaacctgtgaacgcttgatatggtcgccgtagaatctctatcgtagtgagcgcccccagcataaagactctgggcttcgctgggatggcaagcgtggaacgcctgaaatatgatatctagtttatgctcaatgatcctgcgcttttgctttttaaaaaaanaaaaaactagngacacgacaacgaggg

SEQ ID NO: 42815 - DNA, 276 bp, Setaria italica
  Peptide Sequence Number=SeqID_108789
taaaccattgatagaagacccgcgccatttgaacatgattgttttataaaacgagcacaaagcttgtcctacggggaaaaattgtaccccagaagtaattaagtatatttgtacacaaatttgttaaagcagcgcgtctgacgctgacctggaggtcaagaacgttgaggcggccaaagctatcgaagtcaacatatccatcagaatctcttaacgcctggtcaccaccgctacagaaggccttagttcccttccctgttagaatgatgaccccaa

SEQ ID NO: 42816 - DNA, 1323 bp, Setaria italica
  Peptide Sequence Number=SeqID_108790
cagatgaattacattctcacgtatgcaaatgggttgacgaagtctttcaaaaagaggttgacaaagaatgggcatcatccgttgcctcctcgagtgcagtaaatggtaattgatctacggtatgcaccgcctggcaattattcgggactgtagattaatagcttttatgtagtagtaaataatttattagacgcatcaaagtgaagcttcaaggtttccgtgggaacttggagaaatctgggcgtcgtctctccatgtacgcattcttcccttcctttgcctcttcggtgccgtagaatatcagcgtggcattaccaccaagctcctgtagacctgcatggccgtcatcagctgcgttaagtgcagatttcagaactcggatggccatggggctgtttcttaagatctgccggcaccatttcacagtttctcgctccaattcagcaagcggcactacggtgtttacaagtcccattttgtcagcttcatcagcagtgtagaaccgtgacagaaaccacatctcacgtgctctctttggtccaaccaaccgggacattatggaagatccatacccagcatcaaagcttccaaccttgggccctgtctgcccaaatattgcgttgtctgctgcaattgtcatgtcacagaccatatgcaaaacatgtccaccaccaacagcataaccagcaaccatagcaataacaggcttgggaagacggcggatttgcacctggaggtcaagaacgttgaggcggccaaagctatcgaagtcaacatatccatcagaatctcttaacgcctggtcaccaccgctacagaaggccttagttcccttccctgttagaatgatgaccccaatcgaactatcatctctggcatcgttgaacgcgcgcataagctccttcacggtcaatggacggaatgcatttcttctatcaggccggtttatggtgatcttggcgatgccctctccgacggccttctcgtagatgatgtcaacgaactccttccccgactcgtccgtcgccgcgcgccactccgggggctccgacggcacgtcgccgtgcacgcgccggtagctgtcccccgcgggcgacgacgatgacgatgaggaggatgcagtgggggaaggcacgaggggtggcgtggtggcgtgggtcaccgggaacgacggcacgaggtggccagcgacgcgggcgagcctcctctccgccgcgtccatggcgagagcttagctcgggtgtgcgtgcgtggcgcgcgtggtgtggtcggttcgaaagtcttattcgttaagtttcttaacttatttatttccttattctt

SEQ ID NO: 42817 - DNA, 340 bp, Setaria italica
  Peptide Sequence Number=SeqID_108791
agacaaagcacaagagcactcgtgcaaacctcagctcaaaagaatacccagccaaggatcctgaatccctgtgctagatgcccaaaacacctgacctgactaattctgtacacagttgccgcaaaagacaggaacatgcccctcccagatgagatgacctaaccaagtcctagccaacctgcactctggtcttcacttgtggcctggtagcccagcatgcaatgctgcatgtattgccagtgaacagaatggctgcacatactctttggcagctgtgacagaccaaccacagatattgtcacatctgaacgtgtgctatttcaccttgccgtagacatca

SEQ ID NO: 42818 - DNA, 382 bp, Setaria italica
  Peptide Sequence Number=SeqID_108792
aaaccttttagtcaaaagaaattggcatggagatcaaatatgtttatgtagttgtaacgaaaccacacatcttttttgtagaatgcaatgtgctaagtttatctggctaatagttcacgtagctcttgggttatgacttccaggctagtgtctaagatacgtttaagacgtggttaatggttttgggagtaatctcaggaaacaaaatattggttatatacaagggagataagttttggttcacttctacagagggaggagacgacacacagaatatgtcaggcaagcttactcttggagatggcagcaatagatactaacaccaactttggatggaggtttagcattagattaaatttatgatatgaatgaacattgttgc

SEQ ID NO: 42819 - DNA, 597 bp, Setaria italica
  Peptide Sequence Number=SeqID_108793
tatcaaagcagatttttaaggctttcatttaccttaaccttctccatgaagaactctggtgcaatcacctttctttgatgttcccagagttcaccatttgaagtcaatattcccataccaagaagagctccacgctctttttgcaagaaggaaggctttccaagatccaaagacttgcaattggctagctccttcaccatgtcaggatctgttatattcagagcttgtatgctcccagttgaatacaagtagatggatccataaattctgctccaatgaaggaagtaggggaatatggtggctgtataatccgaggagaacttatcagtattctttgcttccagttcttggacaggcacggccagttccttctgaattctcctcatctctgcaatgtttccaaagaggaaagaaggcttggggcccttcactccctggctcctcagtttctgcctgagtctctccggtctcagccataggatggtgtagaggtaggagaggagaagacagagcaacaccagaggtggcagtatcagccattggtgtgacgagaagacaagttccatgtttgtgtgagaaagggaagccttagactac

SEQ ID NO: 42820 - DNA, 645 bp, Setaria italica
  Peptide Sequence Number=SeqID_108794
tttacgcaattgtcacttatgtataccattgtaacaagtaactaaattgacgttccaacaattatcccctaagatgtacagactagcctttgcactaaattctattatacagtatacagtgtacactgacacgagtcatggtttaatatagcttcttaagaatcaaaggcacgccattcccaggctcaatggtcagtctgaacgctgggcaatgcacgtactttggcgaaagagcaaactcgaaccttgacagcaggagtgacaggataaccttgagctcaaccatggccaggttctggccagcgcaggtgcgggtaccgacaccaaagggcatgtacatatgagggggcttgcaggcgcctgctatgccattggcaaacctgcccggatcaaacctgtccgagttgggaccccatatggcaggatcccggtgaaccaatgctattgggatcctgatgtttgttccttccggaatgttgaggctaccaagctttatatcgttcagagcttctcgtgtcacgaaagctgccggtgggtagaggcgaagggtttcctggaccaccattgttagcattttcaacttccgaagcatgtcaaattctatcggtttcccttgacagacatccaatagctcagtccgagcac

SEQ ID NO: 42821 - DNA, 480 bp, Setaria italica
  Peptide Sequence Number=SeqID_108795
ctcagttgcaatggaagtgcttagctcatgccaccaatttgaaaaattgagggactaagcaaacagagtaatgcaaggtagtcattcgcaaatgctaattacaaccttccagagctaatttgcagcataattaacttgctctgaatattaccatctgcatttcaaaattcaatgtttgagtttctaatatgagcgctagagcagcatttgtgcggtgagcatgagcagtaagcagacaaatactaagcctttcagatatgaaactgttacaaaagatcgatttcttcaacataccttgctccgggaacaccaagtatgctttgctttgccattgcaatctgaagttgccgaatcttgttgaatatctctttacctgcagcaaaattgcttccaaatgaagtcctcgatatgacatcagctgaaaagtttctcaaggactcatccaccacaatctctgcacttgtccccctttccctttct

SEQ ID NO: 42822 - DNA, 1623 bp, Setaria italica
  Peptide Sequence Number=SeqID_108796
gaacttatcgttcctctacttcaaggaacaggcaaaggctttggtatatatttttctaaccttagaagtaaccgctcatagtactatataggctgctacaagagatgtgttccaaacaattcctacagcaattctcgcatgagggaaatgctatgccctcatgcaccattaagatgtaagcgactttgcttgagataaaccaaatttaaaaaagtgcagcccatgtatttttcaatatatatttaattcctcagttgcaatggaagtgcttagctcatgccaccaatttgaaaaattgagggactaagcaaacagagtaatgcaaggtagtcattcgcaaatgctaattacaaccttccagagctaatttgcagcataattaacttgctctgaatattaccatctgcatttcaaaattcaatgtttgagtttctaatatgagcgctagagcagcatttgtgcggtgagcatgagcagtaagcagacaaatactaagcctttcagatatgaaactgttacaaaagatcgatttcttcaacctggaccattgttagcattttcaacttccgaagcatgtcaaattctatcggtttcccttgacagacatccaatagctcagtccgagcacgggactgccattcagggtgcgacgcaagaagcatcaagcaccaagcagctgtcgttgaggttgtttcatgccctgcaaaatagatgttcttgcagttgtcgatgatgaaaccctcaggcgtctgtgaagcgaagtggcgggctttagcaccctcaattatagagtgcaggagatccttatcagtcgataaggcgactgaatcctgctcgtgcttcattgctacgtttaaaatgaggcgacgaatgctgcggtctagactccagatttctctattggattttgttggcaagtatcttgctccgggaacaccaagtatgctttgctttgccattgcaatctgaagttgccgaatcttgttgaatatctctttacctgcagcaaaattgcttccaaatgaagtcctcgatatgacatcagctgaaaagtttctcaaggactcatccaccacaatctctgcactgcccccttcccttccaaatattttttcccatgaagtcaacattggcattgcagcttcgaccatgacgtgcaacatgcccttaaccttctccatgaagaactctggtgcaatcacctttctttgatgttcccagagttcaccatttgaagtcaatattcccataccaagaagagctccacgctctttttgcaagaaggaaggctttccaagatccaaagacttgcaattggctagctccttcaccatgtcaggatctgttaatattcagagcttgtatgctcccagttgaatacaagtagatggatcctgacatagtatgaaacatatatttctcaccaagtcgtatccaattgaattgtgcagtcaatattaacttcacagtaatgcactagtttagtagctcaaaagtggataaattcatacatgtgagagcctgattgacgtggaaaaacaaatactagactcacaaaagtgcacctgaacaaacattagagtccaggagacaccgtgaaggcgtgaactatgtatcaacaat

SEQ ID NO: 42823 - DNA, 707 bp, Setaria italica
  Peptide Sequence Number=SeqID_108797
cgcacctgcgatcatcgttttccgatctcgtgcccctataaaatatgttatgatgccgattagcccaacagatcgatccgccgccagcaagaagaagaagaggagcagcccgccgaggaggacagaagcgccgttcggttgtgttcggtattgccagatcgggagcgcgtcggcggcgatggcatcgaacgaggcaatgtggggctcgacgagctcgggcggcgccgcggggccgtgcgcgttcccgacggtgccgaggctgctgcggtcgcacgtgtgtgactggatcgcgctgttcctcctggtcgccgtcgacggggcgctcaacctcgtcgagtcgttccaccgcttcgtgggggccggcatgatggccgacctcagataccccatgaagaccaacaccgtccccgtctgggccgtgccgctcattgccgtcattgggcccgtggtcatcttcctaatggtctacataaggcggaggaacgtgtacgatctgcaccatgcgattctaggtatcctatttgccgtggtgataaccggagtcctgaccgatgcgatcaaggacgccgtcggccggccgcgcccaaacttcttctggcgctgcttccccgatggaaaagcggtgtacgacaacgtcaccacaggagtgatatgccacggcgatccaagcgcgatcaaggaagggcacaagagtttcccgagtggcc

SEQ ID NO: 42824 - DNA, 469 bp, Setaria italica
  Peptide Sequence Number=SeqID_108798
atagtcctcaagctgacgtgctgcaacttgaaacagatcaaaattatccttcacaccatccttccgaagaaggttctccgcaaggtgccgagtgcaccaacgatgatgcaaaggtgcataaccctctatctgttcttgcacagcatgaagtatgccttgatgcctatcggatatgacgccaacatccctaccaggaccaaccacatgtatccggactagtcttaagaactacccccaactatcattgttctccctctcaaccaatgcaaatgccaaagcaaccaacatattgttcgcgtcacaagatatggctataagaagtgtgcctctatatttgccaatcaaaaacataccatcaatagagaaaacaggacgacagtgcctaaaggcttccacagactgagggaagcaccagaacgcacgcccgaatatctgcctcccgtccttccaagcatttggctttgggata

SEQ ID NO: 42825 - DNA, 373 bp, Setaria italica
  Peptide Sequence Number=SeqID_108799
ttcgacgctatttgttgtgtgtacaggtcctggtagctctggaccttgctttgtacatcttttgggatcatgtccaagagatatttggttgttccaaaaggagctgggcttcttgatgctggaggagcagaatggaaggcctcagaagctcttttgctctcattgagaaattcttctgatgcctgtagagcagctattgccatctcttgggctttatcagtttctccctcatcaagaattaatccatggaaatagtaagcagcagcttttgcttcaacatatttccactttacaaatagagaatgctttttccccatccatctgacaaaggaagctctgggatgctatccttaacctgtttccagcatttgat

SEQ ID NO: 42826 - DNA, 922 bp, Setaria italica
  Peptide Sequence Number=SeqID_108800
aaggactataagggactccattaaactctttgtgtcttgtacatatgtagttcaaactgaaaaggctatggatttttatccagccactcttttgctgaaaacaaatatcgcagaagtgcgcaaaaggaaatctaccctgtaatttaattaagcaccaaaatgatggaaggcatatgtgttatcttaaggaaagatcttatgactaatgttcttgaggttacaattgggcccttgctggaaacaaattatttgaattggtcacaggtagtaagagcaatttcctcgttagtactagtcttctgcaaagctccagaattttgttgtttgtcagcaggccttcagttctgttcttgtcagaagaagctttcttacaggcctgaggttggcaatgaactttatagatggttagcccccttccacaacatatctgattggggaagctcataatcttcagggcttagagccaatggaaaatctggcaatggaggtggtgttgcgatgatcttgctgactcctatgttcgacgctatttgttgtgtgtacaggtcctggtagctctggaccttgctttgtacatcttttgggatcatgtccaagagatatttggttgttccaaaaggagctgggcttcttgatgctggaggagcagaatggaaggccctcagaagctcttttgctctcattgagaaattcttctgatgcctgtagagcagctattgccatctcttgggctttatcagtttctccctcatcaagaattaatccatggaaatagtaagcagcagcctaggcagaaataaaagggaagaaaataagaacgaaatcatgtagatttgtatagatgataaagttgaagataatttcatagtggagaaattattctgtgctgctcagaacattaatacaggttgctaatcatcag

SEQ ID NO: 42827 - DNA, 347 bp, Setaria italica
  Peptide Sequence Number=SeqID_108801
gtggtcatgttgcatttaaagaaaccacatgttttttcaatatttgttgccgtttctgaagattggttgagtctcttaccaaaatcttgagatcattttgatcatttggtcaacaatgcaggactactaacactggttaaccaggatgatgacatatgtgcccttgaggtatttccttatttttttcagtctcatatatatctcgtatttatttaggagttcttaaattgtctgtccagtttcttctgttctgctattaagagtagtatccaagatgagaacttcatttgataatcatgatcaatcttaacatgcttaacatttaatagttcactccatcttcataa

SEQ ID NO: 42828 - DNA, 712 bp, Setaria italica
  Peptide Sequence Number=SeqID_108802
cgcaatgtacccatatgaaccagcaacagcagacattgttctggaattggaaatgtcaataagtttggccaggccaaagtcccccacatgagcctccatcatcgcatcaagcagaatgttattagatttgatatcacggtgaatcacctgcggcttgcaatcgctgtgaagataccgcaggccttcagcagccccaagagcgatccggtaccgggtgtcccagtccaggagataggcatccttgctgccatgaagcaactctccaaggctaccattctccatgtactcatacaggataagattggagtcctggtgagagcagaagccatacagcttgacaatgttgcggtgcctgacatttccaagcgttgttatctcagctcggaagcttctgtcgatgttggaaccttctccttgagacttcagcctcttcacagcgattttccggccatcaggcatgacagccttgtagactgtaccacaggcacctcttccaatcacagcactctctgaaaagtcctcggttgctttcataagctcctggtaagtcacccgttccttcatgcagtagtgaggaccggagaagcccgtcttgcgctcatcacttgatacaagctccggtatcttggctctaaaggcccagcaaacaactgcgattagcaccagtgaaaccaaagcaatgacaatggaggcaatgctgataatcttctcc

SEQ ID NO: 42829 - DNA, 658 bp, Setaria italica
  Peptide Sequence Number=SeqID_108803
catccagtaagtttatccagctctcgcaggttttaaatatgggtgcaacagcatactttgttattggatcagcttcaactttttcttcctggaactcttcctcctccgctgcagtgacttcacgcacttgagcagccatgaatttaggctattcaaatatgctctgtgggatgatatccatttttggaagttcgaacataatgtgcttagctcaacctggagaagtagagtggcttgtaactgtgattctgaccgaattgagatcttcatactgccactgttgcatactagcttaataatctcatgctgattccagtgacactcaagcattgttttccacatgcgagttaagcttccaatcaattcttctagctgtggctgaagctctttgtcccttagatcctcgatgttcttcgaaatcatgtctattctctgaatggccactaaaattctggagtgcaaatccttcacaacagcacgggttttgtcaatactcatttggctttctcctcttgattcctggtgtctaagttgcctacatttctcatcatattgcctgcaaattgcactgcttgccttgacttcgtcgtaaagctttctctcccatgcatacaacctgtccagtgtggacgcatgactgccagcattcatgtatacg

SEQ ID NO: 42830 - DNA, 843 bp, Setaria italica
  Peptide Sequence Number=SeqID_108804
taataaggtaaaaagtaaatttaatagacctaattaatttaaacaaacaatgtacacccggacgatttaatcatccatctctaaatgactagttatgttctgttccagaaattagagccactgttctgactgcatcgaatctacttccacttctcataattcgtctttgcctcatcaatttcctctttcagatccttatacttctgcaacgaaacctctgaaaagttttcaagcttccctaggaacatctccaaacttgattgtaaatccataggggggtcactcctgtggatgtcccccaactcgccatttaaccttccactatgtgataatgagaaggtcagcttcgagctaccacgccgtttctcttggtgtggcatagaacggtttatatctgtggcaagacctttaatagcatcctccaagtccttggttggtaagtcatccagtaagtttatccagctctcgcaggttttaaatatgggtgcaacagcatactttgttattggatcagcttcaacttttttcttcctggaactcttcctcctccgctgcagtgacttcacgcacttgagcagccatgaatttaggctattcaaatatgctctgtgggatgatatccatttttggaagttcgaacataatgtgcttagctcaacctggagaagtagagtggcttgtaactgtgattctgaccgaattgagatcttcctgccactgttgcataagaatacttacaataactagaccaactagttagacaataactaagacttaaataaatactacaatagactagaattaccaagtagaacaactacaaagacaattagtttaccaaca

SEQ ID NO: 42831 - DNA, 1103 bp, Setaria italica
  Peptide Sequence Number=SeqID_108805
tcaagataaagccaatagtaagtaaactagaacagatggcatgacaaaaacaatggcaacgagctcgagttttagctatggtaacaaataaaagggaaatttcatatcactatgtgcatgcatcccaacacatttctagtttccatctccatttgaagcaaaacttagatgcatgtgttacagaatagtagtgtgaatctactaagagagaaactaagttgccatttctcatcatattgcctgcaaattgcactgcttgccttgacttcgtcgtaaagctttctctcccatgcatacaacctgtccagtgtggacgcatgactgccagcattcatgtatacgccactaaagatatttccagtgagaccatcagtgtcatcttttgttgttgtcccaagaggatttctagatgaagaagaaagtgaagacattgatctatgccaggtaaggtacttcacttcagcctgaggaggaggttgaggaacagggacttcctccctgcaacacgcaaataactttgcaaaaaaacctgatgctgttgatccaggtgctttttcttctggtagtaaagggcggaaattgactttatctgcttcaagcatcctcggaacttcttttccagaatcagatgccttgataaataagatctcaatctccttcatgcatgagtttaaatccctcaccacattccttacatcacgaaaaggttcctttgatttcccattcataggaagagaagcagtcgaagttgaaatttctttcacagggctcgccacaggagtcccgtcactttcatacatgctaatgtccagtgccctcttgtcatcttttggtcttacagtctgagaatcaactcctgcgtcatctattggtttttcagcctgagaatcaactcttgtgccatctttggatctttcaggctgagaatcaagtctcatgttatcttttggtctttcagcctgagaatcaactcttgtgccatctttggatctttcagcttgagaatcaactatcatgccatcttttggtctttcagactgagaattaactcccatgccatctttggtcttgcggtctgagaatcatcgttcgaagttaactca

SEQ ID NO: 42832 - DNA, 506 bp, Setaria italica
  Peptide Sequence Number=SeqID_108806
attactaaccggtcgatacccaggcccattcctgatgcttttgacgaactctgccagcataagggatgttatcgcctttcccgtcttgaagattcagcaatagatccttccttttaggtaagaagagatacactattggtaagagaaagtgtggttgtcaaagcaatcatcggcaggttgctgatgtattccgaactagagcaaaggtggtttctgaaatccgcaagacaatggaatcatttggtttcattgaagttgaaactccagttttacaggtgtatactgaaagaattaggttctttttgttatcactatgcttgaatcgttagtactgtattttctgatcctttttttactaacattacacatcaaaatggtaaaaacagggagcagcaggtggtgctgaagctaggccttttataacctaccataactcacttcaaagagatctttacctgaggattgcaacagagctgcatttgaaaaggatgttggttggagggctt

SEQ ID NO: 42833 - DNA, 530 bp, Setaria italica
  Peptide Sequence Number=SeqID_108807
ttagttaaagtaattggaagaatttgttttgtgtggattgagttcctagtattaccacctgattgtaaattaaatttgaatagtgaaacgttaagcaacctgcttcacttagcagatagaataaaaaaacagctaaataacagactgcacaattaatcaacctgggcttctagagtccagggctatatctgattataggacttgatttcagtgtgtaatcctgataatattgatattgattcattgcttatcctcattttgttgtttacctgctgtccatattcttgacatgttggatatcactgtaggggaactatctgtttatatgaaaaattttgagatcctcacaaaatccttactgccactaccagacaagtatcatggtttaactgatgtggacaaacgttatcgtcaaaggtatgttgacatgattgcaaatcctgaggttgctgatgtattccgaactagagcaaaggtattggctacatggagtgctgaatttgcattctgaaacttgtgaactagatgag

SEQ ID NO: 42834 - DNA, 1685 bp, Setaria italica
  misc_feature (1648)..(1685): n is a, c, g, or t
  Peptide Sequence Number=SeqID_108808
actagggaactaattcagctttactgtgagaaagacagccttacggtcggaatacatcagcaactgaaggcatttattgatattggtgatatcttaggtgcaagtggatccataaagaagacagagaaaggggaactatctgtttatatgaaaaattttgagatcctcacaaaatccttactgccactaccagacaagtatcatggtttaactgatgtggacaaacgttatcgtcaaaggtatgttgacatgattgcaaatcctgaggttgctgatgtattccgaactagagcaaaggtggtttctgaaatccgcaagacaatggaatcatttggtttcattgaagttgaaactccagttttacagggagcagcaggtggtgctgaagctaggccttttataacctaccataactcacttcaaagagatctttacctgaggattgcaacagagctgcatttgaaaaggatgttggttggagggcttgagagggtctacgagattggaagaattttccggaatgaaggcatctctactcgtcataatcctgaatttaccactattgagatgtatgaagcatattcagactatgaaagcatgatgaatatggccgaagaaattgtcactcgatgtgctatggctactcatggcaagcttaaggttgattatcagggaactgaaatttctctcgaaagaccatggaggagggaaaccatgcattctcttgtcaaagaagcaactggaattgacttcaacaactttggccaagatgttgaatctgctaaaattgctgcaagaggactgccagggatcaaagtaggaagcagtgaaagtacttcactgcaatcctgttcatctgttggacatgttctcaatgaggtttttgagactttcgttgaatctactctagtacaaccaacatttgtgcttgattacccagttgagatatcaccattggcaaaaccacatcggagttatgctggccttactgagcgattcgaactttttatatgtggtcgtgagattggcaatgcattttctgagctcacagacccaattgatcagaggagccgttttgaaaatcaaataaaacagcacaatgctaaacgtgctgcaagtgctaaggtcaaatctactgaggatcaaggagatgaggatgattattcctatgaagtttgtttagatgaagacttcttaacttctttagaatatggaatgccaccagcatcaggaatgggcctgggtatcgaccggttagtaatgcttttgacgaactctgccagcataagggatgttatcgcctttcccgtcttgaagattcagcaatagatccttccttttaggtaagaagagatacactattggtaagagaaagtgtggttgtcaaagcaatcatcggcaggttcctttttgggcttgattttacatttgttaaccttttagctgatagatatggccattgattaatcgataaattgtgatgtactatggttgagtcccgacaatatttatagcaaaaacagctgatagatgtgtcaacacttgaatcaataatggattccacatatttcgtgggatgcaatcaatgtgattcaaaaccgcaggaaactctttactcacaatgcataataccttgaattatcattcnnnnnnnnnnnnnnnnnnnnnnnnnnnnnnnnnnnnnn

SEQ ID NO: 42835 - DNA, 392 bp, Setaria italica
  misc_feature (370)..(370): n is a, c, g, or t
  Peptide Sequence Number=SeqID_108809
taattcttatgaaataatactttgatgaagttaatatggatgatgcactacttggggtggtacattaatttgtcccttatttgacaagctaactgttgtatatcaataagtgttgcccttaaccttgatttgtagtgagtgatacgaatcatatggattctgtagttacctggaaggacacttacctaacatcctacacgagaggtccctctcaactagctctggtgtagcattgtagatgggctagtgtggaccactattgttagtggtgctaggccccatttcaggtagcttattggctgatgtgtacgtaattctatcaaacctaatttctccaacagatcttgtttgccttctgcggtggaaaacnggagatttctacagtgctgata

SEQ ID NO: 42836 - DNA, 1060 bp, Setaria italica
  Peptide Sequence Number=SeqID_108810
tgtctactagtactaacttccttgtagttttcagcttcattactttctgactttagtggagtaacagcaaggaacagcgtaaaagcaatagttccagacaaaattaggaccatgacggtatatggaattaatacaaggcctccagtgtttcctttgaggttgtttgtccaggtgctatcaccaaacaagatttccgccgcaaaaatgatatttgtaaatagcataagaagaaatgcaagagcggcacatatttcagcatacaaagatatcctgtagctgcccattattgatcttgatgaggaaacacgaaaaagggggataacagatgaaggaacggacatagcctggataactgggcaaataataagtaactgatataccccttcagaacctgcgacttttgcacagtagatagtaggaatcacagcgaagcccttaagtagcagatgatgcgcagaatgaggcagtttaacgccaaaaaagttctttaaaatcacatcactaccaacaatagatgtcaatgagatgatgtggctagaaaagagaaggatcactaacaacacaactggcgctgcaggactcacaaacatctggttcattaactctataccatcttgaaagctgctgagtactatgttagtggattcatctgccgccaagcttattagaatatagttcacaagaaaaaccccagtaaatatgaataatagagaaaacagatggtcatggaacagggaaccaagggtaggagctggagatcttctttgaatctgaaccactgatgaatgaacataaagttgtgtgctattacatttccgccaagaagtgccatcagtgagtaagcattctcaccactcaacttggggaacatcacattcatattgatggagacttttggttgactgactaacaaacctagaacgaaacaaagaagcgcaaagcctgcaaggcaagcattgaatgttccagccatcctcttgcccagatgggagacagtctactagtcgtaagtccctttaagttagtctagtatttgttatttgttcgtttctttagttta

SEQ ID NO: 42837 - DNA, 403 bp, Setaria italica
  misc_feature (22)..(22): n is a, c, g, or t
  Peptide Sequence Number=SeqID_108811
tgttgaatttgatacaatgcanccttttgcaaaacaaaaagcggcatgagtagtgaactactggtcagacaattccatcaacagggaacagcatacgctgttacacaatccggggctaagaataatgttgacagactactcacagcttgatcaaaagaactaatccaagagaagccaatgtacagttgagcacaattttgtcaaagaactaatcaaagctacacttctggaatgccacgctcatctcagtatcgccgcattgcacaatcacatatcaccgtcaaagcaagcccatatgaaaatggaaatgtgtagagcggctgaaacaaagaccaatgcccgaaaagctactgctgagtgtgggaagagcgaccagtggcagtaaaagatcacaagaagtgtg

SEQ ID NO: 42838 - DNA, 483 bp, Setaria italica
  Peptide Sequence Number=SeqID_108812
atggcaactccagtttgtccgcaactgaaccaaccttggacagaatacttgaagggaccaaaataagcgaaaggccaacttctggttttgctcgtggagctaatgatgactgcacatatggttgcaacttcagataaacaagatcacccacggaaaaacttcgctctgaatgattcttgtcagcttgcaacttcatacgatgctgagctctagaaagatgttgttggaccaactcagtcataacaaccttttcttgcagccattcacccaaagtaggaacagggcatgcagagagagtgtcaatgccaaaatgcttaggagagtacctatacagtaactcaaattgtgaaaaaccaagagctgaatgccaactggaattatattaaaatgttcagccaaataaatccagtccacccatttgccaggacaaacattcacaaaacatctcaagaaagtctccatgcaccgattaactcgttcagt

SEQ ID NO: 42839 - DNA, 403 bp, Setaria italica
  Peptide Sequence Number=SeqID_108813
gtctccacttcctccacagaagatcccattagaggataagaaaacttttagataattttccgctctcagttagcttattcagcatattctgtgcttcctctgatcggcctgcctcagatagtgcagataacacaacattgtaagcaaatgcatcaggctgcaaacctctgatctccatgtcagcaaagaaatgcaaagccatatcgacattgccatctttgcacaaagcttgaattaaagtgttataggtgatgacatcaaccttcttccctttctctacccatgacttgaaaagcttcaacgctttgtcaagcttgccatattgacaaagcccattcatcaaagtgttgcaggtaacaacatctggcttaaaagattttccaccatcttgttgtggaattgg

SEQ ID NO: 42840 - DNA, 1275 bp, Setaria italica
  Peptide Sequence Number=SeqID_108814
caaggacaccagagcatgttagaagaggaaaagaaaatcatccgacaattgtctgatcaaaaatttcaagtcatagtatcatgatgatttcacagaatttgcaagggatttaagaagagctggtgatggcctccttagagtgtgagtgagaaggatcatcagtgacaatagagtcaacgctccagcttgatgcgctgagcccaaggaagtaggaacatacatcaacagtgtagatatgcccaacgtaacctgaagagcagccattccaaatgtgctcccgatcagagacttgattgctggatgcatgtcaattttcctggcacccagccataatccacccacagacaataatgtggctgttgcaaggattcggtgattgagctgcacagtagatgtattctcaaaaaaattgcgtacgaaaggctccatgctaaacacatcttcaggaatccaggtgtcacccatctttgggaatgaattgtatgcatgccctgcatcattgcctgcaacaaatgctccagatatggctgtaatgcctacgacagcactgacaggaattgccaacttcctaatctttgctgcaccatttacccaactcattgaaccagacggaggatctggcatcactactgacaaagcagtccacaatataccacagtagatagcaaatgcagaggctagatgagttgccaacctgtaagggctaacccttggctgaacatactcagatgttggctcctcaaggccacttttcaccatccaccagccaatcagtccttgcccaccaccaagcgcaaaaagtgccgatagcctgagtccaagttggcggggtaacatacccttttgcaatgaagtatgcaaaaggacctgcaaatacaaagcccaaagctcttccccacattctgtgtccatattccatccagtatataaatttgaaatcctcaaggctcattcctttgttcaccctcttgtactcaggcgattgcttgtatttctcaaattccagcagccaagcctcatctgacattggaggtatttccccggtgaacttccagtcagtcattgacagaccagaacgtgtgagccgggttattcctccaagtatgaccaagctgaacacccaggcagcacagccaaaaagccatatcccaactgccttctgtgcttgaggcccttttgtaacaagcaacttcaatcctgaattcgctgctccattggccatcgtcgaattcaatgttgctgtgctagttgacatttttctgtgcattggcccag

SEQ ID NO: 42841 - DNA, 520 bp, Setaria italica
  Peptide Sequence Number=SeqID_108815
gttgttccaacccctttttgtgcttcgctttctctttgtatgctgtgcgctactgcaatggggaaaagtgtgctcataatctagttagttttgacatgtgaccatgtataacaaccctatgtgatttgtttgtcatgctgggagctaaacttcaatcgttaactcaccgtgaactagtttagagtttattgaagttcttcagttactacgattgatggcctaattcagctactctgttttgcattgctgttccaagcagtatgttaaagcatctctgtgaaactgtttgatacgctgtttgaatgttttcatttaatactattcatgaaagggaaaaaacatttggcaaaaacagattgcttattttggttacatgctatccaaggttttcttagtgttagtttgagatagatgcacctccgctacaagttttatgtttagtttctttcaatcaatattttgggggcactatttgtgtgcaggcaaacttgcattgtcatgatcaattggcaacctagct

SEQ ID NO: 42842 - DNA, 354 bp, Setaria italica
  Peptide Sequence Number=SeqID_108816
ctctccgcttgcttttctcgctgcgactaatttccttttctttctgaatttaccatcgtttcagtggtgaattttaccatcatttcagtagctagcaccatgcgctgcgatactactgaaccgaattaggagtagaaatgaatcaaattaaaccgtgagtttaactccaaatcgatgacattgctggagacaaggaatacataattactgatataactgcagatacgcgatacgtaattagtaaattatactaccttcgatgcttgccatgatcttggttccccttgttgcagaagggagaggcctccggtgacccctcagctcctcgcctcctttgctcttcttggcttcacg

SEQ ID NO: 42843 - DNA, 1354 bp, Setaria italica
  Peptide Sequence Number=SeqID_108817
caaggtacacaattgaataatgctaatacagctcaagtgctgcaagggatgcagcccatgggagtcatgggtactatggggatgagtcagatgagaccaaatggaactatcccctatggtgcccaacaacggtttgcccatgcacaaatgagacctcaagcatctcaacaagctgcactatctcctcagaaagtagctggtcaaggcttgtcgagaacagcgtcaattacagcattaaattcacaactgcctggatcatcgcaaaatggacagatggtggcaatgtccatgcctcagcaacagcaacagcagcagtggttgaagcaaatgcaatcatccatgagctcaccagtttctccacagcaacaatttcagcaccaacaaagactcatgttaatgcagcaacttcagcagaaaacgggattgagccaacagcaacttgcacaagtccaacagcagcatccacatctcaatgcccaacaactgattcagcagcaacattttctccagcagtttcagcagcagcagcagtcactacaatctccaagggtttcagcgtctggttcgcagaagtctgcgaaccatacaggatcacagccaggtacacctttgtccggtggaactatgactggtagaagtgcaagccagggagctgaaggaactagccaacttcttgggaaaaggaagatacaagatctggttgcacagatagatcccctaggcaggcttgaccctgaggtggaagatctacttttagaaatggctgatgacttcattgactcggtgactgcatttgcgtgcaccttagcaaaacataggaaatcatcggttgtggaagcaaaggatgtgttgctgcacttagaacaaaattggcatttgtctgttcctggattctcaagggaggataagaatcctcaaagaaactctgtaaagccatcagtagatccgcaacaaccagaaagtgatgctgctggtgttagaggcccaggcaataagcttattgctaataactcggttggcaaccatcaaataagacctccgattgcggagccttcagcaatgccaacaatgggacccctgtcgaaggctccccgcttttaggtgttaatgctgctctcccatcgaaggaaaatttcctgacaatctacatggaaacagccgtaggctctaacacaaggattgctagcaaatggaagcacaaataaatccacgagcatctgtggcaaaccacagatgcctgtgtacttacaggaaagcagttgctgactgaccgatcgtctccgacggaccctctacctgggtcgactgtgactttgttccttttcttttctttttgtgcctgtaaatgcccccg

SEQ ID NO: 42844 - DNA, 490 bp, Setaria italica
  Peptide Sequence Number=SeqID_108818
aggaaactcatgatattttatccagtacaaagcttccagaatcagtgaagttctacaatatttatgggacagattatgatactccgcatactgtctgctatggcactgaacaccatccggtttcaaaccttaataacctcttatatgctcagggaaaatatgtctatgttgacggtgatggatctgtcccagtagaatcagcaaaggtctgatacttttgttgttccagttcattatttgggaattctaaggaaagctactaagaaaattgagtggaatgttttttttctttttgcaggctgatgggcttaatgcagtggcaagggttggagttgctgctgaccatcgaggaatcgtctgcagccaccacgtgttccggattgtccagcactggctgcacgctggagaacctgatccattctacaaccccctgaacgactatgtcatactcccaacagcctatgagatcgagaagcatcatgagaaatgg

SEQ ID NO: 42845 - DNA, 605 bp, Setaria italica
  Peptide Sequence Number=SeqID_108819
aaacaccgcaggattccggtttggctccagcgtcggtgtcccccgattggctccaaaccttgcggccccgttcgcgcgatcggagctagctggtttggcgggaaggccctcgcctctcctgtcttctcttcagctggaggtagttgtgggggtcggtcggtgttcatcgtaggggggtggggcgtcagagttgtcggcgttttctttcgtttcagccaaggagttgagttgagtttccttggcgggagcagatttcttgccgccgcggcagatcgggactgctcctgttccatctatggaccaaatcgcttcagtttttgctctgatcctcccaaatcaggtcgctgcctttgcaacaatttactgaaattgctcatctgttcgtctggtgaagcaaatcgcaagctgatttcccgaatataatcttcagctcaccttgatctcgctgcaatttgcttgatttcgctgcaatttgctggaatcgctgggccattgctgctcagcttgatttgagacctgccgactgctgacggcgctttgtgggggctagttaccgctggtactgtttgggagctgaaattggatagacaaggcttggaaaagcg

SEQ ID NO: 42846 - DNA, 1058 bp, Setaria italica
  Peptide Sequence Number=SeqID_108820
aatttgaaatagctgctggatgtcttatctcctgtagtaatattttgatgatttacccatctgccatggaacgtttatcaactttgagctaatgaatgaaaatctcacctttatgttgtattgtaggagttatactaagcaggtattcagtattgccttgcctttgcaccacatgttgttgtgaatcatctctactaggctgctagcaaattttgcttgacaaaagcaaccttttcaggtgcccctgggtacataactactagtctgctgaatggaatgtcttttgtcgaaggatgggagtcaaaattctttatttccaagtggtgtatgcagcaattgctacttgagtgcccatcaatctatgagttgttggcaaaccctaacttccagtggaaagacaccccactgctacagatttggagagagaatttggataacgatggtaagaaaagtgccctgttagagtcatatgagcctgcagaagcaataaagatgattgaagaggctctttccaagaatgagatcattgctgacgggatgcatattccggtgccccttaatttggatatattgaagtgggcaaaggaaactcatgatattttatccagtacaaagcttccagaatcagtgaagttctacaatatttatgggacagattatgatactccgcatactgtctgctatggcactgaacaccatccggtttcaaaccttaataacctcttatatgctcagggaaaatatgtctatgttgacggtgatggatctgtcccagtagaatcagcaaaggctgatgggcttaatgcagtggcaagggttggagttgctgctgaccatcgaggaatcgtctgcagccaccacgtgttccggattgtccagcactggctgcacgctggagaacctgatccattctacaaccccctgaacgactatgtcatactcccaacagcctatgagatcgagaagcatcatgagaaatgcgggatctcacatcagtttcagaggactgggagatcatctccccgagcgacaaccaaaccttgaggccagctgaggtt

SEQ ID NO: 42847 - DNA, 2435 bp, Setaria italica
  Peptide Sequence Number=SeqID_108821
ctcacgccgcccacctccccattccggaagcgaataaaacaccgcaggattccggtttggctccagcgtcggtgtcccccgattggctccaaaccttgcggccccgttcgcgcgatcggagctagctggtttggcgggaaggccctcgcctctcctgtcttctcttcagctggaggtagttgtgggggtcggtcggtgttcatcgtaggggggtggggcgtcagagttgtcggcgttttcttttcgtttcagccaaggagttgagttgagtttccttggcgggagcagatttcttgccgccgcggcagatcgggactgctcctgttccatctatggaccaaatcgcttcagtttttgctctgatcctcccaaatcaggtcgccaccgacgaggccttcacgcccatcactcaccttgatctcgctgcaatttgcttgatttcgctgcaatttgctggaatcgctgggccattgctgctcagcttgatttgagacctgccgactgctgaatgcgctgtgtgccttggagtctcagctggtactgtttgggagctgaaattggatagacaaggcttggaaaagcgcaaccttttctggtgaccatgacgctactggaggagttgatccgggcgattgagctctggctgcggattgtgaaggagcaggtgcccttggtcgatccaacccttgacccggtgctacttgttcctggtatcgccggctccatcctagaagctgttgatgatgctgggaacaaggagagggtgtgggtgcgcatcctcgccgcggagcatgagttccgagagaagctctggtccaaatttgatgcctccactggtgaaactgtttctgtgaacgagaaaacaagaattattgtccctgaggatagatatggtttgtatgccattgacacattagacccggacatgatcatcggtgatgagactgtgtactactatcatgacatgatagtggaaatgattaaatggggatatcaagaaggaaaaactctctttggatttggttacgatttccgccaaagcaacaggctctcagaaacacttgacagattttccaaaaagctagagtcagtttacacggcatctggtgggaagaagataaatcttattactcactcaatggggggattgctcgtcaaatgtttcgtatctctgcacaacgatgtatttgaaaaatatgttaagagttggattgcaattgctgcaccattccaaggtgcccctgggtacataactactagtctgctgaatggaatgtcttttgtcgaaggatgggagtcaaaattctttatttccaagtggtgtatgcagcaattgctacttgagtgcccatcaatctatgagttgttggcaaaccctaacttccagtggaaagacaccccactgctacagatttggagagagaatttggataacgatggtaagaaaagtgccctgttagacgtcagtactagactagaaataggaaatgctttgttaacgtaaaaggtaaattgggtactggaagctttgtactggatacaatatttatgggacagattatgatactccgcatactgtctgctatggcactgaacaccatccggtttcaaaccttaataacctcttatatgctcagggaaaatatgtctatgttgacggtgatggatctgtcccagtagaatcagcaaaggctgatgggcttaatgcagtggcaagggttggagttgctgctgaccatcgaggaatcgtctgcagccaccacgtgttccggattgtccagcactggctgcacgctggagaacctgatccattctacaaccccctgaacgactatgtcatactcccaacagcctatgagatcgagaagcatcatgagaaatgcggggatctcacatcagtttcagaggactgggagatcatctccccgagcgacaaccaaaccttgaggccagctgaggttcctcctatggtcaacaccctaactgcaagctgggagggcgtggagggcacactggaagaggcgcaggcgacagtcatcattcacccacggaacaaagggcgccaacatgtggaagttagggctgttggagttagccatggtggctaagccagccatagggaacatgcaggttgcctagcagagctgaacctacagagcaacactgtaaaatagctgtacatatggcctctctaggaaatctgtgtttagaactatcaaatgcttgtgctgcttgtaaatggtaagaactgccaaactggggctctaatgatgaatcagaagggaaagagcaaagccgtgtttggattgcaatttcctcgcaaagaaataagagggtattgcaatttgcttatacgtgggggatggaaattgaattgcttacactttttagcttgtccgtaaaagggataaataaaggctttgttgttgtgatac

SEQ ID NO: 42848 - DNA, 471 bp, Setaria italica
  Peptide Sequence Number=SeqID_108822
tttttttttattctaggacatggtgaaactggatcaaaagaatagacgatgacaaactggcagcaacacaaaaaacagattaattatttcatcatgtcgtacaaacgatcgatactgatcatcccattatggtgagcaaagcaagttgagttagccggagttgcagaggcattggtcccccttgatgtagcctcccgggtggcctgccttccggcagcaggcgtcgcactccgggaaggtggagctcaacggcacagccatggagttgcactcaccgtcctgcacaactggaggagacggaaacgccgctcgccctgcatcggcagagaagcagaggaggttggcgacgatggccatggcgacgacgaggatcatcttgcagacggctgaatgagacttggccatatctctgacgccgctctagcttcgtatgctgatatcgtcgagtgtccttgagaccttgagtgaact

SEQ ID NO: 42849 - DNA, 1241 bp, Setaria italica
  Peptide Sequence Number=SeqID_108823
gccttggtctagttctctttttttaggtttttttgtttttttttagagaagaaagagagtcatccagatatcaaatattcaaaaatgatgtacatgacttgcttcactcgtcaatcttgtgacagaatcaaccacacaaaactcatcaatcttgtgactgaatcatccacacaacacactatagatggcgaatacaaatgcttgaaaagcccaccatctaccttttcatcaccatttgattcagaactataacatcttcagctgccgatgaaacgacacccacataatattgtggctgaagtcattgtccatggctgcttctcttcccaaatggcatggatgtcagtccctcttgtgttagcatgtgtacaaaaggcacgaacagcagcaacaaaatgtttctcctgctggtgtggccttggagcttgatggcagctcaagattgaacaactagagctcagcagcagctgatatctaggtgccactctaacatggtgtatacttatgagtgtgtcttcagtcaactcataacttcctggaagacaagagtgagctcctgtgctgcgtttgcaactgccccttttcttcttgtaagaaaaggaagcttattttttactttctccaattcaatgaagcataagttgcagcgctcccgcctttgctctgcctcaagatctacaccaacagaagaaggacctgctgatactgttgaatgtatcattggaccaaaggtcctgacaagcttcaccaacaattccaatgaaacgcctaagtgtctgtcagttttactctccagaaggtcagtgacaacaggcaggatagaggtacataaatctagtgtgattgtttcacttttctccatcagaacgcttgccatatcagcagatacagcatgatcacacatcttctccatcgcagagagaacacctctgatgtcgtttcttacccacatttgatgaataatctgcaattttgtcaggcgagaccgtgttgagcttagaaatagctcatgttgctccattagaagggatagaacatcctcatcgctagctatggttggagtttcagaagcttgattgcttcctctagatgaatatgaacggcctgtaggagccagcgaagaactgctcgttgttggttcttcatgactaggggattgatccctcccttcccaattagagagccctactttgtacctttgtttacttgaaacttcaacatagctagttatctcgtttacg

SEQ ID NO: 42850 - DNA, 1052 bp, Setaria italica
  Peptide Sequence Number=SeqID_108824
tttacaagtaaaaatactagaatgtagtgcctgtgattgttccaagaactagctcaggaggggagctagctactgattctagaagtgatgctgctgatgtggcacctgttctttctaaggcaaccagaagggttgatcctgctactgattctagaaaggaaagtactgatgtggaacctgttgttcctaaagcaagctcaagaatggaaatatcctctgattcagcacctgttgttatttccaagtcaagcagaaggctggagtctggtgctgattccaaaaaggaaagcgccgatgcagcatctgttgttgttcccagggaaaatacaaaaatggaaatggcctctgattctgcacctgttctttcaaaggcaagcagaaaggtagatcctggtacggattcaaagaaagaaagtgctgatgcggcacccgtcatccccagggcaagttcaagaacggaaatggcctctgatgctaggagagaaccttctgctggaagaatatcgccattcagaatccagtcaagatatgctgagctacgcaagttaacccatgcaaaagttgatgcaaacaaagttgatagcagaagtaaaaatactgaaacagatgacttcaattgccaaatatttttcccccggagaaatggtgtttttcaaacaataagttctgaagaaactcgtgaagatataaagcatggtgcagttgacaggatggcattttcgaatccagcagagttgaatgcaagtgtccgcggtgaaaattatgtttctagaatgcgtaaaccaagagataactgctatgttgaagtttcaagagcaggaagagcaaggtcaagtgtctctaattgggaagggagggatcaatcccctagtcatgaagaaccaacaacgagcagttcttcgctggctcctacaggccgttcatattcatctagaggaagcaatcaagcttctgaaactccaaccatagctagcgatgaggatgttctatcccttctaatggagcaacatgagctatttctaagctctaacacggtctcgcctgacaaaatt

SEQ ID NO: 42851 - DNA, 399 bp, Setaria italica
  Peptide Sequence Number=SeqID_108825
ggtcgtgacaggggagatatattcgcttacggaaagaaacaaaaagaagaagaatgagataaaagagaggctcaagcacgcacattccaaactccaccaggagttccggaatatctttgaaagcattggagcagatcatggtgagatctctgacgacaagaaaaatctggtatatgagatgaaggcctctgcgtggtaccaggtaacctatcacccatactggatccaatgctcaaggaagatgaccgagtttgatggtaaggaaatgccggcaaggctcagctttgcatggatcgctgtagactacttggcacacataaagatgaggtgccgaggagaagtggatgccagttcaaaggaccgcagcctacattttctgcgacgatacggtcagggccg

SEQ ID NO: 42852 - DNA, 272 bp, Setaria italica
  misc_feature (269)..(269): n is a, c, g, or t
  Peptide Sequence Number=SeqID_108826
gttgcagtgccgccgcagcagagcagcaagctacgagggatggcatcgatcatggccgccgccacctcccgcgtcctcgccgccaagacgctgttcctcggccagggccgcgccgccgccaatgccagccccctccgcgacgtcgccgcagccgccagcggccggatcaccatgagcaacgacctgtggtacggcccggaccgcgtcaagtacctgggccccttctccgcgcagactccctcctacctcaccggcgagtttcccccggngaa

SEQ ID NO: 42853 - DNA, 1858 bp, Setaria italica
  Peptide Sequence Number=SeqID_108827
cttatgaaggtctgcaacaaataaccgagattatgaggaggataggatgactgaccatcgtgtattatatagtaattaaacaataacaaccggctaaattataactagttatgcaagctagctgctgactgatcaataatgtctcttcaatcttcaccatgcaggatcaactcttgttcttcgctgatgatggcgattccaaccctggcctgacagacagtgtgggtagtttcacttgagcacgtacttcatgacgcccgggatgtggatcctgtagaagtagtcgtcccagtcgagggtcttggggtcgaagttgaacaccacgcggtcgccgtccgccatgcccagccgcagcctctcgacgttggcgtcgtcgaagacgccccggaagagcgagaagggcccgtagaggtccacgaggcgcatcacgaaggcgtacttgcggcccagctcggcgcagaggcggcccagcaggccgcagcagagcaggttcagcagccgcagcagctccagcggcagccggtaccggaccaccatgtacgccgtgaaggccgccaccgtggcgaagaagtggatccgccgggtgcgcacgggccgcccgtcggggcccgtccgagggtgcgcgttgaagtagcgcatccccgtccggtacagcaccgcgtacggcgccgggttccgcagggacgacgtcgcgtggtacaccgccggcggagtttgcggcggcggcggcggcgacgacgcgtgcgccgccgccgcggccatcatcgcgctctccaccatgtcaccggggatgacgtccatggtgaggtcgaggtcggcgaggaagcaggagaggttctgcttggcgtagccgatgatgatggcgtcgatggtcctggtcccttcgatccaccccggcagcgggtcccgctggatgctcgtgatgatgctgggccgcacgatcaccaccggcacgtcgccgtcgcccatcagccggcccagcgtcatctccccgagcgccttggtgaacacgtacgtgttgggccacccgaactcccgggccctggcgaggccgagctccttcatggccttcctctcgttcttctgctcggcgtcgtcggcggcgagctgccgctggtagtccctggcgagcttgagctcggcgtcgacgtccagccgcggctgcgcgccatcgtcatcgcgcagggtctcgccgtacttgaacggccgctcctggatcaacccctgcctctccccagccacgtaagcagtggagacatggaggatgacctccaggttggggcactgcctggccagctggcacatatgcttcacccccatcacattcacgtcaagggccacgtcatacctctcgtagaagttggtggtggcagctccattgacgatgacgttgatctcccgggtcatctcgctgagctgggctccctccacgccgaagttctcgtggatgatgtcgccggccagcgccaccaccttctcctcgatgaaggcttggaaccccttgccgtgcgtctcccgcagaagcccaaacagctccttcccgatcacctcagtctcaacccgtttcttggccgatgccgcatccggcgctcgcaccgggaggtagatcctcttgacgtccggctggaccctcagtatcttctccaccagtatctttccaaggaagcctgttgagccggtgatgaggatgcccttgttcttgaagtaccctgggatccctgttgcttcctccattgttccaaccatcttcctatctacccgtgtgccgtgtgcttctgtgtttgtctagagagagagagagagagagcaggagggagagaggtaagagttctttggcgctagagaagggttatgtgtg

SEQ ID NO: 42854 - DNA, 906 bp, Setaria italica
  Peptide Sequence Number=SeqID_108828
tactccaagggttttgtttgtaaacgaacagagcatttctgtacacccgaacagcatgttgtttctgatcagacatgtagtagctattcccagctaagattaggtgaaatccgtacttccgaagcataggtggacttgataatagatagcaagaagcggcttgctcaagcagtacagcagaatgcaaagaaggttcctcattagaaacacggaaatacacacttgatgcctccctatattgtcctcttgttttaagcatttctgcccaccaaaggccacatctagtggcattcctctgcccggacgatccaattctcagatatgtactgaaggcattttccatgcaatattcggcgtccttccttgactgatccaacatgaaatagcagagtccactcatctcctgcacaccagcaaatcgcttccaagccttatcgagcttataatctgtagcaagtaatttgtaatttgacaaagcaagctcgtagtctcgtaacatgaaggcgaaatcacccagaactctgatctgtgattctatggaggtgaacgtatacattggcccatttggagcttctgggacatcatctctctttctccaccacaagttcttgatctgattcctaaaaccctttcttgttgtggctacctgctgattgaggacacgtatcttttgctccatgtaggggatgatatgattagaagcaaaatcttgcatgaagtcctttatctcattcaaatcatccatgctaagcaaacaggttccttcacgattgttcaaaccaagagctttataaggtagccatgagttgtcagtattactaccatctgcttctgtagatgaatttatacataataatttacagtcgttcaaaccaagggtgctcctcatttcagctaagacattca

SEQ ID NO: 42855 - DNA, 416 bp, Setaria italica
  Peptide Sequence Number=SeqID_108829
taaacgttgaagcaggcatagacgcacggcgaaattaaaagcaggcaagacttagtgaatggctgcaatcatgtcctttcacccaaaaaacggatgtttatctaggaggcaaaagacagagagagcatttgatggaagtgaccaggtgagaagtaaaatgtggcaacagctttctatctctatcagacttatcatgccaagagattgattcacaacagtatgataatacatttcatgcaatagtagggaataatgtacatgcttgaaggattgcacagaaacacatatgtctctggtgacagatgcatctacttctttttacggaaacagcagaggacctttatctacaaagagggggtggaggtggggggtagggagtatagatggccaaaagatgtgttatccatcttttggcc

SEQ ID NO: 42856 - DNA, 586 bp, Setaria italica
  misc_feature (553)..(586): n is a, c, g, or t
  Peptide Sequence Number=SeqID_108830
cacaacagcgtaaggtgttgacagggcgaagcggaagtcgagcaaggcgcgagtgagttctagagtagctagcaagcacacactagcttgcgcgcaccgaggatcaggatgtcgggagcgcagggcgcgcacccggtcggccggacgacgccgacgacgtacgagtcggtgggcggcggggagaaccgcacgcgcacggacctgcggtcgcgggaggaccagggcgccatccagatcgagaaggtgcaggacaaggtcgacgacgccgcggggcgtggagtggatcaagggaccttcggcgccaagaaggagggccgcaacgccgacgccgacgccggggccacgggcaccggcaccggcgcgtgaccggggtgccatggatcgtgcactttgctgtacaacggtgtgtgcgcgcgcgcacgcgcgcgatagctgtacgcttgctctgtttacgagggtgtgaggcctttctgtgtaatatgcaaccagtgcttgtgcaagatggcaataactgatataacatgttagtggaaagtctggtttgagctaactnnnnnnnnnnnnnnnnnnnnnnnnnnnnnnnnnn

SEQ ID NO: 42857 - DNA, 625 bp, Setaria italica
  Peptide Sequence Number=SeqID_108831
accaattgttacacttggtggaattgacttgaataacactgcaagtatgattgtcaaagaagaaaggaaaactataacagtggtctttcctgatggtcgtgatggacgcactttcacccttaaggcagaaactacagaagacctaaatgagtggagaagtgcattagagaatgctctggctcaggcacccagtgttgcgaatacagctgggcagcatccagtaaccaccactgacataacagaacctgctgaagctgctgttgaacaatcggaagataaatctgtgattggtagacccgcagaatttgcacttgttgatgctgatggcactacagcattcctggagaaagccttaaagttcattgaagattatggtgtcaaggttgaaggaatcctccgtcagtctgctgatgttgaagaagtcaaacgcaggattcgggattacgaaaagggaagaatgagttctccccagaagaggatgcacatgttatcggtgactgtattaagtacattcttcgagagatgccatcttctccagtccctgcatcatgttgcacttccctggttagagcttaccgaactgacaagacaagaagacttgatgctatgaatagagtgatatatg

SEQ ID NO: 42858 - DNA, 459 bp, Setaria italica
  Peptide Sequence Number=SeqID_108832
ctccaggcattgagtagcactcatggtcaaaatcacggataccagagaagaagagatatctgtgctgtcagtgtttgcttctttgccattacatcttttgctttcaattatgggtctcattatgctaatccttcagtgacaagaaatgtagcaaaagtcaagagtatgcagcagagtatagtttgcctattctgaaaaatgttcttccaaagacaaagggattcaatagctgtttgcaagagccgaggagttccatagatgctgtttatgatatcacaattgcatataagcatcggctaccgacttttctttacaatgtttatggcattgatccttccaaaatccacaccatatcaacaacattcaagtctcttgacataccaacaatggaagggaagtggctggctggctgatcgaacagttcggactgaaggacgagctcctatccagttcacgggc

SEQ ID NO: 42859 - DNA, 318 bp, Setaria italica
  misc_feature (286)..(286): n is a, c, g, or t
  Peptide Sequence Number=SeqID_108833
gtcggtcagggcttcggtcgccgctggggcgggcggcccgggagcggcggcggtgggggaggtggcaacggagcagctggtggaggtggcgcagcgggcggcggacgcggcgggggaggtgctcaggaagtacttccgccagcgggtcgagatcatcgataaggaggacaatagtcctgttacaattgcagatagagaagcggaagaagcaatggtgtcagttatactgaagagcttccctacacatgccatttttggtgaggagaatggttggagatgcgtgganaattctgctgattatgtttgggttttgaccct

SEQ ID NO: 42860 - DNA, 327 bp, Setaria italica
  Peptide Sequence Number=SeqID_108834
tagggtctattggaggggtcgtgccctactgctggcagcggcgggcccctgctgttcttggagcggtaagtgcctggctggagccctcgaggagcgagctcgctagcagcaacaggatttggcagcgacccggtggctccatcagcgagcttcggctccaggactccgcccagaactggatcgacctctaggactccaggtcctgccatcctgcaggtgctggtgcctaatttgtgctatgctctgttcgattagtgctctgttcatgctaccctatgcagctgctggaacaatggtatgattctgtgttctctgatctgtacaatt

SEQ ID NO: 42861 - DNA, 335 bp, Setaria italica
  Peptide Sequence Number=SeqID_108835
tagttacgaccaccgcttcctgatctccccctcctcgccggtgagcacgccgaacccggcgagcttcacgaacgtcgaggcgaaggccccgaagaagccctccctgtcgtgcgcgaaccaccgcacgtgccccgccgtgtaggtgtcgacggtgaagagcccgcggcccaccgtcgcgcctcggaagtagtgcgtgtagaacaatgtcggcatcaggtcgctggggacgaccagaaccttcatgaccagcggcgacacgatcttcttcgggcatagcaggtgcaacgtggcttcatagcccttgtcgcggcactcctggctggtgtaccacattg

SEQ ID NO: 42862 - DNA, 711 bp, Setaria italica
  Peptide Sequence Number=SeqID_108836
ccggtgcatgcaagatgtatttaaaaaggagagaagtaaatgtcgagactatcgaacttgggaaagccatggtcccaacttttatcagcatagtcaaagagatgaccgatactgggatgcagaagcattttatgccaatcaaaggacaaatttcagatcaatgcccagggaaactatgagttacgccatgtcacggcactattctattttgggtcttgacaggtcaagatcagagccattttcagatgctgaaatcaagaatgctttcaggagaaaagcaatggagtatcatccagaccaaaaccaaaataacaaagaggttgctgaggcaaaattcaaagaggttatggattcttatgaagcaataaaatcagaacggcgaaatgcaaattgctgattgtgttcacagtttttggggtgaacagaagagctgatgtatatattgcatttgacgcgacacaaactatttcaagactatataccatatgcctcagacaaaaaaaatgcaggcactgttgtccctgataatcactaataaaacaatgtagaatagattggttcccactggtagaagacagaacttcagtgtggcgcttaacaggatgagtgaatgtgctgacctttctttttctatcttttcattcatgttgtggttcctggttggaatatgtatcaataagattatactggtgcgtctgttgttgcttagac

SEQ ID NO: 42863 - DNA, 932 bp, Setaria italica
  Peptide Sequence Number=SeqID_108837
aaattgatttttgacataatgcacactcccagtgcaatcctgagatgataaataccctgagatgataaagaatggatagccgaaactcctattcaagcaatatgggaagggatagcttgagatataaggaaaatgatattgtatattcttaaagacgtatataggtgatatttgaataatccttagctgaggcattaaactgatgcatcaaagtagataagaattgcaacccttttgtttatgaacgggatctacaattcaaaagtaacaattggcagtgaagggccagcacttcagcaccctgatcttcaattcatattttggttgtaaaaagtaaactacaaaatcatggaagataggacagcaaagaataatcctgtaaaagcatgtggtcaccacaaaaataaggaaccatgtgaagtaggccgggaagttgaacctaccgtaaaaaaatcttctcatttgagagtatctggttatattaagaatgcagaaatctcgatgaaataacagttccagtacaaaagaaaaagatcgtctagttttatgagatgaatcgcaggtagtaccaaaattatgagcagctaaggacattgttcatagtgttcataaattacttgtaacatttcaggaaaaccaaatcaatatacataagcattttattgcacaagactatataagatgcatgcaatcttcaatatatgtcatgctaattttctgacaaacctgcaccttgtagacaactgcataaaaccaaagacatgaagtgaaataagaataatctgtggaacacagtgcaattcttagttagctacgaaaacacactttagagagcaaaataagcaggcaaaggtattcgtataaggttgcaggagtcaaaaactgctagcatcggcatgcatccaaccactattgggtaaaagattctcttt

SEQ ID NO: 42864 - DNA, 458 bp, Setaria italica
  Peptide Sequence Number=SeqID_108838
accaaagaccaacacacggaccgaggacggtggcggcagcagcatctcgatccgtctggcggcgtccgagttctcaggcaccgggaacgccaggaagctggtcatcgggctcgccgccgcggggtccgtcgccgcggtcgccgccatcgttcgcgacttgcaattcgtgaccaagaacttcaccgagaagctcggcggcggcgcgttcgggtcggtgttcaaaggttctctgcctgacgcgacgcccgtcgcggtcaagaagcttgaaggcgttcggcagggggagaagcagttccgcgccgaggtgagcacgatcggcacgatccagcacgtgaacctgatcaggctgctggggttctgctccgagaggacgaggcggctgctcgtctacgagcacatgcccaggggctccctggacaggcacctgttcgggctagcagccagggcgcgtcctgagc

SEQ ID NO: 42865 - DNA, 1079 bp, Setaria italica
  Peptide Sequence Number=SeqID_108839
cgatcgagacgggcagcaccagaagaacagcaagaacgacgacgacaggttctacacgatggacgacgcgaggctgccgagcagcgcgcggagcgcggcggcggcgagtgctcgtgactgcgagctcgcgtgcctcggcaactgctcctgcaccgcgtactcttacactggcggcggcggctgctcgctgtggtacggggacctcatcaacctccaagacacgacggccagcggtggcggcagcagcatctcgatccgtctggcggcgtccgagttctcaggcaccgggaacgccaggaagctggtcatcgggctcgccgccgcggggtccgtcgccgcggtcgccgccatcgttctggccacaatcctcatcctgagaagcagaaggatcaagtcgctgaggagagtcgaaggatccctcatggcgttcacgtaccgcgacttgcaattcgtgaccaagaacttcaccgagaagctcggcggcggcgcgttcgggtcggtgttcaaaggttctctgcctgacgcgacgcccgtcgcggtcaagaagcttgaaggcgttcggcagggggagaagcagttccgcgccgaggtgagcacgatcggcacgatccagcacgtgaacctgatcaggctgctggggttctgctccgagaggacgaggcggctgctcgtctacgagcacatgcccaggggcctcccctggacaggcacctgttcggggctagcagccagggcggcgtcctgagctgggagacgaggtaccagatcgccctggggatcgcgaggggcctggagtacctgcacgacaagtgccgggactgcatcatccactgcgacatcaagccggagaacatcctcctggacgaggcgttcgtgcccaaggtggccgacttcgggctcgccaagctcatgggccgcgatttcagccgcgtgctcaccacggtgcggggcacggtggggtacctggcgccggagtggatcggcggcgcggccgtcaccaccaaggccgacgtgttcagctacggcatgatgctgttcgagatcgtctcttcgggtaccggttaaggtttaaactttaa

SEQ ID NO: 42866 - DNA, 747 bp, Setaria italica
  Peptide Sequence Number=SeqID_108840
aatgaattacacaacgtgataatctttcaagaatgtgaataattgaacaacgagaatacgataacactgggctgggctccccaagtctgatgggcgtggtgctggactgccgactgactgctttgcggggagcagaggaaggaaacaatgtggtaacgatcaattatctgacaaatatgtaccgagaacctgatcgcgtcgtatggtcacaacaactgctgcttttgtcaatagggtttactatgcttgttgttttctctcttgagttgtactttgagtttcttaccacctaattggaagccgttcatcatattgatggctgcctgtgcagaagcaggagagtcgtagctcacaaaaccgaagcatttgctgacacccgttgctttgtctacaaacaccttagcacttagtactctaccaaaactctgaaacgcactggaaagttcttggtcaccatagtcttgtgggatatgataaataaatagattggctccaggaggaccttcgatctgcccaccggcattgctgctgggactagaagatatggtggacgtggcatttgaatttggaactttaatcgaattgttagaatttccaaaaggacgattgttcatgagaccaccaggatatgatccaggatactgcataccagggatggcaggataagggctgcctaactgcattgcattaaatgacctttgaactgaactgggggacagttcaggattgactcctcttatcgagttt

SEQ ID NO: 42867 - DNA, 947 bp, Setaria italica
  Peptide Sequence Number=SeqID_108841
caagaactttccagtgcgtttcagagtcttgtgggatatgataaataaatagattggctccaggaggaccttcgatctgcccaccggcattgctgctgggactagaagatatggtggacgtggcatttgaatttggaactttaatcgaattgttagaatttccaaaaggacgattgttcatgagaccaccaggatatgatccaggatactgcataccagggatggcaggataagggctgcctaactgcattgcattaaatgacctttgaactgaactgggggacagttcaggattgactcctcttatcgagtttccttgattaacaggctggaccatattctggaagggaccttgattttgcataggagacaaagggtactgcataagtccatatgtcccgggtggctgataaccaaatccattatattgaggcatatatcccatctgtaaagctccaaataatgaagattgctgcatagggtttgcattgggaatattagacaactgcaattgagctttttgtgctttcctagcctgtctttccttttctgtatcagcccatttgacaaccaatggcacactagaaccctctattttgtgcttcccatttagagcctcaatggctgccaatgcttgctcttttgtttcatatttaaggaatgcgcagccagctttgctcgtttgttgtgaacctctcaaaatttgtaaatccttgatattcccatattcagaaaacagatcagtcaactcagtatccgtaacatttttcggaagcattccaatgaaaagcttgtgttccagcctctccaactctccatcagcatattttacttgcaaaggacttgatgccccagggagcgtgcgcttgttgtggtaagcattcaccgccttgtcagcttcttcccttgaggggcatatgaggaagcagcaccctcgggagaccttg

SEQ ID NO: 42868 - DNA, 410 bp, Setaria italica
  Peptide Sequence Number=SeqID_108842
atcagcacaaagttcctttaatatttggttcctggcgcttgtctccaggatcctatccttgtcatatacagtcaagcatccagggcacctcccaccagattcatccttctggtccattcccattattcgatgccaacagtacagacatatctcatatccacatttacaaggctttagttgtttatctgtcaaatccaaagggtccatgcaaagtggacatttgtcattaatttgggtgctcatggtgactgcccttaaagaagcaagaaaagtcggaggagcggaggcgatcggagtcgccggccgcctcgggattagggtttcgagctccccgcgtcgtctccctccagagactcgctcctcccccttctctctctctctctctcctccgccgccgcccccccttcgca

SEQ ID NO: 42869 - DNA, 2036 bp, Setaria italica
  Peptide Sequence Number=SeqID_108843
ccgtcaggtctgaatggctttagtggttctggcaataaatttcagagtcctactggagcaataaaagctcatggcggaggtccccaatctaacttaagatcattgaagtcgctgcgggcagttgaacagtactatcacacactgcagcagatgaaatggggtccaatgacagaacatgtcttggatagtcttcattgcaagatagatgcattccaggctaatcaagtactcaagcttctgcatgaccacactattgctcttggttttttcaatggttaaaggggcaatcagggttcaagcacgatggtcatacctacacaactatgataggtattcttggacaagctaggcaatttggtatcatgaggaagcttcttgaggagatgagcagagctcactgcaaaccgactgtggtaacatacaacagaataatacacgcatatggtcgtgctaattatctaagggaggctgttaaagtatttgaggaaatgcaggaagctggttacgagcctgatcgggttacgtattgtacattgattgatatccatgctaaggctggatacctggacattgcaatggatttatatggcaggatgcaagaggtaggcctctcaccagatactttcacctacagtgccatggtgaattgccttggaaaaggtggtcaattggcagctgcttacaagcttttctgtgagatgattgaaaatggctgcacgcctaaccttgttacttacaacatcatgattgcgcttcaggccaaagcaagaaattatgaaaatgttgttaagctgtacaaggacatgcaagttgctgggtttcgtcctgacaaaataacatacagcattgttatggaggttctcggtcattgtggccatctggatgaggctgaagctgtgttcattgagatgaggcgtgattggactcctgatgagccagtatatggtcttttggttgacctctggggcaaagttggcaacgtcgataaggcactaggatggtaccaagcaatgcttcaggatggtttgcagcctaacgtgcctacctgcaattcactcttaagtgcttttctgaagataaatagatttcaagatgcctatatcgtgcttcagaacatgcttgctcaaggacttgttccatctctgcagacttacaccttgttgctgagctgctgcactgaggctcagactcagatgggtttatgctgccagctcatgtcgatcactggacacccggctcacatgttcttgctgtatttgcctgacgcagaacctggtggccagaacgtcagggatcacaccagttatttcttggacatgatgcacagtgaggacagagagagtaaaaggggtctaatagatgctgtcatagacttcttgcacaagtccggcctcaaggaggaagcaggccttatatgggaggttgccgcacagaagaacgtttacccggattccgtgagggagaagagctcgtcttattggctcatcaaccttcatctgatgtccgagggcactgcagtaactgccctgtccaggacacttgcctggttccacaggcagattctgacaatgggaactgcccctgaaaggattgacattgtcacgggctggggcaggaggagcagggtgaccgggtcgtcactggttagacagtctgttcagaagcttctgaatctcttcgaattcccattcttcaccactcgtggaaacactggctgcttcgttggctgtggagagccactcaacaaatggttgcataatccatatgttgagcgcatgcatttgttgtagtgaggttattggctgagccagaaataaaggactttcttaagcaggtgcagttttgtggaacaattagcttggaatagataaagattcgcacctgctttgatttgatccatagggtgttttagtcaggtcaggtgtagtctggtagtctaatagtctatgcttggaaactgtttaatgtgattgtgataacatttagagatctcattgttcgtttagcatgagattaaattggtatggactaactcc

SEQ ID NO: 42870 - DNA, 394 bp, Setaria italica
  misc_feature (23)..(23): n is a, c, g, or t
  Peptide Sequence Number=SeqID_108844
cagttccagtaattgttgatttntgggcagctgtcccacatgctaagttagacaataccggccgttttacaagatcaagaggaaatgtggctgtcgatgatgcaatgccagataggctcccagaaaacaagctaacaatcgcagtagagtcctggggcctttccatttgccaatgggacctcagtgattcatatacagaaaagctgattgctatactaggtccaactcccagtaatgtggccccaaggcctttgtacaatcctttgacaccctcatctctacaaattgtagacaccgcatggaagatgcccttgtaatacctagttgttttctgtgtcgccaaacgagtacggacaacatccaacgggttaagtttacagtatgcctgatcttg

SEQ ID NO: 42871 - DNA, 478 bp, Setaria italica
  Peptide Sequence Number=SeqID_108845
tcgccgcgctcgacgcgggtgccgtcggggagcacgtccgccgccgccgcgtgcttcgagtcccacgccaccgggggtacagccgcatcgtttcgcacagcgcggcgtggagcacgcgcatctttccctgcccgccggcggcgtggtggcccgcgccgccgccggcgacctcgcgcaggacctcccgctcgacgtcgcggtggcgggtgagcagccagaagaaccacgtcagcgccgacgacgtcgtgtcgcggccggccatgatgaagctgatcaccatgtcgcggatcgcctcgtctgggtacccgcattccatcatccgcgacaggaggtcgctccgccgcccgtcgttgccgccgccgccgccgttgaccagggcgagctccttcttgcggatgtggatgaggtccataacggcctcgtggatgaccctgatctcctcgcgcaggcggctctcggagccgacgcccagcgcgcg

SEQ ID NO: 42872 - DNA, 578 bp, Setaria italica
  Peptide Sequence Number=SeqID_108846
ggggcctcgtgggccaagtgctgcctctcctgcttcaaatcggtgatgatagagggaagcacttgaagtttctgctcttcaatggctatttccttggtcacctgctccatctctttggcgagttccgtccttcagcgtttgaggcgatctatagtgccaacaataccggagcgggagttctcaaggaaatgaatccgatggtgtacttcttgggcccggtgcttgtacgaatcttcctcctcacgagttttggccagcttggcgcgatctgccatatggcgcagagccctaaacactgggatccacatcgattcaatgtatgcggcgggcgccaaggcttcttccacctcttctgggactcggccgctgacgttactaaaaagctgccgaattggcgaagcatcctccaccaatcggccgatgtcttcttgaagaagagttcgtatgctctcgagcttggcgcgaacatcatcaaggacgaagctcaaggtaacttgacgagaggcgacctcttcgtcatcagagagtgcaaccgcaaatgagaagaggctattattgggagtgtcctgttcttcttt

SEQ ID NO: 42873 - DNA, 444 bp, Setaria italica
  Peptide Sequence Number=SeqID_108847
ttttttttagtaaagacaactgcaaaatctgatgtgtctcctttattagtacatagtagatctttacatggaaagttgttgaactatcagaactgcagatcagatgtacagaaacagcagcatccaagctgacgggtgacgaggtgttgattggtgcctgtttcttgggagcatcgttgacggagcaaaattagcaaggtgttgttctgtctaagagatgctatctcccaagtttaatatcccaagaccatctagttcagttcagttgacacttgacagcctcctgcaaccgcaattacagatatgatattgacacatgtcacccagagtaatctcacacaaccatcgctaacctgctgactccaatttggcccttgcatcaagctccctccaaaatctccagaggtaattcagaccaacgatcagctcggtcaccgcagcttc

SEQ ID NO: 42874 - DNA, 409 bp, Setaria italica
  Peptide Sequence Number=SeqID_108848
gcgggtggacgtgtgtggtggggaggcggcaacgacagggagtgtctggaatggatgatgccactcagcttcactaagaagcgcccggcttggtctgcttgatcttttttagccgcgggaacgggacaaaagccgggagcccgggagtgggggctctttggctttcaccggaaaaaagatcatctccgacctcagtggtcaaaactcacaactccaaaatatcatcgctttggtttcgatctctttgcctctcactctcggtggatttccacttgttgctctctgtttttgtcgtgctgctccatactacacttgtattcatcttagaccccatttgaatcctttcattttgaaggaattggaatatatttaatgaagtaagactatttatcttggaatgtgcattcta

SEQ ID NO: 42875 - DNA, 380 bp, Setaria italica
  Peptide Sequence Number=SeqID_108849
agcacgaggcggtcggcgccgggtccccgctcggagagagccaggtagtagaagaggctccgcccgctggcctcgtccaccgtcacgtacccggagtagtggttggaggggaagtcgccgtggaatccggggaggccggtgacgaggtgctcctcgggcgcggcggcggcgggcgtgcggaggagcgccgccgccccgaggaagaagaggagagggaagggggaggccatggagaagacgtgctcgctcttggcagcgccggaagcagctcggcctctcggctgagacagggagaggagtcggcgtcgtcggggagctacgagtcgtcgacggaggggaggatggcggtcgtgcacaccaccgacacgacgggcaccggg

SEQ ID NO: 42876 - DNA, 805 bp, Setaria italica
  Peptide Sequence Number=SeqID_108850
ttttccatctttgaaataggtgaaaccggtgcttatctctgacaataatctcccgattctccacagctgacatatatttgatagctagatggcaatcccacatatccgcaggttttttattatcctgattggagaggcgctcccagagctcatcatgagtccaaaggctacagccagtttttcaccatgatatcttaatgcaaactccctttcctcttcttccaactcatgcagcaccgagtcagtttcaggcacataaccagcatcagtaatcctatggattagttcctccaagtattggtaaatatctcgagtttgcggatgagacttctcacccatgcgaaacaaatgggcaacacccccaatctcaatcaagctgtatcctatttgcttcttcaatcttctcttgatcatggtattcctcaccttctcaacatggttcattttaccagataaagcatatatattagaaagcagcacacaatgagatggattctcaggctcaagggcaatcaatcgctcagccacctccactccaagattgaaattcttgtgcatcttacatgcaccaagcatagccgtccaaacttcaggtcctggctctccaggtatagagtcctgaataaattgcatggcatcatcaagaagtcctgcccttccatacatgtcaaccatagaacaatagtgctcagcacgagggaccaatccataggcactcttcattgtagcaaaagcatcacgagcctcactaaccaatccagcatgcgcacaagcagtattaagtacttgtcttaacttaaaagtt

SEQ ID NO: 42877 - DNA, 606 bp, Setaria italica
  Peptide Sequence Number=SeqID_108851
atctcatacttattagatattataactatattccaataaggaaaactagtggtcaaagttaaaactcgaaaccataaaaagtcaacagtgtcaagcatttaggagtggacggttgtactttctagaaccagaggtatgatgtcaggttgaatacaaaaggtatatgcaagccatgattcaacgagcttgatctccggtgtacttaagcataggctgaaaactttgggaagaaatattgttccatggatcactggagacttggtgccctttaatagacacctgatagccatgaccctaaaggataccataagcttataaggcattgatattacgacaaagaaagaaaaatagaagagagacatgatgtgcagataaggcatacagctatcaactcagatattgactagctgtgatcagtgttaggcatcagataggacatttcaaataattacatttggtccctggaaacataatttgaaaatcctcgcatgttgtgagcagagtctaaatagtcatataacagtaacagtacaaaacttgcggattgtcagactctaaaatgcactaataaacttacagaaatgtcaaatacatgttacccagttg

SEQ ID NO: 42878 - DNA, 330 bp, Setaria italica
  Peptide Sequence Number=SeqID_108852
cgatgcatgaatcgctcagtcagatagagcaatattattaccaacaactggcatgaatccataggctaaaatcctcagggttcgctcttgacagcatggttgtcagaggcgccagcatttggagcatgtgatggcatagcaagccccttcatcttcaggtctcccggaaatggaagcgcctcctgcagcagctggtgctgctgggcagtgctgagatgctgctgctgctgctgcttctgcaaatgcgtctgctgttgctggtgctgggagtggatctggagctgctgcagctgctgagcagccagaagcgactgttattattgtcgctgg

SEQ ID NO: 42879 - DNA, 720 bp, Setaria italica
  Peptide Sequence Number=SeqID_108853
gcttgtgttacggtgatgcgccctttcattcttaaggagttcctgaagagcttaattatgcaactaaatgtacaatcttctgaaaagaaaggagcaatagattttgcacatggtgcaagaaacacagccccaataatgatggagttgaaacattaataaaagagttagctagacttcttgaagggaagaagtgcttgattgaattctttatgatctcatcaatagcagaatgggataatatatttggaagcttccctaaattagatggttcatgccggattatagtgaccacaagggaagagagtatagcaaaacattgttcagagaaacaagaaaacatatacaagctcaaagttcttgactgcaaggatgcacaagacctcttcacaagaaaggtatttaaggaggacaaagatttggacaagcatcctgaattgatcgaagaagcaaaaatgatcttgaagaagtgcaatggccttccccttgcaatagttaccatcggtggcttcttggcgaagcaacaaaaagtagccgtagagtggaggaaattgaacgagcatattagtgctgaattggaaatgaacctggagcttggggccataaaaacaattcttggtaaaagttatgatggtcttccatatcatcttaagtcttgtttcctatatgcatccatcttccttgaagatcacaagattagtcgaagacatttgatacgacggt

SEQ ID NO: 42880 - DNA, 371 bp, Setaria italica
  Peptide Sequence Number=SeqID_108854
aacgaaccacgaccgccacattgccaaatacctaggcaatatcagcaggctctttggtatagtgggcttagaggagctatggcttttgccctcgctcttcagtctgttcatgatcttcctgatggacatggcgagacaattttcactgctaccacgtctattgttgttctaactgtacttcttattggaggctcaactggaacgatgcttgaagccctaaaagtagttggagacagcaaccgttatcatcaactgtatgaggagaattctgatggcaacgaccctggttacatgggacaaaattatgatgaaggaccgtccacttcaagcaaattcaaatcgaaacttagagatctaaggagaagcgacta

SEQ ID NO: 42881 - DNA, 1845 bp, Setaria italica
  Peptide Sequence Number=SeqID_108855
aataataatatttcagtccaattgacataaatgtgaagctttgatttgacacgtacaaccagcaatacacatgtataccgaatttcaaagtttttgtttcagatctatactttcccgtatcgtcatcagaaattcagaaccgaaagaggtggtgtcagcattgttgctgtgtccaccattattcatcgcattattacacttacaaaacattgatttgattgatctcacgggaaagactacatgggcaacatcttggttagagaaggctgccgttgcaatacgatatacattctccacgtggtgattgcactgaaagattcaccgttccaaccaatgaagatatttttcctcacggcgaatatacatatcacgtcgtatattcagcatttatttcaacatatttgtagctcagatcacagccccatgcctttccatttcctcctccactcccaactgatatatcgatgttcacagtaccatggacatctccagcatctttgagatacttgctagcagcggatctgtcaaagggtagtggttgaccatttttcattagtggaatagctcccagagaaatatcaagtcgatttgcgtcaaactgaatgcctgaatagccaactgagcaagcaatacgtccccaatttgggtctcttccgaacacagcggctttaaccagagaagaagatgctactgcacgagcaattttagcagcttctgcctcattgttggcaccacttacagtaacctcgattaagcacgttgcaccctcaccatcccacgcaatggattttgcaagaccttgcattactgcatctaggcatgcttggaactgttgagcctccgtgctgtcaagactgagaattccagataaaccagataacccacttgccatagcaataacacagtcattggtacttgtatcaccatccaccgtaatttggttgaaacttctactcactgacgttcggaccatttctctccagacatcactgctgacttgagcatcagtggttaaaacaccgagcatagttgccatatttgggtgaatcattccagaacctttagccattcctcctattctgatagccactcctccaatctcagtctggacagcaatgctcttgctaacaaggtctgtagttgtaatagccacagcagcagaattcgcaccctgaactgaagaagacagcgagcccacaagactaggcagtgaatttaaaagtgcctccttctttattctttgaccaatgacaccagtagactgaataagtatgttatctgtgctcacattgagaagcttggcaacagcatctgcactatcaactgcatcctgatagccaagatcaccagttgcagcatttgcttgtccagcattaattaacacagcacggccagttttcgatgtactgaggacgttcttacaatacaaaacaggtgcggctgcaacgacgtttgtagtaaaagctcctgctacggtggcgtcgacgtcgcaggcgaccaatgccaagtcgggcttctcgcccttggcgcgcaacccaccgtagatgcccgccgccttgaacccctttgcggcagtaacgccgccttccacctgcttccagggcccctccgagaggaggatcggcgctgcggggacgaacccctcggcggacgcagcggagcagacgacgaccctgctctgagctgcccgggagttcatccggaaggggcggggctgaagcggggcgcaggagtggaggagcaggagggacgggggcggcatcgctgagcgggaggcggctggtcggggcgcgcgggggcaggtgggagcggaagctggaggccgaaggcgggccggcgttttag

SEQ ID NO: 42882 - DNA, 241 bp, Setaria italica
  Peptide Sequence Number=SeqID_108856
tacttaaattaacttacgtacctttcttcaacggttcagtgatctctttttattccgagtcgctgtccatatcgtgcatagctttcagtcccctgggccgcttcttggaaaccttcttctctcggacttcatatctttccagagtcaagtcacatagccacgttcccgggcagacaaaattgacggttctctggataactttggctcttttcttgggtctttgaggcagcttggatccttt

SEQ ID NO: 42883 - DNA, 269 bp, Setaria italica
  Peptide Sequence Number=SeqID_108857
ctccgctcgctcgctcagcgctcgctcgctcgcccgcgactctccgagcggcggaaactccacgcccgggttgagatccgcgccgtctcccgccgtccccgccgcctccgatctccacagggcggggggaggaggacggtgctgagggagatggcggcggaggagggggcgatgtcgccgacgaggatgctggcggaggggcacctgcgggtggccaccggcgggggcgcgccggccgacggcgggatcgccgtcaggcacctcccgca

SEQ ID NO: 42884 - DNA, 530 bp, Setaria italica
  Peptide Sequence Number=SeqID_108858
ccccctttcccaacctccgcgagctcggcatctgcagcgtcgtcgtcaaggacggggacatcgactccctcgtcgccaggagccccctcctggagatcctcaacatccaagggagcatgaaggggttgcgtctcgtcggccagagcctccggtgcgtgcagatctgcgcttccatggtggagagcatcaccttggtgagcaccccgtgtctcgagcggcttatcctgtgggaagtccgggcatctcccaacccagccagtggcttgcgcaccaggatcaagattggcaccgccccaaagctgtgcgtattggggtatctggacccaacacagcacctgctagagattggaggcaccagcatcatgcctgggattgcaccaagtgcaagcacaatactcacaagtgtgaagtgtctgagcttgaaagtgtgttttggagccaatgatgccatgaaggtgcctgccttcctgaaatgcttccccaatgtcgaggcgctgcatattatgtctgcaaaatgtgatgaacccgct

SEQ ID NO: 42885 - DNA, 530 bp, Setaria italica
  Peptide Sequence Number=SeqID_108859
atgaaaccagagagtgagggctacagacagtgcattgaacggccaaagaatcaccgcaggactaacaatgcaactgtcccttacctgatcgttgatgcaaatggtgggctaaaccagatgagaatgggaataagtgatatggttgcagtggcgaagatcatgaacgcgtcgctggtgatccctactctggatcatcagtcattctggactgacccaagtgatttcaaagacatattcgacgtagatcgcttcaaggagacattgaaggaagacattgtgattgtggattcccttccaccagatttcagaagggtgaaacactacgtgagagcacccacctcctggtccagggcttccttctacagagactttgcgaaaatcctgaggaagttcaaagtggtgaggtttacgcacacggattcacggattgtgaacaacggccttgctccttctctgcaaaaacttcggtgccgcgccaattacaaggcgctccagtacaggaaggagattgaagcccttggctaactact

SEQ ID NO: 42886 - DNA, 1183 bp, Setaria italica
  misc_feature (1145)..(1183): n is a, c, g, or t
  Peptide Sequence Number=SeqID_108860
gggggtttatgcaatagagcgtcagaaggggatagcatcgccatcgcaaaatgcaggcgctcctactccccgcgcggtccgcgccgccgccgccggcggtggcggcgtcgatgcttcggcagcacgcggtttccgcatccgcgtgtgcgtcgcaggcccgccgcccgctacccggctccgccggtcgcctaagatgtggggtccgcgaaagcactcggcggcgcctcacagcggcggcggcggcggcgtcctcatcctcatcgggaccaatctacccgacgcccccaccaacagaggaggaggtggagcgggtcaagctcgagcaggttaagaagaggctagagaaaacagcaaggtatttcaagaatttgggtaccctaggattctggtcccagttggtgtgcacaattgtttctggtggaattttgtcgttctccacggttgcgatggggaaggtgactgcacccttcacattctatgcgactgctgctggtattgctgctgcttttgtttcagtcttctggtcatttggttatattcgtctctctgaaaggcttagaagaacggcaaaagaacctgctaaggctcccccacgcgccgatgttgtcaggagtctcaaaaatggcattctgcttaatatgctcgggatgggcgctgctgttctggggatgcaggcgactgttggtgctttggtagcaaaagctctcacaacctctacagtaccgtatcaggctgcccctggccaaagccctgttttatctatagatgttttcctagtccaggcttcggcgaacaccatcctgtcgcacttcctggggctcgcgagctcccttgagctgctgcgctcggtgtcgttgccccccagcggaagccgccccggcccctgcccctgcgcgggcctgagcacattccgaccatgccgagcaagaaagagatctgcattcctggggctctgcacctgttgttcctttttgtatgtaagaactagcatcaggctgacgcatcgatgcttttgggtttaattttaaaccaacgtgttcccgtatttttcgtggcgcgagccttcgcacaagtaattacatgtggctctagtgatgggctggttcgtttgcttgtcactaaacctgtgtcctagcaaactaaannnnnnnnnnnnnnnnnnnnnnnnnnnnnnnnnnnnnnn

SEQ ID NO: 42887 - DNA, 1142 bp, Setaria italica
  Peptide Sequence Number=SeqID_108861
cgctgatgttgatgatggggcgggtgggaatggggagttcccgcccggtggcggtggtggggacggggataatggtggcggtggcggtggcggcggcggtgggggtgacggtgaggagggggaggacgagttcgggcccatcctgagcttcgagcaggtggtgcaggaggcggagaagcgcggggtcagcctgcccagcttgcccgcggacatggtcgaggcggccaagagcgtcgggattcagaagctgctgctgctcagatacttggacatgcaggcgtccgtctggcccctgggtcctgccattaggtcctgcgcgcttctccggaacaggatgctggttgatcctacattcctcttcaaaatcgggacggagatagttatcgatacgtgttgcgcgacattcgcggaggttcagaagagaggggaggagttttggtcagagtttgagttgtatgcagcagatatgttggtaggagttgttgttaatgtagcattagtcggcatgttagcaccatatgctcgattcggtggcagatctgcatcagaaggtctccttgggcgtgttaggcatgcttatgatgccctcccaagcagcgtttttgaagctgcaaggccaggatgccaattttctgtacaacaacggattggaacatactttttcaagggaattttatatggttgtgttggattcttttgtggtattgtgggacaagggattgctaatttgataatgactgccaaaaggagtgttaagaagtcagaggatgatgtacctgttccacctcttctcaaaacttctgctttgtggggtgtattccttggtgtttcttccaacacacgttatcagattatcaatggactagagcgcttggttgaggcatcacctgttgccaagcgtgtcccagctgcttctctggcattcactgtcggtgtgcgctttgccaataatgtgtacggaggaatgcagtttgttgactgggcgagaatgactggttgtcagtgaggtgcggggcttttcatattttcatgtcaccattcgcagtgatgctgccgcgtgcggtctgctgtttgtgttccacccaaactcgtcgaattttcaccatctcaagtcaaatatacatgatatcaataattgcttc

SEQ ID NO: 42888 - DNA, 718 bp, Setaria italica
  Peptide Sequence Number=SeqID_108862
ctaaaattcttttatcttactgtccttataaaattatgatgtgtatggtgatcaaatttaccaatctcttctcattgtttgtgtattatttgtgaatctcagactttctcatttccttcaaatttgtaccgcaggagtgttaagaagtcagaggatgatgtacctgttccacctcttctcaaaacttctgctttgtggggtgtattccttggtgtttcttccaacacacgttatcagattatcaatggactagagcgcttggttgaggcatcacctgttgccaagcgtgtcccagctgcttctctggcattcactgtcggtgtgcgctttgccaataatgtgtacggaggaatgcagtttgttgactgggcgagaatgactggttgtcagtgaggtgcgggctttcatattttcatgtcaccattcgcagtgatgctgccgcgtgcggtctgctgtttgtgttccacccaaactcgtcgaattttcaccatctcaagtcaaatatacatgatatcaataattgcttcggggtgcagaagatctcaaaaataaatgtggtagctcctcatagtgattctgagattgagtgggagctagcattaggagtgtgcttaggcagggtagagccaggaagagatgagattgtttgtttcgtgctgaagatgtcgccatcttgatttggatagctggatctgtttgattgaatgactttgtctcc

SEQ ID NO: 42889 - DNA, 1165 bp, Setaria italica
  Peptide Sequence Number=SeqID_108863
cgatgagccgcggcggcgcgttctcctttgccaagctcaacttgtcggacgccagcggcgggtgcgtcgggccgctggacgccgaggacaaggaggaccaggccaggatcacggcggagcgcaagacgccgctggtggtgacggtgggccccgcgctgcactaccccaacccgcccaactacgacaaggtgctctacatcaacaagaaggaggcgcccctgctcaaggtggagcgcggcgtgccggtcaccttctccgtcgaggccgggcacgacgtgcccctgtacatcacgtccgatcccgtgggcggcaacgccacggccaggaacacgccggaggtcatctacgccggcgggccggaggcggagggcgtgcgggcgacgccgacggagctcgtctggctgcccgaccgcaacacgccggacctggtgtactaccagtccttgtacgatcagaagatgggctggaaaattcaggtcgttgatggaggcctcagcgacatgtacaacaacagcgtgctcctggacgatcagcaggtgacgttcttttggactctctctggtgactccattaacattgctgcccgaggcgagaagaagagcggttaccttgcgatcggcttcggtagcgcaatggtgaatagctatgcttatgtcgggtgggtcgatggcaatggcaaggggcatgtcaagtcttactggatcgacgggaaggatgggatgagtgtgcacgaaacacatgagaatgttacacacaagaggtgccgatcggaaaatggtgcgatcgtgtttgagttcacccgtccattgacaccttcgtgcagtggaagggtggagtgcaagaacataatcgacccgacgactcctctgaaggtcatttgggcaatgggtgctcagtggtcatcaggccccttgagcttgaagaacatgcattcggacacaagcaaccgtcctatcaggattcttctgctgagcggcttggctgaagcagtggaggacctgcgcccggtgcttgctgttcatgggtttatgatgtttgtggcatgggcttatttttctcccagggggatcatggctgcgagatatctgaaacatctgaaaggcgatctctggttccaggctcacacctatctgcagtattcaagcattgctgttatgctcttggg

SEQ ID NO: 42890 - DNA, 436 bp, Setaria italica
  Peptide Sequence Number=SeqID_108864
tccagttcctgtgccagtagtagcttaaactaggcagaggggaaaaccctagtgaccaaaaatctaatgcttgcatttgccctttccgtggagattcacacttattgacagcaagtataacacacttgtcagagtagttgcgtcgtaaccaatcagaaatctctatatcagctgccacaagaccatcctgaccatccacgacgaatagtatgacagttgcttcttcaacagctgcaactgcttgtttttcaatcattgatggcatcctcgcaatagcagcttctctagtggcgagaggaatcccatccatgccaacagtagtggtgacagcaagttcttccatcacacccgcttgagacttcgataaagtaattactccaccagtgtcaataaccataaactcctgagcaccccaataagatcgtccatataagcg

SEQ ID NO: 42891 - DNA, 288 bp, Setaria italica
  Peptide Sequence Number=SeqID_108865
cactgtgttcttggcaaagaacgcatgctggctctagtgagcgtcttcctcctcgcagtgcttggtgtacttggcggcgtccagcaggccgtccgcctccccagggctgctcggcttcaccttgatcatccacccgtcctcgtacgggctcgagttgatcaggccgggcgtctccgagagcttcggaaggttgaccgcgacgggtcaacgtcccaatctccggcgaggtcgtcgaggtcaactccaagctctcggagacgtacgggctcgagttgatcaggccgggcg

SEQ ID NO: 42892 - DNA, 1025 bp, Setaria italica
  Peptide Sequence Number=SeqID_108866
ttttactttttcaccataaagttcactatattcgcattggaggaacaacagttccaacaaagagttgcgataagtaatcgcagagtgtggaagtacaaatcttttccttatgcagctgaaaggcgcaggtagtaaaataaacaaatacatcatagccaccgactagccgactagccccaattcctatatatgatgtttcaacgatttctgggagtcaagcagctaggaatgcatgctttggatgtccattagcaataatgttctcgtgaagttcttgttgtcgtcaggtttcttatactgtcaacgcaattagtaaatggacgtccatcgtcccgtcgcttgtcagcaaaggaaggcatggcaactctggttattgcgtttggacgacggtggagtttttgcaacaaagcaaaaatgactgaaacaaccaagaacacagtgtcataggcaaagaacgcatgctggctctagtgagcgtcttcctcctcgcagtgcttggtgtacttggcggcgtccagcaggccgtccgcctccccagggctgctcggcttcaccttgatcatccacccgtcctcgtacgggctcgagttgatcaggccgggcgtctccgagagcttggagttgacctcgacgacctcgccggagattggggagttgacgtcgctggtggccttcacactctccacgttgccgaaggatcctcctgccgagacctgggcgccggcttccggcagctccacgaacaccacctctccaaggtggctctgagcatggtccgtgatgccaaccgtgacgacgccgtcctcatggtgcttgacccactcatgagagtgagtgtacttcaacccatcatgaactgtggagaagaatctggagatggagaaggccggggcgacagccctggctccggagagcttgagcgccttggcggctgagctagcccacagcctcagagccatgctgcactgccaatgcgagtgcaagtgttcttctcccgttttcgctctcctatctcttactacggg

SEQ ID NO: 42893 - DNA, 344 bp, Setaria italica
  Peptide Sequence Number=SeqID_108867
tcacacctcttcggcttcctttccttctccccactccagtgctgccccccaaacccatccgctactccccggcgccgcgacgagggctccgcctcggctccccgccattcccgaagcttccagaagtttcgcctggcaatggcgaggcttctcgtgctccgggcggcgccgtaccgccactcctcccacctctgcgccgccaccctcctcgtgctctccccctcccagcaccgccacttcgcctccttcccctcttctccccactccgccgcgcgccgcatcctcccgtcgccgctccgtgtaccgattcgcgccgtggagtcctcccctgggcccaccaagga

SEQ ID NO: 42894 - DNA, 603 bp, Setaria italica
  Peptide Sequence Number=SeqID_108868
gataaatgatgaagtaaaggacgggttaatggaagaactgaaaactgtaaacttgagtcaaatttgtcggtgaagcagttcttacatttgtactgccaagctccgttctactgacatacaagctgcagttcagatttgctcgctactccatcaaagatacatggacttctctccttgccttattcaaggactcttgaagaccttctatcctgagatgtctggagaaccagatttagacaagaatgcaagagccatgaagaagagaagcactcttaaacttctaatggaactgtattttgttggaattttttgaagatgttagtactttcacaaccattataaagggtcttacatcactggagcatttgaaggatcgggaaacaacgcagacaaatttgtctctccttgctagttttgctcgtcaaggaaaatcttttcttggactgcaacaacatgagcaagatgcttatgatgagttctttaccggcctcaatattacttttgatcagaagatattctttaagaaagcctttttgcccttactatgatgcagcaagcgaacttctcttgtcagaacatgcgtctcttcgtgtgatggaattg

SEQ ID NO: 42895 - DNA, 1725 bp, Setaria italica
  Peptide Sequence Number=SeqID_108869
ggtaatggaaaccaagaattagaagctcagaatttgtacgggtcggccaaagaaggaaaagaatctttcttttttcaagtgttgcgattaccgggactcctcggcggcgccggcgccggcggggccgtacagatcgaagggcgcccagagcgcgtcgagcgggcacggccgcccggcgccgagccgcgcccacggcttgccagagccggaccaatgcaggaggctcaccggcccagggtggaggtcgcggcagctgcccaggacattgtcgccgccgaggccgtgctggttccaccggtgctcgatcggcgccacgtgccccgcgaacaccagcaggaagggcggcagcgacccaagctcgtagatgcggcccggcggcgacttctgtatctccatccaccgctcgatgcgctgcgtgtagcccgcttgccgccaccgctcgaggtcgagcaccatgacccccgtgttgaagtagcacggccgccgccccgcgaacgtgccggcgaaccgctggtccgaccagaaccggccggtgaagtacttggtaaagttggcgtggcagtactcgggcgcgccgacggtgcggccgccgaggtcggtgcgccagagcttggcgacgtcgtcgacgaggacgaggtcggagtcgaggtagatgacgcggcgcacgcagggctcgaggaggtcggcgaggtagttgcgcgcatagttgagcggctgctccagcgcctgccgcaccgacgtggagatgagcccccggacgcggtcggggtcgaagtagtagaccttgaagcggagctgcgggaaaacggcgcggacgaggtccccgaggcccgggtcggagacgaggaagtggaagaagacgctctcggggcacctggcgtgctgcaccaccgagtggaccgctgcgacggagcccctgaggtactcctcatcgagcgtaatcgcgatgtggacgagcgaggggtcgcagacattggcggcggtgccgttgcccttgccgccgccgccgcagtcggctgcattgcggaaggacggggcgcggcggaaggcgatccccctggcgccccccgcgatctggcccgggaagcggacgctgccgtcgaactgcgaggaccggatagcctcggcgggcgggaaggactggagcgacggcgacagcaccaccatcaccatggcggcggagaagaagccggacaggcgcgccacccacagcatcgcgctccaccggctcggccaccgcttcctcgcgccgggtcgcccgcgtggcggctgctgcttcgaccggccccaagaggccaagacgcccgtgcagttgcgcgatggcgtccagcggccgcacggcgaggctggacccaaacagaagggagcacgcaggcagcaaggcaggcacccccgcctcctgaacctcaattggatcgcgccgcgctctcctggcaggtggcggcggatcggcgcgtggagtgggggcgaagcgagccggaatccatgcgaggccaggcgaggtaaatgggggtgggctggggaacagagcagcaggatgcggaggccggaggcggcacccaccaacccaccgcggcacgcaggcaggcgatttccccctttcgtccgtcccctcccctcgcctgccaccggctcggcttttctctctcggcgcggtggcgtgacggtggcggctgctgcggtgctgctgcctgctgcgatttcggggatttgcggtttatctcc

SEQ ID NO: 42896 - DNA, 560 bp, Setaria italica
  Peptide Sequence Number=SeqID_108870
tcgtcgcactccgtcggccgcgtccactgcgtcagtagtgtgggccggctgtacccggcggtggacgccggcctcgacccggcctacggcgagtacctccgggggcggtgcccgacggcggacgccagggaggacacgcgcgacgtcgcgtacgcgcgcaacgaccgcgccacgcccatggcgctcgacaacatgtactacaagaacctgctggcgcggagggggctcctgctcgtcgaccagcggctcgccgacgacccgcgcacggcgccgttcgtcgccaggatggccgccgacaacggctacttccacgaccgattcgccgccgcgctgctcaccctgtcggagaacaacccgctcggcgccgacgagggggaggtcaggcgcgactgcaggttcgtcaatccggcgtgatcgatagcagctgcggattcactgttcatgatgacttgctgcatgcgctccatgggatgtggtgtatgggcaggaagaaccagaaaaattatggcccgtctatcttatctgtgcaatgaaaaaattgacatggtttatatagccat

SEQ ID NO: 42897 - DNA, 722 bp, Setaria italica
  Peptide Sequence Number=SeqID_108871
ttttttttttttagtaacaagaaaacttagtaggttacaacttagattaaggaacaacatgatgcctgtctgattgtaacacgattcacatgattagtaacaggattactgcctgactgtagccagttcagaaactaagacctgacacctgagttcagtttcacataaactactcaaactaggagtttatccaaagagagctgaaactagtaattaaggcgacgataaactagctctactggatgaaacagaccaataacacactccacaaatgctaggcatcactatcatcttcttctggcttcacaaagaattctatgtgagcgattcggcttgtctgttcagttcctccaccaatattacggaagtacggcatacctggcctggcaagtgaaatcaggtgctggattttcagcatccctccccttccaattgtgaccttagtcctacgattctccttcatgacactactggggatatttgaggtagttgcacgaagaaacttgtatttatacctgtaagacacttcacggtcacattggaacacgattagaaggtcagtatttgcataataggggaactcgacctgcaagtcgccatgaccttcacctttgaatacaactgttggaggatctggttgcattcgaatctgaatgctggaacctggccattcaaggtcatcgattgtttctttcaggacggcagacttaacggtaaaagtg

SEQ ID NO: 42898 - DNA, 1941 bp, Setaria italica
  Peptide Sequence Number=SeqID_108872
cttaggcgtgtagtggtgccccctagggttccttgctgaaaagaggaaaccctagggatctttttttttcgctccatggtttactacacgcatagtgtagacagctcggctctcggttctactggtgtttcactgttaggggtttacacctccccggcacgacgcccgttgggaatcagccaagaagatgtcggcagcgggcgttacaacgctcagccctttggaggaccagcttactcttgtgccacaatgtctgtttgcggcgcagccactggattcgattctcattttccttgctgtgcccggcatgccactggtgccgatgcgtgtgctggattcggagtctgtcgcctctgtcaagctccggatccagcggttcagggggtttgttgcgacaaagcaaaggcttgtgtttggcgggcatgaccttacacgcaacaactcccgtgtcagggactatgggcttgctgatggcaatgttcttcacctagttgtccggttggatgaattccgtgcaataaccatcgagactgccaacgggaagaagtttaagttccaggtggagagtggccacaaagttgggtacctcaagaacaagattgctgctgagaccggggaggaaatcgagagcctaaaggatcaaaagcttgtacttggtgatgaggagctcgaggatcaccagttgatcactgatattgccaagaaggatgatgcagtgcttcacatgtttgtccgtgagccagcaaaggtgcgaacacagaagattgataaggaaactgtgcttacagttgttaccccaggagacgaaggaaacatacacatagatgccttgaacaatacagaacatggacatgctccagttgagccaattatcgttaatagaagtgtaaagctttctcctgccattatgcaaatgattagcgcaacgattgctggtctggaaaatggatactttcctgtcatgtcagcagaaggttcagggggagtctactttatgaaggaccagtcaggtgaaagtaatattgcagtgttcaagcctatagatgaagaacctatggcggagaacaaccccaggggccttcctttgtcagtggatggtgaggggttgaaaagaggcacacgagttggggaaggcgcactaagggaggtagcagcatatgttctggaccacccaaatgatgagtgcagatccgaggatggtactggattttctggcgtacctcccactgcattggttcgttctttccatatgaggaaggagcttaaaattggatcattgcagatctttgtggagaatcagggaagttgtgaggatatgggccctcaagcttttcctgtcaaggaggtccagaaaattgctgtgttagatattaggttagcgaatgctgatcgtcatgcagggaacatactagtgtgccaagatggagatcacgtgcagttggttccaattgaccatggatactgcttcccagagaagtttgaagattgcacgtttgagtggctctactggccccaagcacgccagcccttcggtgccgaaaccctagcatacatcaaattgcttgatgccggcaaagacattgcgctgctcaaattccatgggtgggagctgtcttctcagtgtgctcgtgttcttcatgtgagcaccatgctcctgaagaagggtgcagagaggggcctcacgccttacgacattggcagcatcatgtgcagggaaatggtgaataaagaatctgaaattgaggccctgattgaggaagcagaggactctatccttccagagaccagcgacaaaaccttcttggagacagtatcggagatcatggaccgtcatcttgataacctgctgtaaaattacaatgtgtagccgttgattgcatccagttgtaagtattcaagtttagcagtcgatctccaataatgagctaggtaccttttctt

SEQ ID NO: 42899 - DNA, 481 bp, Setaria italica
  Peptide Sequence Number=SeqID_108873
tttcaccatccctcttaggatatgctgtgtctaccttcattaatgccccgttcttagttcattgtggttggctgtgttctatcactggctaaagattgatgcatgaattttgctcaatgctgatagtttcagatcaatagctggcataactatacgagtatcatttttcttccctggattgctggagcttttttattagctcatatgatacttctttcttatgatgcgtccaatttacttggacactacgtgtactacttgacaagaaaagcatctctttaaattgatcaggaacattatgaagattctgatttttgtggtttattttattactcagaaccacatattattgttttcacgtaggtgtagcttgatgagcacaaattaaatatgccattctttttgtcatgtctaattacactgaattattgaatgaaccaggtttaaaccatcttgtaaataggagtttaacttgcttgtt

SEQ ID NO: 42900 - DNA, 447 bp, Setaria italica
  Peptide Sequence Number=SeqID_108874
ggcgccgagctcctccgcaccaccaccgctgagcctacccccgacggcgtccgctggacagtccgcaaggacgtgacccgccactccgcgctcctccgttccccaactggcggcgtgctctccgtcatgctcgagaacctcgtcaacgaccagtacaccggcgtgtacaacgtcagcatctccttcgagttccatggcgccccttcttacctcgcggacgcgggattctccgccggcgccggcgccgtcgatcgcaagccggcgactccgacgctgccggagtcgtacttccagccggcggacctgatcctgccggtatcggaggccacgggcaacagcagcggcttctggttccgcatccagaactcgtcggactcgcgctccaagatcgtgaccattccgtcgagcacctaccgcgcggtcctggaagtcttcgtgtccccgcac

SEQ ID NO: 42901 - DNA, 1489 bp, Setaria italica
  Peptide Sequence Number=SeqID_108875
tcaatttgagatggctcagaatctccatgtactatgtttcctgatttttttcattgccttgaacctgcaaagtgttctctcgtggaggatccagaattctacaaataatattggtgatcagtgccctccgcagccccatcctttaggtatgtgcaagtcacgagtagcagcttatggctatccatgtgaagaatatcaggtcacaacagaagatggctatattcttagcctaaagaggatcccacatggtgtttctaatgctgataactcgactgaggataggacaccagtacttctattccatgggctgctggtggatggtttctgttgggtactaagtacaccaaaacaatcacttgccttcattttggcagacagtggctatgatgtttggattgccaactgtcgtggaacaaagtctagtcggaaacatacctccctcaccccagaagacccggatttctgggactggacatgggaccaacttgctgattatgatcttcctgcagtacttcagtttgtctataatcaaacaggaggcaagaaagtccactatgtcggtcattccctgggaaccttgattattcttgcagccttctcagagcacaagttaatagacatagtgagatcagctgtgttactctgcccaattgcttatctgcataggatgaaatccagactcatatggcttgcggctcgtatcttccttgcagaaacaattcacatgctgggttatcatgagtttaatcctgttgggccagttgcacaagaactgttgggtgaagtctgcaccgaccctgaagttgattgttatgatatattttcagcagtagcaggaccggactgctgcctcaatacttcgactacgtgcatcttcctacagcatggtccacaatcaagctctgtgaaaaatatgattcacatgtcgcagttggtcaggaaagcagggatcagaaagtacgactacggaaacaagaaggagaacatgaagcactacaaccagccagagcccccgctgtacaacctctcgtccattccgccccatgtccccttgttcctcacccatggcggccaggatttcctgggtgatgtcccagacaccaggcacctcctgcggactctggtcaggcagcacgacagtgatgacatcgaggtgctgtacatgccagactacgctcatggtgactttgtgatgggttacaatgctccacaactcatatacaagcccatggtagaatttttcaagcgccattgacactgaaaacctatactacaggtcacttcatcatgagctgtagtaaatagcaatagtttcaggtcagctttcggtttatgattgtatgaatcacacatgtctctgctctcatagatgaagcttgtccggccatgctagggtctcatttacccaattcgattgctatatattgccttaagtaataaaaaattcatagcttgtcacactatctcaaaagtatgaatttttccttct

SEQ ID NO: 42902 - DNA, 363 bp, Setaria italica
  Peptide Sequence Number=SeqID_108876
tgaatttttttttctgttcacttctcttggaatcatttcccaaactagagcaacttttcttatgatgtgcaagcagaagagaaacaagagatgtggggaatgtgcgacaagataactctcagccccatatgcgacatgccaaccccgttttcacggtttaggctgacttccgttgaactatggcgtgccagtatgaaataacagtaaatacaagaagtcatcataacatacataatctacattctatgctgatatacattgaatctctgcaacctagagataatgtatcttctctgcaaaaattgagaggatcagcaacttacaattccactagaagctcaacaaaaccttaatttcctttct

SEQ ID NO: 42903 - DNA, 245 bp, Setaria italica
  Peptide Sequence Number=SeqID_108877
gctgtagccgcataaagtagaaagctagaaatagagaacagcaggctgcctgttgcatcggcaattcgctttgattaaaatgtggatgaagcagcaagaaagcaaagaaatgagaagaactgtgtagtggtaaatgagccaattgagtttcagaatcgtaccggaggcatcagctcagatggtccttgaaaaatgtacaaacgtgatgatctagttaatgcataagaggaaagttaagtcccagg

SEQ ID NO: 42904 - DNA, 2424 bp, Setaria italica
  Peptide Sequence Number=SeqID_108878
tttttttttttgtttctttaaactttagttatttcttaacttttactttatgatgttcgagcagaagagaaacaaaagatgtttggaatgtggggcaagatgactcccagccccgtacgcgacatgccaacatacctacccaattgagttccgttgaactatgggcgtgccagtatgaaataacaggaaatacaacaaatcaccatgacatacacaatctacattctatactgatattatacattgaatctctgcaacctggagagaggatgtaccttctctgcaaaaattgagaggatcagcaagttacaattccactagaagctcaacaaaacctatttcctttctaagctcgccatcaacagaatgagtctcagctccaattgcactgccctcacagaatatggcaccaaacaagcttgcaatactgtaggcacaggacaactcctccacagcaagagttgttgatggaggtgcttcaataacccaaacggtcattcaacgcagtgcgcccatcaccagtttgaccttcaggtggcacccatgtttcagaatctggtcctgcttcgaggaaatctggtctcgctggacccaatacccgtttttgttttgacttcttcccttctctcttgctagcatgtggttcatcctcattctccatttcttctgaagtttgtaggccccgtttatgcttaagcagaagggccacagcatcagcaactgatgcttcactttcaactgaagatgaatttgcctcgctggaagctgactggtcagtggactttctcttccgtaaaataagcccaggagcagcctcttcaagctcctttccactgcatgaattagaaagaattgctttccgatctttgtagtccacaaaattgtcaggttcctctgcatccgccttttcttcatttatgaagttttcttcaggttctataatcctcttatcaccaagccactgaggttttggtaaggaaaatgcaggtttgctcccgttttcttggtttttggaggtatcagtctctactttagcaggcttattcgttgatgtctcattagaagaatcctttggcttctccacagctgaagtagccttcacaactttattttgtttcttggcttctggtattggattatcattagatgctgggggtcctgcttctcgaggctttagatccctcttgcgagctgcttcccccataggatcagctatttttagtaggtaaactactctgtccagctcagcctgaagatcagatagttccttctgaatttgggcaatcttatcatgcaccaattgagatgacaagccactcatgtaagcatcaaggtcatccccgagatctgcagtactgccctgagccagcttatgcttctcttcttcaagtaactttcttttattttcaatatcactggtgatggaatcttttttctcaagaagactatcagcagtctcaactgactgttgctcattggatttctgactagatttcttctttgtccgatcgaaaaattcatcatcatcgctaaggatgtcatcttcttcctccagacttgctttatggctaccacgatttgcctttccagaacgagcaccaacactttcccgtatgctgtcatttaaagtttcttctagattatccagctcctccataatctgagatatccgttgttcatttcgtgctatttgtgtttgctgaccttgggttagcccaccttgagaaatgtccttaacccttattgcatcgatttctttcttcatgttggcaatcttttccattcgttttagtatcttgctacgtgttttctcctgtctatcagtaagctgacctttgtaggtttgccaagtgatttcatccgcatcatcctccgcagtttcttcaattgcatcctctgccataccccatgagattccctcagctaaagccgcttgagtttttgcacgtaaaacagaagcttcacgatcaagcatatcttgctgaatcttagcatcccggagcttctgcatgtctttttctggaggcatcagctcagatggtccttggaaaatgtacagacgtgatgattgcccaaaccgaattacatctccaacatgaatctccgtgtacaacttcttcttgacctgacttttgttgataaaagatccatgtgtgcttccaaggtcataaaggaaaaccttcccatcattcctaaactgcagaacagcatgaaatcgagaaacagttggatgctccagtacaaaatcgcacatatcaatccgtccaaacatgtaagctcctttcttggccacgtcaagctggtcgacgatggtgccgtccttgagcacctcgaggaagaaggggtgatccggcgcggcactccactcagggatgacgtacggcgcgcgcgggcgctgctgcttctgccgctccgctggcggcg

SEQ ID NO: 42905 - DNA, 660 bp, Setaria italica
  Peptide Sequence Number=SeqID_108879
cggcggggcttggtcatggaggtgctccggccaactcacggtgccgcagagatgtggcagtggcaggggtcgcggcacgaggctgtcgtagcagtgcgcagtaggagtacgacgcggaggaggcacgacggcgtagcggcagctagcgtgacgaggagtggccgcgcgtggtgccacggaggccgcgtgcgcgaggcacagcgggtggtggtcgcgtgcagtgaaatgttgcaggaggttgcccagcgacgtgatgaggctctgcgctggtggtggcatggcgttcctgacgctggcggtgaagtgggtcgtgcggaaacaccggcaaaagtctagctggttataccagcttcgacgacggcgacgcccttaggcgccgttcccctccttggaggcgtagtttttgtgtttgccacaaccccttctttagctgacgtctgataggggtctcgccaaggcgatggaccatagtatctagaagccttaggttcgaccatgtggtattgctaggatttcgatggcatctaggcgaaggtgaagatattggagcggctcggtggctctgtgtcactcctggtggcgaagccagtgtggagtccagcggcagaagtggcgaggctcccgttcgctttaaggtgatgtgtccgaggagtggtgtga

SEQ ID NO: 42906 - DNA, 677 bp, Setaria italica
  Peptide Sequence Number=SeqID_108880
gtagagggatttataaatatcgagtaccatcccttctacaaaagatgatgggaacccagaatataagctcaagagaatgataatttcctcgatatgggagctacctctccagtaaaatacacagggacggccttcttctgtagccttaacaggatcaaacaaactttcatattcaccgcgaatcttttcagcagaccattttgatgaagagccctgtgatcataaacaaaggatacttcatagtattgttgtaccaccacctaattattactccctctgtactctttcatttgatgctgactagctcgaatttgagctgccagagctaaataaaaaagaaacggaaggtagtattagtactactataaggttcagaacttgcctcacagtagatagactcgtgcaaaagggcataaagaggattttgatcaaaacctaaccacatttcaaactaaagagcataatgttagaatatcagcaaatgtaaacactaggacattgcttcaaagatttagaagaacaacattaagaatactatcaaagattttacctctttcaagaagtaatagcttattctccttttagctccaggaactagtacaggatcccacaccctctcaagcctgtactggacaaaatagcaaggtatggtgcagatcagatagattgtgtttctt

SEQ ID NO: 42907 - DNA, 573 bp, Setaria italica
  Peptide Sequence Number=SeqID_108881
tgggcagcctcctttaggtctcgtagagcatggatctcgtcaaacatgcatggaaataccatctctccagtaaaatacacaggacggccttcttctgtagccttaacaggatcaaacaaactttcatattcaccgcgaatcttttcagcagaccattttgatgaagagccctgtgatcataaacaaaggaatacttcatagtattgttgtaccaccacctaattattactccctctgtactctttcatttgatgctgactagctcgaatttgagctcgccagagctaaataaaaaagaacggaggtagtattagtactactataaggttcagaacttgcctcacagtagatagactcgtgcaaaagggcataaagaggattttgatcaaaacctaaccacatttcaaactctttcaagaagtaatagcttattctccttttagctccaggaactagtacaggatcccacaccctctcaagcagataatgcagtctttcaaatccaccaccagaacccaaacctgacagtccaagacactgcagcatcttaggagttaacctgccaccagatgg

SEQ ID NO: 42908 - DNA, 1859 bp, Setaria italica
  misc_feature (1)..(28): n is a, c, g, or t
  Peptide Sequence Number=SeqID_108882
nnnnnnnnnnnnnnnnnnnnnnnnnnnnttttactcgaggatctgtttgcattttgggacacaaatgtatatatgcaacatagcaattcgcctaaatatttgttccatatgcccaaaatatttgcaacaattcgcctaacatagcaagttccagttctatgatgtagtcgcagaacaagattatgcaatggtactccagttggtgaaatgttttcgattcatttcttcactttcatctacaagaaattgaacagaccgtattgttggcgtatttaaatcataataagctcaggtaaactgtcactcgaacctacacagtagggtttcaaaacagctaaaacaacggcttcttgccgttcagaagacccatgagatgctcgaaaacatgcgagccaccgtcgcggatgccggagtgcatgtactcgttggtcacccagagccggatcccggcgatctgggaggcggtctccttggcgatgttgaagttcacgtacatgtcctcgtagtagaccgcagcagcaacaggaaccttattgttattcagcttgctaacatcatatagtggaggccaatcttccttctcagctaataaatgggcagcctcctttaggtctcgtagagcatggatctcgtcaaacatgcatggaaataccatctctccagtaaaatacacaggacggccttcttctgtagccttaacaggatcaaacaaactttcatattcaccgcgaatcttttcagcagaccattttgatgaagagccctcacagtagatagactcgtgcaaaagggcataaagaggattttgatcaaaacctaaccacatttcaaactctttcaagaagtaatagcttattctccttttagctccaggaactagtacaggatcccacaccctctcaagcagataatgcagtctttcaaatccaccaccagaacccaaacctgacagtccaagacactgcagcatcttaggagttaacctgccaccagatggaagagcaacccctccaccttcagtttcacttaagtatcttacaatctcatgaatgacttgtatatcttgaggatacctcttatagtacttctcgttttgctgttgaacctgtttaaagcaggctctgtatacagtttgtgcagtgcaaggctcacctagtggtggaagccctccagtcaaaagaacagatttcaggccttctggagcaaaactcaaatatgtaacagcacaaaatccaccgtaactctgtccaaggactgtccaaggcttggcatctggtacaagacgtagacgaataaattctgcgtccttaattatattatccgccctgaaatgcttcaagtactcaacctgctttgttggagatgtaatttgcgaaagagatgatggtgttaatggtgtggataatcctgtgccccgctgatctaacagcacaacacggtggtcttcacatgctttctttaaccatccgcctgcttccgtgggacgaggactctcaaatccaggccctccttgcaggtacaacagataaggcagagatgcgtcttctttcccagcggcgacgacctctcgcgcgaagacggtgatggtggctccgctgtcggggctggagtggtcgagcggcacggcgaaccggtggtcccggaggctgaggcccggcaccgcgtaccacgcgccggcctcgtgctccgccctcgctgacgacgacatggccgcggccgccgctcccctcggcggcgggatccggcaggacgtgaggcggaggcgggcggcgcctgggacggggaggaaggccgggtggcggcgaagcggaggcgctgcgacggccggggtggctgtggcgacggcgatggcggccgcg

SEQ ID NO: 42909 - DNA, 543 bp, Setaria italica
  Peptide Sequence Number=SeqID_108883
accgtggaagcaagtactcccgggtggtgttcatgcagtcgtacatcggcggcgtggtgcggcccgaggggtggctcgcgtgggacggcgagttcgcgctcgacacgctctactacggggagtacatgaacactggccccggcgccggcgtgggcgcgcgggtcaggtggcccgggttccacgtcatgaccagcccagccgaggccggcaacttcaccgtcgcgcagttcatcgagggcaacatgtggttgccacccaccggcgtcaagtacaccgccggcctcacgtcttgattcggcttcagcacgtcatggtgcaagctctagatttagtactatatcgatcgtcagcatactacatgatgtctgtggagggaaatgtacgaaagaatggtgagtggatgaatcagttgttgattggggttgttgttttaaacacaacaatgagaacaggggcgtgagatcagcggtacatcgacctgtttaattctcatatgttccaaatgctttagattcctgtgcagctgtgctattctacacacag

SEQ ID NO: 42910 - DNA, 253 bp, Setaria italica
  Peptide Sequence Number=SeqID_108884
caggattgttgctcatagtttgctactagttactcgctactactgcactcaatactggctaggaagttaaggaaatggggctacttgagattaaacatggactgctacaagtcgcagagacattggattttcttcataacaatgcccatcttgcccatcgagctatatcgcccgagacggtctttataacttccagcgggtcatggaagcttggtgggtttggttttgctctttcggtcgatcaagccacagg

SEQ ID NO: 42911 - DNA, 2005 bp, Setaria italica
  Peptide Sequence Number=SeqID_108885
cgacgcggcgcggctcgtgcgcctgcgccacccgggcgtgctccacgtcgtgcaggcgctcgacgagaccaaggccgccatgggccatggccacagaacccgtcttcgcctccgtatccaacgcgctcgggtgcctggacaacgtcggcaaggtgcccaaggagctcaagggcatggaaatggggctacttgagattaaacatggactgctacaagtcgcagagacattggattttcttcataacaatgcccatcttgcccatcgagctatatcgcccgagacggtctttataacttccagcgggtcatggaagcttggtgggtttggttttgctctttcggtcgatcaagccacaggtcgtttgacttcatcacagcaattccattattcggactatgatgtcgaggatacagctttacctcttcaaccatcgttgaattacactgcaccagaattggtccgaagtggagattctaaagtcggctctgcatgtgacatgtttagctttggttgtctggcctaccacctgattgctcgcaggccatttttggactgccataacaatgttaaaatgtacatgaatgccttgacgtatttaacaagtgaagccttttctaatattccttcggatttggtgtcggatttgcaaaggatgctatcaatggatgcagtatcgcgtcctagtgctatggcctttacaggttcttctttctttcgtgatgatacgaggttgcgcgctcttcgcttcctggaccatttgctggagagagataacatgcagaagacagaatttttgaaggcattatcagatatgtggaaggattttgattcccgagttcttcgatataaagttcttcctcctctttgtgctgagctgcggaacatggttatgcagccaatgattttgcccatggttctaacaatagcagaatctcaggataaaggtgattttgagctttcaacactgcctgcacttgttccagtgtttacttcagcatctggcgaaacccttctactgcttgtgaagcatgcagatctcattattaacaaggctacacaggaacatttgatatcacatgttcttccgatgctggtccgtgcttatgatgacaatgatccccggctacaggaagaggttctgcgtcgaacagtaccgctgtctcgtcaacttgacatcaagctagtaaaacaggctgtgctgccacgtgttcatggattagctctaaaaactacagttgccgcggtgcgtgtaaatgccttgcgctgtttaggagatcttgtaccatctgtggacaaagaaggtatactgggtatcttggagactgttcggcgttgcacagcagttgatcattctgcgccaactcttatgtgtacacttggtgttgctaatgcagtctataaacagtgtggtgttgaatttgctgcggaacatgtgattcctctcatcttcccattgctcacagcacatcaactgaatgtacaacaatttgccaagtatatgctgtttgtcaaggatatcacaagcaagattgaagagaagcgtggtgtgactgttacagataatgggaacacagaggtaaaagcatcaccttcattaacaaatggaattcattcagaacctatgccagtacagataccagctgcaaagagcaccactgcatgggatgaagactggggtcctactaagaaaaccagtgctccatctctctctgttgattctagtgcgcgaacaaaccaaccttcatcagatccttttgacttcagtactcaaacaaagcaatccacaacactcccatttgatttcagcactcagacaaagcagccatcattagtctctcaggttacagctgcgacaatccctccagcacaaccacttccatcccttcaatctcttgcacccagttcaggacctcaaacttctggctcatgtgttcctgttgacattgagttggcctcctcgtagcagctcatcatctattcttgtactttctaattgtcgtccta

SEQ ID NO: 42912 - DNA, 1374 bp, Setaria italica
  misc_feature (1337)..(1337): n is a, c, g, or t
  misc_feature (1356)..(1356): n is a, c, g, or t
  Peptide Sequence Number=SeqID_108886
aatacaaaatagggaagtagttagtggattgctttgcaaaagcaatccacaacactcccatttgatttcagcactcagacaaagcagccatcattagtctctcaggttacagctgcgacaatccctccagcacaaccacttccatcccttcaatctcttgcacccagttcaggacctcaaacttctggctcatgtgttcctgttgacattgagtggcctcctcgtagcagctcatcatctgacttcaatgcgccgttgtctgttaacaaggagaatgattccggaaggctgtctagcgatgtgcttgatgatgttgacccttttgctgattggcccccaaaaactagcagtgccactagcatttcaacaattgagcattgggcaaacacaaatcaaagtatttctggatttagctcaggaaacatagggcttggtggcagtggaaattctctggggcaaatgaaaagcaaccagatgagctggtccaacacttctaatctaatgggtatgaactcaactggcagctatttgaatcagggcaacacagctctagggttcggaaatccaattggaggactgagcacaggtctctccaattcaagtagttccagtgcaggccagagcatgatgcagccaaaatctgattttggatcactgtccatgtcgaccaacaatgccgcacatggtccacccagacttgcccctcctccatctgctgctgttggaagagggcgtggtagaaatcaaggacagtcagccctctcccgagcatcacggccccctcattccaactcctcatctgggcaacaacctatccttgatttactttagtaagggaaggatagcctctgttctgccttcccataatgtcaacgtgtacatcttcaaatattttgtacggtgagcatcatactgttctttggacatgcatgtggggaatgggtattctcttgtcagttcgaagctggatggccttggtgagtggtccgaaggaagctgcttcggggtcttgcagaggtcacattttctcctgcttagggttttgatttcagcatggaggccatctccatattggtgagtcaagaaatgctgctgtgtatatctttttccaaactcggctgtagcttgtagaggtgatgaatatagtcaggcatgtttatctgggctctgaagttttgaatgcctacagtgtaccaccatgtttaatgggccttacagatggaccctgcccgtgtaattcatttgtttctgtaaaggcccatgtgtatgtagtcgtcaaaattaggctatctgcaattctgcttcgatgttgttggataactgttgttgataaaccnatgtgttactgtaccccanaactgtgtaaagtcagcc

SEQ ID NO: 42913 - DNA, 634 bp, Setaria italica
  Peptide Sequence Number=SeqID_108887
atctacttgatgccaaaggcaatatctacatgtcatcgtgcttcgcatccctgcagctgatcagactgcactaattatgactgtagttccagctaatgtactacgtactgcggtcagcatttgccccacaatccttccatgcctacctaaagcagaaaccagcatgcttagcagtgcaaatgatgacagaaattagaaaggaggatgatacaaactagtcagtataaacttaatatgttcatacattcgatttagagttgcaattctaaaaacatctgacaaaagcataggagctaatgcttgctgagcacagaaagtagtgctttctgcaatcaaacaccaggtaacattttttatcttgtttcctggtctgcattgctatactctgatgaacctgatgccatcacctacaccaaccaaatgatcggtgaaagctcacattctagaacaaaagaaaaataacctgcagaaaaaaaatcgttgaacggctttaacacaattaagacatgcaaccaacatcatttcctgtgtctaccaaccttggctcatggtggaattggagatgtccaataacaataataggtaaagacaagccatacagataactatcagctacacaatacacatgtttctg

SEQ ID NO: 42914 - DNA, 520 bp, Setaria italica
  Peptide Sequence Number=SeqID_108888
cctcgttaggacttaggacagtttgctttgcatatttgggatttcgaagtatctggatgttggtatcatttgtataagcaagtcagtgtattgcatccttgaacttgtaccatgtaccatgaggttcttgctgttgatgctttgctgaactttgttcttctacaggagctccatgttctctgttgcagttgccagttcatgtttaaatggaagtgatccagaagcacggcataatgagaaattccatcaaagtagtgctttggaaaagatttgagccctccatttgatcacacagtaatatctactgaaaatgaaatacagtgcaacagaaatgcggaaggcaatggtttgcctgacgattcaagcaaacgtagatttttaaagcattggaaagagcaaaacttatggttgccagtagaaaagaatcgtgttattcgaggtgtggaagaactgacaaaggagtttctgcctctggacaggtagcagcagaatcacaagaaatcatgtctattggataaat

SEQ ID NO: 42915 - DNA, 930 bp, Setaria italica
  Peptide Sequence Number=SeqID_108889
cgggtagggctccgataggaagctaccatggcggcggctgagggcgagacagcggcggcgctgcgggcggaggtcgccgcgctgcggatgcgcgtgcaggagttggagagggagaaccagaggctggccaaggttgcttcgagctgtacctgcggattcaaggaggaaaatgttgggtctgttgcagttgccagttcatgtttaaatggaagtgatccagaagcacggcataatgagaaattccatcaaagtagtgctttggaaaaagatttgagccctccatttgatcacacagtaatatctactgaaaatgaaatacagtgcaacagaaatgcggaaggcaatggtttgcctgacgattcaagcaaacgtactaaaagaacaggtcaccaggtcgcgattttaagtcactgcccaaagcgacttgttgctctcaaagtcatgtacttcggccagagattctatggcttttcttcagaaggtaacatggagccaacagttgagtctgagatttttaaagcattggaaagagcaaaacttatggttgccagtagaaaagaatcgtgttattcgaggtgtggaagaactgacaaaggagtttctgcctctggacaggtgatttccttatatctgcgatcgaacataaaggatgttggagaggacatgctagacgaaagatccgaaattgattatgtgaaggtattgaatagaattcttccccgagatatacgtgtactaggttggtgtcctgttccagcagattttcatgcaagattcacctgtttgggcagggaatacaaatacttattttggaggggggacttggatatattggaaatgcagaaagctgcatccaaatttattggagaacatgacttcaggaatttctgtaagatggatgcagcaaatgtgagtaactacaagcggcgc

SEQ ID NO: 42916 - DNA, 341 bp, Setaria italica
  Peptide Sequence Number=SeqID_108890
ttttgtcttaactaaaattaactaaactaaacgtaattgtttaattttctatttgtactaaggtagtaattcttgtcgtcctattgtcttatttcgtatttgtttcttggtattattgatgtatagttatagttttgaaggaaatttcgcagtgacattgatacactatcctctactaaaataaataagatatgctcctactgacactagctaaatctgtgctaacactatagaaatcaactcattgccttttatttccttccaacgccttctctacctctatgaatgtgtatgctaaggaaaactccgcagaagggccaatttggaaaggaacagaagga

SEQ ID NO: 42917 - DNA, 528 bp, Setaria italica
  Peptide Sequence Number=SeqID_108891
tgtaatttgtctacctttactatttgtccgttgtaactttcttgttgttttttgtaccttgtattgtaagtaaattctctgtaccagagaagttacaagaacagaacagaaacatctttagcaactgctcttctttcagcaacatttgcaactttgatgtgctatcccctggacaccgttagaagacaaatgcagatgaaaggcacaccgtacaataccatttttgatgctattccaggcattgtggagcgtgatggtctaattggactatacagaggttttgtgccaaatgctttaaaaaatttaccaaatagcagtatcaaactgactgcgtttgacacggtgaaatcaactcattgccttttatttccttccaacgccttctctacctctatgaatgtgtatgctaaggaaaactccgcagaagggccaatttggaaaggaacagaaggatgtgctgcctgtagatcctaaaatacggtcccaggagggaggaaacacagcacatgggagtatgcaaagactcat

SEQ ID NO: 42918 - DNA, 371 bp, Setaria italica
  Peptide Sequence Number=SeqID_108892
gaaaaatttttccggagaaaaagatggagagcttactgtatttgggagacttgctgctggtgcttgtgcgggcatgacatctacacttgtaatttatttattttcttcctcactagcaaatgcccctgcatttttaatttggctagatgtgtgaatttggatacatgtggcttctgcttttgccttttatttggttatggcagatcctgaacttcgtccttgtacttgctcataggttacttacccactggatgttcttcggctcaggctggcagttcaatctggacacagcactatgtctcaggtaacaactcttgtaaatgcaaatttctgtttttggaaatcagcataatctgatgactttgtaggtt

SEQ ID NO: 42919 - DNA, 1078 bp, Setaria italica
  Peptide Sequence Number=SeqID_108893
gctgctggcactggtgccccacagcgccgcgctcttcgccgcgggggccgccgccggcgccgcagccaagaccgtcaccgcgccgctcgaccgcgtcaagatactcatgcagacgcacagcgtgcgggtggctggagagaccgccaagaaaggggttggattcctcgaggctattgcagacattggaaaagaggagggtcttaagggttactggaaaggcaaccttccacaggttattcgcataattccttacagcgcggtgcaactcttctcatatgaagtttacaagaaaattttccggagaaaagatggagagcttactgtatttgggagacttgctgctggtgcttgtgcgggcatgacatctacacttgttacttacccactggatgttcttcggctcaggctggcagttcaatctggacacagcactatgtctcaggttgctcttaacatgctgagagaagaaggattggcctctttctacggagggttgggtccatctcttataggaattgcaccttacattgccgtgaacttctgtgtttttgacctgatgaagaaatctgtaccagagaagtacaagaacagaacagaaacatctttagcaactgctcttctttcagcaacatttgcaactttgatgtgctatcccctggacaccgttagaagacaaatgcagatgaaaggcacaccgtacaataccatttttgatgctattccaggcattgtggagcgtgatggtctaattggactatacagaggttttgtgccaaatgctttaaaaaatttaccaaatagcagtatcaaactgactgcgtttgacacggtgaagacactgctagctactgggcagaaggagctggacaaattaatacaagaaaaccaggagaaaacaatctaggaaagagccttgttcattctctaaggcttgggtagaaaggatgagtctttgcatactcccatgtgctgtgtttcctccctcctgggaccgtattttaggatctacaggcagcacatccttctgttcctttccaaattggcccttctgcggagttttccttagcatacacattca

SEQ ID NO: 42920 - DNA, 556 bp, Setaria italica
  Peptide Sequence Number=SeqID_108894
tttgctcaatacaacaacgatgttatttcattgacaaggagaatctgcgccatgctattcgattgttctggatatgatgtatagttatagttttgaaggaaatttcgcagtgacattgatacactatcctctactaaaataaataagatatgctcctactgacactagctaaatctgtgctaacactatagaaatcaactcattgccttttatttccttccaacgccttctctacctctatgaatgtgtatgctaaggaaaactccgcagaagggccaatttggaaaggaacagaaggatgtgctgcctgtagatcctaaaatacggtcccaggagggaggaaacacagcacatgggagtatgcaaagactcatcctttctacccaagccttagagaatgaacaaggctctttcctagattgttttctcctggttttcttgtattaatttgtccagctccttctgcccagtagctagcagtgtcttcaccgtgtcaaacgcagtcagtttgatactgctatgcgtataactttttaaagcatttggcacaaaacct

SEQ ID NO: 42921 - DNA, 350 bp, Setaria italica
  Peptide Sequence Number=SeqID_108895
aaaataaagaaaactcgcctgctcggctgatcctttttaagcacgggaacggaccccagcatcctccctatcccccaaacgttaggatcaccggcggggacagaccaccggagctgagccccacagcaccacacatccacgcggtttgctggtgacctggtgtggtgactggtgaggaagcgcacaagaacacaacaagaaggcgagagcacagagcagagagggagaaaggggaggaacagagagctgaaaaaggtggaaaaaacccggcttttgaccccgccaagcccaccgtcgccggcaatggcggccgcttccgaggaggccatcaagcagttctccgcgctcat

SEQ ID NO: 42922 - DNA, 762 bp, Setaria italica
  Peptide Sequence Number=SeqID_108896
ctagtcatcatcagtgccccgctccccctcccactcctctgccgcatttcgccgtcgccgcggaacccgatgggctgcttccttggctgcttcgggggggccaaggagcgccgccgccgccgcaagcggtctccggcacagtcccccaacggccgcgcccgggccgcgacgcgggttacgccgaagaaggtcgatttggatggggaggccgtctccgccgccgcgccgctcctggcgacgctcctcgagctgagggactccacggatgacatgtgcttggccgtcgtgaagaagaaggtgacgttcgatcccaacgtcaccacctacgaggcggccgcgatcccggaggaggacggcgagggagccgatccggaggatgatggggctagcagggagaaggactggatgctggcgccggagtgcgccaagtccgaggccgtccccttcaaccacaggtacagcaactgcgccgacagtgacaacgacagcgagtacgaggacgccgaggaggaagagtacgacgaattcgaagacgacgaggaggatggaggaggaagaggacgggctcgatgagtgcgccatcgacgacgacgatgaagagcacggtctcctcggcattgggcgtagcgaggaggaggcctgcgagtcgctcttcctgctcccgatcagcaagacgtccaaggagagcggcggccaggtagcggcgccaggcgtcgccgcgccagaggccccttcggtgcttaactcggtggagaacctcac

SEQ ID NO: 42923 - DNA, 375 bp, Setaria italica
  Peptide Sequence Number=SeqID_108897
gaatctgggttcttttcacttttgttccttctgcttattcctggaggatttacagggtagaagtggttcctctgtgaggaaaccatagtttgtgaaagtttagttgatggcactccatatgtaccttcatggcccctgatatgcaagatttctgtctttacatcatatggaacaaaatcatgtcctcgtattgagaatctgggtttcttttcacttttgttccttctgcttattccagaagcaaggaaagaggtgctaacaggatctttttgcacacacgccaactcatcagcttcttccaaatcctcatcccagccgtctgatttatccttatcctccatgctgctagcctgctgaccttgttttgaagctggg

SEQ ID NO: 42924 - DNA, 459 bp, Setaria italica
  Peptide Sequence Number=SeqID_108898
gggaacggtttcgtgctggctctggctggctcaagaaacagagggagggaggataggaagccaggaagggaatcgaatacgataccttctcttttctctcctcttctcctccttggagggccttgtttgtaatccttgttcgggttagtagagagctccccttcttccccaacgaatccaagcatctttccctagtcagttccgttggggttgccatgccatattggtattgccattggcattgccgtgccagcctaaaatcgcaaccttattgattgattgcttctactgccagtactagaaaaaccccaccaacagcgcagccgtgatgcgatgcgagaggcatcctcctccttccaatccaatccacttgcgagggatgtgatgtgatgtccttcttctagaagaggagaggagaggaggacatcttgccgatccaaaaagaaagggaaaccggga

SEQ ID NO: 42925 - DNA, 738 bp, Setaria italica
  Peptide Sequence Number=SeqID_108899
tttttttgttttttttggccaagagctttaaaagtggttgactgttgaaagctaaagaaacaaagcgcactcagtcaaagacacaacttccacaaattaaacatgagcgcgaagcagttcatcacgatggagacacacgactgtgcggacatgaagctgttgatgcatgcggtctcctgatcaagtaccagaaggtgatgtaccattacctgctactgctggcggaggagatggtgccggcggagggttctgccatgagaccttgtactccaaatcttcttccgtcttgcaagcgacctcgccgccgtcagggatgcttggatagctgcggaggaaggtaaccggccagcaataataggtcttgttgatgctcttctccgatagcgctggcttgtaggtggtctccaccaccaccattacggggaagccgaggctccagtcgtggaggtgcctgtcgtagaggtagtacagcgatgcattttgtccttgctgtgtgaggcttatccaccttctgtatctgtgcgagctgtgcggctgcagctcgaagctgacattcctctccggatccggcttgaaccaggagagctctaccatctccacgaaggacgcattggggatgtccatgatcctgacgatgttgatgttgccatggatctggccgcggccgctgggttgagggcgtggatgatgatcaacatcttcacctcttgcgctggctcgtacacacgcgtggtgttg

SEQ ID NO: 42926 - DNA, 250 bp, Setaria italica
  Peptide Sequence Number=SeqID_108900
gccgggctttctcaaggttgagacgctcattcacgtattcacctctaatgtagatgtaagcagctgacgccctcattccaactccagcaataaggcatccttccagaagcttgtggggatcatgacgcatgatttctctatctttgcaagttcaagactcactttggtgggctcaaagatgaggaccgcattttttaccaacctctacggtctgcatgacccttttcttaaaggtgcaatgaagaggggt

SEQ ID NO: 42927 - DNA, 170 bp, Setaria italica
  Peptide Sequence Number=SeqID_108901
gcaaagctggagagttgtgggcagtgcacaccttgccgggaaggcacaccctggctatggatgatcatggagaggctcaaggttggtaatgcaaagctggaggaaattgatatgcttcaggaggtcacaaagcaaatcaatttcctccagctttgcattaccaaccttga

SEQ ID NO: 42928 - DNA, 341 bp, Setaria italica
  misc_feature (320)..(320): n is a, c, g, or t
  Peptide Sequence Number=SeqID_108902
gcaatcgcgtcaacaacatctgtagatttgtgggcagtgcacaccttgccgggaaggcacaccctggctatggatgatcatggagaggctcaaggttggtaatgcaaagctggaggaaattgatatgcttcaggaggtcacaaagcaaatcgaaggtcatactatctgtgctcttggggatgctgcggcatggcctgtgcaggggcttatcaggcacttcaggccagagctggaaaggaggatccgcgagcgagctgaaagggagttgctggcagcttctgcatgatccgccagccattgcgctcctgtactagtttccngatttctttactaaataatgc

SEQ ID NO: 42929 - DNA, 223 bp, Setaria italica
  Peptide Sequence Number=SeqID_108903
aataatcaaagactgagttttgcattggtgtactagggacggagtaatcaaagacggatttctgaactggtgtgcctgggatggaatcaaagaaaggtttctccattggagtaccaggaactttggtcataaggatggtgagaatggtgattcagatctcttctttgggccacaaggtcttccaccgataaggactggaggttcctcatctagtagtttgttt

SEQ ID NO: 42930 - DNA, 388 bp, Setaria italica
  Peptide Sequence Number=SeqID_108904
aggccttcctcttgagctcctcgatgctggcgaccggcggctgggtcttcgccaccttggcgatggccgtgttctcgtccggcgacccgccttccaggaaggcgcccaagaccttgccatccttgatccagtaagacccgaacttcggcttgctggaggcagggtcgctgtcgccgaacaggatggtctcgcccacgttgtcgccgtagaattgccaccccaggtcgaatgatcgggagtagaagtatggcaggtagtcgtactcgggaactgactccccggactcctttcccttgattgcctttacagcctgctctgcagacttcctagaatggtcaagtgttcctggagtatacgccattggcgatgtcgctaccttccccttgaa

SEQ ID NO: 42931 - DNA, 434 bp, Setaria italica
  Peptide Sequence Number=SeqID_108905
gttcctccttgctcagctggccaactagatgttcctccaagacagggatctttggcttttgttgttctgccttaacagtatcatcagcatctaaagaaagaggccttcgagatggtggcttcatggatggcggaagcatcccatgatgtggtccttgcattcctctatttgctgtacttgcatgagaaggcggtccactagggtttcctgcaaactggccagtagagggtagcgaggtgccctcggcccaaataccatccggtagtacatcaggaagaggacgatgctctcggtgcctctccattaagtacacggcaacacaaaattccttgaaagacagcatcccatccttatcctggtcagacaaatcccacaccttccttaagatatctcttggcagcctccaacttaaaaatagattccttgcctcttcg

SEQ ID NO: 42932 - DNA, 3942 bp, Setaria italica
  Peptide Sequence Number=SeqID_108906
aattgcctcatcacaatatagtaacccataatcagccaaagtgtatgtacagactacagagctcagaaattttgcagaaacagaagaaactgaagaaaaatggctacacgatggaagaaaacactcggagagttcttcaacccaacgggttgactcgcatcttgtagatgtacttgtacaatacaaggtataaagaatgtttataagcagcaccatcccgccaaacacatgttcccagcctaggtacaaaattaaacacaaagcaaacacacaagcaagccccgtcccgtcccctttcccgtccaaggtgtggagcagaggcccatgcaaaaaaaatagtcttgcccttgtacgtgtatgtatatctgcagtaaggtgcacaagcacatgacctctataatacaatacctgtcaaaatgcgctccatgcatccgttccatgttttgtcgggctgcttgacgtctctgtcggtttaaacggcccagttccaaaggggtcctcatcatcaaatgagtagccccggttgttgtagtcgctgctcttcatggaatcaaacctcgcaaatgtatccgttctgtcatggtcgctggtgctgttcatggaatcgtacctcatgaagctgttgcccccaccttgatcagaaatgctgcggaaagaatcaaacctcgcaaaggtgtcattaccgccattatcagcattgctccggaaggaatcaaatcttgagaagctgtctctctgtccaaaagaattgttgtcgtgcatgccaaaggagctgtactgagacattgtgtcaaatgaatcatctcctgcttcgctgtaccttggcgtgaagcttgagttgtacattggtgtactcggaactgaagaatcaaaaaatcccttttgctcattgccatacatgctgccagcagtaggagattctgctctgcttgggccagaatcaaacagtgatctctgcattggggtgcttggaaaagagtcgaagaatggtttctgcatcggcgtactcggaacagaatcaaatactgatttctgcatcggcgtactcgggacagaatcaaatactgatctctgcaccggtgtaccagggacggaatcaaagagcgacttttgcatcggcgtgcttgggacggaataatcaaagactgagttttgcattggtgtactagggacggagtaatcaaagacggatttctgaactggtgtgcctgggatggaatcaaagaaaggtttctccattggagtaccaggaacagaatcaaaagatggtttctgttccttggcaaacaaactactagatgaggaacctccagtccttatcggtggaagaccttgtggcccaaagaagagatctgaatcaccattctcaccatccttatgaccaaagttccacagggaatcattatcaatgccatgatcaaacgatggggcccatgaatgtccatcataagtgttatctccatgagcagaggaattcgttgctccacggttactgacgctttcagtggcacgtggtgagatgtcatttgttccagattgcttttcggtagaaccatcctctctgttcttgacaggactaactggtggactttttactgactctggtttgctattggatggtgttgcttcaggttcgactgcctgctccacagcagcagcagtagatttatcacccttcttgtcttctttctctgttgatgccccatttgcagacactttgacatcttcaacagtaggctcactctttggtacaatgggaggttccacttcaactgttagttcctttattacagagaacccttcatctccaaatctgtcccattcttcatcccatgtggctgctgtttcctgtattccaggttgccaaccaaaaggaagttccaccaatgtagttggcttagctctcaaaccatatctcttgcactgttcattcaatgatttcacaagctcctcaagatcagactgtatcttattagcccgctcctgaagcttttcatcactttcatcccctttctgtagcttaactatggcgttgtaaatttcaagcttcttctcctggatctcacggaaagtggcctcatccattgttagctttgatgccacatctccaaccttcttgcatctctcatcatattttgctgcaagggattgaacctcacgtttatcagcagacatactttccgagacttcattaagcctgttctcacacctacttttgtaaagaataagctcctgcatcttggtgcgataaaactcggtcttctctctagaatcctggatttccttttccagttcttggactttcttatcagcgtctgaagcttccttaaactttgcttctagtgtgccttgttcctccttgctcagctggccaactagatgttcctccaagacagggatctttggcttttgttgttctgccttaacagtatcatcagcatctaaagaaagaggccttcgagatggtggcttcatggatggcggaagcatcccatgatgtggtccttgcattcctctatttgctaatcctgtacttgcatgagaaggcggtccactagggtttcctgcaaactggccagtagagggtagcgaggtgccctcggcccaaataccatccggtagtacatcaggaagaggacgatgctctcggtgcctctccattaagtacacggcaacacaaaattccttgaaagacagcatcccatccttatcctggtcagacaaatcccacaccttccttaagatatctcttggcagcctccaacttaaaaatagattccttgcctcttcgccagtgatcttcccatcacgatccctgtctaccttgataaatacaatcatatatttcctgacatccacttgagtgattttcggccatggggcctgagagtggtttggatttgaaggaattccaccaggaatatttgcactcactggtcctggagtgcttggtatagaattaaattgttgttgcctaggagctggttgactgtgtggcaactggctagtatgagaaggaagtggcgatataacctgcgcgggaccagcctgcattggcttgggagggtgatgaggtccagcagctgaggaaggagctgtagaactgggcagattatttgggacgttggggtgcaaagatgagtcttgttccgcttgtggagttgccgaaaaggggtcaacaccaaaagttgagttagatgacaatccattacccaagggtaccaatgccttggagtcattaactgatggtcgtgaaggcatcatgtttaaatttgttgaatttgcgttggcaggcgttgtagcaccggccgtctgagaattgtagcctggtagaggagttgaattctgtgctgaaattcctgcactattaaggttggcctgcggagaaatacctctggttggagcttgtgaagttgcacccaacggacttgcactcctcttaccactaaaccaatcagtagctagatttgttgtggttgaactagtatggtttagcccactaggaccacctccgacgggtggcctggaagcaattccctgagcagggggcacagcgtttgcatttggaggttgtggcggcctgacttgtggatttgatgatgcaccaggaagcacttgtggtcctcttatagcatgattctgttgaccagaccctagtgcttgagtggcattcggggggctagctgcactatttgtctgaggagcagcagtagaaatatttatccgaggagcaggaatctttgcagcagctggaccaaacaatgctgacctaacaatatcaggtgtcaattctcgaccgctctgagctactgtgacaagtttaagcgaattgtagaagtcttcacgcccaaggaaaccagtccgatttttatcagcatacgtccaaatctgcgctaggacgggctgcgggaggccggagcccttgaagaaggcgacggcctc

SEQ ID NO: 42933 - DNA, 1834 bp, Setaria italica
  Peptide Sequence Number=SeqID_108907
ttttttttttgttaaccgtgaggcagcaggctttattcaaatctcaaatggtacagcaagtgtattcgtgtatgtgtagttcagacttcagacatcacaatcggaaaccgaatgtcatgacgcctggcaacatctgttgtagaacgctgcgaccatgaacacacaagaacaacctaaacgatgacgcgagatgtacatggaacggaacacactggaacgggagcgtctcagatcttgctggcgaactggaggccttccttcttgagctcctcgatgctggcgaccggcggctgggtcttcgccaccttggcgatggccgtgttctcgtccggcgacccgccttccaggaaggcgcccaagaccttgccatccttgatccagtaagacccgaacttcggcttgctggaggcagggtcgctgtcgccgaacaggatggtctcgcccacgttgtcgccgtagaattgccaccccaggtcgaatgatcgggagtagaagtatggcaggtagtcgtactcgggaactgactccccggactcctttcccttgattgcctttacagcctgctctgcagacttcctagaatggtcaacgtgttccactctcctcaactcattgtacatcttcaaggggaaggtagcgacatcgccaatggcgtatactccaggaacacttgtttcaaagaaagcatcagtcttgattccacctttttcctcagcaacttgacctttgaagagagtagtcaatggtctggctcccacaccgacaacaacaatatcagcttcaagtactgtgccatcctttagcttaactgcagtgacatcaccattggcattggcatcaaaaccaacagctaatgtgcccttcaaaatctttacccctttgttagtatagtaagcctcgtagaaagcagcaatatcggcagtgaagagcctgggcatgcaccaaggttcgggaaacaccatagtgacatcaaaatcattgatcttcagtgcggcactaatttcaaggccaatataacctcccccgataacaactgccttcccacccttctttgcctggatagctgcaaccagcttgtcagcatcatcaatttcccttagatatagaatgttgttagaatcagctccttgtgtgccaaaatcagtgagcttgatgactgaggagccagtagcaatgagcaagatctcatatgtaaaggttgctccagctgcactagtcaaagtcttggtggaaagatcagctttgacaatttctgtgctgaggatcagctcaatacctttctctgtgtaccattcaggcaattgcctctctccaccacttcccacacatacatgaaatcctgggagccttgcagcattctgaggaaagaggtaacccttgctgagggcaggacgctcgtaaggagctaccgcctccttggagatgacggcgagctcccctcggcttaactccctgcttggcgaactcccgggccgcgtaccccgccgcgacgccgccgccgaggatgacgtacttgaagtgcttcccggacgccatgcctcccaccgaaatcgggcgctaatcacctctactactccgatcgatcgaactggtgacgagtcagtcagtccactctgcctgtgcagcgggcctggagggagatcgcagaagacaaggaggatttgagatgaggaacctccagtccttatcggtggaagaccttgtggcccaaagaagagatctgaatcaccattctcaccatccttatgaccaaagttccacagggaatcattatcaatgccatgatcaaacgatggggcccatgaatgtccatcataagtgttatctccatgag

SEQ ID NO: 42934 - DNA, 483 bp, Setaria italica
  Peptide Sequence Number=SeqID_108908
agaagaaacgtagaaatggtcttccaatgactacctggagaggtttaattggtgcagcattgtcatcatactgtgaacttttgctggttaacacaaatataaattcagaattaagttttttcatatcgcttgccaagagtcacagtacatgcccacaagtactgtctgctgtagccgagtatttggattccctacaagcggtagcatcccttgaagtgacaaaagaatttgatccacaaaatctcttggatctgttctctatctttgctgttaacttgagcagtccaaacaaggatgtccggattttaacattgaggattctatcatattttgtgaaaatggaccaacgtctaggcacaaatgaagagagaccacacaagagacaaagaacagaagattctggagaggaaacagctaaatgttagaacggcttcctgctggtgctcatgttccacagttcagggcatgtgttggatccgttgc

SEQ ID NO: 42935 - DNA, 2345 bp, Setaria italica
  misc_feature (1)..(59): n is a, c, g, or t
  Peptide Sequence Number=SeqID_108909
nnnnnnnnnnnnnnnnnnnnnnnnnnnnnnnnnnnnnnnnnnnnnnnnnnnnnnnnnnnttttttttttttcccaaacattatgaacttttgcatcttctttatttttcgggaacatgggaatccatggacaaccaactaataatccctaggtgatgaatgtaaaacggccttattgaagcagaaatacaaattttgtacaacagtgagaacaccaacagcagtccctcgcttatgcactcaacatcgcgacgcaagcactgggttcggaaggcactgggaaaaacgggattcctggagctagtgcttaaatcattcgttcttggagcaggcagctcaagttctcgaggttggcatggttacaacaagttgatcgacagtatgcacaacagatgctggttggtgggttctcatggtgcaaaaaaggcagcagttggctccagctgacccggagagatcagttagaacggcttcctgctggtgctcatgttccacagttcagggcatgtgttggatccgttgcactctgatatctcgcccgatctggatattgttccatagacttcagttgcctagacgaaatactgtttgttcacatgaaacaatcatcggcattgtccacgcagtgctcaagcagcatccgtactctaagcttgcaatccaagcaggggtcatttatcatgctttttacttgttggatcactccagcagtttgtagtctgataactcgaccggatgaggcttcacatttcgggtaaatcaagttcagaagacaccatagggtggcaacccgcaactgtttatccttgctttgcagaaagttcacaacaaaggatggtttaatgcgatctggtcggtgaggaagaaggacattcatcacagcttccttgttcatttcgtttccagcagcaatgtttgcaagcacaaacataccctgaatgcacactcccagggcagatgcattgttcagttgtcttgcaatagcatcgataaccattccatcttcgccaatgacataattagcagactccacatatccatcgacaagattgtgcacaagtgccaaggtctgttcctgaacaaaatgttcagagtcacatatgaggcttgaaagagtagataaagtcaattccttaacaatgaagtctttatcctttggactcagaaggaacataatatttcggagagcccatacagattttagcctcaatgttggatccatggacttcgataaatgaacaagttgtgaaacaaccccagaatgaagaagaactgatttcctgggtgtcaaattaacagcaatattgcaaatggcaccaagggcagcaacctgcactgaagtagatgagtcatataaaagctggaccaggggaccaataactgtatcacaggacaatcggcctccactgagaacctttggtgacctggagatattcttcagacatgaacatgctgcaacacggatatcagcccaatcatgcttcaacgcctcaaggattaaggttgatacctccgccgacataagctgagatcttgactcttccagttttgagcaaagttcagataatgcaagcaatatggtcactgctcgttttgtttccaatgaatttgctagcagatggttgctgagcttctcaactgcgttcgttgtaagggcttgtttctgcagttccaagctgtctttaatcagggtggttaatgccaacggagcttcatctcccacgtggtcaggttcttccattagctcaagtaagaccataatcaacttggtcttaatctgtttgtcctgaaaatgacagggagaagcatgcccaagtgctatcaagcacagacaagcaagtagtcgtgtgcgtggactccgatcatgtattaacccaactactgaacggaaaccttttccatggtccgttgatgcaaatgtcgaagcaacttctctgttgttccgaatgactgcagtaacagaatctaaacaagcatcccgtagattcatagaacctccaaaaaggctaacaagtttctgtggaactccagcactgcatagtgacaattgttctgaactattctcacaagagtgcgatataatagtagcagccagctcggtgacattctcgttctcactgttcaaaagagaaagaacaaaatccatgtttttcccattattaacgtcaaactttggagctagttttgattgatatatcattctgagagcacgtgcgcttgcatccacaaccttctcgtcggggtgcgcgaggagtcgggtgaggtgccccacggcgccggcggccaggacggcccgcgcgccgtcgtccacgccgcacgagaagctccccaccgcggccgccgcct

SEQ ID NO: 42936 - DNA, 691 bp, Setaria italica
  Peptide Sequence Number=SeqID_108910
aactctgaacagctgctacagtctactacagatatggtgatgtgctacaagctaccagcagtaccttgcttagtcggttaatagatgtccatataatctctactaaccccctggtctggtacacgagaagagagcccttcgttgccttctgaacacgagggccctcggattaataagagacaccgaaaacaagcaaacacacaaacctgaagaggaagaagaagaaaaccaaagaacataaggtcgtagcaggcgagcgagcaagctccttcgtcttcactactacttcagctgcgctggccgccgcagctatggctagatatagcaggcaggcaggagagggcccggccggtcaccggagtaggctccggattatctcggcctgggggctgtcgttgtccatggtcgacatgagccccgacagccgctccgagaggtcgtccacctcccggtggaggctcttaatgtagctgcacgtctccttcaggagcttcgacgccgacgaccggctcgcgttccggcggcgtgaggactccgggaggagtgcctggagcttggagatgagctcgttgatctcgtcgtcgctgatcctgccgcggcggcccgacatctctccggcggcggctgttgtgtcctagctcagctcagagagtactttcaagctacagcacctggttgctgattctcgtcg

SEQ ID NO: 42937 - DNA, 376 bp, Setaria italica
  Peptide Sequence Number=SeqID_108911
cctaatcccggcgtcggcggcgccgtcggccgatgccgggatttctccctcagctcgctccccacagtcgaccattggtccctcgccgactctcgcgatggcctcctgctcttctgctcgtcctgcgaccgctctaccaatgatcgcgaccttccggacctcagggacatccccaagcacttcgccgtctgcgaccccttgtcaggccactctatcctcttgcccaagcctggtgccggcctgtaccttgggtcttattacctaggcgctgctttggtaatcagtgacaaagacgaggggggcactggcatcttctccttcgaggtgctcattgcaacatacgttcttagggaggggccgtgcctctagtgctttc

SEQ ID NO: 42938 - DNA, 394 bp, Setaria italica
  Peptide Sequence Number=SeqID_108912
cctactagggtcaatgccaatagttatacaattaaaaattggctaacaaaatttcatatttgcaaaggcagatgactaagaattagcacctactgaggatacaggataaaaagaaagtcaaattacataactgtgaatgatcagagcaacattgaattcttcataagattctttttaaccacaggtctttcttatatttcaaactatttgttttttttttcacggtccacttcttcagagacaaccaaaaaaaaaagactgcagaggcatgcatatatctagagaaagtctaggaacaatatttttgcttgaccaaaccaacatgttgttggaacattattggatccataaaatgcatgctgggccatgttttcaaacagaaaaaaaaaaccag

SEQ ID NO: 42939 - DNA, 402 bp, Setaria italica
  Peptide Sequence Number=SeqID_108913
acaataaacctacgaccggaagactagaaccgtcaggggagtcaaccaatacctacgactagaatggaagcaccagcttcagcttgctcctccgaactcagtgaagaacagagcgctgacagaacactgtcatctaccgagatgccagcaccaagatccgtgtatctctcaaggccatcaaagtctgagagcgtaaaagagtccatgtccggcggtgagccggcaccacaaaccgatgtcccaatcccatccattcctagcaatggtcacaccaccggatgaaatatttctttaccaattgaagagcagaggacttgtcaattcctcagagtatcagcagctcgatttgtttcctttcttgttcgaagaatctttctggttgcgcatagcggaacaggggcg

SEQ ID NO: 42940 - DNA, 1553 bp, Setaria italica
  misc_feature (1544)..(1544): n is a, c, g, or t
  Peptide Sequence Number=SeqID_108914
gctcgctcgccatggcggccaccaccctcctcgtcctcctcctggccgccactgcggcctcggccgccgacctgtccgtgtaccacaacgtgcacccgccgtccccgtcccccctggagtccatcatcgcgctggcgcgcgccgacgacgcgcgcctcctcttcctctcgtccaaggcggcggcctcgcccggcgtcacctcggcgcccgtggcctccggccaggccccgccgtcgtacgtcgtccgcgcggggctcggcaccccggtgcagcagaccctcctcgcgctcgacaccagcgccgacgccacctgggcgcactgcgccccctgcgacacctgccccgccggcagccgcttcatccctgccagctcctcctcgtacgccgcgctcccgtgcgcctctgactggtgcccgctcttccagggccagccgtgcccggcgaaccaggacgccggcgcgtcgctgccgacgtgcgccttctccaagcccttcgccgacgcctccttccaggcgtcgttgggcagcgacacgctgcgcctgggcaaggacgccatcgccaactacgcgttcgggtgcgtgggcgccgtgaccgggccgaccaccaacctgcccaagcagggtctcctcggcctcggccgtggccccatgtccctgctgtcccagaccgggagcaggtacaacggcgttttctcctactgcctgccgagctacaagtcttactacttctcggggtcgctccggctgggcgccgctgggcagccccggaacgcccggtacacgccgctgctgagcaacccgcaccggccgtcgctgtactacgtgaacgtgacggggctgagcgtgggtcgggcgtgggtgaaggtccccgcgggggcgttcgcgttcgaccccgccaccggagccggcacggtgatagactccggcacggtgatcacgcggtggacggcgcccgtgtacgcggcgctgcgggaggagttccggcggcaggtgggcgcgcccagcgggtacacatcgctgggcgccttcgacacgtgcttcaacacggacgaggtggcggccggcggcgcgccggccgtgacgctgcacatggacggcggcgtcgacctcacgctgcccatggagaacacgctcatccacagcagcgccacgccgctggcgtgcctcgccatggccgaggcgccgcagaacgtcaactccgtcgtcaacgtcgtggccaacctgcagcagcagaacgtacgggtcgtcgtcgacgtcgccgcctcgcgcgtcggcttcgcgagggagccctgcaactagacgctccccacccccaatgtgtttcgtttccactgtcgtgagtgcaataagaagggacgtgacgtgacacgaaaaaatattggttcgtcacgggtagctagaggatcacgtagtaaagattctgccactgtgtgtattgcttttcgtttttttcccaatgttttgtatggctgttgcaagatattaattgatttgcgaaaattcgatgggggcttgttcgtaacaaaaaaaaaaaaaaaaaaaaanaaaaaaaaa

SEQ ID NO: 42941 - DNA, 534 bp, Setaria italica
  Peptide Sequence Number=SeqID_108915
atggttgtgtagtattacctttcagttttcataacatggcaactgacaaagatcccattttagattaatactataagtggaagacttgagttttgccatcagactgatatttactaatctagtaatgtttatgatttttatagtttccttctattattgggctttacttttcatagtttccaaccattgcagcttgccaacttttgaatttgcagtgtccgtattaatttcatattctcagtttggaatttagtttataacgtgtttgttaaaatccttacaccctattttatttctcacttgtaaacagatgaaatgaaggtgaacctacaatactttgatggccggccaatgtctgctacggttcctcctcgagtgacttgcactgttgttgaagccacagccgaatacaaaagggcttactgctcaacctcagtataaaagggtcgtgctggataatggtcttacagtgcttgcaccgccttttattgaagcgggtgaacaaattgtaatcattacagcagatgattcata

SEQ ID NO: 42942 - DNA, 951 bp, Setaria italica
  Peptide Sequence Number=SeqID_108916
caaagaagaggtcgcatttatcaggtaataaaagcacaacattcacatcaaggaagaggaggggccacaatacaggtggaactgagggatgttgacactggaaacaaaattacagaaagatttcgcactgatgaggcccttgagagagtttttgttgaggagaagttattcacatatttgtatcaggaaggagacactgtgacgcttatggagcctgaaacatttgagcaaattgaagtttcaaaggatctgtttggcaaagctgctgcatacctgaaagatgaaatgaaggtgaacctacaatactttgatggccggccaatgtctgctacggttcctcctcgagtgacttgcactgttgttgaagcacagccgaatacaaaagggcttactgctcaacctcagtataaaagggtcgtgctggataatggtcttacagtgcttgcaccgccttttattgaagcgggtgaacaaattgtaatcagtacagcagatgattcatatatgacgagggcctaagggatatcttggatagcgttttgttcttccaaattggaaaattgaatgcgttttgcctactaggataagtgttacctcgttcagctgccacaaatgtcaaccgtggccgccagctaccaagaacttagttcttacccacacattttggactcgcagatgcttttatttgatcttcatttcaaataattatgcaacagattcctttgatggaaaaccatgaaaatttttgtgggaactcaggtagagaagccatttttgtagataggttgaaattattcatattgctttgtatggcttactgtccagcggaacaatgggcttacatattttgcagcagaaagatcatatcgccagcatacactgcaagacctatttgtaatttttatcattgaaccaacgctgaaataacgtgttgattatatacagcagcta

SEQ ID NO: 42943 - DNA, 219 bp, Setaria italica
  misc_feature (201)..(201): n is a, c, g, or t
  misc_feature (203)..(203): n is a, c, g, or t
  misc_feature (211)..(211): n is a, c, g, or t
  Peptide Sequence Number=SeqID_108917
aagtaaattaaattaaggtataagcaccaaagttataaatgaaaataaacattcctttcatggctcataggtttgaagtgagtgtaacagctcccagtttcatgcttaatgtgttcttagttgcaactaggatgttagcaacaaagatttaatctgttaaattattgtcatgcactgctggttttattcacatttcagctntntagtagangctgaaat

SEQ ID NO: 42944 - DNA, 553 bp, Setaria italica
  Peptide Sequence Number=SeqID_108918
tcttacttagaaataactgtaccattttcacctctgcctaacactgtgctgaagttccttgttgctttcttcatctctttgtaactaaatctgccaaaaaatagtggaattcccttcttggcccttttttgacacaggagaaactccatgcatcgatagggttattcccttctatcttttttgagttctttattctttctacagatcagcagaatcagtactgtcactagtaaaactgctagtcctataatcaaagctccaattgctgggaacagaacaagcttgtaactgcgatgatgcttgggtggcactgcaggaacttgcactgtaagtgggctaggggatatatctggcgcgagaagtccagctggggctgatccagagatgttcacttgaagagcactaagcccctgaacgctaaaaaagcaaccggctgtatcaacagtagatatattcccttgactcacaaatgcaacaaaagcagcatcacggcaggtattcaacgtgacattatcttgctccccacgagatggcgagatacgacagaccagag

SEQ ID NO: 42945 - DNA, 681 bp, Setaria italica
  Peptide Sequence Number=SeqID_108919
ctctcttctcctttcccccccaaacctttccctttcctgtacgccccgctaaatcctcctcctctccccagtactcgccctgccatgcttcgccttggattttaattactacttgctgcttctgtttgggacgcaagatcaccagacgggccgcacgacgagagcaggaggaggaggaggagggattcttcattcatcggttcgtctgccggtcgagccaggaaggaaggaaggatgtttggggactgccaggtcctgtcctcgatggcggccatggccggggcctcatcctcggcggacgcgctcttcatccccaaccctggcgcgctcgccggcttcatgtcctcctccgccgccgccatgccgttccaccacttctccaccaccaccgcctccctaatactacctaaggaggagggcggcatgatgggcgcgctccaggcggctaaggacgaggacatggagctggagatggacatggagctcagcggcggctccggcagcggccacctggacggcctcctcagcttcgccgacgtggacgacgaccggcccgagcagaagccgcagcacgggggcctcgacctccaggcggcggacgccgggcagccgccgcagcagcagctcgccaccgccaacggcaagaagaagcgctaccaccgccacaccgcgccgtcgtct

SEQ ID NO: 42946 - DNA, 481 bp, Setaria italica
  Peptide Sequence Number=SeqID_108920
gctgccatgtgataaatgtatatgctttttttcgaatccggtgtaaaagtactgtatgattcaagtattaggatctaaataagttttcgaaaataaacttttggtcgttaatatatctttgaacatgttatcaattgctcaaaaatattaaagatatatgacatatgaatctgatacacaacttttagactctaagcctgcatctaacataattgttagtacttataaagtttgaccttttcaaatcttaatacgtcccaaaaggagagaagtatatatagatcggtggcaagtactcaattctggttcagttaaggtttcaaactgtacagattaaatacacacgcatgcctttgaggcttgtgattcgttgatatcaaactaaataacatgtaaaacctccaaagaaaccaggaaacaggggcataaccacatgatacttgaaaccgacaataatgatcgtctcacgttgtcagctact

SEQ ID NO: 42947 - DNA, 320 bp, Setaria italica
  Peptide Sequence Number=SeqID_108921
taaataggaaaaaaagtggacatcagtacaatgttggacgaagcagtccagtatgtaaagtttcttcatatgcaaatcaagctgttgagttcggatgagatgtggatgtacgccccccttgcctatgacagcgttaacatcgggatcccactgtgctcatcagtacaagaatgacaatgcccactgaaattgtatcaattcaggaatatgttccatcttagctttctcgttttgctgccaaataaatataacacatgctgttatacggtttttaacctatttttttcattatgtaacatccccttgagtaaatatcaatt

SEQ ID NO: 42948 - DNA, 1762 bp, Setaria italica
  Peptide Sequence Number=SeqID_108922
atacaactctcgttgataaactcactgctgaaaatgagaatcttaaggctttagtgggctctcttgagaccaaaattgatgaaacagaacagaagtttgaagaaatgaagaaagctagggaagagtggatgaataaagctgcagatgctgagtcaaagataaatgaactgaccaacacagtgctaagttttcaagaaaaggtaaccactatggaagcagaaaatcaattacttcggcagcaggcactgttgcgtactcctgttagaacaattcctgagaatgcatctccaaaatctaatttgactaatggcagtccacgtagtgaacaaatgacacctcatggcactcctccagctcgcaaggaatatgggagctttgcacagcctagagcatccttttttgagaagcagcatgagagtgttgatgcacttataaactgtgttagtgaaaatattggctttagtgaaggaaagccagttgctgcaataaccatatataagtgtcttgtgcattggaagatctttgaaacagaaaaaactagtgtttttgatcgtcttattcaaatttttggttctgcaatgcagaaacacgatagcaatgaggatcttgcatactggttatcgaattcatcgactttattgatcatgcttcaaaagagcctaaaagctgctggcacaacaggaactagtccacagaaaagaccacagactcaatcatcattccttgggaggatggtgttccgctcttcaaacatcactgttgatatggaccttgtgcgccaaatcgaggccaagtatcctgcttttctttttaagcagcaacttacagcatttgtggaaggcttatatggaatgatccgagacaatgtgaaaaaagatctttcttcattgctgtcatatgctattcaggtcccaagaactgtgaaagctagtatggtgagggggcgttcttttggatcatcaagtttgccaaggggacgttcattttcaaatcaagctagttattggcaggccatggttgacaatttgaatgaactcttgaaaattttgcaagacaattgtgtcccatctatttttatccggaagatatttacccaggttttctcatttatcaatgcacaacttttcaatagccttcttgtacgtcatgagtgctgctctttcagtaatggagagtatgtgaaacaaggattggcacaactagaggcatggtgtggagaagtcaagccagagtatgcaggatctgcattggatgaactcaagcatatcaggcaagctgttggtttcttggtcatattcaaaaagttcaggatttcttacgatgagatagtcaacgatctctgcccagtactaagtgtacagcagctctacaaaatatgcactcagtactgggatgacaaatataacacagagagcgtgtcagaagaggtccttgaggagatgcgaacatcgatgaccaaagaatcgaaccaggacactctagagaacacctttttactggatgatgaaattagcatgcctatatcacttgaagagatagcagattctatggatgccaaagaattccagagggtcaccccaccacaagaacttactgcaatgcctgcctttcaattcttgaagagctgagccctcaaagggccagagacacatccttttcctcgtcatatgttgctgcatgggctaaaaccgcatacacggatacctcagcattcttcattcttccatcagatgatgtaaattcaatatgggttccattatcc

SEQ ID NO: 42949 - DNA, 1252 bp, Setaria italica
  Peptide Sequence Number=SeqID_108923
caagagtgtgacgacacgctgcacagatgcaagaataggatcttagaagaagaacagatcgaacaggaggtgaggaattcagcctttcctaaacggatagcacatgctaccaggtcactcatctcctctgcctttggccatgataaccagttaagaacatctattgttagaagatttgagtggtatgcagatggtgctggcgacttcttgaggttcatcgagcttggttgcacaccgcattgtcacatgcccttcaaccctttcatcaagaacttttttgcagggaagaagctgcagcacaaaatcgaccagggaaatgggagcagtttttttatactgtggttacccttcattactgcagagcatagggtagaggtttccctagtcttcatccagaaagatggtaatgcaccagagaacaatttttacttcagcatcatgctacaactttctgagagtacggacatagttgggattgcaatgaagtgcttgcagctgtttacacctcttttcaagtctaaagttgaagttattaggaacaaaattatgaaactgcctgcacaagacttctcatgggtgccgtttgttgactcacgccagaaagaacattgggacaatctagttggttgtgtctctcagtggcttcgtccagacccatcatgctgcaagaagattgaccagcatgaagctcaccattgtagcaacacagacacgtcagatgtttctctagaaccagttattgaagcgcatttggagtgccaagtctcactggatggaggcgaaatttgtctccaagattctgaatatctgatagctggactcctctttatgccccatggttcttcagagaacctgtcgcctggggataaaagctctgctatagcagtgaatcacagtgaggagcaacattgcatgcatagagacattaccttgacacagctggaagagatcacacttgcaaaggcggtagagtactttcgccaaaacacagacgcattagtctaccagatgctttggaagtctaaacagggcactgcatatattcatgttgtgaagggaagcacgaagatgcagagcacacgacgaatgattcggggaggaaagattgtgcaacaacaggagcgagatcatgtggttcctcagttcctcaacttatgggttggacatgcacccatcaggctgcaaggctcgatcgtggactggattcagaaagagggaaaaataagctagcattttcaccgctacgcctgaa

SEQ ID NO: 42950 - DNA, 337 bp, Setaria italica
  Peptide Sequence Number=SeqID_108924
ttccggttctagctcgccatcttatactttccacaaggttttcaaccaagattctgggtgcttcagttggctgcaaagttataatcttcaagcctaccattgtatccatacaagtcgatcagttagtagtgagaatcaggctactgtggagcctcaacaaagtccaggagcagctgtatcagttgataattctggtgaaccaaaaccgaagaggaaaaagctgaaaggaaggagggcagtaacaagatttttgaaatccttgagatggaaaagaaaagggagattcagagaatgactgcagaggagaagattttgtacaaactgaagctagctcaaa

SEQ ID NO: 42951 - DNA, 624 bp, Setaria italica
  Peptide Sequence Number=SeqID_108925
tccgatgctagcagaccatcacagttccttgcacattacagagcttcgacgtgttgatccaacacgaggcaacgaaatcggtacatgacgtgcatgacgttttgccaaaacattattcaactagcgacaaagtgaaattcagctcaagaggaaggcttgctggcaagcgtgaagctacttcatctacggcaagcctgagcccttctccctagcctccctcttgttccgctcctgctccaccctgtccatctccctggcgatccggtcccgctccttcacggcggcgtccacgtccgccgcgtcggggaccacgctgtccttcacgctctgcgcggtctccttggccgcgtcccaggtgccccgcgccgcctgcttcgccttctcgctgatcgcctgcgccgtctccgccaccttgctcgcgccatccttggtcatctccaccaccttctccccggccgacttggtcccctccacggcgcggtccttggcctcgccggccctgtccatggcccgctccgccgcgtcccccgtccggtccttggcagcccgcgccggtcgtccggcgcgttgttgtacgcctgagacgatcttggcgcagtctgcaagcagagtcggctccagctc

SEQ ID NO: 42952 - DNA, 601 bp, Setaria italica
  Peptide Sequence Number=SeqID_108926
aagtacaattcagtaagatgcttgctgcgcaagatatcatagattcggttcacattcaaattggttggttttaaaagtgtcatagcgagggatagcgccaatcactaaactgtaattcttaattgttgccatactaatgctaccgcattatataggcatggatagcaagggtgatcaaccatacaatatatggaaggcagtggaaataaacagcttaacagcatagggatggctggaattatgggcaagagggggaaagcaaggtgaagctattcaggacgtaccataaagagtggagacatcatatttgagtcaatatatacaaccaccaacagctaatatattagatctagtagttataatttgtatcagaaatgagatagtaaatggcacatacggacagagagaacttagtgagaatgccccagttacaaataacaaggccaactgtaaaacagtcctatatctcatttcacatgtagtctagtccctttgcatgtgatggtttgaaatgtatatgcgtatatgatagcttgttccatttaacttgctatttgaaataatatatgtatatatgcatagagcaaagggacaccaaccc

SEQ ID NO: 42953 - DNA, 711 bp, Setaria italica
  Peptide Sequence Number=SeqID_108927
atcaccagaatgccaagaaaggagggcactgttgctagaagggtaagctgatggaaatccatgcaacaagcacttaagggaaaaataattttcctgaccttcacctagctttgtggtgactccatctattcttgatgaaagctggtatatgggttccagcatttccaaatatgaaccagatttctcaaaaagaaggtggtgcttggatttgtcaaagacagaatgcttgagcagcagggaagggtaagaattatccaaggaaggctttccactgtaaagaaatgacaggtatgctttcttaaaagtatgaaggtagacctccaaaagagaagacaaggtatccaaacagcgtccaatgttcttggttaggtatatagacaaactatttccatgagtaaatagctcctcaccctgaacctcatgttttctatgtgaatccacctcagtttctgcacctacctgcacctgctgcctctgaagatccgcattaatgagtgagagaataaaagaaagccaagctcctttccttgggaaatcccaactctccagcttactagaaccaagaatatcagagtgcaacaactctaggagttcaaatattaatgcaggcagatcgataccagcatgggatgaagcaccattgctgatactgagagcaaatgctaggaagacgttgacattgccaagttcaggcttcaagtaatcatcatt

SEQ ID NO: 42954 - DNA, 385 bp, Setaria italica
  Peptide Sequence Number=SeqID_108928
cttggtgcagacttcaacaccatactttggatgttaatatctcacatatctatagttcatgacctgatcaacaccatatgaaagtgcttacaaatatgaatctaatgatactagagttgtatcctacaatctataaattcttaggttaagtcttattcaaagattatgaagtttgaatctcgaaatacatgcacgtcttatgaaaagaaacggaggagtaacaaactgctagtaagcgaggggaaatcttgggaaaatattatatacagttttcacaatgatggatccatacatttgcataatgtatatacattatgttttcccagcacaaaaaggtgactgcagggctactgagttaattatggtctatggcttcagttcttca

SEQ ID NO: 42955 - DNA, 1174 bp, Setaria italica
  Peptide Sequence Number=SeqID_108929
attttcagtatctaatgtagcaacttgaaccaacgatgatctctgttgcgcactggttgaactactgtcattgccaagcacatgtaaaattccatcatctctgaggtatgcaggcaacagtaagcaaggtgacggcacgttggactcaagatgtggacagaatctagaattagtgtttgtcacaaacagggccgaaggataatttgaatagccagaggatgttgaaagagtcagcggtgagtctgcagactcgatattattaacctctgccgttagaagatatggagccccatgcgggtgaaaatgcacagctctcaatgaacggcgggtttttaggatgatggctgggacagaagactcatctcgcttattatagttccatatgtacaatttgtgacctgatgcaactgccagaatctcccctcttgcatgaaatgcaatggacgcaattggccgatggaagtcttgtgatccaatacagtctgaggtattagcatcccatagacgaacttcatgatccaaacttccactagccaggatatcagaatataacggatggtacctgaccacccaaggagtgcgtcgatgtccactcaaaaccttcaagcatttcccagtatggcagtcaattattttaaccgtatgatcaccatgcgtggatacaagtgttttcccatctggactgaaagcagctgcaatggttgaccgaggaggtggcaaaagagggcaatacttggcagaccagcgatgcagggactgcgattctgcccaagaaaaaatgccatgtttagcatctgcatctgcaaatcttaattcaattaaatcaggatcacatattggagaattattccatatccttctagcttggtgttttgttcgaggggagacttctcgttgagttaataaatgaaagatgttccgttgccttgatcttctgggcgatggaatttgacgtctagaaaccaaaccagaagatggtgctgctgtagaagtatgcttttcgtgttctaaccaattttcagccattccaagtctttgatatattgacctggtgggtgctcgtcggcggcaaagggcccggcgaagacgtggcgaagggcgccgccgctcgcccagtcgtcgccgccccgaaaggaagaccaggagaaaagagaggtggacgcggtgggggtgg

SEQ ID NO: 42956 - DNA, 2178 bp, Setaria italica
  Peptide Sequence Number=SeqID_108930
agcaaatgtggaactatcctgggccctttcttccagaactcctacactgaagtgaaagttggatcatgccctgaatgccagtccaaaggaccattcacagtcaatgttgagcagactatatataggaactaccagaaactcactcttcaggagagcccgggaattgttcctgctggcaggcttcccagatacaaggaagtcattcttttgaatgatctgattgattgtgctcgtccaggagaggaaattgaggtcactgggatatacacaaacaattttgacttgtctttgaatacaaagaatggtttccctgtttttgctacagtggtagaggccaactatgtggcaaaaaagcaggatctcttttctgcatacaaattaaccgacgaggataaggcagagattgagaagttgtccaaggatccaaggattggggaaaggattgtcaaatcaattgcaccatccatttatggccatgaagatattaagactgccattgcactagctatgtttggcggacaagagaagaatatcaagggaaaacatcgcctaagaggcgatatcaatgtcctcctcatgggtgatccaggcactgcaaaatctcagtttctaaagtatgtggagaaaacaggacacagagcggtatatacaactggaaaaggagcctctgctgttggtctcactgcagcggttcacaaggatccagtaacacgagaatggacactcgagggaggtgcactagttcttgctgataggggcatatgccttattgatgaatttgacaagatgaatgatcaagatagggtgagtatacatgaagccatggagcaacaaagtatcagtatatcgaaggcaggaattgtcacatctcttcaggctcgatgcagtgttattgcagcagcaaacccaataggaggaagatatgattcatcaaagacattcactcaaaatgttgaattgacggatcccattatttcacgttttgacatcctttgcgtggttaaggatattgttgatccattcacggatgaaatgcttgcaaggtttgttgtagatagtcatgccaggtcccaacccaagggagctaaccttgaagacagggttccaaccgatgtgaatgatgatccattagctgctgcaagacaagctgatccagatgtcctttctcaagacatgctgaagaagtacataacttatgctaagctgaatgtatttcccaaaatacatgatgccgacctggacaagattagccatgtttatgctgaactccgacgcgagtcctctcatggtcaaggggttccgattgcagtcaggcatatagaatcaatcatccgaatgtcagaggcacatgcgaggatgcatttgaggagctacgtgtctcaggaagatgttgacatggccatccgtgtcttgcttgactcttttatttccactcagaaattcggtgtgcagaaagcacttcagaagaatttcaggaaatacatgacatataagaaggattacaatgagttgcttctgctcctcctgcgcacactggtcaaggatgctctgcactttgaagaaatcgtgtcaggagcaacctcacgcctcactcacgtcgaggtcaaagtggaagacctgaagaacaaggcccaagagtacgagatctacgacctgaagccgttcttctccagtgcacacttcagagacaacagcttcatcctggatgaagggcgcggcatcatcaggcatccagtggcagcatgacaactcacttacctcctgtctacgattagcgtagcttgacaccctggatgaacagctgcagccgccacttgcaggctaatcaaacgactgagagtgtccgactgccttaccaggagatagattgttgtgcgtttatttcaacttctgtatggcttgactgggttcagagtgtgtcatgtaaagtgtccaaacattgtgctgtcttaatgggatcattggtgctcaatggtattatttagacaatttccttggtgtaatgagttaatgaccttgtcttcatacacagaacaatgtagttagcatcaattgccagtacttgggtagttgggttgttttttcatttaagcttgtagttgtattgtatgaggtgcccctggaattttactgacctgggcaagataaggccatgtcaattatactaaaaaaaaaaaa

SEQ ID NO: 42957 - DNA, 488 bp, Setaria italica
  Peptide Sequence Number=SeqID_108931
gttccgttgttcttcggcagccgccccatctccatctcccaccacccatcctccctcctcctcggccgcctcggctcctcacgatgatcgccgccaccaggctcgtcccagaacttgcgcgcctcggcgtcatcgggccggatgcacacgtcgtggcgcgccacgacgcggccgcccagggacaccgctgcctcctggtcggggtagctgaggccgcggtggccctccggcgcagtgtcgtagatcaggtacgccgcgtagggcgtcgccggcgtcagcgccgccgtcgggagccgcccgtagatgtccaggcacgtgcactccaccagctccgccacctccccgaaccttgagagcgggtgcggggtgaatctccagctgaactcgccgtcgtcccacggcaggctgagcctgcgggccgacagcgcgtagcacctggcgccggtggccctgtccagccacacccagcacccgccgtcgtcgtcccc

SEQ ID NO: 42958 - DNA, 957 bp, Setaria italica
  Peptide Sequence Number=SeqID_108932
taggaagtgtcgatgtcttctcttggatcagctgtctagatcttcgcactctagctgcgctaacaaattccacgctgtccagctcaagtgatccacagaatatatctttccatttcttaatacctgaaggagacgatgataaagtgccctaccacacgttaaaagtagtgctacctgattcagatctcactgttagtagtcagaggcaaatcaaggacaagctaaatgttgccactccagaaggaaattttctttggtcattccacaaggaattgtcacccctccttatcgcaaaatctcagttgtccaaaaagcgatatctttatatctctgcagactccatcataaagggcaaaattgaagatcttggtcgcatggatttaggcacttatgccattgctgccactgaagattgcagcaagcactttggtgattatgtcaatatggacgttctaagtgacacacaaagagcagcggcaaaaagttgggtgtctaaagaggatacatgcctacttgactttgatgtgctcttggtagaacctcgtaagctggacaagaacctggttgattcaattatgtcgtggactagagttgttactgtagccaatccaagggaccgcattaggttggcagttgctcttgccctctatggcaagtatctgaagctaccttcgatttggaagcgaggagatgctaatgcagacattctcaactatgatggaccacataaagtttgctctgaagatggtcatcagcacgagcaatcaagcgatggggagaactggaggaaataccttcatcagaaatttgaagccattctgaacgcctaacttcatcctacagtttttccattgtgcgcctgggagatgactctcttgtataacttgggcaatttactaacccgtaaagcccggaatagaatgcatttcgttctcctgccatcaagtgactaaatgg

SEQ ID NO: 42959 - DNA, 311 bp, Setaria italica
  Peptide Sequence Number=SeqID_108933
agcgacagtgcgacacctcacaccttagaaccccactgccgcggccggagatctcacaccagccaactcatcaagctcgctcgccgtcgcactgcgccaccggcgggggtccgggcagctctctcccgccatggcctcctggctcaaggtcgccgaagacttgctcgaagtcgtcgaccggagggccaagatcgtggcaactgagttgtcggatgagcagtctacctctcaaccttcaggatcgaatagccaggaagtgcaagcgaagaagggaaagccgagggagaagggtccactgaagctcacttctg

SEQ ID NO: 42960 - DNA, 263 bp, Setaria italica
  Peptide Sequence Number=SeqID_108934
tccgcctggttagctttgtataaactcgcaacaaaatttacaagacctacatcactggttaaatcattgccaagaaatggttattcccttgtccccagggattgagtacgatccacaaaccatgacaaaaagctcataaacttcaacgcagacaagcccatgtgttgccttttgttcagtagaattaacgccttgcctggacagcgcaacatgaatttgaaaggaaattctcatcaagatcttaatatcactgaagatgtaaa

SEQ ID NO: 42961 - DNA, 1112 bp, Setaria italica
  misc_feature (1)..(80): n is a, c, g, or t
  Peptide Sequence Number=SeqID_108935
nnnnnnnnnnnnnnnnnnnnnnnnnnnnnnnnnnnnnnnnnnnnnnnnnnnnnnnnnnnnnnnnnnnnnnnnnnnnnnnnaatttgcaaccagcttgtcgagataaattgcatttgccaactcaaatttacagaaacatttacattaatatcacgaagatgttaactcagttctcatatgtgaacaaatgatccgcctggttagctttgtataaactcgcaacaaaatttacaagacctacatcactggttaaatcattgccaagaaatggttattcccttgtccccagggattgagtacgatccacaaaccatgtcaaaaagctcataaacttcaacgcagacaagcccatgtgttgccttttgttcagtagaattaacgccttgcaggcaggcttgatgcttagaacaacaaggtccctcctgatggtaggcgacctgaagcttgcagttccttcaacgtgcttgccaaccagtccaagccctcatatagaccatcacctttgagggcacaagagccctgaatgtgccagatgcgatttttcaaatcgtaaagaccaaggccctcgcacacctccattggcgtcattgcccctttcatatcttgtttattggcaaataccaatatgacactgttaagcatcaaaggatcattaattattgcctgaaattcagctttggcttttccgattctctctcgatccaatgaatcaaccacgtatatcaagccatccgtgttgttgaagtagtgcttccacaggggcctcaatttctcttggccaccgacatcccaaacagtaaacatcacattcttgtactgaactttctcgacattgaaaccaatcgtgggaacagtcgacaaaacctccccgatatgcagcttgtacaggatggtggttttgcctgcggcatccagcccaagcatcacgaccctcatctcgctggtgccgaagaaggcatcgaacagcttgcggaacgcctgccccatccgcgcaccgaaatccactcctcgccacgcgagcaccaaactttcgatcggattttgtggcttcgtcttctccaagtcgccggtaggtttttggccctatcggagtaatctcgtagaactagtcg

SEQ ID NO: 42962 - DNA, 634 bp, Setaria italica
  Peptide Sequence Number=SeqID_108936
agattataaggaaaatgaccaagcactcataagggttatgaccttacaaactaactaccaaacaacttatctcaaaatacggtctggatgataacacaatagacttcattggtcatgcagtggctcttcatagagatgatagctacctttcagaacccgcaattgacactgtaaagcggatgaagctttatgcagaatcagtcgctcgttttcaaggtggatcaccatatatttatcccttgtatggcttaggagagcttccacagggttttgcacgactaagtgctgtctatgggggcacctacatgttaaataaaccagagtgcaaggttgaatttgacgatgaaggtaaagtttgtggtgttacatcggaaggagagactgcgaaatgcaaaaaggttgtctgtgatccatcctacctacctgacaaggtcagaaaagttggaaaagtttttcgggcaattgctattatgagtcatcccattccaaatactgctgaatctcactccgttcagattatactaccacagaagcagcttagccgtaaatcagacatgtatgttttctgttgctcctactcacataatgtcgcatcaaaagggggaattcattgcattcgtgtctgcacaagcag

SEQ ID NO: 42963 - DNA, 1925 bp, Setaria italica
  misc_feature (1888)..(1925): n is a, c, g, or t
  Peptide Sequence Number=SeqID_108937
cactctatagattatgccggcgttcacttgcatcagtgttatccaatcgtcccaggctgcccccgtccatgaactcgtcaaccaggttgatcgagcaaatcctgccatttgcccgtgaagcagtggatttggtcctcgagggactcgcatccgagcccatggtggtctcgcccattgatcttgatgaattctcaaacttctttaaagtgatgtgccagcaggcacgtctttggatatccggtgaggggccaatgcccaggaatctgtacagcagggagtctgagcatggtaacacatggatatggaggttccacaacatgtcgatggacatgttgaaaaggttggatgagtgcttgaagaagttggagatggacctatcattgtcatcagagagcaccggggtcatggaaagtcaaaccgtatgggccgctcgatcattcatcctggttgtgttgactgaactcgatttcatctcagcgatttatgaggatgtggggcacaccctacagcttgtgttgatggcacatagggcgccgctcaatgcacttgtccgctgttccaagagaaatgagcatctccattggcttgcgaagcataagaatctcctctgctttgaggccagaaggaatttagtcttcatgatgctccctgaaggaaaggatgattttggggagctgcatgagatgttgattgatcggtcacatttacttgatgaatcctttaattacatcgcacaggcgaaacacaatgagcttcgaggtgggctgtttatggagtttaagaatgaggaagctacaggtcctggggttctgagagaatggttttgtttggtgtgccaagctcttttcagtccgaagcaagttctcttctcgccttgtcctgaggataaacgaaggttctacttgaatgaaacatctgctgtggatccattgcatctgaagtacttcacttttgcgggacgaataatcggattagccttgatgcataaggtgcaagttggaattgtgctagaccgtaccctgttcttgcatcttgctgggagaagtattacactagaagatatttcggtggcagatcctgtcaaatatgcaagctgtaaaaggattctggagatgaatgctgctgaaattgatgatctatacctaacattttcccgaggagctcatgaattaggtactcgagagattattgacctttgcccaggagggcaggatatcagtgtgaatatcagaaacagagagcaatacattgatcttcttattaagaatacgtttgtggactctatttcagctcagctgacccatttcacccaaggatttactgacatactagttaatcctgagcgtcgtaaagacttttttgagtgcttagatctggaagacttagaccgactgctagggggaagcaatgacacaataaatctgcaagattggaaatcacatactcaatataatggctacaaagaaaaggatcgcctgattacttggttctggaaggcggtcgagcgcatgccaatcgagcaacagaggcagctccttttcttctggacttcagtaaagtacttgccatcagaaggctttggtgggctgagctccaaactgtacatatacaagacatcggactcacctgaccgtctcccatcgtctcagacctgcttctaccgcctctgcctccctccttatacatcctcgaaaatggtggaaaaccagctgcagaagatcacacaagaacatgtgagctgcagcttcggtacatggtagttgctgccattcttgagtgggaagcggtatattttgtacatatcgtaggctagtgtcatcctgttatctcattgaatctgatcctataagcttgaagaggttaattaggttctttgtttaaacttttnnnnnnnnnnnnnnnnnnnnnnnnnnnnnnnnnnnnnn

SEQ ID NO: 42964 - DNA, 439 bp, Setaria italica
  Peptide Sequence Number=SeqID_108938
ttaacttccatgataacctatactttggccactcaggcgtcacaccaacccattttccataatcaatgatcctagttctgattatcatcttggacagcattttaaccaattcaattctcaaacaaaaccatccataatcaagtacaagatagattctacaaagacacaataacccattccaggttcagcaactatgccaaattcttaaaacactgcccgcggcacatgaaagaacactccaaggaagctatcctcccaactcaaatgtctagaatcatcgcacggtcacgaattcaccaaacacaacaattacacatctagaataaaaaggagcaatctatgcaaatggatacagtatcaaatgaagatggaattggtatatcaacagtgcatgatcactaacttgctagcgatcctgacagtgcgcagagaggtaccg

SEQ ID NO: 42965 - DNA, 361 bp, Setaria italica
  Peptide Sequence Number=SeqID_108939
gcagagccttcggaattcataaagcaccaaataaattcctgacctctgtcacacggatccgtccagccaaaggtgaaaaagaaatagcaggagcagtgaagtgaagtgggggacagatcacaaagaggaaagaccgtcccccactttaaataaagcacccttttccgggctattttactcgcggattccgatctgggggacctcccgttcaacgaggcgccctggaattcggttcccgtcgcagccgcagatccgtggcgcgggtcgcagtgccgccgcggggcgcggtcgcctccggtcgcagggcgcgggggcggagcggggaggcagccggccagggagcgcgagcgagagctagcgg

SEQ ID NO: 42966 - DNA, 285 bp, Setaria italica
  Peptide Sequence Number=SeqID_108940
tgccctgcgtcgtttctgcccctcatctcggattccaacttgccttgccccccctctagcaagcagagccttcggaattcataaagcaccaaataaattcctgacctctgtctacacggatctgcaaagacaaacaccagtcaatagacacaacacactgaagccatcaccaagcaggaagctaaaaataaaagacaattcaagaagcccaaccaaaatcacacagcctgcagaactgaaaccaagattggaagccttcccaagtaacggtaaattcgtttgggt

SEQ ID NO: 42967 - DNA, 2421 bp, Setaria italica
  misc_feature (2413)..(2413): n is a, c, g, or t
  Peptide Sequence Number=SeqID_108941
tactccgcaggactccaaaagaaggttgaaatacctaaacgaagctcaagatttaaattaaaaagaatgtttatttcctaatcagactagagaacaaacatcaattgcagtatatgttgagacaaaaataggcctttttttttatccaagcctgctacatatttgccatatcctgataaacaatctatcttcacgtgggaggtagggctagaaatcaagaaccggtccctatctcatctcggagggtgcagctgagcctcgcttctcggcttctgagctgcagatgctgggagcgcaaaagggagtcgaacaaaagaattacgtgctggaatcctgtgggcctgcttctggtagccacaacttcttccggattatcaagatcatttcattctcttctgactccgggctgggttcagcatctacaacagttattacttcccagtgaagtgcatggaggtacttcttgatgaactcaatgacagcactcttgtccctcacaatgataaacccagtcggtctgaggatacggtccatttcaaggagcaggtcttcagcactgcaacctcttttgtcgaggtcagagaagactgtccatgcatggagaagatcatatgttcgaggataggttgaaaaggcttcacaccagtcatgattgctgcctatcagccctctatcgtagattatcttcagggtgcttggtccatcatgtggcacaacattcatcacccatacatctttatccttgagtgcagcagcaaatgacccaaagtttgctttcatgtccataatgtttctaatagtgtctggttttacctttgggcccaacaaattccaataattttctactctttgctgccacatttccgtatccttttcaaatgtgtcagcagtaacatacaaatcagcaagacggggaggcggggttgttaatcgagcaggccaaggagccagcccagttcccccatctctgtgcatttgttctggataaggagtaatgcaagcttccattggcactccccacactgaatctggatcatcaccacttttgcatagaggtggctttgtaccatgagctcgtctcctgtaacaatcattgttcagaggcttgacccaaataacagtttggtttcttttctccgcaattttccagcacatcctttctacaagggcactcatttctttccagatccggagatcttcctcatcctgtgcatacgcttcaggagaggagtaagcaaaataacctccaggcctgagcaatctgtctagttcaagcagaagaatcccatctctttgaagccagtcgatcctacaacgtgaacaatgggctaattcaaacgatctacttgggtatggaagcctttttgttcccaaaacaccaagatatgcagggatccctctttcaagtgcaaattgaatctgattctgatgcacatcatttggtgccaaagacattgctatcacattagaagaaagaaggtatcctccaaaactagcaactccacaaccaacatcaagcactgtgcgaagcattccctcattgtttatattgttatctttgaaatttagcatatttgcaatatttgatatatatttgtcagctccatgatgaaaatgggttccaccacctggaaacttgatcttttcacctgcttcaaccatccagttctggtctgacttctctttagcaaggtgagtgtgtggaatatttgctttccacactacatcgcggcttttcggccattttataggaaccttatatccgtgtggtggaggaatcaagcaattaaagcgtctttcaggaggagggcaatgcctctcatagtgctccatcaggtttaaatccagcttcagcctcatttgatatatcaagttcctatccaagcaggggatcagctctgagtgccggtcatcacacacaggaaagctcttgggcttaacatcatctgcatccccagtcccaaaaatggattcttcagagccatcctcaccatcatcactgccccatccaagtgtccgcgagaatttggttccatactcgaaagcggcgctcttagcctgcccgttggagcccgagaaatacaggaagagaaggcataggcacacgatcatcatgcagcacagcacaatgggcctcttgctctgccctgcgtcgtttctgcccctcatctcggattccaacttgccttgccccccctctagcaagcagagccttcggaattcataaagcaccaaataaattcctgacctctgtcacacggatcgtcgcagccgcagatccgtggcgcgggtcgcagtgccgccgcggggcgcggtcgcctccggtcgcagggcgcgggggcggagcggggaggcagccggccagggagcgcgagcgagagctagcggaaggcctcgacttgcgaacgtaaancgagcgag

SEQ ID NO: 42968 - DNA, 267 bp, Setaria italica
  Peptide Sequence Number=SeqID_108942
tcaccatgttgtcaggaagctccgctgccacggccgcatcccaccacccagtttgggaagagaagacgcgcaggacgaggacgcgttggttgtccatcacggtgagcaggcggaatgaggagccaccggcctcgagaaagatggtcttctcggggacgaagagaggcggcaacggtgggaggaaggtggaggtcccgaccagggggttgcagacgcagatccgggcggtgtcgcgcgagcccagggtgcggcagagggcaacgacgg

SEQ ID NO: 42969 - DNA, 329 bp, Setaria italica
  Peptide Sequence Number=SeqID_108943
aagagatactctccactatgcagacataagtcattatttcaccatttcatatcattgccagctgaaagatctccggtcagctcgtgggttcagtgtgaatcttaacccaaacatctccttgatggcctgccccttctctagatgttctaccagctttgcgacaagagctgcactttccctcacatgatccatgtcagtctgtgtccatatgcggcgcgatagctgcagccttcgttgtttggaattcagatcaatcccccacttggtgtaaaggctctctctttctagatgatggtagtttcttcagcatttgccttgtagagcatgtc

SEQ ID NO: 42970 - DNA, 320 bp, Setaria italica
  Peptide Sequence Number=SeqID_108944
taagaagtactaggagctgcagaccactgaagtagattcttccgaagattcaacaacaccatcaaggttttccagtggttgtttagtccggcaggcgggggcagctacagatgtcaacttcctccctgctgattataggagttcacttcattcaaagcgtatgaagaatatgcaacctggtgatgcaggggccgctgtaaagtactttcagagcatgcagatgaacaacccttcattcttttatgcttttcagcttgatgaagacgacaaactaaccaacattttctgggctgattccaaatctagaactgacttcagct

SEQ ID NO: 42971 - DNA, 296 bp, Setaria italica
  Peptide Sequence Number=SeqID_108945
agggaggtcttggcattcccaatttacagatcatgagctgggccttacaaatgagatggttgtggatacaaaaaaacctcttcagatcaaccctgggcagggctaaaattcccagttcaccctcaaaccaaagccatattctgcatttcagttaccacacaagttggcaatggacctaattctctcttctggtcggatagatggttacatgggtgttctctgtctgtttaagcaccagcagtggtctcgtgtctcgcagaggtgtatgtctagcaggacagttgcacaagctcttg

SEQ ID NO: 42972 - DNA, 381 bp, Setaria italica
  Peptide Sequence Number=SeqID_108946
tattctaaaccttaattaaacctactcagtatagcatgtactatattaaaatgttattccttgctcccacatgacatgttccattctggacttaatttctgcatgcggcttctcatctgtgttaaattactgaaaaacaattgaccatgaatttcttatacaaatttctctgttcttggtaaagttcatgtcctatgcattatacagtcgaaagaccatgcagtatggttattttaaattcagtagcgctacttgccatgtatatttattaggttttcttagtaatcaaattcagtaccgttgattagctatcctacaataaagaactgttgttccattgcatgccatccaagcaaagtatcacaatcagaaatacataca

SEQ ID NO: 42973 - DNA, 652 bp, Setaria italica
  misc_feature (220)..(220): n is a, c, g, or t
  Peptide Sequence Number=SeqID_108947
gtcagtaactctgtttcgtgagcagccatatcgtgtaccccatcttcttttgagtttctgcccgcttctctgcttctcaagctctttctggctcgagaagataattagatatgccctgtagctgtagcaagaaactgagtcatctgggacaatgacatagctcggtgcaaggaaagctcgacatgaatcacatctctctccaatcttgtcaaaccgcacnttaagctttggggcaagagatattttgatccatgtaagtggacatagcagggaaaaactgacccttcagcgatgatggtgcactgaagctctccgcaaaatcgtatcttgagctagctgaagatgcagatcatgggataatcttaaaggaacgcactagtagtcaaacatttgtcaggtgctatctctacaagttgcgcaatttgtcaccagaaatcattagagcaaaactttcaccagaaatcttcacaagaacaactaccagacttgaaatgatgaaaccgatacaagtctcgaacaactatctctctatctgcagctcggcttataaacttgattgcctcatggcagtcctcgcaaacacgcagattcttgaagatccgaagaggcatcccaagcggtggctgattatcccaaatgcaatggcaagcct

SEQ ID NO: 42974 - DNA, 473 bp, Setaria italica
  Peptide Sequence Number=SeqID_108948
tggaagaacacactacacgaaaaccaaagctgtccgccgcgtacttgcatcgcaccagtctagactagctgcagggtgtcgaacgaagtctcagctgggtcgtctctgcagcctctctcgatcaggagacgaagatgatggaggggtcgcagcagcactcgtcgaggagacagcagcagcacagcgccgccaggcagccctcgaggaagcccggcgacctgcgcggcggcggcgggccgtactggtactgcggcggcgccatcaccggcgggccctggtacggcccttggtagtaaccttgcgccgggtaagggtagctggcgtacctcgggtcgctcatcctcgacgaccgtgctcgagatgagcgggtggtggatttgctgattggttttggtttaggcggatgggggaaagcgtcgaaggcgacgggatcggagaggactggtgcttagctagagtagtgagtggttcgg

SEQ ID NO: 42975 - DNA, 507 bp, Setaria italica
  Peptide Sequence Number=SeqID_108949
ttaccaagacctttaaaaagtccatttgtatgtagactcattcattttcaaaacaatgtgcaattcctcttgcttcttcacagccactatatgcttgaacattgacccacttccacaaaatttgccatcatatagtgaaatctcctcatcaaacccactagttgaggcactaattctcacgtctgatggttgttttgcttctgcctttacctctataacagtctcaatgctgtcacctagcaaagcaaatatcatgtccaagccataaacttcgccctgaaaccgtcctatcaggacggatccaaatccagcaaaagaagtgtcgatttcaacatacccactaaacaacggtgtgtcaggagatccttcttcctcttttatccaaagactaacatccattaaaaaatatggacacacatatattccacgacatgggctacaaagtggcaggaaagagcaaccctgagaaatcatggctggatcatttctttgtagtcgtaatttaaa

SEQ ID NO: 42976 - DNA, 339 bp, Setaria italica
  Peptide Sequence Number=SeqID_108950
gccagagcctcgctgggtaatttcgatgggcagctgcgccaatggtggcggatactaccactactcctactccgttgtgcggggatgcgaccggatcgtccccgtggacatctacgtccctggatgcccgccgaccgccgaagccctgctatacggcgttcttcagctgcaaaagaagatcaacaggcgcaaggatttcctccactggtggaccaagtaaaccaggcaaccagcgtttctccccgtgtctgcctcctgcgtttctctgaaatgttgccttgctgttgttcacttaaagcaagagattgtacgacctggtcgtccgaggagtgcaagacg

SEQ ID NO: 42977 - DNA, 247 bp, Setaria italica
  Peptide Sequence Number=SeqID_108951
cccctcttcgtccgccgtcgcatcagcttcagctccccgctcgcgctccttaccctcctcctccgcggccgctgctgcaatgacctcctgctccttccgctgggcctcgatctcctcagcgagcgtcttgatcagtccgccgaagatccacccgccgccggagccagcctcctcctcggcccctcggctccctgctgcacctcctcctcctccgcggcggcggccgactcattcaccctccgctgct

SEQ ID NO: 42978 - DNA, 596 bp, Setaria italica
  Peptide Sequence Number=SeqID_108952
gctgaatggataggtgacaacaccaacagtgagataaccagcttcctttgatatctgggcaacaactggagcagcaccggagccagtacccccacccatgcctgctgttataaagacaagatctgagtccctcagtgcagtggctatggcttctcttgattcctcagcagcctgttctcccaaatttggatttccaccagtacctagtccacgagtcaattgctctccaatttgcagaggatattgcgcttgtgaagtaataagggcctgggaatctgtgtttatagcataaaattcaataccctgcaggccgctgccgatcatgcggttgacggcgttgttgccgccgccgccgacgcccaccacctttatcctcgccgtctccaccggcgcgaaggagcaccggacggtcgcgcggcggggctgccggtgctcccgccacccgcttcgtggcggtgcgcgcaggtgggccgggcccgggaggcggacgagcgcggaagccgaggaggaggcagcagcggacgaggccattgccactcgctcgaaatccacggacgggggaggtgatgggcgaggggaccggcggaggggatctg

SEQ ID NO: 42979 - DNA, 1053 bp, Setaria italica
  Peptide Sequence Number=SeqID_108953
cactgtgctgaacctcagaaacaaacaaaacaaacgatacatacactgaaattgaacctaatactatccaacgctaaaccaagctataaatctccaggtagctaaagaacgccttcgggactgccattggcaggccgtgccaactctctagttccctacggttacgggtcacagctccacaaggaagtttgcctaacgaactgtgctcaggagaagagtcttcgggaccaagctgaggcaggtgctggttgaaccacagctgctgctgctttattatgggcgaaggttgctgctttctccttggcttccgcaatccgtgccccctttggatcagccagaagggatttctggaaggattgtggaaatcctgtcgcgatgatcgtcacatgtatctcaccagtgtaacgatcgtcaacaacggccccaaaaattatgtttgctgaaggatcagcaaggcttgtcacaatctgggacactttgttcacttcttgcaaagtgatgtccttcccgccagtgatattgtacacaacgccagtagctgcctcgatagatgatccaatcaaaggagcaagtgtagcctgctcagcagcttcttgcgcccgatttttgctggaagaaacaccaacgccaagcatggcagttccagagtttttcatgacagctttcacatcagcaaaatcaacattgactagtccaggtatcgtgatgatgtctgagattccttgcacaccctgacgaaggacatcatctgcaagaaggaacgcatcttgcaagggcatgttttcatcggcaacatctaacaacttatcgtttggaatcacaataagtgtatctacacttttttccagcttctctaatgcttccagtgcctgtagagagcgcttacggccttcaaagctgaatggataggtgacaacaccaacagtgagataaccagcttcctttgatatctgggcaacaactggagcagcaccggagccagtacccccacccatgcctgctgttaataaagaacaaagaatactagaagtaccctacaagtagacaagtaga

SEQ ID NO: 42980 - DNA, 553 bp, Setaria italica
  Peptide Sequence Number=SeqID_108954
tgaacaagaccgtacgtggaggtactcaagcccccgcgcgatggcgaggtacgtacctacgcgccagcgccacggtggctgcttttctgggttgaaaaggaagctgcggagggacccacctggcatgaactcgaacaccagtacccggtggttaccttcattgcagtagccgatcatgcggacgaggttccggtggtggatctgaccgatggactgcacctcgttggtgaactcttgctcgctatactcgttcgagtcgatgagtttcttcacggcaacgagatgcggctgtggggatctcatcgttcccaggtacaccttgccgaagctccctttgcccagcaatttctcgaagccattggtagcctggtaaagctccttccagctgaacgctcttacgctcgagctcaatagctgctgccttgctctgttcctgttcctggcgggtaaataacgccatgccaggaggccgctgatggtgatcaccaagagaaaagccaggcagacggtgatgaccttgtaggtcattgcggatttcctcctttttgccgtc

SEQ ID NO: 42981 - DNA, 157 bp, Setaria italica
  Peptide Sequence Number=SeqID_108955
acaaaccaatggctgctgagcgctggctggctcatcggtcttgacaatgacattgttcaggtggggggtttgtccctcccctgttgccctgtctcgttgtcataggctaggttttacccctggtgcttggtacccatttgcaaattggaggtcttcg

SEQ ID NO: 42982 - DNA, 525 bp, Setaria italica
  Peptide Sequence Number=SeqID_108956
cacacaacacccccgagaacttagccggcctgccccagtgcacgtcgcaccacctgcagcggcgaaggaaatggcccctgccaattgccagcagcagcagcaggcgccgccgcagcaggtgcgagcggtggatggccgcaaggtggtggacgaggtgtccggctggctgcgcgtgttcgacgacggcagcgtcgaccgcacctggaccggcccgcccgaggccctcccgctgatggagcccgtggctccgtacgccgcgccccgcgacgggcacacgctgcacgacctccccggggagcccaacctgcgcgtgtacctcccggaggtggccaagggctccgaggacggcggcggcgctcgccgcctgcccgtcatcctgcagctccacggcggcggcttctgcatctcccacccgtcctggctcatgtaccaccacttctacgcgcgcctcgcgtgcgtggtgcccgccgtagtggtcgccgtcgagctcccgctcgcgcccgagcggcgcatgcccgcgcacat

SEQ ID NO: 42983 - DNA, 484 bp, Setaria italica
  Peptide Sequence Number=SeqID_108957
ccgtcgtcggggccgggctcgaggaaggccacggagtcgctgacggagcggcggtgcgcgccgcgcttggcggccgagaagtcgaggaactcgtcgacccacgacggctgctggtgctgctgctgcggcggcgggagcggcggcatgggtgcggcgaggaacgtgcccacggaggggctgcgctggtgatggtggtgggcgtggtggtggtgcccgcccccgaactccggccatgccggcgccatggtggggatcttgggcggcagctgcgccatggccgggaccctgcgccgcgcgcgttggttcgaggaatcaacgcaacacgcgggaaggatggcgcaacgccgaaacctccccaatgccgagggcccgggcggcaatgtaaggccgacgggcgcgggtgccgggattgcgcgcgcggtgccttttttagctctcgttccccttttttttctgttgctcccgctgccggtgcgcgccgtcg

SEQ ID NO: 42984 - DNA, 446 bp, Setaria italica
  Peptide Sequence Number=SeqID_108958
taagaactaaccgaacgaacctacctactagacttaggactgcgaactgaagtgcggttcagcctgcaggcaccgtcgtcatcagccttcagggactcctggatccggctgtccgcagtccggtcgtgcgccctcaggcctcagcccgacatcccctaatgcagtgctgcttgcctgcacagtgattggtataatctccagaagaagcatgtgaagccattttggtgtggacaatttgatgaatgtatagaaaagggtcaagctagtctgcaaaagaagacgcacactgaagagaaatatgctcacagagtgaaggccattatgcatgcccttgaagtgcaaaggtcccatttttcacttgaaggtcaattaaatacttatgaatcctgtgcatccataaagaccaaatctgtttccaagaacatataaaggatcagatatcaaaa

SEQ ID NO: 42985 - DNA, 587 bp, Setaria italica
  Peptide Sequence Number=SeqID_108959
ctgctcccgcggaggacgtggcggaggaggcgcttcacggtgtcgaggcgggcggggtcctcgacggcgccgccggcgtcggcgtccgtcacgcgcaccagcgccgccacgcgggcgtcgtgggtccacacctccgacgccacgatgttgcaccggaggtccgtcagcaccgcgaacacctccgacagcaggcccggccggtcccggccgatcagctcgatggtggtctgcgactcctccgcctccgcctccacgccgaccgaccgctccggcgccgcccggaagctcagcgatcccgctcccagggactgttcaattctgtcgatgacttggccgtcataaagtttattcccatcctgatccacgacatggaacacatccatgaaccactcgccgtcggaggtaatgtaggcccgcttgatggtcagcttcagatcggtcagcacctgaaccacctccagcaaggtcccatacttgttcgcgctgtccaccttcaccaaggtggcagtcatgtcggagtcgttgtccacggagaccctcggagggttcattctgatgaccagcttctcgaactcgtcgaccatctc

SEQ ID NO: 42986 - DNA, 883 bp, Setaria italica
  Peptide Sequence Number=SeqID_108960
agagaacaattacagactcgccaagcgctcgaggcgactcacatcctccccctgctactacaccaccagactggaaatcgaacccgaccaaagaatgcatctaatccctcatcgtccaagcgagatcactgcttgcagaagcttctccatgctaccacccgcgaaaccgcagccggcaacatcgccgggcgccttcctcctcctccctctacgcggcgggcttgtagagcttctccaccatcttcctgaactcttcctggttcgcccagagcgccgccgcctgcgtgttgagtggcgagtcgttgttcggctctccgaggaggctctggatggagaggaggatggtgcgcacgtcgtaggccgaggaccacttgtcctggaggatgtcgaggcagatgttgccgtgggtgtcgacgttggggtggaagcagggcgtgtcgaaccgcaccttggggggcttgtaggggtactcggcggtgaaggcgagcgcgaggcggtaggaggtgccctcgtaggcggtgcccgcggatccggcgatggtgcccacccagttgaagatgttgtccccatcagggaacgccgacacgccggggtcgccgcccatcatcagcgccatcagctccgactgcagccgccgcaccaccgactggccctccgcgcccttcccggccgccgatgacgccggcttcgggcccgccgccgcggaagccgcggggacgttgccggtctgcgactcctggttctctccccgggccatggctggcgatcggctgagccggtgctttctctctctgtacttgctcggtcggcggcggcgatcggatcggtggaggcgcggagggaggggagggagcggcgggaaggggtttaggggttttagttt

SEQ ID NO: 42987 - DNA, 499 bp, Setaria italica
  Peptide Sequence Number=SeqID_108961
ccaagcacaaatcatagttcatctgaatctcacacatcaattcattctaaatttaatatctgtgatgagcaacccagcaccagggacatcactcaacacaatggcatgtaactaaatatatctaccagatatcgtcggcctcatttcaggatcctacttagatacaaagctactaactgatgagcaagagaaagccatacgatgcgacagtctggattctagatctaagtgccactgcttgttcaagataaacactgcttctaatcttcacttgatacaccgcagttgaaggcagctaatatcgacaatgacgcggtggtgcagctcaacgccatttttcgatcccttttgaagttgccgtcacaagcttcttggtgttgataaccagctcgtcgaataaagcaacaacagtgtccgtcggcagatgtggagcttcctggaacatctttccaacatttgaatatcttttgttttcatcatatgcaattccttttgtcct

SEQ ID NO: 42988 - DNA, 244 bp, Setaria italica
  Peptide Sequence Number=SeqID_108962
tttttttgtaaaccaaatgggatggcagatcatgaacttcccacagagtacggttgttagagctctgacaatctgcacccgatatttttttacagcacccagcagtgcatcttattagcttacggtcacacagacagtccagattaccactcgcatcgcaagttcacttcactggcgcaccgcgcagcggcacttccgtctaggcgtcgcagtccatcggcacggcggcggcgtcttccacccg

SEQ ID NO: 42989 - DNA, 1584 bp, Setaria italica
  Peptide Sequence Number=SeqID_108963
ggcgatggcagcgctggcggaggcggaggaggaggtgcggctggagctggaggctgtggcggcggtgtacggcgacgacgtccgcgtgctccgcgacctcccgcccacctcgtcgtccacgtgcggccccgcaccgccgacgactcctcgcagcagtttgtggaactctttcttggaattaaagcatcctcacagtatccaaatgaaccacctcacatttatgctgtggaaagtaagggccttgatgaggatcgacagtcatatcttattagaagcatccagaacaaggcaaaagagctttccaactatccaatgcttgtgacattatgtgaggaagctggagagatcctctcgaatatgaatcatccagcaggggattgtccactgtgtctatatcctttaatgagagaggataaggatggctctgagttgcctttcatgaagttgatgtcatgctaccactgcttccacagtgactgcattatgagatggtgggaatggctccaacatggtgatgctaaccttaaggagcgtaatactagaggcaagcaaagcattataatgtgaatcagaacaaaggattttgtccagtttgccgcaaagtgttcgatgagaaggatattgagcatgttcgtgatctgttgggtgaaagtacttcccggctggtatgtctcagatatggtttacatacaagtgaaaaccctttctacattttgaggctttgccagtttaagtttactgcattgaagccttgatcatattactccatatcactattgcccactatatcatataatccttatcttgaataaatgagacccgccataactcttttcttgggtgaacttgcttaccggctggaatcattgacacttgacctgggtgaagatgagaaggaattgttccattctgaggcagagcaaatcaggagaaaaagaatcgaatcacttgttaatctgcagcaagaatgcaacgggctgattgaaccgaagaaagaccttgccatacaaccgggaatgtatgttactcttcctcccagcacaccagacacagctgcagaagagaacgctgatcccagcgaggacacccctacttcaacctcaggaacagagcaacgcagccaggtaaacaacaccagcagcaataagccgaagaattctggatatcgaaggcgaaaccgagctaacacttcaagaagacagcctcacggccaacctcataggcagcctggtatgcaacagtggcagaggaaagaagcagacacttcacagcaataacattgaagcaatgagggtgtgaggtgttctatcggttatgtatattgttggtgcgccctgtgtttttttttccatggcacacatcataatttttgcactgttgaccaagagagttaaagagtatattgtcacacctggttttaaaacgaaatcaagtgctatctatatgtatgccaggatcaagtgctatctatatgtatgctaggatcaagtttcatacatatagtgacatcatcagtgaataataataacagtatcatagtaaataaatataaataatgagttacaagtctatcagatatatact

SEQ ID NO: 42990 - DNA, 934 bp, Setaria italica
  Peptide Sequence Number=SeqID_108964
aagggaggaaggcagaggcctccagacgcgatcccgctccatccgtaaactaataaacccccattatatcgattagaatagtagcaacccccattattgccgttgcacacgctatcagcttcaccctctatctgccgcggcagccggcaacttcctcccaagaacacgcgaaaagaagaaggagaaggagaaggagaagagatggtgaacgccgacgccgtccgcaacatcgtcggcatctgcggcaacatcatctcgttcgggctgttcctgtcgccgctgccgacgttcgtgcagatcgtgaagaagcgcgacgtggagcagttcgtgccggacccgtacctagcgacgttcctcaactgcgcgctgtgggtgttctacgggctccccatcgtgcacccaaacagcatcctcgtcgtcaccatcaacggcacggggctcgccatcgaggtcgtctacctctccgtcttcttcgcctacgcgcccaggcccaagcgcctcaagatgctcggcgtcctcgccgtggagctcgtcttcgtcgtcgccatcgccgcgggggtgctcctcggcgcccacacccacgagaagcgctcgctcatcgtcggcagcgtctgcatcttcttcggcacgctcatgtacgccgcgccgctcaccgtcatgaagcgggtcatcaccaccaagagcgtcgagtacatgccattcacgctctcctttgtcagcttcctcaacggcatctgctggacgacctacgcgctcatccgcttcgacatcttcatcacgatcccgaatggcataggaacgtttctgagctctgcgcagctgatcctctacttctgctactacgggtcgacgcccaagaacgacaagagcgtggagttgccggtgacggccagcgacgacagcaacaactagcgctgccggctttaattttcta

SEQ ID NO: 42991 - DNA, 327 bp, Setaria italica
  Peptide Sequence Number=SeqID_108965
cacaaattcgtgtacagagttacagactgctttctagatatttggattgccaagcaacatttctcaattaactttcctcaaatttgtcagaccacaccgcaaacggcataactggccaggtaccgtaacaaatcgcgttttcttttgccggaggacaggctcaccttattagtattggccaataacctgttttgcctccgcatattttcagtgatcagatcaggaggataagattttgatgcagtggagaagatgagcgttcgtggtatctaacctccatcgcagcaaggcggcagctgcggcgaagcttagaggtgcggttggcca

SEQ ID NO: 42992 - DNA, 489 bp, Setaria italica
  Peptide Sequence Number=SeqID_108966
ccttatgcctccgctcctcctgctgctgctcgcttccttcctcctcccgccgccggcggccagcgcgggcacggcacagccgtcaagctgctggccgaagacatgcgggggcctgaacatcacctacccgttctggctggaggagcgcgaccggccgccgtgcgggccgccggcattccagctcaagtgcaacagcagcggcgcgttcatggtcaaatccgtctaccaggcgtatcgggtggtcagcatcttcgccgagaaccaatccttacatgtggtggacatcaacctcccgctcgacaccggctgcccagcgccaacgttcaacgtctcgctcgtcccccggccgctcgccttcagcaaagccaacaaagagctgctcttcatcggcaagtgcacggcggggtctcaaccggaggattcgactgggtttcacagcctaccttgcgacaggtcttccttcgtccggctcggcgacgggcggaattt

SEQ ID NO: 42993 - DNA, 433 bp, Setaria italica
  Peptide Sequence Number=SeqID_108967
agcataatacaagttcttcaactatagaaaatcaacttttgccaccttctagtttgccctctactcactttaagttctttttcaagttggtcctgagggactcagtggcacagcttgcctacctgagctggatggaaacttaatgcattctgacattaataattctgaagttacacctgatgtaagcttgaacagtgatccgctgagtaacagttcaggccctgccagaatttcatccatgtcatcagactgtaagtctggtcatggcctcagctccttgagatctttaggaggccataatattgtgcatggaagtaaatctcttcaacttttttattcagatggccaagaagttttgggaaatatctccactacaaaacttggaggaccttctagaaaacgatctctttcggagattttattgaataccccc

SEQ ID NO: 42994 - DNA, 368 bp, Setaria italica
  misc_feature (350)..(350): n is a, c, g, or t
  Peptide Sequence Number=SeqID_108968
tagtcagcacattggttaacccttactaagttttactaactagtctacagtttaaaaaaacatataacatcatctaaacatcagtactacgaccagaaatattatttgcactactataaataaaacaaagaaaactaataagcctaaattgtttgaaacaggcaccaccatatcctatacggggagataaaacaatagaactgatgctaaacaacatggacgagcgcaaatgcaaagaaaatcacataaccaaatggcaaaaataaacacttcgtgaaagaaaacaactggaaaaacaatgttcagaatgcaagtgtaataataactatgaaatcagccactgatattgngcatttacatggtagcag

SEQ ID NO: 42995 - DNA, 3825 bp, Setaria italica
  misc_feature (1)..(20): n is a, c, g, or t
  Peptide Sequence Number=SeqID_108969
nnnnnnnnnnnnnnnnnnnntagttctcttttagttttttttttttttaatatgtcaagtcttatctctactaaattaccaccagattttgtacagacacaatgcccagcattcaaagacaaccaccgatatcagaaatctcgcaatcatgcggaaaggggcaaaggaatgtataaacctcctagctggcatcccgggctgtcccaggacgaacttacgggaaggggcaaggcaggaccgacgagcatgtaccactctgagtttaacctatcttctaacatgtacaaaatccggattttattcactgcgcaccgagttgtacttctcagcgagtgcaggagtagacacgatcttgttcatcagattcttgaaccgtatactgtagtcgctgccacttatacggctcaaagaagatatggctcgaagagcacttcgaatcatgtcttcattccgatcaacctcctgcttcactgcatcgcccttgggtttgtggttaatagttttctcaataggttccactatggagtccaaaactgcaagaacagcagaagggcacttgtctgcaagctttgagagaatcaaatggcaaggcatctttacatcataatgatcccctaagccagataggaggaaaggtacaataaaggacgacggattcacttgatcaagacaactgtccagcaacgtgtccacacattcaaaggcagctttcctaagttcaagaccatcatctacaacatgtttaaaaggcccaagatcaactgtcctgatcaattcttgctttataacagtttggtcatacagaagaggtagtaattctggaagaagacctttaatcaaacttggcttgttgtgggcagctgtgctcaaagccagaaccgctgctcgtctcacatgcctatcactgtctttaatcaacatcaggaaagtagatatctcagagtacatgatttcatctattttttcaggccgttcaacaattgagtatttgatagcaattgcaactgtagatcttgtgtttgctgctgggctagacgtgcgcaccttcaaagcagggattaatttttttggttcaatcagtgcaatttttcctaaacactctgcaacaacattccgaactccctcctcttcactttcacagtgattaaagagcaatgccaatatcttctcaatgtttgaatcctggagctcgctctggccattatgatcaacagtttgccgcacaattacctctttaagcgaatgaagcaacagatattgcttcttctgttgattgtcaatctgatccaaaataaatggtaaatacttggacaggttgccaacagcaatgtttccaagtgcataggatgctgcagatttaatctcctcaaaaggtgattgaaatgattcaatgacaatgttctcaatctgaacatgattgctgaggtccttcctccttccaatttcacccaaacataacaaggccatgtgttgtttagcagagttagaagcgctgtcatcttttaaaatgcctttaagcatttcaattgtagccgcgcacttctggtcaccagctgctaagcatagaacagcaacacacttagcaatggaagacagtgcttgcttggcaagaccacctgactgtgacggcttagcaacagaaataagggaatccaacaaagcatcgaagctagtatttgcagattggactagcgaagcaaaaaacctttgaagggcctgcagtgcttgcccttgcaaaagggcactcctaatcaaaataagtgcctgaggcaaaaccttgttcctcacagctaaaccaacattttgaattgatttccggtcaaccattattgtgcagcaaagttccagtgcaagagcagtcatatgcaaatccatgtcacttatgagggtagaaagttcagcaattattgtctcatacgaagaagagccaatttgaccaccatatgtgacaaccaaagaattaagtgttcccagtgttgcctgcctaagagctctgttggccttacgaaggaaagctgtgagctcagaaacaacatggtccaggacaaatgagagatcaatacggaggggtgaattcgcaataactgagaatgccttgacagctgtaagtcttgttatttcattacccatcctatcaacaagtatgggaaggcatgctggtaattctctttgaaggccatcaccaaaagtggagaccaccagactcatgcatgatatggcacattccttaacctcctggtcctgatcttgattagccaaacgtcccagtatagcgttatagattggaccaatatatggcctgaaatccacagcacttgcctcgagatttggacgaaggacacggactagttctccacacacccgcaaagcctcagcagtgactttataatatctatctccaatagcagataatataggggcagaaaatgcctggatatatggatgaaacacagatggaaaatgtgaagccataacaagccttgtaaatacaagggcttcaatcttcaggttggaggtagaagatttatcagtcaaagccttctcaatcccaggaacaagtgagccaaaatgatcagcaagacagtctggtagtacaacaacaagctccttcaacacagaaaatgctccaacctttgtcttgattgatttttcacgtaactgcctgttgatagacttgacaacttttggcacctcttgtttcagcaaccatcgaggactcgactcatcgatgtcgccttgtccttttgttacattaccagtttggcgtaacaactcaatgaaggtgttgaatatgtccatctttacattctcctctctttccctaaaccgttcaattaactttgggcaagcctccagatacatctttgacaacatttcaggacgagatactataactgcagataggcacttcgctgatgccctacggactttccaactcgcatcctcatcatctgtgtactcattcgcactctcatcatcatcatcctcttccaggccttcctcatcggtatcctcctccatgctatcagtgaaattaggatcatagctcacatattccaaagcaagattcaaaatgccctcacaatatggtgatatatcccttgggcacctgagcataaagctctcgagagcctgcaagctgtattcacgcagctcttcatcattttcggatgcacttctacaatagcttataagcaaaggaacagtttcaccaagatgtggcccaaaacggtatccaacagaacggcttagagaaccaatcatttggatatttgttcgggtgatttcagattttgcacttctatttttaagcaattggacaacttgcaaagttgtctttgctaacaaatcatcagataaacttggggcaagcgatgcaatacaagaaacagacttttttctgacgcttgcttggttggaacccaactgggataaaagtgcagtgagcatatactcatgatcttttgtgatcaagttgccaaatctatgaagcacatcccccaatatatcaaggcattcacatttaatttcagcaccttttgcagaattgacaccctttatgagctgcggggcaagagaaagcaaaatcttttcagcaagtgatgacgtagtaacttctgcaatgattgtcttcagggctatactagcagtatctcgatgctgctcctttccattgatcaatttatcacaaagtttgttggtcatctccactaccttgtcctcaccaaccttcttgacaagtggagccaagctatttacagctaaaccagaactctcgcctgaccaaatgcaagagcaccaacaccgagtactcgttaacttcgg

SEQ ID NO: 42996 - DNA, 460 bp, Setaria italica
  Peptide Sequence Number=SeqID_108970
gtacatcctttggaagtaactggcggagaaaatgcggctctggtgcctacaagaaaagtttgagaagagatttgggcagtcacatgcatttttggcttcgacattgctagagaatggtgaaggttgtcgctttgacatgctcaaaagtcttgatgattgcatccatgtgctaagttgcgggtacgagaataagacaatgggggaaagaggttggttggatttacggatctgtcacggaggatatcctcacaggcttcaagatgcattgccatggttggcgatctgtttactgcatgccaaggagaccagcattcaagggatcagctcctatcaatcttactgaccgtctccatcaagttctaagatgggcacttggttctgtggagatctttcttagcaagcactgccctatatggtatgggtatcgatgtggtctgaaaccattggagagattgtcata

SEQ ID NO: 42997 - DNA, 331 bp, Setaria italica
  Peptide Sequence Number=SeqID_108971
ttagtggtggattttcccttgaggcatttaagaaatgggcgccatcagagaagaatctgattacacttccaggttattgtgttgctggaaccgttggtcataagttgatgtctgggaaaactacgaagattgttttagacaaggacacccatattgatgtcagatgtcagatacatcagctagcattcagtcctcacacagactccaaagggatcatggatctgactgaatttctttcacccaaacatgtaattcttgtccatggtgtaaagcctcagatggctttcttgaaggagaggatcgaatctgaattggggatgccgtgctttta

SEQ ID NO: 42998 - DNA, 536 bp, Setaria italica
  Peptide Sequence Number=SeqID_108972
atggtcaggatcatcacgcccgtggcctggacggcggtgaagacggcgatggtgaggtagcggccgaggtagctgtcggcgacgaagcccccgaggaggcagagcatgaaggaggtgccgatgaagttggtgacggtgttggcagcggcggcattgccgaggtgcatggtgccggtcatgtacggcaccaggttcaccgcgatgcccagcgtcgtcatccgctcgaacagctccgcgcctaggatcatggcggcgcacgcccacccgccggtggtggcgcggctggccgggcggcccttgtagtcccaggcgtccgtcagggccttgccatccgacgcggtctccggcagaacagaggccatcgttcccttctccctctcgagatcgacagagcaagcagccaaggccgagcagtcactgggcaggtggtggtggtggcgcggtgacgaggaggctcgagctagcgatggaagcaatcagaggggttgggtgagggtgggggaggtgggctcgcgatcggcgtggcgcgatgctgc

SEQ ID NO: 42999 - DNA, 351 bp, Setaria italica
  Peptide Sequence Number=SeqID_108973
aacgctgtggtgtaaatagaagtgggatgcacgggtcgagccgggccggccagagacgacgaaccgtggcctggacggcggtgaagatggcgatggtgaggtagcggccgaggtagctgtcggcgacgaaccccccgacggaggcagagcatgaaggaggtgccgatgaagtttgtcacggtgttggcggccgcggcattgccgaggtgcatcgtgccggtcatgtacggcaccaggttcaccgcgatgcccagcgtcgtcatccgctcgaacagctccgcgcctttcaccaagaataaccatcagctctcaggagtctggacctcgcacgtgcaagtgcatggacagcac

SEQ ID NO: 43000 - DNA, 1346 bp, Setaria italica
  Peptide Sequence Number=SeqID_108974
ggcgagctcaatgccggcgtcagccaggcgcttctccttataaacatagcccctggccgcgagcgtgaagaggacgaggttgatggcgctgatcacggcgagcaaccagtagaaatagtcgagcctcccgtcattgaggttgtccgcgagccagccgccatgaccgccgtgacccgtgaccttaccgacgatggttacgagcagcgtgctgaagaagaatccgagcgcgcaggtgctgaggaacagcccggtgctcatggtcttcatgcccttgggacactcgcgcaggaaaaaggcgagctggcccatgtacgtgaacgcctcgccggctccgacgagcacgaactgcggcatgaggaggaacacggtgatcgtgacgccgtgctcggaggtggtctggcggtggcgctcgatgagcgctgcgacggccatgccggcgacggagaggaagaggccgacgaagacccgctggagcgggctgaggccgtgcgggttgcccgtgaggcgtttgacgacgggcgcgatgaggcggtcgtagaggggcacggtgaggaggatggagccgatgaggaagacggtgagggagccggcggggatgaggaagcccgggccgccgatgccgcggtccatgacctcggcctgcgccaccgagaaagtggtcatctgcgcgtggatggtccagaacatgatggtggtggcccagatgggcagcatccgcaccacctgcttcacctcctccacgtccgtccgcgtgcacagcgtccacttgctcgccgacgccggcgactcgccgtcgacgatcgccgcgtggtcaagaaaccggcattccttgctgtggggcagcttctgcttccccttgacgtcggcaccggcggcggcggcatcgtcgacgtcgtagagcgtgttgggatccgacggcagtggcagcgcacgcttgctccaggcggcggccgtcacggcggccacctgggtcagcgggctgcccaccagcttcttgaaccggtatctcctggtaccaagcaggaacacggcgagcccgacgaggatgccagcggcgcagacgccgtagccccagcggcggccgacgttgtcctgcacgtacaccagcaccgtgacggccagcagcgcgccgatgctcacgaagaagtagaaccagttgaagaaccggagcatcttgctgcgctcgccgtcgtgcgcctcgtcgaactggtccgacccgaaccccgacacgctcgacttgagcccgcccgtgcccagcgccgtcaggtacaggcccaggtagaggaccccgggctgcgtcccgttggccggaacgcagtcggggctcgcgcccttggcgtccgcgc

SEQ ID NO: 43001 - DNA, 2145 bp, Setaria italica
  Peptide Sequence Number=SeqID_108975
ctaagaaaaaaattattactttatactatacgccgtacgcgtagcgccactcgctggctgctgcgtactttgtacttaatagatacacacgtgcatgtaggtatacatggccgaatgacacgaccacctcttagcgcaacacacgtcggagcaatcggcgccgttggatcggcggccgacggacggcccggatatatgtgggccccgtcgcgtccccgtcgatcagtggagcatgggctcgtcggcgttgatgctgccgtcggcgccggggcggccggccttgtacttgtaccacctggcggcgacgaggtagacgagcaggttgacgaggcagatgacggcgagcagccagtagaagttgtcgagcctgcccttgttgaggtcgtcggcgatccaggcgtggcggtcgccggtcaccttgtgcacgcaggtgacgagcgccgagctgacgaagaaccccagcgagagggtgctgaggaacaggcccgtgctcatggtcttcatccccttggggcactcgcggaggaagaagtcgagctggccgatgtaggtgaaggcctcgccggcgccgacgaggaagaactgcgggatgagccagaacacggacatgggcacgacgccgccggcggggaccgcggcgtcgcgggccacgcggaggcggcggatctcggtggccgcggcgccggccatggcgatgacggagagcacgagccccacgccgatgcgctgcagcggggtgagcccgtgcgggttgccgttgaggcggcgcgccacgggcaccacgatgcggtcgtagatggggacggtgaggaggatggagccgacgaagaagacggtgagggagcccgccgggatctggaaggacgggccgatgcggcggtccatggtggtcgcctgggacaccgagaaggtggtcatctgcgcgtacaccgtccagaacatgatggtcgtcgcccagatggggagcatccgcaccaccgtcttcacctcctccacgtccgtccgcgtcgccaggcgccacttgctcggctccgccgccgggtcctcgttgatcgccgcgtggtcaaggaaccggaactggtcggtgtgggggagtttctccttgcgcttgctcttcttggtggacccctcctcggcggcggcgaccttgccgacgtcgatgtcgtagagcatgtcggggtcggcggggagctcgaggtggcgcttgcgccaggcggcgacgacgacggcggcgatttgcgtgagcgggctccccgccagcttcttgaaccggtacctcctcgtcccggcgaggaagatgacgagcccggcggcgatggaggcggcgcaggcgccgtagccccagggcctgccgaggttgtcctggacgtagacgaggacggtgacggcgagcagcgagccgagcgagatgaagaagaagaaccagttgaagaagcgcatcatctggttcttctcgccgcggtccgtctcgtcgaactggtcggagccgaagccggagacgctggacttgagaccccccgtgcctagcgccgtcaggtagagcgctatgtagaggacgcccagctgcggccccgtcgcgcgcgagcacgacgcgtcgttggacgggcacgtcgccgggcggagccccggcgccgccgtcgagatcgtcaggatcgtcacccccgacgcctggacggcggtgaagatggcgatggtgaggtagcggccgaggaaggagtcggcgacgaagccgccgaggaggcagagcatgaaggaggtgcccatgaagttggtgacgacgttggccgactccgcgttgcccaggtgcatcgtcgccgtcaggtacgtcaccaggttcaccgcgatgcccagcgtcgtcagccgctcgttcagctccgccactaggatcatggcggcggcgccccagcgtccggtggaggcgcgtggggcggggcggcccttgaagtcccaggcgtcgaggagcacgtcggtctccgccgcggcattggtctctggcaggagtcccaccatcttctcctcctctcttcttctccctcgccggcgaggatctgtgaggaggaacggtggggtatctcaatgtaatcgactggggaggctagctactctgtgctcttcaagttagtacgtaacttagtaagttacgta

SEQ ID NO: 43002 - DNA, 1627 bp, Setaria italica
  misc_feature (1566)..(1566): n is a, c, g, or t
  misc_feature (1576)..(1627): n is a, c, g, or t
  Peptide Sequence Number=SeqID_108976
cgtcgaggcatctaaactcgccgtgagtggccaaccctttgaggtggtttactacccgagggcgagcacgccggagttctgcgtgaaggcgggggctgtccgagcggcgatgcgcacccagtggtgcgccggcatgaggttcaagatggcctttgagacggaggactcgtccaggatcagctggttcatgggcacggtctcggccgtgcaggtggctgaccccatcagatggcccaactcaccttggaggcttcttcaggtcgcttgggatgaaccggacttgttacagaacgtgaagagggtgagcccatggctggttgagcttgtctcgaacatgccagccattcatctttctcctttctcgccacctcggaagaagctgtgcgttccattgtacgcagagcttccgctcgagggccagtttccgacaccgatgttccatgggagccctcttggccgtggggttggtcctatgtgctatttcccggatggcactcctgcaggcatacagggagccaggcatgctcaatttggtatatctttatcagatctccaccttaacaaactgcagtcgagtctgtcacctcacgggcttcaccatctcgatcacggcatgcagccgaggatcgcagctgggcttatcatcggccatccggcagctcgagatgatatctcgtgcttgctgaccattggcaccccacagaacaagaaatcagatgtcaagaaggcgccgccgcaattgatgctattcgggaagccaatactcactgagcagcagatatcattaggtactgctgggggcttcccgctgtcaactcctaaaaggagcccttctgatgacaatgccgaaaagacagtgagcaactccgatatttcaagccccggaagcaatcaagatggcacgtccagtggaggagccccatcgtgccaagataacaaggtacttgatctcgggttggaaaccgggcactgcaaggtattcatgcagtcagaggatgttgggcgcacacttgacctctctgatgttgggtcatatgaggagctatatcagaggcttgctgacatgtttggtattgagaaagctgagttgatgagtcatgttttctaccgtgatgcatctggggcactgaaacacactggagataagcctttcagtgagttcacgaaaaccactcggaggctgaccatactaacggacacggcaagcagcgatagcttagcgaggtaggggaatggaagaagctctcgtcacttgtacagctggaggagcgtggtggcaaatttccacttccaattgctggtgcaatttcaaagaggagaagcagtttcagtttggttttccgtcgattggagctcccggaacgggaccgagtgcgtgtaatcatcgcaggacccataattttaccggcagatttgccggattagctctacgccctattgtcgtttgaagtgatcatcgctgttgcatctgatcactgatgatattgtcatggatgtactctgccacgaaaccgttgcttggcgaatgcgattcctgaaagttttagggaaaaaaaaaaaaaaaanaaaaaaaaannnnnnnnnnnnnnnnnnnnnnnnnnnnnnnnnnnnnnnnnnnnnnnnnnnn

SEQ ID NO: 43003 - DNA, 471 bp, Setaria italica
  Peptide Sequence Number=SeqID_108977
ctgtttctggaacatcgacttgtgcatcatcggcatttcattctacctcttgcctgattggaatggattggcttgctgcttcggttgcaaacacaacacgatgaatgaatgcctcactaaacagttgtgcaataggtttgccttcaggccatatctcatatgtgaagaatgttaaacctggcatgcctctatttctgttcaattatagtgaccgaaaaatgcatggaatttttgaggctgcatgtgctggcaagcttaacattgatcaatttgcttggagtgatggtggtagaataaagacacaatttcctgcacaggtccttgtcatcaaataacactcagtgctatccagttccagagtctcacttcaaaaagtgtgatcagtgacaattaccatagacctcggcacttttactttgagctagaccatgcacaaacaagtgctttgattatcttttgttttaaacccgt

SEQ ID NO: 43004 - DNA, 442 bp, Setaria italica
  Peptide Sequence Number=SeqID_108978
ctttttgaaatctgtcgttttttacaggatacatgtcggtatacaatctccagaaggctttagctctagccacggaattctcagaaggtttagtgactttctgaagttatcttctgatcttaagagtgcgtttcccagaaaagatgtcccattggctcctccgaagcatgctttcttgagaataaattcaagcaggttgcttctagaagagagaaggcatgcattggaggagtggatgcaaaagttactttctgacatcgacttgtccagaagtgctcctgttgctgcttttcttgaacttgaagctgctgcacgttcatatttccaagaccggaatggacgtccttctgaagcaggttcttctgcaaaaagtgtactgactcttctccacatcctgatggacctgcttctggttctctcgctgagtccaatcaaataacga

SEQ ID NO: 43005 - DNA, 628 bp, Setaria italica
  Peptide Sequence Number=SeqID_108979
tgttggtattgtcgtctaagttctattccttccaatgatcaaaacagaagttgtctagacttttgatcaccatgcaacgaagaatagggacagcaaaaactgatatggaggatctcatagcacgactaaatcaagaagcagctgtcaaagagtatcttacgacaaaggttaaagatttggaggttgaattggaagccacaaagcaaaaggtagagagacactgcagcaagctatcctggccgaaagagagaggattacacagatgcaatgggatatggatgagcttcgcaggaagtactctgagatggagtcaaacctgaaggttgaacaaaatgagaaaactcgtgtagagtcagagaaacatcttctagcggtgaaaatgaaacactacttgaagaattagaaatgaacaaaagaagttgagagtttgaaacagcatcttggagaagttgaggcaaaggtctaaagcagatataaaggttcttgtcaaagaggtcaagtctcttagaaactcccaaaaaagagatgaagaaagtgctgcatcagtatattgaggagaagacgcccctggtactacgacgacagcatgaagcgtgtcgccaacgccgtgcgcgaattcgagagggag

SEQ ID NO: 43006 - DNA, 606 bp, Setaria italica
  Peptide Sequence Number=SeqID_108980
aagaacttaagaaaggaaacgtaacctaacggccgaaggcttgaggacgtcctcgccgagctcgaaccgtacacgcagttcaccatcgagcagaacccgatgtcgagcaggttgtgcgtcgacgacccggaggccgactattccaaccaatgggatttgagaagctggttttccgaaattcaatcaccggggtgaggagggaccggaagtacgcgattcaggccaagaatgcctacgccacaggtgtgcacatgtctgagaacgttatcggcaacaccacacacaagacggagcacctcatccggtactaccactaccacaacaccatcaacgtcctcgacgaggtttgccgcgagtttgtgcctattccacccaagggtggcctgacgtggtccgagaagacgccctggtactacgacgacagcatgaagcgtgtcgccaacgccgtgcgcgaattcgagagggagaccattggcgatgtaagactatgacagtgaccacaaagattaagagctgatgtacaggatgtattgctgtcagccattcatgagacttgggcacttggtgccggcgtttctgtcttccggatgttatatgaagcaaacg

SEQ ID NO: 43007 - DNA, 2132 bp, Setaria italica
  Peptide Sequence Number=SeqID_108981
acctggatgctatatgttaagtagttcactatttcacttcttagactaaattcaagcaggttgcttctagaagagagaaggcatgcattggaggagtggatgcaaaagttactttctgacatcgacttgtccagaagtgctcctgttgctgcttttcttgaacttgaagctgctgcacgttcatatttccaagaccggaatggacgtccttctgaagcaggttcttctgcaaaaagtagtactgactcttctccacatcctgatggacctgcttctggttctctcgctgagtccaatcaaataaacgaagtgcttactcgtggtagcagtctgacaggagcaactggcaatggtgtgctgggagaagctatcttagatcagtccgatgatcatgttagtagtgtctcgaatcacaggaaagggagccttaattttttggaacatgatggtagaaatggtttggcatcatcttacaggggagttgtttctgaagaggctcatgattctaatcctggccatgctcgcaaggactctgctgaaagtattgggagtgatttgagctctttaagaggaagtgaattatctgttccaggggccaatagctccctatgggatggtcctgtggatctaccaagtgccatggacgcacatattagtcaaacagagcatcttactggtttagatatgcagcttttgtatgatgtggatgcgcaagtcatccttccaaatgatcaaaaacagaagttgtctagacttttgatcaccatgcaacgaagaatagggacagcaaaaactgatatggaggatctcatagcacgactaaatcaagaagcagctgtcaaagagtatcttacgacaaaggttaaagatttggaggttgaattggaagccacaaagcaaaaaggtagagagacactgcagcaagctatcctggccgaaagagagaggattacacagatgcaatgggatatggatgagcttcgcaggaagtactctgagatggagtcaaacctgaaggttgaacaaaatgagaaaactcgtgtagagtcagagaaaacatcttctagcggtgaaaatgaaacactacttgaagaattagaaatgaaacaaaaagaagttgagagtttgaaacagcatcttggagaagttgaggcaaagtctaaagcagatataaaggttcttgtcaaagaggtcaagtctcttagaaactcccaaaaagagatgaagaaagtgctgcatcagtatattgaggagaagactgatttagagagggttgttaatagagagaagcagcggtcaacacgcttgaggttatcccgagaaaaaattcttcacgagtgcagactgctgcgtgagcgtctacaagaatgtagtgctaaatttctagcagaagaacaagacaactttactgttgatccatcgtccttgcctgatgcactagatcttctggcaacatcagacaatagaatacggctactcgttgcagaggctcaacttctagcacgagaagatgaacaaggctcttctgatgatggtgacaattctgatagtatatcctcattaactatgggcagcgaagatgcaagtgttactgatgaagatacaactaaaatgctgtctgatctgcttatcgataatgcacagttaaggatgcgtctcaatgctgtcatccgcaacgctgtaaatactgccgtgaagccagagagagaaggtagtggtgaagttctccctaagaggaccgtcctcaactggttgttagacagatgagatcatgagaacttcaccgatgtatattcttgtgaattagatcctgaaaccttatgcggcttgaccaaagttatagtgatgagcattcctatagtgctggagcagcctcaggataaaactttccctccatgcggggagcctggaagcctgtcttgctgttgtacgattgtttatttacatggaaatcacggaggattagcatatttggctggattgtcacctcgcattcgtgttgcgaggggccgaggtcagcaagcttgctgagctatcgagaaagctcgcaactggggcgaggctgatggagaacataaagattccccatttttgcaccatatatgtaattaaaagctggtgatgtctgtaaa

SEQ ID NO: 43008 - DNA, 362 bp, Setaria italica
  Peptide Sequence Number=SeqID_108982
ccgagggaagacgaagaaagtccggaactcaaagacgtaaccaatgcttttgcgctttaaatattgctgcgctgcaaccttggtatttggcatgtctatgccatcccaggacggaacagtagcttccatcaggtctgacgcccaaatactgacaggctggggcgctcccaacttagcatctacatttttccttgattgtgtctgatctacagaagagcttggaccggactttggaacgtcagcattagcagaaggtgcacttgtaccagtaccaacacaagctccatcaatcttctgcatgtttttttgaggatttgaggatcatcttcaggcctagaacatacatccgactgtcggaaacg

SEQ ID NO: 43009 - DNA, 254 bp, Setaria italica
  Peptide Sequence Number=SeqID_108983
gggcgtcagacctgatggaagctgctcattcatactgtcacctaaacaagatatatttgccatgtccttgcaaaccacagcacgtcttctagttctcgtgtgttttgttttcttccctggctttagtgaagcagccaatagttttttggaacctaaccacatgttcacaacaggatacctcacaaacttctttgacttcaaattcaccttttttagctgtggtgccatttgtctattgtaagttcttagtcctt

SEQ ID NO: 43010 - DNA, 480 bp, Setaria italica
  Peptide Sequence Number=SeqID_108984
gtagtgtaaagcacaacattgggtgatgccattaagagttgagatcttttcaggggttttctttgtgggcgaaattagcagtgctattatctctgcgcaccactgggttccgaatactgtcacgcacataaaatagcatataagccttctgcttcaatacgtctgcctcacgaacttggcgcacctggttatcatcaagattgtgccacatcccgctggacgtacgaacgaagcaatagtagtgacctgattgagtattccagccagcatgaactaagacaccataaaggctgtatttgaaatctgtacctttagaatcactaacaaatggtttcaagtcaagaactggttggaaatccacttttttgtcaatcttttctcgggggtcaaaagcaataccagtgtgaccgctgcaggcagaaagttgtagcaaagaagaggtttacaattgataaggctccaaatgtcttgacagttcat

SEQ ID NO: 43011 - DNA, 3211 bp, Setaria italica
  Peptide Sequence Number=SeqID_108985
ttttttttttttttttttggtaaagcatttgcatcatactataactgatcatattattcggtaaacaacaaacacaataggtattgggaaaaagaaccattgcctcactatgtttgttttgctacagaacacgttactacagctggctgggacacagcggttcaaatgtctgtcaaaattgctaaattaaacaacatacatagccacgggaccaacaatgaatggtttaacttaatcttcttcaccaatgaatgggggctacaacatgtaacaacagcagtctgtgcgcctcggggacgtctctcatattctcagccgttctgtcatgttaggcttgttccaggacttgccttggtaagatttttgtttcgacctccgctgtgatatgtagtctgcctcctcctggaaggggttcgggcccaccgaaatcttgctttgagttccggactttcttcgtcttccctcggtcatactcctcgtcccattcatctaagacgtaaccaatgcttttgcgctttaaatattgctgcgctgcaaccttggtatttggcatgtctatgccatcccaggacggaacagtagcttccatcaggtctgacgcccaaatactgacaggctggggcgctcccaacttagcatctacatttttccttgattgtgtctgatctacagaagagcttggaccggactttggaacgtcagcattagcagaaggtgcacttgtaccagtaccaacacaagctccatcaatcttctgcatgttttttgaggattgaggatcatcttcaggcctggagctagcatgcgagcgtttccgacagtcggatgtatgttctacggtttcagattgcgcagttgccgatgttgatgtcagctgctcattcatactgtcacctaaacaagatatatttgccatgtccttgcaaaccacagcacgtcttctagttctcgtgtgttttgttttcttccctggctttagtgaagcagccaattagttttttggaacctaaccacatgttcacaacaggatacctcacaaacttctttgacttcaaattcacctttttagctgtggtgccattgcatgaagcagccacagcaacctgcacagaaccaccagagctgacctgttgtccacaagtgacttgtgcaagttctggtgcagtgttgtcctggctcataggaagtgcctttgcaatggcattagcttgctccacagatcctggcaagtccttggttttctcactggaagtaagagatccactgccaggcacgatgccattcgaaacaataggatccttctttgatggagtttgcacagcaaaccctgcagatgtgtcatttatatgggcagctggcttcgaaaatggagttgttggaggctgagaagttagtttgtctgccttggacaatgtaccaacaccattgaccatgggagaggcaacagaagtattcccccccgcatcacccttagtttccactgccttctggccatttacagaacactgcatagatttgaggggcaaggtagcaccattgtttcgagattcaagagcttgcgtggaaagcggggcattgctttgggaggctgctacatcttcagctttgacttcattcttcgagaaatggcctgctgaagacttgccaagattgctagagtagccgctgcttgtgatgtgcgtcttatcaccaaatggagatgaaccattcaaatgttgtgcttttacactactttgggtgatgccattaagagttgagatcttttcaggggttttctttgtgggcaaattagcagtgctattatctctgcgcaccactgggttccgaatactgtcacgcacataaaatagcatataagccttctgcttcaatacgtctgcctcacgaacttggcgcacctggttatcatcaagattgtgccacatcccgctggacgtacgaacgaagcaatagtagtgacctgattgagtattccagccagcatgaactaagacaccataaaggctgtatttgaaatctgtacctttagaatcactaacaaatggtttcaagtcaagaactggttggaaatccacttttttgtcaatcttttctcggggattgaaagggctgaagcgcttaagatgaactgtcaagacatttggagccttatcaattgtaaacctcttctttgctacaactttctgcctgcagcggtcacactggtattgcttttgacccccgtctagtagctcttcctcggtaaaattttgaagtgcacgcactaaagttgtggccttggcaatatcaagactgagatccaagaaaggatcaaatttattggaacaatgtgagcaccgtgtgcatttcacctgacttctaagccggccaccaaatattttgtgaactaagcttttgtcataagcactttgcgactcacttggtaccccagaaggtaagcagcatttatgcatagattcgagcaaattaaccattagctcatgtgcatcttcttgccttgaattacggaaactccgagaaatgcagcgtaagtttttgacgataagtgatggtgtcactatttttccggttgattgtagagcagtcttgacatgtttctgcagagcacataatgcacaaaatccagaggtacgacatgaggacccatgcttcccgctctgcaaataggccgcaaatggctccgtgtacgtcaaacattgcagcaccgagttgaggtagcaggtgttcccaagattttgcaaaccagcaccaattctcccgaggtagatcctggcgacgctgagctccggatcgatcccgccggcgtcccccttctccggcctcctcgcctccccctcgctgctccccgccgccgccccggccccggccttacccgcggcgtccgggttcagcgtctccatccggaacccgcctccccccacggtcaccgaggcgtgcggcctccgcgcgaggtggaactctatcctccggtgcagcaccccctccggcgccgccgccgtcgacaccaacgccattccttagggtttctcaccgcagcggcagcagcacttagcctcaagatcgggcaggcgagggattagcactaagactgaattcctggacaaaattgtcggatcaaagctcgcgggctcgatcgatagggtaggggagattggtgcggcgcgctgtttgtttttttttttctttttttctggccgccgctcgcgacgcg

SEQ ID NO: 43012 - DNA, 683 bp, Setaria italica
  Peptide Sequence Number=SeqID_108986
tcttggggtatgagcaacctggagcaacatattggaggcgcatatggaatcacttttggtgcaacaataaagtggaatatttcggtctcaaatttctctcactcatcgttggggaacaattcaagcttcttgcaccaagtgggttgattccttgtagcaagttgacggtatcaatccaagtggtacaagtgctcgagataaggtaaacattgctccacaattgtacaagggcaagcctaagaagaagggtggaaagacaggaaaggcctttgccttgcaactgtaacagcccaaaattcaaatagaaataaaatcaagataaatgaataaataaaatttgctttggcttttatttggttcttctcatgttttatgcattaacaaccctccttgagcatgtttaaaatgtttttcaagaataagtattacaataaatcttcaaactttgctacaaaagttctaagtcatcaaagtagttttggtgaatttcttggaatttttggagaaggtttaaatagaattacatttgaacttctgaaatccaaatcaaatacgaaatcttttttctaaactaaatctcattctggacaatacctgctgcggcccatctttttcattcaggtcccacctttgtcctcaccataatctgacatgtggtctcgtggtccgctcatcatcctctc

SEQ ID NO: 43013 - DNA, 614 bp, Setaria italica
  Peptide Sequence Number=SeqID_108987
ttttttttttttgttaagtaacctaattccgtactagttaaaattacttaaaattgttctattcctagtattactatcagtgatttgggtacacagttaatatagtaaaggtataataactttctggggggcaacaaaccaaacatacatgtatgtttcacttatgcaggaaagcaacggtcgtgatgcaagaactatccacattagggtaacttcgaacgtggtcgaggtagctgaacaccgcagtgtcactggctggcaatccctctgagcccatagcaccgagctttctttggttgaagttctccacctcctgtaccaactcatccttggttctgctgcatgatgtgatgaccaatataccaccaggggaaaccaagctagcaactgactgccagtacatcatcctcttcacaggtccatcaggatggagcccaattgcatcaagagtcccttcatccatgacaagttcaaatcttctctccacctttgactccaatacatcatcaaccaagaaattaatgttgcttctaaaacctattctacgtaatttgtctaagtattttcgttgttcttaagttctttctaatttgtcgtcctttctacttattagt

SEQ ID NO: 43014 - DNA, 1226 bp, Setaria italica
  misc_feature (1)..(1): n is a, c, g, or t
  Peptide Sequence Number=SeqID_108988
ntttagttttttttttttttttttaacttatctaaagtttggaagaaccaatccgacagtaaaatactaaaatgtcatccagatacatcagtgatttgggtacacagttaatatagtaaaaggtataataactttctggggggcaacaaaccaaacatacatgtatgtttcacttatgcaggaaagcaacggtcgtgatgcaagaactatccacattagggtaacttcgaacgtggtcgaggtagctgaacaccgcagtgtcactggctggcaatccctctgagcccatagcaccgagctttctttggttgaagttctccacctcctgtaccaactcatccttggttctgctgcatgatgtgatgaccaatataccaccaggggaaaccaagctagcaactgactgccagtacatcatcctcttcacaggtccatcaggatggagcccaattgcatcaagagtcccttcatccatgacaagttcaaatcttctctccacctttgactccaatacatcatcaaccaagaaattaatgtgctcaaaaccatcacgaattgcaagatttcgtgcaagctcaattgcgccttcactatagtcaatcccagtcagatcagaaaacccttgctttgcgagctgttgcaagagtctgccactcccagtcccgatgtcaagtacactgcagctgggcaaatccttgctcgagcacaaatttttggtccagcctacacggacatccatgacctcagtgccaaaccagtcatcagcgtggctgcgttcgtggaaattagcaagatcttcagcataagcaccatcctgaaaattctgcatggccagcaacggaggctccacgtcgccggagtcagggacatccttgtcgaagctgaagtcggaggaggggttggcggcgaccgacgcggagggcgcggccgcggcggaagccgatgacgaggcgaggaggacttcggcggtgtcggcgtagcgctgctcgtcgtcgagggtgctgccgtagtcgctcttgatcgaccacgagtccgcggccaccgaccggtcgtcgtccgacgccatctcgcccgggggcccgacgggaacccaaacgccgctgccgaccatccgggacgggaagatctccgggtcctccggcggccaccgaatccccgccatggcgctcgccgtggcctcgccggaaccctagccttcccgcgacgatggcggttgttgtcttggt

SEQ ID NO: 43015 - DNA, 263 bp, Setaria italica
  Peptide Sequence Number=SeqID_108989
gagcagaaggagatgtttgagcaataggaaaatgataaggaagatcttgagggaatactggtttcggattgattttgtgcaaaaggttcttggtctgtgatgtttattagtcttcaatatccagatggttttagcattgttatgagttccagaattatcatcttcagttcattgtgactgggttcggttgccattgcaccgatatcttgaccaccaatatttagcttccagtgatgcaactaagaaatagtagaccaacctag

SEQ ID NO: 43016 - DNA, 648 bp, Setaria italica
  Peptide Sequence Number=SeqID_108990
aaatagaaataagaatttaacatataattaaaagggtatcatagtaatttcttactatttttgatacttgttccaccaaactggtacttcttgatacttctctttaggtacttcatgatacttcctttgtttccactattcgatttcgcgggatggacggctctcatttttttcaagcattctaaaatttctattctgtttatcatatcaactgatatgggttccacacgcatgttggttttataatgacagcaaggagagcagaaggagatgtttgagcaataggaaaatgataaggaagatcttgaggtactattatcttgggacaacttgttatagatttcttgggaaaaaaaaatcttgggctgacaattgcttacattagggaatactggtttcggattgattttgtgcaaaaggttcttggtctgtgatgttaattagtcttcaatatccagatggttttaccattgtttatatgagttccagaattatcatcttcagttcattgtgactgggttcgttgccattgcaccgatatcttgaccaccaatatttagcttccagtgatgcactgatgtgccacctgaatgtctgtacgaatgtcttcgctacctgaaaaatgctgtgatgatttaacatagaaaa

SEQ ID NO: 43017 - DNA, 349 bp, Setaria italica
  Peptide Sequence Number=SeqID_108991
tgtgacggcaatcatagacgggacaggctcagctggcgctgcagttggtcccttgctgacgggttacatctctgctaagagctggactgcggtcttcacaatgctgatggtttctgccctcgttgcagggctgctgttatcaaggctggtcatggctgaggtttctgcgaagctagaatcccagagatcggcagcagcaactggtctgcctgtgtcctctgtagaggaagcttaggctggagataactgaattgcttacgctttcctggagattccaaaatggtgaaaccctcaaaatgttagacctgagctggaagtccatgtttcttgtgtatagatagcattcttt

SEQ ID NO: 43018 - DNA, 457 bp, Setaria italica
  Peptide Sequence Number=SeqID_108992
agtagtaaacaaccaacgctgttgcatctccttgtaaaacttcactgcctcctcaacctccccaactctacagaatcccccaatcaaaatattgaaactccaaacatccgctgcaacaccgcactggtccattgccctgaacacctccttcgctttatccaaccttctgtgcttgcacaaccccttcaacactgaattgtacgtcacgatcccaggcttcaaccccttattagccatcgaatcgaccactgccattgctgcatccacatctccggcacgaaatctggcatcaaccatcacattatgcgtaaccacatccggaaatacgcatctcttctccatctcggagatgacagcgtcaaccttatcgaactctaaggttttacagttagtgtggaccatgatgttgagcgtgtatgcgtttacctctagagtcggacgagaggacgaggcggta

SEQ ID NO: 43019 - DNA, 388 bp, Setaria italica
  Peptide Sequence Number=SeqID_108993
cacggcgtcgtgctccagctcggccaggtcccacgagaccggcatcttgagatcccaatccatggacggagcgccgcgcgcggggccaggcgagctctctctccaccgtctgtttcctcccggccactgagcaacaagcagcagagagagagaggcagccaccgcccgtgcccgtggagctggagctggagagcaccctgtggtgtgtcgttcacggtcaggacactggcgcggccggtctgctgggctccccctcctccccgtcccactcatcctataggccgctctgccgcggggagggtggcagccaaccaaggggagttattgccccccgggggggcaccaccaccgcagctcagaagccaacaaatcaagcacgggaacaggg

SEQ ID NO: 43020 - DNA, 560 bp, Setaria italica
  Peptide Sequence Number=SeqID_108994
tgcccacctgcacttgcatctgcttccctgaacgcctcctggctgctgcgaacccacctgcattcgctgaagctcggtggcgcctgtctacccgtgattcgccgtacgccgcttgctgtgtggtagtgccttgtcctcttgcccgttcgttccctgaaatctctagcgcggaagtatgtgctgaggactgaattgttggggttttctctattctccagtggcgtattcaagaaatgctcggagttccattcggggcctgaaatttctggaagggtttaagagcataaggacaatttgcctgagagatagagaaggatatggcaggcactgaagctgcccatgacctgggcagttcacgaagatcacaagatgacacagcaacattaatcccacatagtggcaacttggaagaatcaagcgggaggggcgtgaagacaacgaggttcaaggatgatgatgaggttgtggagatcactcttgatgtacagcgtgattcagtggcaattgaagatgtcagggcagttgatgacagtggctcagggcacggtggtgggtttgac

SEQ ID NO: 43021 - DNA, 3064 bp, Setaria italica
  misc_feature (3044)..(3044): n is a, c, g, or t
  misc_feature (3057)..(3057): n is a, c, g, or t
  misc_feature (3059)..(3064): n is a, c, g, or t
  Peptide Sequence Number=SeqID_108995
tgtctaactatttaattccctactattagttggtctaactttggtaagtaattctacaagcgggaggggcgtgaagacaacgaggttcaaggatgatgatgaggttgtggagatcactcttgatgtacagcgtgattcagtggcaattgaagatgtcagggcagttgatgacagtggctcagggcacggtggtgggtttgacggcatgtcactagtgtcaccttcctcatcaaggagcggcaagcttgcgtcaaagctaagacaggtgacaaatgggctaaagctgaagaactcaagcaataggccacaacagacacaggtgggaaagaacgtgaggaagagattggacagaagtaagagtggtgctgttgtggcgctcaaaggcctgcagtttgtaactgcgaaagttggccaggatggttgggctgcagtggagaagcgcttcaatcagctacaggtcgatggcgtcttgctacgttcaagatttgggaaatgcattgggatggacggatctgatgagtttgcagtgcaagtgttcgattcattggcaaggaagagagggatagtgaagcaggtgctgactaaggatgagcttaaagatttctgggagcaactcagtgatcagggttttgacaaccgtctccggacattctttgacatggttgacaagaatgctgatggaaggatcacagcagaggaggttaaggagatcattacccttagtgcatcagcaaacaaactttccaagctgaaggaacgagctgaagagtacgcagcactcattatggaagaacttgaccctactaaccttggatatatcgagcttgaggatctggaggcacttttgctgcagtcaccgtctcaagctgctgcaagatcaacaataacacatagctcaaagcttagcaaagctcttagcatgaggcttgcaacaaacgaggacaatggtccattttaccactactggcaagagttcttgtacttccttgaggagaactggaagcgcatttgggttatgactctctggctctcaatctgcattggcctcttcatttggaagtttatccaataccgtaatcgagctgtattccatatcatgggttattgtgtgacaactgcaaaaggtgctgcggagactctcaaattcaatatggccctggttctttttcctgtttgccgaaatacaatcacttggattcggtcgaagacaaagattggagctgtcgtgcccttcaatgacaacataaactttcataaggtaatagcagcaggtgttgcagtaggtgttgctttgcatgcaggtgctcacctaacatgtgattttcctcggctgctccatgcaagtgatgctgcttatgaacctatgaagcctttctttggggagaaaaagccaccaaattattggtggtttgtaaagggaactgaagggtggacaggcgtggtcatgcttgtacttatggccatagcttttgtattagcccaaccatggttcagacgtaacaggctcaaggattctaatcccctcaagaaaatgactggcttcaatgccttctggtttactcaccacttatttgttattgtgtatacactgctcgtcgtccatggaatctgcttgtatctaagcagggaatggtacaagaaaacgacttggatgtaccttgctgttcctgtgctcttgtatgtaagtgaacgcattattcggctatttaggagccatgatgcagttaggattcagaaggttgctgtatatccggggaatgttttggctctgtatatgtccaaaccacctggtttccgatatcggagtggacagtacatcttcataaactgccgtgccgtgtctccatatgaatggcacccattttccatcacttcagcaccaggagatgactatcttagtgttcacatccgcacaaggggtgattggacttcacggcttaggactgtcttctctgaggcatgccgacctccaactgatggagaaagtggactccttcgagctgacctttccaaggggattactgaaagcaatgcaagattcccaaagcttctcattgacggaccatatggtgctccggcgcaagattatcgggaatatgatgtgctactgctcattggactaggcattggagccactccgctgattagcattgtgaaggatgtgcttaaccacattcagcaggggggatctgttgcaggaacagaacctgagggcagtggcagggcaaagaagagaccattcatgacaaagagggcctacttctactgggtgacgagagaagagggatcctttgagtggttccgaggggtcatgaacgaggtggctgagaaggataaggatagagtgattgagctccacaaccactgctcgagcgtctacgaggaaggggatgcacgttctgcactcattgtcatgctgcaagagctccaacatgcgaaaaagggggtggatatcttgtctggaactagcgtcaagacacactttgcacggcctaactggcgaaaagtattcaaacatgttgcagtgaaccatgacaaccaacgcgtcggagttttctactgtggtgagcctgtgctggtgccgcagctacggcagctttcagcagatttcacccacaagacaaatacaaggtttgagttccacaaggagaacttctgatggtttaattcgagaagcatctgggtattgtctcgtagttcttcagtcttcaggatgtgaattataaggttgtactatgtatacaggtagagaaaataaaatgacaggagttgtcctgtagatgtcaaaagtagtggacgatgtggttttttggcaggaatactctgttcatccatgtatactgccactggaagaagctatggagtgactatttctgttgtagcctaaatagataaagcatctttatatttgaaagttgcgagtaagtatgccagaatgtaacataaacttcagatacataatgacatggtatttcgtttctgagatttaaaaaaaaaaaaaaaaaaaagactcagcacctgctgacacagcgagtagaaaaaanaaaaaactaaagnannnnnn

SEQ ID NO: 43022 - DNA, 424 bp, Setaria italica
  Peptide Sequence Number=SeqID_108996
taccaaagcgaacaagggcagccagaagcggatgccaaatcctctcgcccgccatctgcgaccccccaaattgcgcagcttccctgttgaccatcaccaaccccgaaggcccgaacccaatcgccggcttcctcgctgccagacgcgcgacgccggagacgatgcaatcccggccacatccccagcttcgaatcgactcgtcctcatccatggccatccgaccagctccgctgctccattcgcccttggcacgccatgtcgccatccatcccgtggctccaggtcgtccagattaactacgggtgtgaaccgtgtgatgctggtgcacactctgtgtttgagtaaatgccccaacgaatctgaagacccgcgcaggctgaacatcgctgttcgtttttctgtggtctgtgcagatcagcaaagg

SEQ ID NO: 43023 - DNA, 861 bp, Setaria italica
  Peptide Sequence Number=SeqID_108997
acgtttgtttttcttggggtgttacagttggtaatcagagcttaggttaatttaatccgaggaaaaaataaagtctaatttgacacacttgcacttgtaggttgggtacgggtacattggtgtgtatggattattttgtctttatgcatactttaaattgttggagcttgatatttgtgttggttgtgtcttgtggtggctgcagttatgccgcctaagaagcaaggtcgggcacgaccagcgagcggtgcccaagctgatggcactagtcaagcagaattacttgccgcaatgcgtgagatgcaaaatgagatgaggactttgaggcagactgctcgtgcgggtgcagcacaacctaacctactacctctactcaggaagttgctgccccagttggccctgagagtggtgtcttgctgagagagtgggttggcatgaagctcgatagttttgatggcagtggtactcctatttaggctgctgattggttgtcatatgtggaggataagatggaagcttttgaggtgtcagctcatgatcgtgttcgttatggggcacaattactaaagggtgaggcacaacaagggtggaagggtgtgcagtcagctcgcacggctgcgcatggttctttaacttggcctgagtttgttaggcagtttgagaggaggttttacccagtgaccttcctggacaagatgaaaattgagctaaataactatgtgcaggaaaggaagacagtggctgagtatgaggtggggttcaaccagattgttcgctttgttccacatgtggcccatgatgatgcagagaaagcaaggcaatttcgtcaaggccttaagccttcaattcgccatgtgttgg

SEQ ID NO: 43024 - DNA, 438 bp, Setaria italica
  Peptide Sequence Number=SeqID_108998
cccgccgcccgccctcctcctcgacttcttcttccccatacgagatgttgcagtcaggcttcttcatttttccccaattttttcaataaatagcctgaatgcatgagagtgaattaccacaccaccatcttctgcacctccacgaggtttcattttgatgctcactgctgccgtccccactgattcgcatccggcgagctctaatgcagtggtccgtggatgcaaatattttcccctggaaacatttttttgtttatcttacctatttttttgcagtggtcaaactttctttcactaaaatttgtttaccagcattttcattttggttcaatactcatctccactattttcactttgtcggatttgttaattgaacgaagttgagcactggctacaaacaaccaagttcttacatacatcaggcagaacttctttcct

SEQ ID NO: 43025 - DNA, 3723 bp, Setaria italica
  Peptide Sequence Number=SeqID_108999
tccctgtgtgtccttggtctagttttcttttttagatttatttttgctattgcaccctttttttctcattttgctttagtcaaagcaacaactcttgtcaccagcaacagatcaaaacattgatagaaatatttacacttgcaaaagtgataacttagtcatcggtttggcaagctaccaggcacactcaactgaagaaaaatcgatatttacatgcacacaactcccagggcaaccatatgtacagtgggggccagtcgtgccggccacaggtcatcttcccaagccatggaaaagggattacaaaacttccaccagcctgggcaattataggtttacaaccctcgcatttttaatttacatggtgtagaagactttgacgacgctatatataatctgtcctacgatctgtacacactgtacaagtttgcccctccaccattggaggagactgcagcacgtgtgctccccaaccagctcgtccaagatagagacaatgcaaggagtgcaaaagaatgaagggacacctcagtcttctcaatgaattctacaattgagaaggtccgtggtatttgcacatggattctttcttgtgctcaggatcaaggctgttccttagcccaacaagcgcacaatggaaagcacgagcagatgccgatactggagctactgcagcagctggtgctccacatattgcagtagccagggctgatccagcaccagcccgattataagctttaataggattgctaatcaaagccgaggcagtctttccaaacccatcagttaagctttcataagcctgttttatcccttgttgcgcactttcaggttggttagctcttatgttgtgttttgttcgtttcgcttcacatgaagctaaaggtggtggaacagctgtaagggcccgttctgtcttcacaagcatatcatgagctcccgcagccaaatggacaccaagccctaccgcttcaatggaaacactccttataaaagcaactgcacctctttgcattcccttgagcaacttacggtccttcttgtagctttttatgggcaaagataccaacttcttagtccctgaactcacagcaactagtgatcttattggaggaagcccttttaacaatttgtgaacctggtttttagaaatgtcctccaaccattctgcagctactgtatcacatatgctgttccatccataaacacccattgcagaaacatgcttaagcttcaaatcaattcccttccacggaagaatgttgagaagttctgcataatttcctttgcctagtgcaatggggtcaaactgacgaggtatataattaatgtgcagaacaagcggctttacatcaaatttctgaaagaaaggaagtaatgcctcatccacaaccgtatttcttccatagcttgtgcttttcacattgaaaatctctttttcgctttgcaaatgagggtcattgttacacaaatcattctgaaagaactttattaggaagttaagttgcccttgatcaagatgcaactgtagaggtaaaaatctccagatgaagcctgtagtcttccaaaggagcatgcggttcgggccttacagactccagttcaaacctgaatacactagagcaagattctcttgggtaatcctttgagttgtaacatccaagaaccagtttccacggagcatggatactttgatcacaaagacttaagtcctgagcagcaatggatagcttagatatagaaacatctccatctggatacatgtcaagttggatactgagccctgtcagggaaaactccaaagaagagctcctatctctgccatctgtgcatgcgaagctagttggatctttctgaggtaataaccagtcatttccagcatacagccgccacttgacatctatatcgtgaataagaatctttcctttaagattacaggattcatcatcagtattcaagtggcaaacagatgccttcacttcttgttgaagtatttgctctccttttttgcttttctttttcgaaacatggttctcaactattgtcaagggaacattgttataccatccaccatcttcactctccccgccagatgtacacttatgctcttcaatacatggagctgatgacgattgatgaagttcaggcatataatatgagtcaatgatttgatcaggacaggagtcttgtctcagtggtatttgagtaacattggtttccgaagtaaccaatgatgatctaagcaaaacatgagaagtggccgtgttcagttcaaacccatcatctgtttcactgctactaactgagtgacagcaattgctctcccaaaagtcattggccatgtagtcctctgtgtaaaaagcattctcaatgatatcatcaagcagtccatctgactggcaatcaccagaatccgtcatattctccaaactgctctcagacttgtctgatgcatcagcagctatattttgcttgtttgcttgttggacactattccacctagattgtagatgatctaaagcatcccgcatatctggaccatatagctgctggagttgggagcctaaacgaataagaccataagttgtatcacgacaagtagcaatatcaaattgggaatccaatatttcaagcttccaaaaggaagaatcgattcttagagaagcttcgatgaatgtgttctgggcaaccttaacataacctgcttgacgaaggtaatctacaccataaccacaagtgacattttttgatccagatgactctgaaaggagaaccccaagatcacgtaactggatatcaaaatcagtggctgcagaggctgatgaagatttattatgaagtttaaatgatgacgcagctaagatgcacgagaaaaactttgggtccgttgcttcggcagtgagagtgaaatatttgaagtgaggttcatagctaacagcaacatcagtcaactcaagaaagaaagatgatgcatatggttcaccagaccgagaactatttactgtgttactattatctgactttccagttccatctgaacctgaactgaacagcaggcacatcgcattgatccaatccatacggccaccaggtgccacaattgtaccagaacgaacaccaacagaagtgtagttctcttttagctttgggttcctgatgtgggtcacagaacagccagcagtgccaatagacaacacattagtaccttcaccatcaccccgcctgcaagcagagtccttgcaaaccactataagaaaatctttgctttctccagggactttatcatccttaacactaacagaaccccaaagctcagcttcaccatgattcacccaaagaaaactggcattgttgagtcgtccaacattagaataagagaaaagagaaaaatttgaaactttcaacttaagcgagctccaggatccttctagttctgtctgtaacaaaggaccaacttccactgtttcatccaattcagtgcaaatttccaagatgctgcattcaaaaatgacggatgtttggatgcaaatatcatttggaacagatttgtccttgcaattttcagatgtgcttgtttcttcatttgatatcccatcaaggacatgatctagcaacttatttagtagtccgcaattcctttttacaaacttgtactgagacacaagaaagtttaacatgaagtaagagctcagagctcttaatgagctcctggcgcatgctaga

SEQ ID NO: 43026 - DNA, 937 bp, Setaria italica
  Peptide Sequence Number=SeqID_109000
atctcgcactcgcagtctcccctgctctgctaccctcccttcccgcacgccgccgccgaccacctcaccgaaccctaaaccccctgggccccaccccctcggacccgccgccccgggcgccggcgggatcctaggcctcgccggagccgctgcggccggggccgggtggcgcggcggagggcggaagagcccggaaagcggacccccactcccctctccccgtagcgggggagggagaaaactagcggaggaggtaagtcggagcagggggaggcaagatgaggatcatgatcaagggcggcgtgtggaagaacacggaggacgagatcctcaaggccgccgtcatgaagtacggcaagaaccagtgggcgcgcatctcgtcgctgctcgtccgcaagtccgccaagcagtgcaaggcgcgatggtacgagtggctcgacccctccatcaagaagactgagtggacaagggaagaggatgagaagctacttcatcttgctaaactcatgcctactcagtggaggacaattgcacctattgtaggtcgaacaccatctcaatgccttgagcgttacgaaaacttcttgatgctgcatgtgcgaaggatgaaaattatgagcctaatgatgaccctaggaagctgcgtcctggtgagattgacccaaatcctgaatcaaaacctgcacgtcctgatcctgtcgatatggatgaagatgaaaaagaaatgctttctgaggcaagggctcggttggctaacactaggggtaaaaaagcaaaacgaaaggcaagagagaaacaacttgaagaggcaaggcggcttgcctcactacagaaaaggagagaattgaaggcagccggtattgatacacgacgaaacaaaagaaaaccggtaaaaattaaaagaaaaataaaaaacaaaaaacgaaaaaacaaaaaa

SEQ ID NO: 43027 - DNA, 467 bp, Setaria italica
  Peptide Sequence Number=SeqID_109001
ttttttaatatagggactccaacataattccccatttctcctgaatgagattattacggaatatctttctgtctaatcagtccataaaaaaatgaaatatctttatgtttaaacaaattccttatggaatgataatcatggtcaaaagatagtgctggatgaagtcagcatatgtaagactaggatcttcatcatctgcaactgcaaagacccgctgacgccgacgccattgccaattaggacgacagccccagcaaccaaggcagccagcagtatgcaaccaattcctatgtatatcccaaagataataacttttttatccatgacctgtgaatcatctttattcatatcctccggggctactacagggagagaaagtgactctgagcagcttcgtcctccatgaattggagttcctactcctgctggttcatttccttctactagtttgtattgttctactttaa

SEQ ID NO: 43028 - DNA, 611 bp, Setaria italica
  Peptide Sequence Number=SeqID_109002
tttttttttttgataaggatctgcaagtttcaacccaatgtttcttctcctgagtccgaactattattaaggtacatttacagacatgagacatctagttgcacgagttaaactgaattccagtccggagaacaggtaaccagggtcagctgcaaaattgtgatttcacaatgcagagtttaaccagaaacagtcgcgagtcgcagctactagccaggcagcaactaatgaaaaacaaagtactgaatcaacagacatgttaatctgatgggcagggaacaaacctaactacacagttagactgctctctggtcaagatccaaaaggaaacacgacttctagctttctaagtcagctgaagtccatgtagacaggcaggttgcatgcgcgatggatgctatcataactgcagctgcctgtcgaagcctgcagcaccaccacgagaaggttgcagcagatttacaaagtttcggagatgaggtggaggtgcattgtatgcaattccagcacccatgagacgacttggagcatgcgttaagttagtggcaggtctgcccaatgtgttagctatagcctgcggtgtggtcataacaggctgtctaaggaagtta

SEQ ID NO: 43029 - DNA, 793 bp, Setaria italica
  Peptide Sequence Number=SeqID_109003
gttttactaggatttttcatatatacttgttacaacttattattctttacagctagctaaaatgcaattacatttaccatcaggtcaacttcatggaaataggaaacaatgaaaccgtttagtctatatgattctcaaggacaactgtctctttatatttccatttcctacacctttctcatggcttcactacttatgacctcgtcaatgagattcttgaagatgtgtctttcaatgtccagaaccaccccttgtagctcgctgtcgaaactcttccattttcccatttcatgtactgcattctttgctagcttgcgctcttcctcttcctcttcagagaatcttattattgaggcctcaggttggagcatttcaatctctgagcataattccttgaaaagatgccatccgcttgattttttacatataatcatctgcacttgttgtctcacagaaccgccaccgtgtattttctgagcaatgagttcatttgcaagatcgaaaatgagtttgcggtgaagctttcctgcggctggttttgcttgttcaaggataaggaaaacctcaggattgattgtatagcttggcagctggaattgactacgcacttcgaaagataatggtgtattccgctggaaccgacaggggatcatcttggagcttagttcactgcgtaggaggcctgatgctgagagtatctcataaatgtaatggcggtctttattggcagttaccgtcaacaaatgtcattgtgctgggagcctcatcactcaacaattgcaagagttcaagc

SEQ ID NO: 43030 - DNA, 498 bp, Setaria italica
  Peptide Sequence Number=SeqID_109004
tttactttaccgtaacttactaagttgttgagttagtttcctacttcaaaaatcttatttatatgcagcagagagcaaatgcacttcagaaatgtgttccagtcactgcttgtacagaaggaacttggagaattgaatttcttgagcatgtggggaacatctctgacagactttaacgtctcacacaatgcagacattacttcttcacagcaaagaaagaatgttattgtgttgaggcgattatttatgacatcaatatcaattataggacgtaagaaccatgccctcaagagacgtcttcccattggtgtgacacacttgttgagcattccaaaaactgagaacccttctttagcccttccaattcccatgtaactagggtgtttatctacttgaaaaatttgtagtgcttcatgagcagttgcgtcgagtttaaggaacttgtctaatgagatctgtgccacagaatcgatcgcaatggatgctccaccttcatct

SEQ ID NO: 43031 - DNA, 722 bp, Setaria italica
  misc_feature (1)..(48): n is a, c, g, or t
  Peptide Sequence Number=SeqID_109005
nnnnnnnnnnnnnnnnnnnnnnnnnnnnnnnnnnnnnnnnnnnnnnnnctaagtcgaaattttcttgaccactcaataattgtctcagacaaactctcgaccatgcattcatgggaggagcctgacaaaagtctagtagaaagtgagaagaatacaaaattatcagccggcctcctcatgacaccacccgtatgaaggcggggaataagctagtccacggcgcagatgccatgcatataggaggattacagataaacactagtgtcttgttagtaattaagttgtagaagggcattggctgatgatccttggaccgatggggatcttcttttgtgaagaaaagggttggaggagacgataacgaatgtatatggatggatcgatcaatcagaacttcagaagcaagccagctccttgaggcagcccgtggcagagcccttggcattctggcagaccgccatggtcttgttgttggtgcccttgtactcaaccttaatgttatccatggtgactccggtgcatggcagcttgtcggagcagagcaggctgacagcctccggcgttgcggaggtgccagtgatgttcttgaaggtgacgtccttgatggtgaccttggaagcgccgttcttggtgcagatcttgttggggcagtacttcatgtcgatgatagaacaagggtttttagacaacgttacctaccaataggacgaatagttactaca

SEQ ID NO: 43032 - DNA, 344 bp, Setaria italica
  Peptide Sequence Number=SeqID_109006
tggtcttggactacttaacctaactaataatgaagtcaaattatttgaatctactatgcactgcatgacaaggcatcttgtgcactaatccgtctgtaggagcaagttagaaatgttgagaaacagaaccattaattggattcgatccattcccgatcgaacatgttgcatgcacaatgacattcaagcattttgatgtctggattatttatttataggaactgcctatagcatattaatgagattgcaaaaatggacctgtctatcatagaggggttattatttgtccaacagcctggttcctttacattttcgattgtttatttaaaaatgttaaagataaa

SEQ ID NO: 43033 - DNA, 726 bp, Setaria italica
  misc_feature (212)..(212): n is a, c, g, or t
  Peptide Sequence Number=SeqID_109007
tgtaggtaccaaaccaatggatgagctacaaccgtctctgcaactgtgggcaacagcttatccttgtattaactcaaatccattaacttccatctgccagctccaactcagtaggctggggtgatataatctcaatgtttgatatgcttacatgtggtgcgtgcctgatgcaggcatgcactgcttaggaacgaggggcaccaggaggcacnccaaaacagatagcggtggtctcactgcagtgtctttcactctttctcagtgacatgttgcagtttatcaaagacatgctctagaaatcggtaaagtcacaagtgcctagtttgtccaaaaaattaaagttggacatctactatgttgtccacatctacgggcaagaatttgattttctctgtacccagctagtcctcataatcaatgacttccatctaccagctcaatattcagacttcgtcatatgctccaagtatatacatactccacctcacacaggttttttgctgctcctattggtcatctagtactcgtgatgtgcatgaaagatatccgaagcacatacttgaacttgatacaagctgcattcttcgattgtgatgcttcggaacgaggggcaccaggaggcacaatagaacagccaggtttcactgcattctgttacctggcagcctgtagaagataaagttcaagtcacaatagcaagtatgttactaatcgccttacacgttg

SEQ ID NO: 43034 - DNA, 499 bp, Setaria italica
  Peptide Sequence Number=SeqID_109008
tcatcacctactctgcctacaagcgctgctcccaaaatgcatcactccccagtccaacttaacccatcaacctccacgcttgcgagagcgcctcttaggctcattattcacggcggcagcttcatcgctccctttgccaccgccttcttcactcttcggatcgtctccttgcgacacttcaccactttggcgaccgccctgccttttcagcggcggtggcttctcatcaacagatttagctacgttgctggcctcaccagccccgctctccaacccttctgaggtacaaggatccaaaaagttcacaacttcgttcagagcatgaagagccatcttcttgatctctagtttatcttcgttagctttgtgggaagaaggaagtcgtctaaactccccagtcaacttgacacactcgccaatgttttcaggggaacaaagtccagtgcaactttaatgcaggacttcaaatttcccgctggatgtcctcatcaagtgagaa

SEQ ID NO: 43035 - DNA, 406 bp, Setaria italica
  Peptide Sequence Number=SeqID_109009
ttaggaattacggatcggatccggcgcccccggtggcagatctgcaaagagcggctccaccaccagctcgtcagcgcgcagcgggctccggcgcggaggttagcagcgctaaggtgggggagcagctcggcgacacgcgtggccggcggtctgacggggatgcggtgcggctgtggcctggcgggggacgcggacggcagctccgccctggtaggggtgcggcccagctgcagttcagcgggaagcggcacggcaaaggatgcgtgagtcctagcagcggcttcggtcagcagtgcaactgcggcggatggcggtggtctagtgggggcacggaggcccgacggggccagccactcggcagcgcgtcccgaggtgcgaaggctggtggggacgcgacctgacggcc

SEQ ID NO: 43036 - DNA, 500 bp, Setaria italica
  Peptide Sequence Number=SeqID_109010
cctcccctgtgccgccatctcaacgagtgtatataacttcttaagtggcatatcatccaatgcttccgctgctgcatcgatatctccttcattgaacacattgagatgctgtagcacctttttggcatcctctttcttcagtttaggaacatggtaggtcacagagaagacatcacacatgccaatggactctagaaatcccacctcgcttgtcgttccaatcacaagcaaattcttccccttcggaggaacccttttgaggagaaccagaagcgtttgtgagatcaagtttgagaagcggggtccaatagcaacatactccagtaacctctctatgtcatcgagaattatgatgctcagtgaagatttgtatgcatcctcaaaaaccttgcatatctgtgcacacttgctgctttcactgcaaccaatcattgtctcagctgatataacttttacatagcaaaatcactatcgatgaccaacagtagctgccgtagctg

SEQ ID NO: 43037 - DNA, 346 bp, Setaria italica
  Peptide Sequence Number=SeqID_109011
tgaaattgtagatacttggagatggatgccattgcaggagcaccaatgttcttcacttgggatctgactcaatgtgggagaggaaggcatacctgaccacaattttccatgtcttgcacttgagttttcaatcgacctagctggcccattgttgcagattactgaaacagataaaacatctcttgtatgtgacatagtggttgttgagattaggagcaagtctgtaacagtaaatgtaacaaaccttgatggttcttgacaagaggagttaaattgtaaatgatacatgcacctcgtgtaaaatcaatgagtatcccttaattaaaccggaaaaaaaaaaaaaaaa

SEQ ID NO: 43038 - DNA, 521 bp, Setaria italica
  Peptide Sequence Number=SeqID_109012
catggttggtcctggtgaggttgatgacgagttggaagatgaggtggcatctgagtgtgccaagtatgggacagtgactcgcgtactaatatttgagatcacacaggcagacttcccagctgaggaggctgtaaggatattcatacagtttgagcgggcagaagaagcaacaaaggctctgatcgatctgcaagggcggttctttggcgggcggttggtgcagtcatccttctttgacgaggaaaggtttggaaggaacgaacttgctcctatgccaggggaagtaccagggtttttcgactaaagaaagaaattttgacgtggtatcagatcagagctgagcagtagttcttatttttcctggaggcaaatggagcgtatagggagggcagttgtagtagctagtgcacaggtgtattcgaactatttttgatacaagctgtgatgtttttgtgttttgtcatctgctactgaactatccgtgtgtttgtacatgaacttttgacatctttctcgtgctt

SEQ ID NO: 43039 - DNA, 785 bp, Setaria italica
  misc_feature (744)..(785): n is a, c, g, or t
  Peptide Sequence Number=SeqID_109013
gatttcgctcacctgctttttacacatagcccttgcgaagctgccaattcctattgcagctgacttttggatgattgacttgtactccctccatcctgaaatataaggcatccaagggttcaaaatttgtccccaaatataaggcgtcctaggagtttttggcaagtactcaatcaactcaattaaaagcttgccaaatatttcccttgttaacaggaaaacttgccttgtattaccattagctaagggtatatgagacatttgcccacctccttaatctgtcctaaaaatcctaggatgccttgtatttcagaacggagggagtacttgtgtactatctcttttagatattttttttatttttttcatcaacagaactgctctagtaaagtgggtacttgcatgtggttgcatatttttcatcaaaattactttgccttttctccctatttttccctttttctttcctgtcccctaccggttgctgctattttacagtctcttgggctggtaagatatcgcgtcgcctcatgccttggtgtcgtggtgggcgtgggttgccacacctcgcctgccttgacgctctaagaacattgcatgattgtatgtgcatgtcttccgtttagaatgtgtttggttaataatgtaagactgccaaggcatgcaaaacacttttgccagcttgtctgactacaaaagcttagtaatataatatttatgatgtgtggtattgttgttggaggnnnnnnnnnnnnnnnnnnnnnnnnnnnnnnnnnnnnnnnnnn

SEQ ID NO: 43040 - DNA, 874 bp, Setaria italica
  misc_feature (822)..(874): n is a, c, g, or t
  Peptide Sequence Number=SeqID_109014
gtgtttaattctttgttcagtctgaacttgtctatcattggttaaatctgaacttgtttgttctttgttaaatttgaaattgtttatagtttgtctctgagtaagcatgatgattatgaatctcagcttaagagagacttcaaagaaacttcgttatggatatgtttaactagcacttgtgtatatattgttgctttcacaagtagtgttgtctacaactaacctgtgaatagttttagttctactgcttgaaaattgtgacagtatttcagaagcttactacatcttaatttatactcttatagttttatctgaatttctcttgttttcactgtggctgtgccatttgcatatccttagattgtgtgtataaatatcatactatcatgcacagattatttgtgtgtataaattgtacatgcttctgaaaagctctatcttgtttatgatatattctatgaatgtctgcaacattgggagcagcctctacagttgaggaaccaagaacttcaaatacctgataaacagaagatcctcagtgtgaatttctacttttcttagctttaaattgacaccggcaatgaagttaaagagctcaagtgctaacgagaggagggcgtgacttgttttgttcttctttcttttccaagagagtgctgtgattcggacttcgccgtgctagcagaggatacctacagtgtcttgctagttgctacttataaagggctatgttgaatacaaatattacttcaagaacaaatttgttgctacaagcgttttgttgctacaattgttttggttgaattcgttgcttcaagaacnnnnnnnnnnnnnnnnnnnnnnnnnnnnnnnnnnnnnnnnnnnnnnnnnnnnn

SEQ ID NO: 43041 - DNA, 257 bp, Setaria italica
  Peptide Sequence Number=SeqID_109015
attcacatgcccctccctggaggactacacggcggcggtgcgcaatcttcagcaagcagtggatgccccggagaacatcacaccgatccgccggaggtacgaatggcggtacggtctggtggatggagccccatccgacgccagatcgtgcttcccggctaggctgccgaagccaccgcgcgagccggctccctggatccacgacgaccacggcgaccgaagacgggaggaccagcgccgcggcaaaagcggagcct

SEQ ID NO: 43042 - DNA, 399 bp, Setaria italica
  Peptide Sequence Number=SeqID_109016
ttttcgcggcgctccgcagcgcagcgcgtctgctgcagacctgcagtgtaccgagacgaagcggcgccgccagctccccaaaacctcgccacctctccgccctcgccagagaaaaagcagaacgaaaaggggggaaaacagagctcaagcactcaccgcagcaatggctctcaccgctcgcgccgcgctcgtgcgcgtcctccctccgcgaccctcaccgacctcgcagctcaagcaaggtttaggcggccgcggccgggcctcgctcgccgtgcgggtgaaggactccgacgactacggggccctgctctcggagaagcccgcggcgcaggcgaagcgggacgggtgggaggggtttggccggggcgtgaccagtgcggcggaggaggagaaggaaga

SEQ ID NO: 43043 - DNA, 236 bp, Setaria italica
  Peptide Sequence Number=SeqID_109017
cggatccacatccgagcttgtgaccgtcgacgaggacagcggtcctattactagcgttagctgggctcctgatggtcggcacattgctgtcgggctcaactcgtctgacgttcagctctgggacaccagctccacgccagcgagccgactcttccctcgtgcacccctctgagagttctcaacagtctgttggagctggtgtcccagagctgaacgtcagacgagttgagcccgac

SEQ ID NO: 43044 - DNA, 643 bp, Setaria italica
  Peptide Sequence Number=SeqID_109018
acagtagcatcagctgctgcggatgagaccctccggttctggaatgtttttggagcccctgaagcacccaagcctgcagccaaagcttcatacactgggatgttcaacagcttcaaccatatccgataggatgagatgattactgatgatcttcttttggatatggtcccagtgttcttctagttcatatagatcgcctctcactgatgtgatctaccaaattggctaagcaggcagcttgagggaagcattgcaatccaaatacatcatttttagttttccggagggtcagaaatcaatgacacagggttgccttcgttgccgtcttcatcatcacaacatcacaggcacggagcagcataacctccacatgtagagcctgagattgaaatgcagaatcgcagagcccttgacttcggacaagacacgctgcggcctagcctcagagattacaatgcagagtccgacaattttgctacttctcctgtcatttgtaatttgtatgccagtcattagtgctgttcgatgtagaatgttttcgccttttgatgcaacatcaagagagcttgtttgatgtggcattaattgtaaatcaagacacaacctttcctttcataattataatggaatatttgttctcaaa

SEQ ID NO: 43045 - DNA, 2151 bp, Setaria italica
  misc_feature (2145)..(2145): n is a, c, g, or t
  Peptide Sequence Number=SeqID_109019
cggcggcgttcccctccccgtctctcccctcctcgccctacaaatactcgccggcggccgatccctaaaccccacagcgcaagcgcgcagctctgctctctctttctccctctcccgtcgctcctctccgcctccccacgccgatctcgatcgctcggggagaccacgagacgcgcgcccttctctcgctcgctcatcaaagctctcgacttttttctttgagttaatcttcgcgtttcctttcgtgttcgattcactaacctgcgattaatccctgtttttttttgctgagttccattgtttctcctgttattattattattattactgttttgttgccctgtttcttctaaccatggacgtaggctcccgctcgatctcatctgtcaagagccgcgcggcggcggcgccgcggccgccgctgcaggaggctggatcccggccctacatgccgccgctgagctcgggatcgcgcaacccttcagccaagtgctacggcgacaggttcatcccggacaggtcggcgatggacatggacatggcgcactacctgctcacggagcccaagaaggacaaggagaacgcggcggcgtccccctccaaggaggcgtaccggaggctgctcgccgagaagctgctcaacaaccggacgcggatcctcgccttcaggaacaagccgccggagccggagaacgtcacgggtgctgacgcggcttcctcccaccacgccaaaccggccaagcagcggcgccacattccccagtctgcggagaggactctggatgcaccagagcttgttgatgactactacctcaacctgctcgactgggggagcaacaacgtgctgtccattgctctgggcgacacggtgtacctgtgggacgcctcgagcggatccacttctgagcttgtgactgtcgatgaggacagcggtcccatcaccagcgtcagctgggctcccgacggtcggcacattgctgttgggctcaactcgtctgatgtccagctctgggacaccagctctaaccgattgttgaggactctcagaggtatgcatgaggcaagagttggttcattggcatggaacaacagcatcctgacgaccggtagcatggatggtaagatcgtgaacaatgatgtgaggattaggaaccacgtcgtgcagacatacgagggacacagccaggaggtctgcgggctcaagtggtctggatcaggacagcagctggccagcgggggcaacgacaaccttctgcacatttgggatgtgtcgatggcatcctccatgccttctgccggccgcaaccagtggctgcacaggctcgacgatcacatggccgctgtgaaggcactggcatggtgcccattccagagcaacttgctggcaactggtggtggtggtagcgatcggtgcatcaagttctggaacacacacaccggtgcatgtctgaactctgtcgacactggatcacaggtttgcgcccttctctggaacaagaatgagagagagctgctgagttcacacggattcacacacaaccagctaaccttgtggaagtacccatcaatggtgaagatggctgaactcactggccatacctcccgtgtccttttcatggctcagagccctgatggttgcacagtagcctcagcagctgcggatgagaccctccggttctggaacgtgtttggagcccctgaagcgcccaagcctgcagccaaggcttcccacactgggatgttcaacagcttcaaccatatccgataggatgagtcccaggaacatgcacttctatcggacatggtcctgcatcaatctaatgcatcataatgaaggtcaaaattcaatggcagaattggctttgttgacgtcttcatcatcacgtcgatgatatctgcagagtctcaacgccagaacattgggatccagaacctctaatattgaattgttgcgggaggattatgtaaataccagtgattagtgttgttccatgtacatcaaagtacagtgtgttcttcccatttggacgcagcatcaataagtctgtttgatgcggcagtttgtaaattaagaaataaccattcttttcaaaaattaatggaatacttggttcttttcttccaatcttacctaattctaaaaanaaaaaa

SEQ ID NO: 43046 - DNA, 289 bp, Setaria italica
  Peptide Sequence Number=SeqID_109020
tataataatggcttgtcttgcagtgctcttgcactgctgctctccctgacaacaatacacacaagagaaggctgcttgatcttatctttcatctggctatgtaccatgaaactgtaaagatttgaacacaatcatgaatccatgatggatggtctgataacacttctatgaatgggggacgaatgtcccgacatagcccagaccaacgatgaagaaagcaatggattggaggaagaggaatatgtagtagtggttattcccaactgtgacgtcgtagcatccacagaag

SEQ ID NO: 43047 - DNA, 362 bp, Setaria italica
  Peptide Sequence Number=SeqID_109021
ttagtaatttagtgaattgataatatcgcacacagcagaagtattggacgtatccaactttttaagtgattcttccagcaataccagcctctggggaataaagataagtatttactaggagttatagactaatgtagatatagtacatacacaaccgtattaatgatgccggccaacaaatattaagagcatacaaagactatatcaataaggttaggatctatgcagcatgttccagtaataaccataaatgtaattagaggaaatatcatatctgaaagcaaaaattgacagctatagtagttgttgttttgtgttccaagaatatatagagaattgaagggggtgcttgttgatgctct

SEQ ID NO: 43048 - DNA, 382 bp, Setaria italica
  Peptide Sequence Number=SeqID_109022
ttaggtttaaaaaatggtggaaacttttggacagaatgcagttcttaagttggtatggtggaaagatcccagcactttaagtggttgccttctttcaaagggaaccccttaaaatgaaatccgatgttttattcatctcagttttccatatgatggctttggtcacacacgttggaagaaaatatttctcggttggcttgcctgcaatagtttgtcagcatcacgggccatcgtgactggccattcttgtaaattgatgacttagggacccactttgagagacagttaaataaggtaacactgaatgggttatgccttgagaggttaagccataattagaacaaaatgaatcagttacgactgagctgtaaaagcaccaagt

SEQ ID NO: 43049 - DNA, 719 bp, Setaria italica
  Peptide Sequence Number=SeqID_109023
acccaattaaactgtaagtactagacatgacccaccggcccgtgtccgaggagaatgtgacaaaccggaactcaactgaagtattgtttgtgtttttaaatgggaatgcttggacaatcttgaacttgttatccttggctgatgacagttcaattggagggtcaatcttgatcttgtgcttgttggctgatgcctgttcattgggtggatcaaacacaagacctactgccctgccacggattagatgatgttctgcaccaggaattggttgtgcttgctgcgttgccggattagcaatgaggatggtatgtactcgagggcgtatatcttcaggagtttaataataagaaaggaccaattttgttgaggccagcagactgaacccatcatacttattcatacgacagcccaagaagtttagccttgatgagggaacaccaacaattgcaggtgttgatgaaatcaagttaaggtaataattgtaacgaccatcagaatcaacatgggaactgatctggatgagggcagggcatgatgggcagagtcttgcctgtttagcagcaaacatagcactattgatgatcttcgtgcagctatgcccggatacagtcttcaagcatgtgactaacttgaagggcagccgtgaaaagatgttctcgcatatgacatcttcagatatgtcagagttctccaatctgatgtcctgcagccatactaag

SEQ ID NO: 43050 - DNA, 434 bp, Setaria italica
  Peptide Sequence Number=SeqID_109024
tagaatagttagactagggacaagaatgtcaatcatctaactcaaaatttcttaatcttatcaatgcaagctactaattgaaactaaggctattagcttgatccttggtgctacgctacatcaaactgtcaattgatgacattgtatgttggattcaccaacaagcaggttaatcattgctatgcgggtagtgtttttttttcttccctttttttatgagaatacacgaggaaaatgtgtatgtaattttaaggagagtgccatagtgggtatatacccaagacctcaaccactagaaccttgcactcaaccattggtccacatggctgcgtatgttttagtatcaatatgacacgattgcaccatctttctactttttggcggcgctgatgcaaatagcaaatcaatgttcttatttctttttgtaaactttc

SEQ ID NO: 43051 - DNA, 585 bp, Setaria italica
  Peptide Sequence Number=SeqID_109025
agtagacaaggggaacatttgggtacttagatccagagtattattacacaggcttattaactgagaagagtgatgtttatagttttggtgtgatacttgttgagctcctaacaaggaagaagccgattttcctcaactgccttggtgaaaagcagaacttacatcattatttccttcaagcgctaagggataaaactactatggatgtggtggattcacaagttgtgttggaagccagccaaggtgaaattgatgagattgccttggttgcagagatgtgtttaaggactaaaggagaaacgagacctaaaatgaaagaagtggagttaagattgcagctcctaaaagctaacatatctaaaacatgcaaaaaggggtcaaaaaggggcagagaaaccaagcagtcattatcctcggagtatagatctacttccctgaccatgaccaagggagctgaaattgggcttgttgctaatccatcatctcaggctgtctctaggtgctacactatggagcaagaaatgatacattctgctgagtttcctcgttgactgtacggtttggcattttggtatgaagaactat

SEQ ID NO: 43052 - DNA, 490 bp, Setaria italica
  Peptide Sequence Number=SeqID_109026
aggggaaaacggcaacaagcaaagaggagagattatcaacctgacactttcaatgaaattgtttcaatgatttctccagttggaactctaatgcagctttttcggtggccatggattccaattgtgtttgtttgtggtacagcaagtcagttagctcacgatatctcttctctagctcaacatgctcctgtctggaataatgctctgcgtctcttctcattccagccatttcaactctcatcttctgtaactcagcctgcatcaagaaaatgtgcaatgtgcaaatagaaaacaatatccataacaaatctgatcagtttatatcaaataaacttttagagtcctagctacaacttaaaaaaccaaagcatgcacatccagcattacaacaaaagactgaacgaaatactagcttatgaaattacgacctccaatgacgatatctttgcctcagcctctcgttggctttggcgtgcaggcattggctagt

SEQ ID NO: 43053 - DNA, 1019 bp, Setaria italica
  misc_feature (1)..(40): n is a, c, g, or t
  Peptide Sequence Number=SeqID_109027
nnnnnnnnnnnnnnnnnnnnnnnnnnnnnnnnnnnnnnnnaaaggaaatttgtttttggtctcaagtgggctgtgtggtatattttatgtcaaggtaatgcatacaagctggtacagtacatactctttcagaatcaccaatgttaaaagtgtaaaagaatggattatatagcccatggccaaacaacgaatactactactttacaaaagatggaatgggggtagagaaatttaaaaaaaacaaaattgaaatgtggggggttaatgctgcatccaagtccaaccagggaaactcaaccgtgtggcagggagcattgcctggataggcaggaaataggaaggtcacagagtctatggcaggttcccattggcaagagccagatcacccatgcctgatgttccttctctggatgcaaagtcctgaagtcggtgcagcaagtgcatcaagaacaaatgcacaaacaccagatagaatagcaggctgactcgagcaacaggatgtcgccacaaaaatcttgttgcacggacagctcctgtatctagaagctttgcagccttttgtaactgctgatttgctgttgccatgtgtcgatgatgaagaggaagaggctctaatgccttaatatcactatcttcttcccatgacgatgcggatctacgagttgatttactcctttctgcttcaatctgcacttcatgaaattgtttcaatgatttctccagttggaactctaatgcagctttttcgctggccatggattccaattgtgtttgtttgtggtacagcaagtcagttagctcacgatatctcttctctagctcaacatgctcctgtctggaataatgctctgcgtctcttctcattccagccatttcaactctcatcttctgtaactcagcctccaatgacgatatctttgcctcgcactttcgttgcaatatccgtgcacgctcaacttcttcctgccatgcctgcatctgaagaacttgattagcttcttcagaaggctttttctgcg

SEQ ID NO: 43054 - DNA, 1807 bp, Setaria italica
  Peptide Sequence Number=SeqID_109028
tggtggccgataaaccgagatctgatgtctatggtgaagttgctgccatgatgatgaagagagcaagtctgtttatgttgggaatgtgccatcatctgtcagcgaggctgatctttgaaaatgaattcaaatgaactttggtaacgatcttcaacgccgcatagacaaaaatatcgaagccatcaccatagtcacacgcaagcaacaatatagcagctagggtaacagaacaacctctcttaatgtaaacagggatcatcagtctagcaaaagttggatgtcacgcgcatgtgcacacattcatcgacaaaacaagccccaaaaccttccaaacgcaacatagcagcatataggctgctttgttctggatctctctctctccatttgacgacagatcaaaaccttatgcttgctcttgctgcaccagatcagttcctttgagcatggctccccagtatgcccctctcttggtgaggaacgcgcccataaccgttcgacctcccacggttgccgccattgtactcatcacctccgcctctcgcatatccccgacctccacctccaaagcggccccttcctcccctccttccgcctcttattccgctgttaggcttcctctcctcaacatatatctgccgcccgtttatttcaattggtgaagccttcaatgcattgtgtacaccgctaagctcctcaaattccacaaaagcataatagccaccagtctcctttcggcttctgatagcaacaccatcaggaataagtcggccaaactttttgaattcattttcaagatcagcctcgctgacagatgatggcacattcccaacataaacagacttgctctcttcatcatcatgggcagcaacttcaccatagacatcagatctcggtttatcggccaccatagatgaagccataaccaaatgctgggcctggttcgactccgtcgcagggtgagaaggcttactcacagggacttgctgggctaccgggaatgcaggtggagcctttgcagtttttagaatggaagcgtaagtcttcttcactggttcaccaacaggctcctccacatgaggagttggcacaggaggaggttgcactggctcctctggtgccactgcaatttcatttgagaaggaagaaggtggttcttcaggaagaggttcatctccccagttgtcagatgacactacttgctgtggtgcctcggaataagcatagctgtcgaccacatcacgtccttcagatgttatttgtgttgtttgagtttcttcctcgtgaatgtactcaggaacggtttcgacaactgtgttggacgccaaattgctctcgtagtcatcctgagaaatcagtggtgcaggctgcacctgttcttggtcaacgaagtgaaagtaatcgttgagaataaaataacccttctcttgtggagcaaggaagaacgtttggataaatttcctttggtggctgaactccttggtctgcacgagcccagagaccataacaagcaccccatcatcccatgagctgacaaagttggctgtcttaatctcaatttgggtgaaattcaaggacataatgagcgagtgtatgtccatcatggtgttgacagtggtgttcgcgccagtgaggtcgtcgacgcggaccatggtactggcgtcgctgtagaactggtgcacgacatcggggttctgctgtagcagattgtagtagtttcgtatgaagtaggttcccacctgggtcgccgccgccgccgaggccatggctggatgggggagaaagagaccagcagagcagaagccgagag

SEQ ID NO: 43055 - DNA, 317 bp, Setaria italica
  Peptide Sequence Number=SeqID_109029
atagtaaatggaagttcttcactggcattcatcagtaacatgacatctttgaacaccttgtatgcataacttgctattcatttgatgactcaaactacatcttaatattttctgtagtgtaaccaattgttaaatccgaaaactcttgacatgtttcattgcagagttttgaggaactgcaggatatctgataacctggcatcagtaaacttttcacagtttgcaacattaaccctactggatttgagttttaacaatatcactggccaagtaccacaagctctgccgaatctgaatttactcaacttcttgtttcg

SEQ ID NO: 43056 - DNA, 228 bp, Setaria italica
  Peptide Sequence Number=SeqID_109030
cgaggccagagagagggaaaggagatgaggaggcctggacccagctgttcgtgccgccatggctctgctgcgctcccgacgttgctgctgctgctgcttcttctagctgcatctgcgcaagctcagcaagcgaggacaaggaccgatccggttgaagcggcggcggtgaatgcggtgttcgccaagctcggccagacggcgtcgtcggcatggaacatcagtggcgat

SEQ ID NO: 43057 - DNA, 304 bp, Setaria italica
  Peptide Sequence Number=SeqID_109031
gcagtacctgagtctgggcatcaattcattatccggatctgttccgaaggagctcgggaaccttaccaatctcgtatcgctgtcctttagctcaaacaacttaaatggttcccttccgttggaactagggaatttggttaaacttgagcaactgtatattgatagcgctggcttaagtggttccttaccatcatcgctttccagtcttacaagaatgaaaatattgtgggcatcagataatgattttactgggcaaataccagattatattgggaactgggctaatttaacagatctgcggttt

SEQ ID NO: 43058 - DNA, 418 bp, Setaria italica
  Peptide Sequence Number=SeqID_109032
aattatttcccaagtgcaacatcggaatctcgtgaagttgtatggttgctgccttgagggcgaaaatccactgctggtttacgagtacttagagaatggaagtcttgataaagcattgtttggtacaggttcattcaatttgatgcaactgtatataactccggccctccaggagttcatcgtataacttaaacattcatttgcaggaagtgggagaaagaacctagactggcttacacgctttgggatatgcttaggcattgcaagaggtctagcttatttgcacgaagagtctagcatccgtgttgtgcatagggatataaaggccagtaatatcttacttgacaccaatttcaaccctaagatctcagatttcggactcgctaaactttatgatgacaagaagacgcatgtcagc

SEQ ID NO: 43059 - DNA, 491 bp, Setaria italica
  Peptide Sequence Number=SeqID_109033
ctggccactctttctaatctcgtcgaattgaccagcttagttttgaggaactgcaggatatctgataacctggcatcagtaaacttttcacagtttgcaacattaaccctactggatttgagttttaacaatatcactggccaagtaccacaagctctgccgaatctgaatttactcaacttcttgtttctcgggaataatagtctttcaggaagccttccaagttctataggaacttctcttaaaaacttagacttttcctacaaccagctatcaggaaactttccctcctgggttagtccgaatttgaaattgaatttggtggcgaacaatttcgtaatcaacaactccaataacagtgccttaccttcggggctagggtgccttcagcgagacacaccctgctttcttggctctccacacgtacactgattttggctcttcaggacgtttcacactgggaaggtcagatagaagtggttctacaacta

SEQ ID NO: 43060 - DNA, 469 bp, Setaria italica
  Peptide Sequence Number=SeqID_109034
taacttttagtaagttagtaaaacttttcggtcttgtacagactcgaagcttggaacatgaataacatcgccccatgatgccattgtaagcggtgaggacattatcttctttgcagttgacgagatgtcgttcaaagtgatctcctcaacagttttcaggaaatattcaatgggtttcctttccccataagtcagaacctgtcttccaatatcttcagatgctatagaccttgattccaagttcatcagtactgcagatttggttgcctctttagcacgatcaagctgttcttgtgaaacttttccaggagttgcaatctcaaggagttccccggctgccaaatccacagcctttgatgagaagtctgggctagtgactgcataaattccaaaaaagacccgaattgttgtagacactgttgaaagcagagaatgcattctcgattgtatctccgtatcttgaccaact

SEQ ID NO: 43061 - DNA, 524 bp, Setaria italica
  Peptide Sequence Number=SeqID_109035
cttagaggttcagcataattgtaatattctggaaacaccgtattccaacattacaccaaaattcaaacatgatgagccaactttaatctttgttaatatcttttctgatgttgtttcaggaacttaggacaaaattacttaacagggcctttaccatcgttcctcgggaaattgactgctatgcagtacatggatctgggcatcaattcattatccggatctgttccaaaggagctcgggaaccttaccaatctcgtatggctgtaagaaataaatttttgtaatgtggaaccttactaatcttgtatcaccgtatttcactaggaaaggtcctttagctcaaacaacttaaatggttcccttccgttggaactagggaatttggttaaacttgagcagctgtatattgatagcgctggcttaagtggtcccttaccatcatcgctttctagtcttacaagaatgaaaacattgtgggcatcagataatgattttactgggcaaataccagattatattgggaa

SEQ ID NO: 43062 - DNA, 501 bp, Setaria italica
  Peptide Sequence Number=SeqID_109036
tttagatttgcatttggcgtggttgttttggagactttagctggaaggccaaactttgacaatacacttgatgaagataaggtttatattttagaatgggtaagttcactctgaactgtaaacttgaggcaaggcattgttgcactctagtctccgtactattggtaaaatcgtctgtaaagtttatgctaggaatttataatggagttcacaagccttcattacatcactgtttgccacatcattctgttaggaaaaaattgcgtgaagttgctgacctgtaaacaaaatgctagtactatgcttaggtttatacactacttgaatacagtagtgggctaaatttcagaaaaattgctaaactataaataaaatgctaattgtgctatacttaggtttatatcctacctgaatatagtagtgtgctatttcagcatgccagcatgacggatgttattgcagtacaagaggttgatcacattttaattccctttctttttc

SEQ ID NO: 43063 - DNA, 713 bp, Setaria italica
  Peptide Sequence Number=SeqID_109037
acggaaagggggacgagccaatacccgagctcgagagaagagagagggaaaggagatgaggaggcctggacccagctgttcgtgccgccatggctctgctgcgctcccgacgttgctgctgctgctgctgcttcttctagctgcatctgcgcaagctcagcaagcgaggacaaggaccgatccggttgaagcggcggccgtgaatgcggtgttcgccaagctcggccagacggcgtcgtcggcatggaacatcagtggcgatccctgcaccggcgccgccacggacggcaccaacatcgacacagaccccaccttcaacccggccatcaagtgcgagtgctccggccagaacaacaccgtctgccacgtcacaaagctgaaaatatatgcgctgaatgcggttggtgcgataccagcagaactacagaacctcacgcgtctgactaatctgaacttagcacaaaattacttaacagggcctttaccatcgttcctcgggaaattgactgctatgcagtacctggatctgggcatcaattcattatccggatctgttccaaaggagctcgggaaccttaccaatctcgtatggctgtaagaaataaatttttgtaatgtggaaccttactaatcttgtatcaccgtatttcactaggaaaggttagagatttctacttaacatcttcattccttcaactgattaaccactgtct

SEQ ID NO: 43064 - DNA, 1613 bp, Setaria italica
  misc_feature (1574)..(1574): n is a, c, g, or t
  Peptide Sequence Number=SeqID_109038
aatctacagctcacgccagtttcagaatactctagattcagaactgttccagacagcaaggatgtctccatcatcattacgctactatggcattggacttgagaatggaaactatacagtcacacttcaatttgcagagtttgacttcgaagacatgcagacttggaagagtttaggtaaaagggttttcgatatctatgttcagggtgagcgtaaggagcagaactttgacataagaaaggcagcaggcggaaaatcttacactgctgtcacgaggaagtatactgttcctgtcaccagaaacttccttgagattcatcttttctgggccggcaagggcacttgttgcatccctagtcaaggctactatgggccttcgatctctgctttgagtgcaactccaaatttcaaacctacagtgcgtaatgctgcccatgctgcccagacgaagcgtactagcaatacaggtgtagctgttggggttggggttggtgcagcagttttaggactattagtgctctctggactctatgtgttgaggcagaaaagtagaaaattgtcattggacaaacgagagctgtacagttttgttggaagaccaaatgtatttagttacagttatggtgaactaaggaccgctagtgaaaattttaattccactaaccttcttggtgaaggtggatacggagcagtttataagggtaaactgaccgatggaagcatggtagcagtaaagcagctatctgaaacatctcgtcaagggaagaagcaattcatagctgaaatagaaactatttcccaagtgcaacatcggaatctcgtgaagttgtatggttgctgccttgagggcgaaaatccactgctggtttacgagtacttagagaatggaagtcttgataaagcattgtttggaagtgggagaaagaacctagactggcttacacgctttgggatatgcttaggcattgcaagaggtctagcttatttgcacgaagagtctagcatccgtgttgtgcatagggatataaaggccagtaatatcttacttgacaccaatttcaaccctaagatctcagatttcggactcgctaaactttatgatgacaagaagacgcatgtcagcacaaaaagttgccggtacatttggttatctagcacctgagtacgccatgagaggtcatgtaacggagaaagttgatgtatttgcttttggcgtggtcatattggaaacaatagctggaaggccaaactatgatgataggcttgacgaagacagcgcctatcttttagaatgggtctggcaattgtacgaggaaggccgtcctctcgacgtcgtggacccgagtctcatggaattcgtcagcgacgaggttctccgtgccatccgcgtcggcctcctctgcatccagagctcacctcggcagcggccatccatgtcaaaggtggtgtccatgctcacagaagacatcgaagtgccagaggcagtcacgaagcccagctacgtcaccgagtggcaggcgagctcgagcaagagggaggtgggcatgtcggcatcgtcgtacctgagctccctnatcgaggaaggccggtgatgatggtcaatgatcatcaag

SEQ ID NO: 43065 - DNA, 1003 bp, Setaria italica
  Peptide Sequence Number=SeqID_109039
cttggggctagggtgccttcagcgagacacaccctgctttcttggctcttcagaatcttcctccgttgttgtggactgtgggagcagtagatttatatcaggttcaaataatggctcagataattccatatatcagcctgactacaccgatctgggacctgcttcctattatgttacaggagcaccaacatggggtgttagcaatgttgggaggttcatggattcacaaaatggaagttacataatctacagctcacgccagtttcagaatactctagattcagaactgttccagacagcaaggatgtctccatcatcattacgctactatggcattggacttgagaatggaaactatacagtcacacttcaatttgcagagtttgacttcgaagacatgcagacttggaagagtttaggtaaaagggttttcgatatctatgttcagggtgagcgtaaggagcagaactttgacataagaaaggcagcaggcggaaaatcttacactgctgtcacgaggaagtatactgttcctgtcaccagaaacttccttgagattcatcttttctgggccggcaagggcacttgttgcatccctagtcaaggctactatgggccttcgatctctgctttgagtgcaactccaagtactcccgttgtctataaaccaacgtttctatactgtttagataattttcgcggggtcaacttagttcccattaggagaatgctgatgactgaaccaacactcttacatgtataatagtgatacagaattacagatccactctgaaccggtgctgaattctcaagtacttttaaaaagtgaaaattcataaacacttaacataggatccaaatccaagattgcatttgttctaacaagtggacttttggacagatttcaaacctacagtgcgtaatgctgcccatgctgcccagacgaagcgtactagcaatacaggtgtagctgttggggttggggtggtgcagcagttttagg

SEQ ID NO: 43066 - DNA, 2647 bp, Setaria italica
  Peptide Sequence Number=SeqID_109040
tgaaaataattgtatgcatataagagatgttttgctgactgtactgttccatgccactcaatcttatttgttattgttctttgtgttcaggtgggcatcagataatgattttactgggcaaataccagattatattgggaactgggctaatttaacagatctgcggtttcaaggcaattcgtttcaaggtccccttccgaccactctttctaatctcgtcgaactgacaaacttacgaataggtgacatagtaaatggaagttcttcactggcattcatcagtaacatgacatctttgaacaccttagttttgaggaactgcaggatatctgataacctggcatcagtaaacttttcacagtttgcaacattaaccctactggatttgagttttaacaatatcactggcctagtaccgcaagctctgctgaatctgaattcactcagcttcttgtttctcgggaataatagtctttcaggaagccttccaagttctataggaacttctcttaaaaacttagacttttcctacaaccagctatcaggaaactttccctcctgggttagtccgaatttgaaattgaatttggtggcgaacaatttcgtaatcaacaactccaataacagtgccttaccttcggggctagggtgccttcagcgagacacaccctgctttcttggctctccacaatcttcctcctttgctgtggactgtgggagccggagatctatgtcaggctcagataattccatgtatcagcctgacagcgccgatctgggacctgcttcctattatgttacaggagcaccaacgtggggtgttagcaatgttgggaggtttatggatgcaacaaataatagttacataatctacagctcactccagtatcagaatactctagattcagaactgttccagacagcaaggatgtctccatcatcattacgctactatggcattggacttgagaatggaaactatacagtcacacttcaatttgcagagtttgacttcgaagacatgcagacttggaagagtttaggtaaaagggttttcgatatctatattcagggtgagcgtaaggagcagaactttgacataagaaaggaagcaggcgggagatcttacactgctgtcaagaagcactatattgttcctgtcaccagaaacttccttgagattcatcttttctgggctggcaagggcacttgttgcatccctagtcaaggctactatgggcctgcaatttcagctttgagtgcaactccagcacctaatgctgctcggaagagaagtaagaataaaacaggtgcaattgttggagctgcggttggtgcagtagttgtaggactaatagtgctcactggactgtatgtccggaggcagaaaagtagaaaactgtctttggagcaacaagacctgtacaatactgttggaagacctaatttattcacttacagttacggtgaactaaagaccgctagtgaaaattttaattccagtaactttctcggcgaaggagggtatgggtcagtttataagggtaaattatccgatggaagtgtagtggcagtaaaacaactatctgaaacatcccgtcaggggaagaagcaattcataacagaaatagaaactatttctcaagtgcaacaccgtaatctcgtgaagttgtatggttgctgccttgaaggcaataacccattgttggtttacgagtatctagacaacggaagccttgataaagcattgttcggaaatgggagattgaacctggactggccaacacgctttgagatatgtttgggcattgcaagaggcctggcttacctccatgaagagtctagcatccgtgttgtgcatagggatataaaggctagtaatgtcttacttgatgccaatcttaattctaagatatctgattttggtctcgccaaactttatgatgacaagaacacgcatatcagcacaaaagttgctggtacatttggatatcttgcacctgagtacgccatgagaggtcatctgagtgagaaagttgatgtgtttgcttttggtgtggtcatattggagactatagctggaaggccaaactatgatggtaggcttggtgaagataaagcgtatcttttagaatgggtctggcaactttacgaggacgaccatcctctggacgtcacagaccctaggctcacagaattcaacagcgaagaggtgctccgtgccatccgcgttggcctcctctgcatccaaagctcacctcggcagcgcccgcccatgtcgagggtggtgtcgatgctcgtcggggacattgaggtgcccgaggcggttactaagcccagttacgtcatcgagtggcagagcaacaccatggggacgtcgagctcggagccgggggcaaaggccatgtccctgagctccgtcatcgatgaaggccggtgattgatgaccatcgcccatcggcaagttaagatcaacttctgccaagaccaagattgtttcttggaaattcacttggaaaaatttcgattcggatgtgtacaagaattgccaattcgctcgaaaaaaaggctgtaaattgcagttggctggaccacacagcttcatatcaccgaacgtgctttgtgtcatgagtgaccaggccttggg

SEQ ID NO: 43067 - DNA, 526 bp, Setaria italica
  Peptide Sequence Number=SeqID_109041
taagttagtacttaggttactaacttttacttagttacaatacttagacttaaccaatgctgaacggcagcgggaacaagaggtgtggtctggaggagaacgtgttgattgtggcagcccaacgtttggcctgcttctcttgttggtactgtgcaaggagatactgatggcttccagactgatattaaacaactgcggatgatcactgattggatgcccaattggccaaatttgatgttcttcctggagccatatgattatatgaattgtgatatgcatcgttcacgcttctgatatgcctgtgaaaccttgtgcccacaatatctgttcggtttcccatctcacgtggtgcttaactgcttattgagttcatttcctacagagcacagatacaagactgaatcaaatggttggtatcatttctctgaaggctttatcacacttccaagctgaagcaggcatctctgaaacgtgtacctgttgctgttcattatacatcaatacgcacgtaccatgctatcatcat

SEQ ID NO: 43068 - DNA, 364 bp, Setaria italica
  Peptide Sequence Number=SeqID_109042
ccaagaggaggatgttgaagagcacgaagagcggcgccgacgccgccaccccgatgaacctcctccacagccggcccagcacgatagccgcgaggaacaccaggcccgcgatggggagcatggcgaggagcgagagggaggggaatagccgcggcaccatcgccacggcgagctgcgagaagatcacgaggccgcatgacgcgagcgcggaccacagcacctcccacggcgacgacgacgacctccgaagccggtggagccccgtcgccagcctgctcatcgccgcgggaactacctactactccgccgccgccgcctcctcggcccccggaccatcaaggcgggcggccggagggagcggagg

SEQ ID NO: 43069 - DNA, 524 bp, Setaria italica
  Peptide Sequence Number=SeqID_109043
taagaagaagaaatagtagccttgcaggcttgtactttggttggttgagcattgctctttgtagtttgtactttcattttcacctgtgcctattgaattgctctctttcgcccagatgacgatgaagaggtacaagatagaaggacttcgtgaggccgggtactccaagaatgaggagatggccaagaggaaccctgccctggcggcaatgaatcagaagttcaggatgatcaacgtgctgtcgtcgctggccagcccggcagcctggccatccacccctgatacctccccagcaagctcgacccgtgactgcctgaccgagggctttgccatgcctgacctacgaactctgaacttagcctaggtttctgtggagaaaaaagagttatgtctgtgcaagaacattggtcctcgggatgatatgattagcctttaaataatcttaatcttaatattactaattggaggctccttttgaagcctccaggtaaagccacctaggattcctaggtggacactaaact

SEQ ID NO: 43070 - DNA, 702 bp, Setaria italica
  Peptide Sequence Number=SeqID_109044
tttaaagtttaatttaggggtttaagtttaattttaggtttaccttacaattgagatatcttgattgctgaaatcgatgctgacaatgttctgttatttgagtaggataggggttatgcataacaaaaataagaagagagaatgtggcttgcaggcttgtacttcggttggttgagcattgctctttgtagtttgtgctttcattttcacctgtgcctattgaattgctctctcgtgcctagatgacgatgaagaggtacaagatagaaggacctcgtgaggccgggtactccaagaatggggagatggccaagaggaatcctgccctggcggcaatgaatcagaagttccggatgatccacgtgctgtcgtcgctggccagccccgtgtccttcggcagcctgaccatccactcctgatacctccccagcaagctcgctcgacccgtgactgcctgaccgagggctttgccatgcctgaccgagtgttagctggtgcctggtgagtggtgacctacgaactctgaacttagcctaggtttctgtggagaaaaagaagttatgtctgtgctagaacattggtcctcgggatgatatgattagcctttaacaatgtacataatgcaggaagttcgtttcattttgtaatttgtgtataggaaatgtgtctgtggcaaattcctgatattttacagtcaagaaa

SEQ ID NO: 43071 - DNA, 524 bp, Setaria italica
  Peptide Sequence Number=SeqID_109045
tagaacgaaccaaaactaacaagtactacaacggacgttaggaacgaattctttcctggaaagcaattcttgtgttccaacattcgagaaagtctatttttctcttgcaagtcacctgcatggtgttgcttgctgagttcaatctcccgcagctgctcttgctcgtgaaggatcttctcttcctcaaggcgtttttggaaagcttgttcgatcagtggagcctcttcctgcctttttgccctttccagataatccattgtttttgtcaagcttctgcagttttttcttccatttcttggcgctcctttaactgttcattcaatgccaattccatgatggcctccttggtaagctccccttcaacaacaacatgttttttgcctcctttctttgtcaagtcctccagcaactttcttgcttctgctttatttttttccttctatttctctacgaatccgctcatgctcctctaggttcagataatacatcaatttccttactgtctctctttcacgctttcttga

SEQ ID NO: 43072 - DNA, 1003 bp, Setaria italica
  misc_feature (780)..(780): n is a, c, g, or t
  Peptide Sequence Number=SeqID_109046
tacttttaattttaaagtaaattctagtcctaaaaactacttgtaggttgtttctacttagtccatcagattcgatgtccacagtaccaaaatgaacggctcctgataaatggttcacttttatagcaacaaaattgcgcttcgcagcatcaacagaaatcttttcaacaacagcgaagtcaaagaacgggatcattcttgagagcatatcaattttcatggactggaatatctgagaggcctgctgcagcactctcagtgttgtaagcttctccaatgcagatatgtactgagaaagcttaacctctggaacagaagaagctgatgaaagcttcccaccaatctttgaaatcttcgaaagaagtggctgcacttttgatgcaaggtccagaggtagaaactcatgttccaaaaggttgtacaaatctcgcacttcttgggaagcacatgaaagcacccctttcgacaccaactcagatagaagagatgctcttgaaggctgcaaaaaggaaaggagatctgtaagggtggaaaaagctaccaaacatattctctaattagcaaacagtttagaggacaaaccaattctctattttcacgcttggaatctagcgaaaagttgacaaggttcgccatccgcatgtaacgttccttctcattttctgtctcaagatgagatgcaccatacttctggtcataaggtgccacagatagtgcagcgagtaagacagaagatgctattaattgtagatccttctgagacaagttcttattgtagcncttttgcaagttgaaaaagcttgagccatgcatatgcatgataaaggtggctatcagatatccagaaaatttcagttaacttggcataatatacaaccaaaacagaaggttttggcattttcttcaccatgctcatcagaccatggatatcctccaccgatctgtaaagtctttccttgttccttatttagggttaaagttctttcttttgtttttgttctta

SEQ ID NO: 43073 - DNA, 492 bp, Setaria italica
  Peptide Sequence Number=SeqID_109047
tcagttttttctccatttcttggcgctcctttaactgttcattcaatgccaattccatgatggcctccttggtaagctccccttcaacaacaactatgtttttttgcctcctttctttgtcaagtcctccagcaactttcttgcttctgctttatttttttcctctatttctctactcttcacaaaggctgcccactcgggatatattccgtcagcaagatagtaccccatgtcatattggttcccatttacaacaaattgtagtcttgttgcttctccttttatcgcatcaatgaatagtgacgacttattcaacacattgatatcattataggcactagcggtacaaaaatgcatgcttaccgcttcaaggatcatagtaggattttttttatcaccacgagtaaacatggtagcccaatcttttggacaattcttccacgcgcaatgcatacagccaatacttcctatcattcctgggaagcccagggt

SEQ ID NO: 43074 - DNA, 407 bp, Setaria italica
  Peptide Sequence Number=SeqID_109048
tcctttcctttcctccaattctctctctctctgtcgctgcttctctgcaatagcatcaagcttagctttcctctcagcctcttctctcttcctcttctcttcctcttcacgttttctagcttcctcttcctcacgaagcctttcaatccgctgttcctctaggttcagataatacatcaatttccttactgtctctctttcacgctttcttgatgatatcaattgattgatccgttcatctctctctttcttcagacgaccaaactcagtctcacggcgttggacgattctttcctggaaagcattctgcaaaacaaaacaaaatcaggaagaaacagcaaagggataaggtagaggttattatctgaggtaacaaacacaaaacatctaaatttgaatatcatgtt

SEQ ID NO: 43075 - DNA, 3429 bp, Setaria italica
  Peptide Sequence Number=SeqID_109049
ttttttttttttttttggtcagcacgaaaacagtgattgcatttagcaaaaggcgggttttgcgcaccaacagaaacatacggttcgagtattactaacaaataacgacagaatgtgcatggagtgctgcaacttggaacgtcaaacattgactggaaaggtgctgtagccctaacagactagctccaaaattttaggtgcagtcagcgcaataagaaagcaaacgagtaaccatgttcctcgagatcactggctggcattgtgcactgaagtctccacattgacgggcggcaaaaaaatctcaggaagtagcacatcagttccgtggcctcccccaggttgatgaagaggacgaagagttggagggaaatcttgatccacgccagcgctcggtagacggagggccatctgggcgggctgctggaggtgcatcctgtcgcgcaggagggccatcttggcggactggacggacatcagggcgagggcgctcttcacgtggtccccaacggtcatcttcgcgcgtacgcagatctgctggtctctgactgccaccagcactgctgctgctatcactgccacgaagtttaaacttgggaacatatttgccaggagctggagcagcagcagctgctgcagcagcagctgcagcagcagcaggtgctgctgcaggctcacgaggtggctgcgcaacaggggcagcctcagcaacacgcgcaggctcagatcctcttaagagctgttccttcctcgccttttccttttcctccaattctctctctctctgtcgctgcttctctgcaatagcatcaagcttagctttcctctcagcctcttctctcttcctcttctcttcctcttcacgttttctagcttcctcttcctcacgaagcctttcaatccgctgttcctctaggttcagataatacatcaatttccttactgtctctctttcacgctttcttgatgatatcaattgattgatccgttcatctctctctttcttcagacgaccaaactcagtctcacggcgttggacgattctttcctggaaagcattcttgtgttccaacattcgagaaagtctatttttctcttgcaagtcacctgcatggtgttgcttgctgagttcaatctcccgcagctgctcttgctcgtgaaggatcttctcttcctcaaggcgtttttggaaagcttgttcgatcagtggagcctcttcctgcctttttgccctttccagataatccattgtttttgcaagcttctgcagttttttctccatttcttggcgctcctttaactgttcattcaatgccaattccatgatggcctccttggtaagctccccttcaacaacaacatgttttttgcctcctttctttgtcaagtcctccagcaactttcttgcttctgctttatttttttcctctatttctctacgaatccgctcatgctccctctgcttttgttcatagaggagtctattcctttcctcatccgcacttttcttctgaatactgagtctctttgattcctcctctttttccttctccaatatttggcgctcaaggtcttctttgcgcttctcaatgatagattttcttgcaagaagcctcctgtgttcattctccactactccagctaaactaatgagactttcaccaagtttagatggctttttaactggtggacgaatttggttcctcgctttatttaaagaatcagccaaaacactgaggtgttcacttagtccatcagattcgatgtccacagtaccaaaatgaacggctcctgataaatggttcacttttatagcaacaaaattgcgcttcgcagcatcaacagaaatcttttcaacaacagcgaagtcaaagaacgggatcattcttgagagcatatcaattttcatggactggaatatctgagaggcctgctgcagcactctcagtgttgtaagcttctccaatgcagatatgtactgagaaagcttaacctctggaacagaagaagctgatgaaagcttcccaccaatctttgaaatcttcgaaagaagtggctgcacttttgatgcaaggtccagaggtagaaactcatgttccaaaaggttgtacaaatctcgcacttcttgggaagcacatgaaagcacccctttcgacaccaactcagatagaagagatgctcttgaaggcaattctctattttcacgcttggaatctagcgaaaagttgacaaggttcgccatccgcatgtaacgttccttctcattttctgtctcaagatgagatgcaccatacttctggtcataaggtgccacagatagtgcagcgagtaagacagaagatgctattaattgtagatccttctgagacaagttcttattgtagctcttttgcaagttgaaaagcttgagccatgcatatgcatgataaaggtggctatcagatatccagaaaatttcagttaacttggcataatatacaaccaaaacagaaggttttggcattttcttcaccatgctcatcagaccatggatatcctccaccgatctgaaagcttcctgccatagggaaagctctgttgcaactttaagttgttcaacccgggtatcaagatacagttgtagactttcaggggcagtcagatcaggacgatctctttgatcacgatacttgttgagattggcaagatggtttctgataatctcacacaacctacggaattcggttgttctcttatactgtttacaaaactgaaaagccctatgagcagtcatagcatacaacgcttcaagctttgaattattccttagtatctcaagcactgtcctgtaggtctcccagaggaacttaaaccatggagtaacaacttctttgtccgatcggtcctttcctttctccccactaacaaaactgagcattaggtcctcaggacgcttatccgcttccagatcttcaacatccaaagcatcttccagggcttctgcctggctcttagcttgttcggctctctcattggaaagctgcataaaatgcttgatgacatcttccaaggaagacacatttacttgctggcagacaattctatactgaataaggccatctttcgcaaatctgcctttcctcaggtcaacacagagctccacatacttcatcatgatcttttcgagaggcttttgccatgacctgtaccttttcgaggtaatgagatcatgtaaagcctgcagcgccgcctgcttttgcccaacatgaatcaattcttcagctctcttcagcgcgttctcgggtttcgcgaaggtcgccatggtcgcagcgagggttctgtggcggcgatctactcctgtagatcgccggcgacctgcgcggggggaggcgacgcgtggccgtcggggtcggaggcggggatctggaagtgggaatggagacgacggcggcg

SEQ ID NO: 43076 - DNA, 657 bp, Setaria italica
  Peptide Sequence Number=SeqID_109050
ggcataagaatacaggttcatacaccaactggaattcaaatagagaaacacatgaaataagtatgatctcttgtagcatgtgctaatactaaacaacagtacaagattagtaaagcttcaatagagaaaataacaaggttagtacgcatctgaatacataagacatctaaggcttcaatttcttctaaccacaacttcagaacatttataacatgagcacaagctacaaccaaaatgtacctctgcaactgtcagtagccttatctcaatttaattatttatataaatgtgatttcataactccaaaacttactagtccacattacttatgttcaagtgtaacaacaccatttttgctacaaatcaatgcagagttatatttcaactcgagtcaaattgtgacagcagataggtactagtgtcctcgacagcaacaacgcacatttgcctcttaacacacaacagttaagtgacactaaacatctctagctagcttaaatggactaacatctcaaacatttgctcaagcattgcatagcacatctaagaaccctatgtacttgatgacatagacacaacgattcctaattagtagcaattggcatacgtaactcacatctaagacaacaattaaaaatttaacaagcactgaaaatt

SEQ ID NO: 43077 - DNA, 261 bp, Setaria italica
  Peptide Sequence Number=SeqID_109051
tgcgtacgtaggcggtcatccgcggccaggggccctcgtcgaaggccttgcgggcggcggcgacggcgcggtcgatgtcctcgctgtcgccctcggcgacgcgcgcgatgacctcgccggtgcgggggtccagcgtcgggaacgtcttccctggtgagagcgaaatgcgtgcacctcgctgagaccctgaacgcgatcgacaggcaggtctcaggtactaaagtttgcataccagaagcggcgtcgacgaagttgccattg

SEQ ID NO: 43078 - DNA, 289 bp, Setaria italica
  Peptide Sequence Number=SeqID_109052
gtcctcgcccccgaacccttcccccggccgccgacgccgccagatgcgaatgcgccgaccccgctgccccattcctctcctgctcccgtctcctcgccgctgccgccgaccgacagccccgataacgacgaggaggatgacgggctcgacccgctgttctcggagaccgtcggcgccggggggtgggacccgctcggcgcgccggcggaagggtaggacggggacgaggaggagctgctgggaggcgggctcatcgaggagctgcgaagggagaattccgtgaagaagg

SEQ ID NO: 43079 - DNA, 1331 bp, Setaria italica
  Peptide Sequence Number=SeqID_109053
atggcccggaacatgacgaagggcatctttttgtcttatgctagtgcctccacagtcaatggcttggtcggagatctcttcaattgctccggtgtcacaaaagaaggatatgttctggatgtggagcctggcaagacctacctgctacgaataatcaatgccggcctcttctctgagttctatcttaagatcgctgggcacaagttcacggtggttgctgccgacgctaactacgtcagccccttcaccacagatgtcatcgcaatcgcagctggcgagacagtggatgccctgctgattgccaatgcagcccctggcaggtactacatggtcgccctacccaatcaggcaccattgcctgccacccaaactccggagtacgctacaagggggatggtgcggtataaggtcagccacagcacctgcactagctcaacgacagtgagctcatgccagggtacagaagaagaagaaaaaggatatcgaggtacatctggtgatgctccaatagtgcctaagatgcctgacatacatgacacaattacatcgttctacttccatggcaacctgaccagcctgcaccaccaagggcaacttccagtccagcaacaagtcgatgagcgcctcttcatcgtgcttggcctcggcaccatctgcaagaaaggccagttctgtaagaggggtagcagtgacgaggacctcctagtggccacgatgaacaatgcttccttccagcaccccacagcgataccgacactactagaagcacactactaccacaccggcctcatcaatggcacgacacaagaacttccgaagaggccaccattattgttcaacttcaccgatgaagccttaatcccgtttggacccaaagagatgcggctagagccgacttacaaggcgacattggtccggcggttccgacacggcgccgtggtggaaatagtctttcagagcacagcgatcctacagggcgactccaatccaatgcacctacatgggcatgacatgattgtgcttgcacaaggccttggcaactatgatccagcgaaggccgtggccacgtacaacctggttaatccactagtaaagaacactgtgcttgtcccaaatcttgggtggatcgccatccgatttgtcgccaataatccaggggcatggttcatgcattgccactatgagtttcatctatcaatgggcatggcagcagtctttattgtagaggatggaccaacaaatgacacgtctctccctcgactgccagtgaattttccgactattggtcaagacatcaatctcatgcccaatgacttatatctcaaaactat

SEQ ID NO: 43080 - DNA, 681 bp, Setaria italica
  Peptide Sequence Number=SeqID_109054
ggcggcgggcgactgcgcgctgcggaacgacagcgacgacgccgaggaggcggcggaggagaacgccgacgacgaggaggaacaggaggacgcggagggcgagccggacgacgaggacctgctggaccgcctgtgcaggatgatcttgggcaggatggcgctgaagaggctcatgtactgcttggagtgcttcttgccgccgccgccggcggaggacttgtggtgcctgtggtgggtgacctgctgcctggcggtgtagtaggacggcggcggcgtgagcggcggcagggtggccgtggagatggcgtcgttcttgggcgtgcccggctgcgactcccacatgaagggcacggaccccgccgacgcgacgccgtagtacacccggaaggacggcgccgcggccgagctctccctggtgaacagcttggagaagaccttgctccctccctgcttcagctcgagaggctcctccttgtccttgccggtgatagccgccatggatactgatgcggttgcagagagagagagagagagagagagagagagagagagagagagagagagagagagagagagagagagagaggagagagagagagagagagagagagagagagagagagagagagagagagagagagagagagagagagagagagagagagagagagagagagagag

SEQ ID NO: 43081 - DNA, 529 bp, Setaria italica
  Peptide Sequence Number=SeqID_109055
cgttggttgttggtgagcccgtcgaccttcttctcgatggtgatggtgtgctgcgaggacatgcgcgaccgcaggcggccgacgccggagcgcagcatgtcgagcacctcgtcgggcagcagctcgttcgccacgctgcgcaccagcatcagcgacgccgccgcggacgctgcggcggcgagggccttgcgtgggacggcatggtgtgggtggtgggtgaatcctcgctcctctctctctcgatcttgccctctcctttgctatggacttgtctttgctcttggtatggagcagggagtggtatgccgtatgcggagaagacgaggccagacgaaggaggtgggtgctgatgaagaattgaggtggaggcgtggagcttgggtacggtggcgcggcatttatatgcgcgagtcgagtggcgaccaagtgataagtgattgtgacttggtctaaagaaagcaaggatggcagacggtcagcacacggcccggtcggcgtacactacggccatgtttagttactcccaact

SEQ ID NO: 43082 - DNA, 328 bp, Setaria italica
  misc_feature (64)..(64): n is a, c, g, or t
  Peptide Sequence Number=SeqID_109056
ggcggccgggcggcgtccccggaggtgctgcgggagatggcgcgcgtgggcgccgtggggaagntctgctgcgtgctgcaggcggactgcgacgccgccgtcaaggaggccgccagggccgtgctgaggctgcactccggcgtctggagcgggtcgccctgcgtcagcgcatacctgctctctagatacctctagtcgtcgttgccattaatggcatgcgaccgtgcaaaaccatacaagcaagcatctgcagccaagcactgcaattcttgcagcttcagagtaaccaacatattgaatactagtgtagttgtaactagcttgtagg

SEQ ID NO: 43083 - DNA, 312 bp, Setaria italica
  misc_feature (294)..(294): n is a, c, g, or t
  Peptide Sequence Number=SeqID_109057
aaaaaacaaaaaaaatttaaactaagggaatttcgtaaatgcaatttgatatgaaatagtggtcaacggtatattagagaaccgtgccatattcgaaatgcatagtttttttttattgtatgcgagggagcatttagcttgaatgaatggtgttaactaggagtaggggagagacggagagatgtatttccttcttgtgaacgaatctgggtaaatcatttaaactaactgttttttttttcttgttcttttgctttacctgcaggatcaccaaagaaggcgggcttcaaaggntgggctctacgcggcggc

SEQ ID NO: 43084 - DNA, 467 bp, Setaria italica
  Peptide Sequence Number=SeqID_109058
tttttttgtaagtaacatcacttaatttattgataacttaaaagcacacaaagcagtctaaccaaacaaattaagtcacacaaggcagtacaacgcacaccgaaactacggtaacataacatctcaacatttaaggttacaatcatgattaatgcctcatcccttctcatatatttcgcggttctccccaatcagtggtggatccttgcaaatgcagcccaagcaaaggtagcaatgaggggccaaagatccatcagtatcatctgaatgaccaccactgcgaaaaaattcaatattgttgggattggtcccatcctaacaagtcgcgcccgtgcaagaaaaccccatttaaatattttctccacatttctatatagcacagggagagggctaatcataaagatcgcaatagcagtgctacgagcaaccggagctagcaccatatacgcagcaagtgcaaaagcaac

SEQ ID NO: 43085 - DNA, 999 bp, Setaria italica
  misc_feature (971)..(971): n is a, c, g, or t
  Peptide Sequence Number=SeqID_109059
ccgtcctgttctcgcaatgcgtcgaattgggccggcatgggctgcgaaagaaggaagaaatggagccccagggtttagggcctggattttttttcttttgcgtccctacatttttgccggagtcaagaaattgtctccctcgactctcacaaattatttaaattacttccctgctacggttaaaagagatttttaaggcggcttcatcattttctattaaaaataagttcggtaaacacatggtaacatttttataaaccataaaaaatttgagccgccttgcaatggtgtgcacacagccccatccctacatttgtggttgcgtggggttcctatttttgttattttttgataaataaactatcatgtttgcttgttattgaccagaaagtgtaactcgattgaaaactcgaacttaacttgaaacgagccctgtgcgaaatactaatataatactctgggtccatgcaacatgcgctgggtgaaagtgaaacaaacatgcgcggaacactagcaatagcttttgggaaggtaaatgcttttgggaaggtaatcactaggttcaagagtcaccttttcaagtactcacggtaaaccatatcaagctacaacacaaatcattgaaagtgaatgaagaatgaaaatatactccttagctgtgtgcagggtagaaacttgtaggagacatttgcaactgcaaactaaccctgcctaatcatttgattctcttggctgaaggaagaggcctgggagtaaatgcaaactaacttgtgtgacattattgaactagataaattagaccccaaatctaccagagatccaggcggctaacattagattccaacttaaaaatacatcaaatcgacacactcatctccacagcaccgcagaagcagcgaaaaccgccgccctcatcgcgcagcagcagatctagggggagatgaatcatgaagcgccacacgctcccccgnatccaatccactagcaaccgatcacgcg

SEQ ID NO: 43086 - DNA, 338 bp, Setaria italica
  Peptide Sequence Number=SeqID_109060
taagtagtttaaccaaaacaaccaacagaagtatcaaaccagccactccagcctcctgtttcagtctcttgtgaattttcttgtgcagccaagttttgtctactctcctcatcttttgctaaccatgcagaccatccaagagcgccatcttcccctattctggcaccaccactgttccagaagtgttcaaagagtctttgcttactacttgtggtcagataaaggggaggggagaataagctgaactccatttgtgcctgaaatagcccagttgctaattctcgatgtcctgtctgccactcaaatcggcacagattcacaatatatccactaaaccc

SEQ ID NO: 43087 - DNA, 1433 bp, Setaria italica
  Peptide Sequence Number=SeqID_109061
ttttagttttcttttccgtttttagtttagttattgtattttttatggttatcaaatcaatttatgctgacacctgtaatggacctaagctaaatgaccatgaagctacttcgtctgctatagttcatcagtagaatgagtattcttttgaaccaggatcagtggaatgaggttacacagatacacaatggtggggaagagacacctctaaattctccttctattccagtcaaagttgaaatccctctggcaccttccccgaacaggcagactcataagcatcagcaaggccggggatggattcctcatagggagcaacgaatttctccaagaacttctctttggtcggcgccaccacgttgaagaagcaccggtcctgctcaaccaaccccatgtccttgagagctttcagcacgagatgccggggcactatccgcctctcgaggctgtacatgaggagcaccgaccggcgcgcgatgtactgcggcggcagcccgacctcgttgagcaggaactcggcgttccggcgcagcctctcctcggacgcgaccaggatccgcggcgccttgctgacggccaggttcacctcctcctgcgaccaccccagcgtctctttcaggacggcgaccttggcatcgaccttctcctggccgatgcatcccgcggtggagagcgcgtggcggaacatctgggagcccggcgcgacgccgagctgcgtggcgcgccgcacggcgtcctggacgtactccgggtgcatggtgacgagccgcggcgcggccacgagtagctttgagatatccacggcgctgagcccgcactgcttgaggaaggcgacgttgggctcgaccaccttctcgaggtcggaggtgaggagccagtagttccagtcgctggcctggagcagccgctccggggagccgaagagcgggagccagaaccgcaccttggagacgaagctgcggcagaggaagtagcggccgccgatctgcgcgaggcgcgcgatctgggacggggagagccccagcgcgcggagctccgcggagatgggcgccagggagcggtcgatgcgcgcgcagaggacgcgcgggttggaggccacgagggcggcgacctccttggatgagagcccgaggcccgcgaggaaggcgagcacggcgtccgcgttggaggcggacttgaggtgcgcgaggttcttggatgccttgagcgcctgcggcggggtgaggtggcagctggcgacgaggtagtcctcgacggcgaaggtgctcgcgggggcggtagagggagccggggtggcggctgtgctcgtggcggccgcgcccgcgcgggtgagggtgacgcggaggcggaggcggaggcggcaggggggcgggaggagggacacgacggcgaggggagaggcggcggggtggaagaggagaggcatggcgggg

SEQ ID NO: 43088 - DNA, 1003 bp, Setaria italica
  Peptide Sequence Number=SeqID_109062
tggataaaggatttggtttgcgatcatcccagatctttaccatgccatcctttgatcctgaggccaagcgggtactcatccattgagatatggacaaatctgtcacatcaccatcatgcttaccaactaagcgaacaccatcaataagcttctcaagatgacatttaacaggttcttccacagcaaagtctcttcctcttcccactctagtcgtgtctattcttaagacacagttcccaattccaacaaacagaatctcttgcttatgtgagtgccaacatatccttggatggtaagcttcaacttcgcctacaatttggatggcaatttcaatctttccagtaatttgtggtttattttcatcatcaggtccctcatcaatcctccacacatatatccgcccatctacactcgcacttgccaaacgatggacatcctcagcaaagaaagccatgtctgtcaccctctgtgtgtggccacggaggagggagcggagggcggtgttgatgttcagcacacggatgttcccgagcttgagaccatacacgatgtaggttcggttcaccgcgatctgcctgcccagcacgagccccggatccgacgtgtatttcgtgatcggtgtcacctccagctgtggtggctgcgcctccccgggcagcctcgagtcaatatcgtgtaccgctcgttccccaccgccaagcagccgccccctgggcaccttgctactggtgctgctcagcatcctcgccggcggcgcggatggcatcgccgggagcggctgcgcgaactccgaagtcggcgggggcatggagactgcggtctcgagttgggtcggcccggagttcccgagcagctgcatgaggcgcacgccggggttggggcccggacggcggcgttgggttagcgttcgggttgggttgaggtttgggtttggcatggggaaggagacgacggggcggggcatggcgtgggggtcctgcgggtagtgcaggtagggtccgcg

SEQ ID NO: 43089 - DNA, 447 bp, Setaria italica
  Peptide Sequence Number=SeqID_109063
tcgtccgccacctccctcccctaccatgtcgtcgtcaagccctcgcccaagcaccgcccaaccggcctcctccacctcccagccggcggcaccaccgccgcctggcctcaccgcccaagttccaagcactctaccatgcaccttgtagcgagcatggccccattagttcgtagtttgtgattttggtgattgagtgacaatataattattgggactaatattttgtcaagtatatgcttggtaggttttctaggtcccaagtatgcaaaccaaaccatgggcaaggtccaaatcatggtattcaagtatgcaaaccaaaccatggcaaggtccaaatcatgatattcaagtatccaagctatggtattcaagtgaccaagccatggcccatcggagtaagtatcggagcaattggtccaacggggaaatcaacttgagttccaggaa

SEQ ID NO: 43090 - DNA, 678 bp, Setaria italica
  misc_feature (616)..(678): n is a, c, g, or t
  Peptide Sequence Number=SeqID_109064
ccggccggcgagcccagcgcgccggcgctggacgcgtgcgcgctgtgcgcccagccgctggggcgcgacagcgacatcttcatgtacagaggggacacccccttctgcagcgaggactgccgccacgagcagatgcagctcgacgccgtcagcgccaggcgggccgccaggtccgccggtcggaggcaccagcagtattcgtcgtcaggaacggactctcctcgtaggggccaggagtccaggaaggtgtccgtggcgagttgaccggccagaaggagcctggcttgtgactgagctgtttgattcgtgccaagaagattcggagatccgctgatccgatggggcaaaagatggccagaagttccatttctcagtcacgattcgtcgggcttgagcaacgcgatgacgcctgtcagagccggagaagggtcgtaaaagttccaactctgcttggatgagactccgccatctgagccgcccactggccactatgcagtggtattgcaatagtcgcttttagtgggcgtttgagccacaacgtaacaccaccgtgtacctgtaaacactgttcaccgagcaaattttgagggaaacgaaacaatctactgcggagagnnnnnnnnnnnnnnnnnnnnnnnnnnnnnnnnnnnnnnnnnnnnnnnnnnnnnnnnnnnnnnn

SEQ ID NO: 43091 - DNA, 872 bp, Setaria italica
  misc_feature (817)..(872): n is a, c, g, or t
  Peptide Sequence Number=SeqID_109065
tcgtcctccgtcctctctagcttcgacgctctagttccagcaacgcgcatagcaaaaccaaagccatggcggcggcagcacatctcgcttgcgccttcttcttcgacgcggagccgctgggggagcccgggcggcatgcgctggacgcctgcgcgctctgctccaagccgctgtcccggaacagcgacatcttcatgtacaagggcgacacgcccttctgcagcgaggactgccgcgacgagcagatgcagtttgacgccatccgggccaggcaggccgcaaggtcatcagctggccggcggcagccctactcgtcgggaacggagtcgcggcgtgggcaccaggagagcaggaaggtgtccgcggtggcaagctaaacagccggacgccgcgcgcacatccggagacctgattagcgaggcgtggtttgactccagaagatatacggggaaacgtcgacctgatggggcacaagggagatccgtttctccgtcacgctttgcccggcctgagcagagcggtgatggccgtccacggcggagaaggatccgtgagatgatggcatgaggcactggccttctcagccagcgcctcccgctgcccagtgtccaataacagctcctttgggttggttttgttctagttctagagtgccgtgtacggtgatcagtgtatgatccaacccgatcacaacaccgtgatgtacatttggaaagcttggttccaaattccaagcaaattttttgaggaaaaaatcatgtatcgaggtgaaatgagtttcgtctggaaataaattgccatgagatgtcgtgaactnnnnnnnnnnnnnnnnnnnnnnnnnnnnnnnnnnnnnnnnnnnnnnnnnnnnnnnn

SEQ ID NO: 43092 - DNA, 799 bp, Setaria italica
  misc_feature (797)..(799): n is a, c, g, or t
  Peptide Sequence Number=SeqID_109066
ctctcatctgaggattagcacaccctcccggtctcccttctccccaatctctccagcaaagctgcttcgctgagctcggagagacgacctgcgctccccaaccaaaccacacaccaagaagataacagatggcggcgtccgtggctttcttcttcgacgcggagccgctgggggagcccgggcggcacgcgctggacgcctgcgcgctctgctccaagccgctcacccgcaacagcgacatgttcatgtacaagggcgacacgcccttctgcagcgaggagtgccgctacgagcagatgcaccacgacgcggcctacgcgcggcaggccggcagccggcggaagcagcagcaggcgcagcggggcggcggcaggcacgagggcggagcctccgtgcccgccaaggccgacgtgtccgtggccagctactaataagcaaggaaggaggaagaagagtttcttggctgaaacagctactacgagagatccggtcatggaggcgctcctggctgcctggagctacgcggagcccgggctttgggcagagacgaagctaacttggggaggggatggatctgaagatcggagaaggcgacaaaggcagatttgacctaaccttggggttaaatctgggcagtgcgtcgggtttttagttctccccttttgattggatcttctagagggcgtgtgtgctagagcatcatctcgatctgtaaatgtatgaggcatctgaaaaagttatgcatgccctgcaattttgatccgttgattggtatacaaaaaaatgaaaaaaaaaannn

SEQ ID NO: 43093 - DNA, 737 bp, Setaria italica
  Peptide Sequence Number=SeqID_109067
gcggtaggtctcaccggaccccagcaggcatgaagctctcagcagcttaagaaggagaccacaagagaccgaacctttctcggttggcagcagggagatgatggtttcaagagcggcacaatgctttgtgcagtcaagcccattgttgacggcattgtccagggaactgaacagccggcgacaagcgtaggctcgcagcgcttcaccaatcacatcgctgcttgtcctccccttggccttgatggccaagatgaccttcttgtacaggcacacctcaaggtcacacaggtcctccacccaccagtctctaggtactgtctgctacttcctaactcaccaagtgtgtgaatcgaaggccactctccgatggaagcttcttcctgttgtaggtgtatgaccaatcaacctctgatggatccatggaagccttggaggcaatggaatcaacgcagtggttgatcaccttcaggttctctgtccattgttgaagtgactttgtcgactgcagcacaatgatcgagtccttccaggtccggaatatgcttgcggacaagaacacatcgatcttgtagatgaggtttcccttgtcaattgtctcgaacatctcaaggtactcagctgcacaacgggctgccgtaggtactaaggcattgagcgtgacaatcataccgtagcagaacttggcgcaaatttcaaatgccgcaggaccgccagggatatcagagatatctacttcg

SEQ ID NO: 43094 - DNA, 443 bp, Setaria italica
  Peptide Sequence Number=SeqID_109068
ccaacatttgattgctaacctcttcaagctgtcgtggtgtgacatcaaaatcctgccaccaaatcttatcaccatcagatggaagcttcactttgagaaatttagcagccaaaaagatagcacctgctgcaatatgatgaggctcgaattgcaggcaaagcgaagtacgcagcctgtacagtgcacaacatttttaaaagtgtagtagatacacaactgtgaactgcaatttcaaaagacagcaagggtagcattagcatacccatcatttacaaaattccaggcaacctgaggaagtgcatttgcaccaccaacattgaatctccttattgcttcaaccaagggcttgtaagcatggtgaatatttaggtcaaacccaagtgttacaagtacaactcgcttcccatgtgaaataagttctttttgtttatcatatatttcct

SEQ ID NO: 43095 - DNA, 637 bp, Setaria italica
  Peptide Sequence Number=SeqID_109069
aaatatgcttgtctgaattcgagtgtccaacgtcatggtgacctggagcacctgtcaaggaagaatttggcagtttggatgcctgatgatatccatgagcagatggttccttggagtttgcttcagattttacagatgaatgtggattgcgcgcaccagcagagctcccttcagcttcacttccctgtgatgcttgtgcctgtgttgtacggttttgctcatacaactccaacatttgattgctaacctcttcaagctgtcgtggtgtgacatcaaaatcctgctgcaatatgatgaggctcgaattgcaggcaaagcgaagtacgcagcccatcatttacaaaattccaggcaacctgaggaagtgcatttgcaccaccaacattgaatctccttattgcttcaaccaagggcttgtaagcatggtgaatatttaggtcaaacccaagtgttacaagtacaactcgctccccaagtaaaataagttctttttgtttatcatatatttccttctgctgcttgattctctgaccagcattaggatccttcttatgaataatctcgtaagaaaccacaatgacatccttcaaagtctaggtgtttcttcaacttttccagccaagaacatacaaactgt

SEQ ID NO: 43096 - DNA, 2283 bp, Setaria italica
  misc_feature (1)..(63): n is a, c, g, or t
  Peptide Sequence Number=SeqID_109070
nnnnnnnnnnnnnnnnnnnnnnnnnnnnnnnnnnnnnnnnnnnnnnnnnnnnnnnnnnnnnnnttttatttttaatgtgccttatcaggcaagtttattacgccacatcgaaacatttgcatcattttaactgaaacatcacatagaagaaatgaacgaactgttatcagaagcgtgtttcagtgcatatattccaatgttcattgaaacattgatattgctagcacgactttcaagatgttccatggtgcggatctaggaacagttttaaactgccatcagttacgggggacaaatatacgcaaaagccgtggacatcttgatgttccacagatcagcagtttttgcaaggcactgcaacatcctcaggcactggtgaagacacatgctcagcattacctatcatacaatgaattccatgccaaattgcatccggtctacaatcacactttgttatcctgtgcgccttcaagcttaggccttttgtagtcatctcttccattctgctcatgtcttccagcaagctgagcatcatggcccttgtcatgcttcaatatgtgatcatcctgctgggacttgtgctcataaccatcactttgcttatcaaatggttgagggtgttgttctttactgttccttggaaactccccatcatcagcagtcgttgccacactctgttcgccattgtggccattctccattgcaaggtcaacatgttgaagatccggtggaggcatgctaccatgggacaaattctgcctcttatcctgcttgatcttctcatcctcaacagccaattcaacaccatgttctagctctctctcaagtagatcatcatcatccatcacatttacatttgtagcaactccaccttttgattttcttcgcttctctaaagctgcttttaccttatccttgtcaattttattcatagcatccatccttgaggatgacacaccaggagcttcattgccaccaagaacaccatctcttgtttcattagagttatcgtgtgatcgatgtggttggtgttcttcctttggattacgaaactcatgactggacttggaatgatgttgtcctggtgaggattttttgtcacgatgagatctgtccgttccagcatcagatttaattccactcttgctgctcttatctttgctgccaccatggttaccattgtcattttgaagcattttcgggccagaaatatgcttgtctgaattcgagtgtccaacgtcatggtgacctggagcacctgtcaaggaagaatttggcagtttggatgcctgatgatatccatgagcagatggttccttggagtttgcttcagattttacagatgaatgtggattgcgcgcaccagcagagctcccttcagcttcacttccctgtgatgcttgtgcctgtgttgtacggttttgctcatacaactccaacatttgattgctaacctcttcaagctgtcgtggtgtgacatcaaaatcctgccaccaaatcttatcaccatcagatggaagcttcactttgagaaatttagcagccaaaaagatagcacctgctgcaatatgatgaggctcgaattgcaggcaaagcgaagtacgcagcccatcatttacaaaattccaggcaacctgaggaagtgcatttgcaccaccaacattgaatctccttattgcttcaaccaagggcttgtaagcatggtgaatatttaggtcaaacccaagtgttacaagtacaactcgctccccaagtaaaataagttctttttgtttatcatatatttccttctgctgcttgattctctgaccagcattaggatccttcttatgaataatctcgtaagaaaccacaatgacatccttcaaaggtctaggtgtttcttcaacttttccagccaagaacatacaaactgtggcaattattcgtctatcatttttcgcatgggattggcgaaggtaaaagcgatgacagaataccatagctgtagcaatcgaaacttgaggcactttaagcttcatgcccaagtcttgcagaaaactgcaatacgactttcgaaggctattctctctcttcaaatcaatgccatccctcctggatggagaattttcttctatttcctttctactgaaataccacgatggaccgagtttcctggcttcctcacgcctaccctgggtaaagccattgggactattgtccacaactccgtgatgtgacgaatcacttggcaccatagccatgtaggttcagttacaatcaaaatgaactgatgaagaattt

SEQ ID NO: 43097 - DNA, 522 bp, Setaria italica
  Peptide Sequence Number=SeqID_109071
aaaaaggataagatctgcaaattcactagttttctgcaagaactcatgcaaaccaggacgctcaaaaacagtcacatgattcaccttctgttttccatcaacatcctttaaagtttacacaagcagagctcatttatctgttgtgcttcaaatgattaagcaaagtgaggtagcaaaagtagaagtccggtaccttatcagacgatatgcattccatgtcaaagcaatgtaatcctgcttcaacagcttgggtgcgtacaataacaggaagactagatgattcatgcagaaactaaagtctcatccaagtcaagcactaccgtgaggcggcccaggggcgtcaggtggagccgcggtgcagggccacgtcagctgggatctcggagcggagcggcatgaaggctacctccggcgacggctcggaggccgcgggccccggagaggaggggtagcggaagccgacgaaggacaggagctgggcgcaggaggggtgcccccggaggagtctggagcaggacctgg

SEQ ID NO: 43098 - DNA, 546 bp, Setaria italica
  Peptide Sequence Number=SeqID_109072
agatgcttcagaagtggaaatataaccgtcatgagctgatcatcagaatgttgtccagctgaaaatggaacacaaggtatgccattcaaaggctgaagaatgaaactgaatggattgttgtcgacaatgacgattctgcagaaatcttttgacacgcaagaaagatctttcacatgttctctgaattccctgtaatcgtgcacaatccattgatattagacaaggatcgttcaggttattgccaaataagtacagtatggttcaagcaggcaggcaggaagagaaaaagaatatcaagaaacaagcatattatgattgagtagcatggtgaatgaacacaaaaatgcatgctaaaggaagcatccatggttcgtcactaaagaaatcccacgaagcaacttagcagaaacgaggaaaaacacaggcaacaagagaccgaacaagacagcctgagcacatattgcatatgtggtaaatttattgagttcagatattctgagaaatacttggtaaagaagatgagaaaatgagatgaagctaaaattc

SEQ ID NO: 43099 - DNA, 342 bp, Setaria italica
  Peptide Sequence Number=SeqID_109073
gggaggaaggctgcgtgttctcagaccgggtgcacttccagatgatcagcctgcttggagctcagaaggacttcaaggcgctggagacgctggtcggcgagcttagccatgacccaagcatcgacaagagggagctttatcttgtggctgccggcatctatgagagagcagacaagtttgataaggcatcccagataatcagccagataagaagctccaacggttttgatgtcaggaaattcagataaaatgctccatgtcccagtaattcttacgtccagagaatctgacgacaatgtttcagataaaataataaagagcactgaacaaaaaaaacatagg

SEQ ID NO: 43100 - DNA, 323 bp, Setaria italica
  Peptide Sequence Number=SeqID_109074
gaataatgagcagatcataggaggtattgactgcattagttaggaggataccatgggcaagtgtatagccatgtaccagttatatataaagaaaaaacgatgaaggcgccaaaactatttgtgttgtttcgtgcttgtaacattttagagagagggagtgaatagctggacaacattctgatgatcagatacagtggatgattggtgctcatcatcagttacctgatcatcagaatgttgtccagctgaaaatggaacacaaggtatgccattcaaaggctgaagaatgaaactgaatggattgttgtcgacaatgacgattc

SEQ ID NO: 43101 - DNA, 1126 bp, Setaria italica
  Peptide Sequence Number=SeqID_109075
accgggtgcacttccagatgatcagcctgcttggagctcagaaggacttcaaggcgctggagacgctggtcggcgagcttagccatgacccaagcatcgacaagagggagctttatcttgtggctgccggcatactgcctgattagtttggggatcccatgcttttggaaccattctggcatatgaaacctttcatgcaacacgggcctgacatctttctggagggaaagatgcttcagaagtggaaatataaccgtcatgagctgatcatcagaatgttgtccagctgaaaatggaacacaaggtatgccattcaaaggctgaagaatgaaactgaatggattgttgtcgacaatgacgattctgcagaaatcttttgacacgcaagaaagatctttcacatgttctctgaattccgtggtaacagttgatgggcggtagagacggagtctgaatctattgtggacatctattcggtcaactaaaggtctagcataaccttctaaacctgctgtaaaaaggataagatctgcaaattcactagttttctgcaagaactcatgcaaaccaggacgctcaaaaacagtcacatgattcaccttctgttttccatcaacatccttatcagacgatatgcattccatgtcaaagcaatgtaatcctgcttcaacagcttgggtgcgtacaataacaggaagactagatgattcatatgcagaaactaaagtctcatccaagtcaagcactaccgtgaggcggcccaggggctcaggtggagccgcgggtgcgaggggccacgtcagctgggatcgtcggagcggagcggcatgaaggctacctccggcgacggctcggaggccgcgggcccggagaggagggggtagcggaagccgacgaaggacaggagctgggcgcaggagggggtgccccggaggatctggagcaggacctggaggaggaagccgatccaccccaccaccgtccgccacgcctgcgacgccactttcccccgctgctgctgctgcgccgccgccgccgcggtcggcgagtacacctccgccgccgccatggcctccggcgacgagctgtcgcaccacgtggggacggaccgtcaggggagccctcc

SEQ ID NO: 43102 - DNA, 874 bp, Setaria italica
  Peptide Sequence Number=SeqID_109076
ttttttttttttaaactttggatgtcgttgacccacgaactgttcattagactatctgaactgtcaacagtcaaattttaacaacaagagctgatatacaacaattaattgatataaaaatgctccactacacatacaaatctgacgttatgctagattacaattttcttatcttcggatgtggcaactccatatgaacagtgactcgattttatcaggaaccctaaatgaatatagataatgtacaagcgctccccctctgagggaattatagcgtggtaggcacttgagccttcaccaaaacaattccacaggacggcagcagaacttacactgcctgattagtttgggggatcccatgcttttggaaccattctggcatatgaaacctttcatgcaacacgggcctgacatctttctggagggaaagatgcttcagaagtggaaatataaccgtcatgagctgatcatcagaatgttgtccagctgaaaatggaacacaaggtatgccattcaaaggctgaagaatgaaactgaatggattgttgtcgacaatgacgattctgcagaaatcttttgacacgcaagaaagatctttcacatgttctctgaattccgtggtaacagttgatgggcggtagagacggagtctgaatctattgtggacatctattcggtcaactaaaggtctagcataaccttctaaacctgctgtaaaaaggataagatctgcaaattcactagttttctgcaagaactcatgcaaaccaggacgctcaaaaacagtcacatgattcaccttctgttttccatcaacatccttgtacaacaatagaattacaaccttactagttttaccaatacaaacaataca

SEQ ID NO: 43103 - DNA, 505 bp, Setaria italica
  Peptide Sequence Number=SeqID_109077
gcagcagtggccagccgccttccccctgttctagctgtggaaatcgctacggcgccactgtcaccactcacaccactcgccagttactcaccacatccatccgcgcccagctctcgcatcccataggctgccctgttctctgatcccaccggtctagtcgtcttcttccctgcacagcccgcggctctgctacaacgcccgcgctttcctcctccgaaagcggcgctgcagcagtgtcctcctgccctgcgcacgcaatcgagccccggctagctaggcaagctaggcgctcgccagttattgcaccggggatatcgctgccgggtgggcggcggatagctgcgctgcgccgctactccgtgcgtgttggggaggagtaattgtggaggagacaggcacgcaaacgatcgcccttcgcctcccgccgcgcgccctcacgtgattcatacttgccgcctcctcacttcgactctcctctcgcaaccataccaagcaagcaccaaac

SEQ ID NO: 43104 - DNA, 445 bp, Setaria italica
  Peptide Sequence Number=SeqID_109078
atcgttgcaattgatgttcgatctcgaagagaaggaagagatcttctaaaaagtgggtttttatgatccaataaagaatcaaacttgtttaaatgttccagctattctctatttccttgaaacgggtgctcaacctacaagaacagtttatgatattttaaggaaagcagaattctttaaagataaagaacgaactttgagttaattgaagaactaaatgaataaaaaagtaggaggggacgctagtacctcttaattttttagacacagcctctttcttagtcctattttttgtgttcatttatgtcgtgccaatccaacaaaagtccttattttatttccttttttgtatctaattgcattgtatttccattgacaaaggtctattaaacaaatagaatttgtagatagctggggtctcttttatcatcactccatattaggt

SEQ ID NO: 43105 - DNA, 530 bp, Setaria italica
  Peptide Sequence Number=SeqID_109079
acaattaggaatgcagttgtctgtgagtatgtgcctcagattggggacctatcacctttggacagcatgagtcttgtcgaagtctgaagaattcccaaatcaaagcctcgggttcttattcctgctcaacaactcacatttcatacagcagagcaactgcgttctttacttatccaaatcctacgaggtaaccctcacccgcaaactcgagcgctatatggagagttatatacaggtatcgtgggcaccggtgttgtcatgctccggcacctcgttgctttaggagaaactactccccactgccttacaagttccagtctgagtttctgaagacctacaatacccaaaagctgtggaaggtcccagatcccgagctgaggaaaacgctgcccagagctatcaccgagaaaatcgtttcaggctatacagaatacatagaggataacaaaattaccaccctaaattcactcccggacctggaagagatgttgcaagagctcttccaaggatgaacgagagcacaatacgtt

SEQ ID NO: 43106 - DNA, 241 bp, Setaria italica
  Peptide Sequence Number=SeqID_109080
ctaggttcacatatgtagactgatgttcaatctagtggctaccgaccagtgagaacttttctctatgtgattaaaattttagcaggataggcaggcttttctgactggcaacaacccattagcaaaggatctgacgttgaaggagctatacaatatgcaaagcaggttggctcaggagaaggctagagaaacatcatatcgacaaaggttccagatgccagagctgcaaggcctcatccag

SEQ ID NO: 43107 - DNA, 497 bp, Setaria italica
  Peptide Sequence Number=SeqID_109081
aagaaataagaactaacctaagaaggaaaggtaacaaagaacacgcttaatgtgcctatttctggttttggttcaagcagaggttctcagttgttgggtggctcgtataatggtcatcatgatatgatctcaaccaataccctacaaaacatagctggaattcagacaggaccagcttggcttgaaaatgatgctgcgggtagtgctctcgaattacaatatgctttttatgaaccgttaccaaatctcatggcttgcatatttgccttatgatttaaacttgtttgtgatgacagcaagcgcatatttggaaccaaaggatgaagttcatgatcttgcaagcctgcggcatgcatttctggaacaggataggcaggcttttctgactggcaacaacccattagcaaaggatctgacgttgaaggagctatacaatatgcaaagcaggttgctcaggagaaggctagagaaacatcatatcgacaaaggttccagat

SEQ ID NO: 43108 - DNA, 1794 bp, Setaria italica
  Peptide Sequence Number=SeqID_109082
gttcttggttcctgttcttctccttgagcggcaaaatcactgtgggacttcttgctttcttggtacccaatcaaggtgtgggtgcagtttgttttccacaatttagggggtcacgtgaagtctgcccctgcttcggcactttcccaacagcatgtccacagaagataagaaactgagtatgctaaacaagggcactgcattgaatccaaatgcagaggaatttgttccttcatcccttagaactgtcaatgacgcctccaggagatcagatgcagctttggttgtctcagggccatctaaagaaactagcacagaccagccagagtccattatacggagtaattctgatgaagaagcgcatcagtattggcaacagcagctccctgatgacatcacccctgatttcaaagtcctgggacaagatgagacttctggacctgacagtcttacactcacaggcctgtctataaatgacggtattggtgcgtcaatgttttctccaaaccagacactgagcatgcagcaccgtgcatccccttttatcagggacagactgggtacacgtccaaagattgagttttctggcccagcttatctggacgagcgttctcaggctacaattatgagtccaactgcaggttccatgagtccaactgctgctccatgggttaagacagtaaggaatgggggacagtataactcaagcagaagggatgctggtcactacaatggagattctagcattggagcttcattgcacaacattactgatgcgtatcatggaagcaagcgcagcttaagctcaactatggatatcatgagtcacctggagaataaagttgatggacgtctcagtcagaacctcaggtcactgtcatttggacattcaagtcctccatcaccagcatcatatggccaaaatggtcttgggaactataataaagaagcttttggtctgccaaacagtccatatagatctcattcagctatactcacagaagatgttgtttcaccctcaactggacgtgaacatgtatccctggatgctcctagaggaaggtacaagacggctaatgtgcctatttctggttttggttcaagcagaggttctcagttgttgggtggctcgtataatggtcatcatgatatgatctcaaccaataccctacaaaacatagctggaattcagacaggaccagcttggcttgaaaatgatgctgcggcaagcgcatatttggaaccaaaggatgaagttcatgatcttgcaagcctgcggcatgcatttctggaacaggataggcaggcttttctgactggcaacaacccattagcaaaggatctgacgttgaaggagctatacaatatgcaaagcaggttggctcaggagaaggctagagaaacatcatatcgacaaaggttccagatgccagagctgcaaggcctcatccaggagcaaaaccccccaattgacctgtgcggccttcacgtcagtgaggcgctacacgtcctcaactacgagctcaacaaccggaggaagatcgtgcggtccaccggtcgccggttccaggccatcatcatatcaagcgcccgcaccccagcgaggctgaacgctgccgtggagcagtacctcctggagcacggcctacactacacgcaggcgcagccaggcctcttccgtgtcctgctgcagtgatgaaacgggacgggaaggtctaggtgatgttcgcgaacaggatctgatggaaaagggaaaaaaaaagtttgacttgtacttttgtatatggcagaggtggc

SEQ ID NO: 43109 - DNA, 518 bp, Setaria italica
  Peptide Sequence Number=SeqID_109083
ccctcctcctcctctcccatctcccggcctcctccctctcttcgttctccttcaactccctcatccgcgcctccccgtccgtcctcgcgctccgcctgttcgaccaaatgcgccgccgaggcgttcccgcggacccatacaccctcccgttcctgatccgcgcctgcaacggcagtgatcctccgctgtgcaagtctctgcatgggcaaggcgtccgtcttggctacggctgccacctcttcacgcagacggcgctgatgaacatgtacttcgcctgcgggtcggtggtcgccgctcgcagggtgttcgaggaaatgccggcgagggatgtggttgcatggacgggcctggtttcaggttatgtagactccgggatgtacctgaaagcagttgaggtgtttcaggagatgagaggtgctgattatctcgtgtggcctaatgaggcaacggtggtgtcagttgcctctgcctgcaccggtctgggctcactggagtatgccacggggctgcattcatat

SEQ ID NO: 43110 - DNA, 1376 bp, Setaria italica
  Peptide Sequence Number=SeqID_109084
ttttttttacaatggaaacagagcacatagcagtacaattgcctttgatgagtatactgtatacaacaatttcaacacaccagacacaaggaaaacagcagtacaactgcagaaaaagataagaccccaaaacaagacacaagtacaccatcgaagcaaaccattaaacattcatggtacacatcaaatctgtcatacataatactttgtaggcatcaaaacattccacaacatgcacaaatatatacatatatggagcaaaccataaaataacactattgactttattcccaggcaggaaagaagaaccaactcacagtgcattctcagttccacacccacacaaactcctgttcaatagtcgccacgatactcgctgtaatcatccctcccagcgggtaccaccttctcttccacccgctctgcagccttctcctccttgtacttcaccccttcaccaattgctagtcccccgagggctccagccacagcacccaccgcaagtccagtgcctactccataccttccgctcccactatcaccaccccctgtcctacctctctgctcatactgcctgctgtagtcgaccggtgcggaaggccctcccgtgtactcatactgaggtggaggtgctggtgcagagtagtacccactgggccggtagtattgctcggatccgtactgcggcggggccgagtaggcgggaggcggaggtggtggaaagtagtatggggagctggatggcggcgggtactggggctcaggaggaggcggcgagcgctcgcggatggcgacgcggatgcggagctttccctgtggacggccggaggggcggaggagagggaggctgacgagaggggaggccgcggaatcgtggctagggttagggtttgtggggaagaggaggtcgcggagaggcgagcgggcggatccgacgagcggcttgggcgagtcggaaggcttggagtggaagacgtcgagggacaggaggatggagggatcgtgcggggagaggtgaggcgggagcgggaggacgaggcgctcgttccaggcgggcttgcaaccgccggcgtcgtcggggcgggtggcggcgcggcgggaggggtcgaggtaggcgacgacgtaggcgcggaggtcaccgcgtcgccagttgacgttcttcaggtgcttcccggagacgactgtaacctcaaggtcgaacgccttgggcggcgccgctggcggcggcggcatcgaaggcggtggggcttggaattgggggtgggcattcggaggaagcgggtgctggtgctggtgcgggtggaggggcgaggagggagacggcgaagccatggcgcggcggcggagcagcgggctggtctggtttgtttgtgggg

SEQ ID NO: 43111 - DNA, 2326 bp, Setaria italica
  misc_feature (2301)..(2326): n is a, c, g, or t
  Peptide Sequence Number=SeqID_109085
ggatgggggcaaggcggtggtgtcagagatggcacggttgctgaggcggttcggggccggcaaggtctgggccgtcggtacagctgcgtgcgccacctacctccgctgcaaggtctaccacccaaccatggaggccgagtgggacctccaggccgtgcccatcgcccgcggggcaccgctcgctggtgctgctctcaggcctgcaggcactggacttctcggcaactcggtggggatgttatcgcctacccttcggcctgtgccggtgacaccaacggcgccccgatggccaccaggggcagggactgaccagcctctcatggctaggccggccatgtgcctactttgcaagggtagctacgatcgtgagcttgccaagcttgcagcggagcggaaggagaagccggcatcgcgccctgaggctgctaagcccggtttgccacactggctgcagccaagcagtgatcagacacagaccaaggagcaagagttgaaatggaaggagactgcccaagagcttgagaagaaatggcgtgagacttgcgcccgtacccacggcacccgtgctggagcaccagctctctccatgccgttggctgccttcggcccacgcccgcccattgagcccaaactacaacttgccaggggtgccattcccacccttaaaatgaacaccaattgggagaaggcagagggtacccctacgtccgagcttcgtaagagtccgccaggcagcccagtgaagaccgaccttgtgcttggtcccttggacccgggtgctactgtggataaagaccagaaggaaaattacacagagggactaactgccatgcaaaaggctaagatatctggaatttctgacatcgagtccttcaagaggctcctcaaggggcttacagagaaggtcagctggcaatcagatgctgcttcagcaatcgctgctgttgtaatacaatgcagatctggcagtgggaagcggcgaaaaatcgggacaaggggtgacatgtggctcctgtttgttggtcctgaccaagcaggcaagaggaagatggtgaatgcattgtctgagctgatggtaaacacgcaaccagtggttgtaaactttggtggcgattcccggctggccaaggatggtaatagactcaatgcaggtttctgggggaaaacctcacttgaccggatcactgaggcagttcggcaaaatccattctcagttattgttcttgagggtattgatcaagtggatgctgttgtgcgaggaaagatcaagcgagcaatggaaactggtcgtctgccagactcccggggccgtgaggtaagccttggcaacgtcatctttgttctcaccacaaattggttacccgaggaactcaagggaccaaaattcgaaacattgctccaagatgaaggaaggatgttcgaggtagcaaactctaattggcagcttgagctctctattggtgacaagcaggtcaagcaccgagcagattggttgtgtgatgatgctcgcccagcgaagttagccaaagaattatccagtgggcatggtctatctcttgaccttaatttagctgttggggcattggatgacactgagagctcacggaattccagcgatctctctgttgaacaagaacaggagaaagggcacctttcagtcaagtgtataacaccagcccctgactctgatctattgaatctcgttgacgatgccatcgtgttccggccagttgactttggaccatttaggaagaatgtcacagattgcatggcggcgaagtttgaatcactcattgggagcagcaactcattcagaatcgatgaagatgccattgaccggatggctggtagcgtctggctcactgacgagaagctagaggactgggctgagaaagtgctcatgcccagtatagaacgattgtggcgcaacatgaagcatcacaatggccgtgctgttgtccgtcttgcagcagtcgcagacaaggcattgccaaggtggggaggggggcgagaagggctaccagcaacggtaccgatcgccattgatggcatgtagagagggaatttggggggagtacattcttttgtatggtagatatgtaaatattggggagaactcccttgttataagcttagggaggttactatatgaagcacataggaggggagggagaaaatccttttgactaccaaataggcatggaggttatagatcttataacaacaaatgtgatctatagttttgataatatatgtagctatgttccttgaaactaaaaaaaaattctacttttagaaacnnnnnnnnnnnnnnnnnnnnnnnnnn

SEQ ID NO: 43112 - DNA, 329 bp, Setaria italica
  Peptide Sequence Number=SeqID_109086
cagttgagaaacgtaaggaattaggattgactctaaattggagtcagaaagacaacacaaacaaacagtgaaatcataaatatggtggcatataagtatgtgaaataattagcattaaaactggtcgctggtggaaccaagttgatttcctaatagtttcatcgccctcacagttgttacaaggatgcaatgcattggatctactgcgaattacaatcaatatctcaagaaagtcatcactgtgaagcacaatatgaaacaaaacagatgtcatatcaagtcctttttttctcaatatatcactaagtaccaagttttaattctcttgt

SEQ ID NO: 43113 - DNA, 279 bp, Setaria italica
  Peptide Sequence Number=SeqID_109087
taggtatttagctgaatatttggtttactattttaataacaggtgcataacgcaacaaattccaggagcagtagctgactggtccatcagtccatctatccgttgacacatagatatacatgagaaatctcatagtaataagttgcatgaggcgaggtcagaaagatcaaatccaatttagacatgatggcatcagccaagccgctatactgggggatgggggaactgggtggcgactcgacaaaaaaatgttaaattgtccttctcttgagaggctga

SEQ ID NO: 43114 - DNA, 825 bp, Setaria italica
  Peptide Sequence Number=SeqID_109088
ctgcgacgcctccacccacgtccccgcgctgtgctgcgagaagtacatccggcgaagctcgccggagaagttgctcacacgcagcgtcacgtgctcccagtcgccgacgtgctcgccgatctcgcccagcgggatcgtgagcaggccgaccttggcgcgcgccggcccgttgaacgggtagaagatccacacggcgaggtcggtcaccgtcccgcccagcatcggcttcgcttgcacgtacaccttcgcgctggcgaggtcgcccctcttgaccttctccctctgcttgttgtccaccggcaggtcgagccagtagccgccgtcgttgccgccgccttgcgggaggttcgacccgtcggcggccaccggcgtcgcggtctggctgcccttctggtacagcagcgcgccgttctcgaagaaccacgtcaccgacgaagggaagtagggctcgttcgggtgcaggtacacgtgcggcgcgtaggccgcgaggagggagttcacctgagccaggtcaggcatggaggacgtgtaactcgcgctgttgttcttcaggcatgccagcgacgaggcgttcgccggtgtcacgctgctctgagctaggaacgtgccggcgtgcacgcctcgggcgtcgatgccacggacggacggcctcagagtggcggcgctgaagccgtccttgtcgctgctcaacagcgactcctctgtctcgcacgcgtcggtgaagtcggcgcggacgcacctgacctcgtcgcgcgaaggcttgtcagacgtggccgtgaccaccgcgcccaccgccttgtaaccttcaggagccgtggggagcca

SEQ ID NO: 43115 - DNA, 247 bp, Setaria italica
  misc_feature (245)..(245): n is a, c, g, or t
  Peptide Sequence Number=SeqID_109089
accgcaccccatcccaccacccctcgtctccttcctccttccctcccccctgtcctgcctgagccgggcgcaaacctagcttcttggatcgcacacagctcgttctccgtggcgcccgatccatcgggtttcgtctgcgaccaagaattgttggcgagcgcactggcaatggcgtccacgtcgagctcgacgcccgcggcggaggaggaggagagggggcggaagcggaagcgcgcgcccggggnga

SEQ ID NO: 43116 - DNA, 680 bp, Setaria italica
  Peptide Sequence Number=SeqID_109090
ccgcacccggaccacctcgcggccgcgcgccgcctgttcgatgaaatgccccagcgcgacgccgtcacgtggaacacacttctcggcgcctacgcgcgccgcgggctcatggacgaagcccagagtctgttcaacgatatgccgcagaggaacacgacttcttggaacacaatggtcactgggttctttgctgttggccaagcgaagaaggcactggacgtgtttgaggcaatgcctgtcaaggactctgcgtcgctgtctgctatggtctctggctttatcaggaatggctggttgcgtgaggctgatgtgcttttgacaaagcacctgagggcaacggacatggacaaggctgttgatgcttacagcaccctgattgctgcttatggacaagccgggagggttgccgatgcaagaaggttgtttgatatgattccaaaagaacagagccagcacaaggggcataagaggagggtgtttgagaggaatgttgtttcatggaactcgatgatgatgtgctatatcagaactggagatgtttgctcagccagggcattgtttgatgagatgccaggtaaggacttggtgtcatggaacacaatgattgcagggtacactcaagcctcggacatggaggaggcagagaagctgtttggaagtgccagagcctgatgcagtga

SEQ ID NO: 43117 - DNA, 789 bp, Setaria italica
  Peptide Sequence Number=SeqID_109091
cgcacccgcgccgccgctcaaaacgcagccgagggggaaagggaagcacgcccaaaaatttcccaggttttcgcctctcgcggcgcaccagcaaacacccggagcggctcgccgtcggcgcggaggaggagggcggaggatacgcgatggcggaagagaatcaggctggaaagaaagaggaggaggaatttagcacaggtcctctgtctgtcctaatgatgagtgttaagaacaacacccaggtgctcatcaactgccgcaacaacaagaagctccttggtcgtgttcgtgcttttgatcgccactgtaacatggtgcttgagaacgtgcgggagatgtggaccgaggtccccaagactggcaagggcaagaagaaggctctgcctgtgaacaaggacaggttcatcagcaagatgttcctcaggggtgactcggtcatcatcgtgctgagaaacccgaagtgagcgtccaacaagtcacattgcagctgttccctcgatctgggatctggggaagccatgtatctgttgaagactgaactgtagcttatctgcctttgtatgttttggaggattaactggtagtccggaaccgctgctcatgtggcatggtgatggcgcatgagcacacgtttcatgagtttgttaactggagtatgtacctagcaactgcagtgtttggatcacggaatgttatgcctgcgtttcaaggtttaaaaaaaaactaaagagactgccaacgacgacacactgagtggagaactagaccaaaggacaacacagggatagg

SEQ ID NO: 43118 - DNA, 221 bp, Setaria italica
  Peptide Sequence Number=SeqID_109092
ccagccaccaagcggcccaggctgctccagccgctgcagcagcagcagcagcagagcccagcggccgaccacgcggagctctgcctcgggcgccagccgctgctgctggcgccgcagcagccggccaagccgagggtgcacgagtgccccgtctgcgggctcgagttcgccatcggccaggcgctcggcgggcacatgcggcggcaccgcgccgaggccga

SEQ ID NO: 43119 - DNA, 1273 bp, Setaria italica
  Peptide Sequence Number=SeqID_109093
acgatgccttgtaaggtagcaacaacttcaccgcagccgatgatggactactctggacttcgagagggccataattaaaacaaatacagatgttcagtataacttccaatatattacatgttgttaggctaaagtgaataactcctagtaggttgcatgctctgcagtattggattcccgaaaaccctgacgtgctcgccatgcttgaggaataaaaaaagtcatactgatgattccgctgcagtggagttctggaaccaagccgaacagatcactaacctcaaaccactcaaaactccaaacgacccctgctatgtcagggaggggcgaaacggcagggtcacagcaacgtctcaactacagcagagattgcttgcggtccccctcgctcaagaagagatagagcaaggtcatgttcatgccaactccggagcccagctgctatcttcttcagcgtatccagttttatgtcccgcaaccatgatgggacaaacttcaccaccaggaacacaaagcgagacacatatgctttccaggtacccggattgcagccaagaagaatgtgtccatccaatacaccagctatgaaatccatgtgggttccgacaactcgcggcctccttgagaggaaagacaatttcatgacaggagaaatcctatctgctccccaaagcaggctaccacagaagaagagcatgttggccatggcataaccttggagtgtgctagaaactggcccagggtccttcaaactctgttctctggctgatagcagcagtgttggcaatgtttcctcatacaacacctggaccacaagtggtccacctgcaatgcataggagccctccaccaagcattgcgacctgatgtgccatggatgctgcacaagatagtggtgtccgccctgacttcaactgtggaggcccattaaaggaccatccatttgcaagtttgtgggaccactcgatcacttgcttgaggatcacttcactgacaaagtaagtgtcgtggaatgttcgacacgttctcaggtagatgaaaccaggtgccatcgggagcctaagaccttgatttgtgatcgagtctcctagtaaagccccgactccacgatttgcagttatgtcagaaccaccggatgacgacagcagaaaggacgaaaagcaactttggatgagctgcgccactgcatctttgtctctgccgaatggagaacgcaaacaagagaggacgataaagtcatgccatcttcgcactttctgtgtccacaatgcccc

SEQ ID NO: 43120 - DNA, 531 bp, Setaria italica
  Peptide Sequence Number=SeqID_109094
cccacggcgccgccagtccagcagggtgaccatgacgcggacgataccttcgtcggccagcgcttgccgcacctccggcaccgccgagaggttcttgagcgcgccggccgcggcggactgggagacggagtcccccgtctggcagatctcgatgagcgggccggcgccgccgtggccgacgatcgcgcgcgcgacgtcgggggacacggacagacgctgcagggtgagggcggccttctcgcggccgacgaggctgccggactcggccagcctgatgagcggcggcaggacgccctccgacacgagcagcccgtcgcagctgcctgactccgcgacctggcataccaccgtggcggccttcccccggaccaccggcgccgacgccgtgagcagctgcaccatcgcggagacgttggcgcggccgagcacggcgagcacgctcttctcgtccttgcgcagcgcctcgaggagcccgtccacggcccggttcttcgcctccgtctgcccgatctgcagcctcgcgagcagctc

SEQ ID NO: 43121 - DNA, 400 bp, Setaria italica
  Peptide Sequence Number=SeqID_109095
gccgagacggagaagcgagacgaagcgagcttacaaatacagcgccgcaagccccaatgcccacaccgcccgcctcagatcccgaaccctaaccctaggcggccgtccaggggcccgcaaccgccgccggtgaccggcgggcgacgcgatcggccgccgaccgacgcgggagcaaccgccgacggcgccgtgaagaggaggaggataagggggagccccaggccctagccgacgtagccgtagcgccgtgcggccgaggcgcggatcggggaggggaagggagggggacgggaggttgaagcgggggaagcgatatgccgggggacgtccccacctcgccggcgccggcgccgccgtcagcgtcttcttcgtcgcagcaccaccaccatcgcggccccac

SEQ ID NO: 43122 - DNA, 439 bp, Setaria italica
  Peptide Sequence Number=SeqID_109096
ttacttaagggtttttagttatctagggttttgtggagattgtcataatgcagcgaagcttatctccaaaatcgaggaccgaaaaatcatccttagggatactacacgtttccaccactttagaggtgggagctgctcttgtggagattactggtgatacaaggcgtaactagcatggctgccattttcggtaacaatgtcagacatacactggtgtcaccataggacttgcaacactatctgatcctttcaacaagaaaaaaaatgtggagcatcagcagtcaacatgtgaggtttgagcagtttgccctgatgtttttcttgtgtcttttgcttttggaagaaacttatgccctccaggccgtgagattcatcagaaccttaccattgactgttggaggatgctgaaagatcacggataagatatactgaaggcctg

SEQ ID NO: 43123 - DNA, 170 bp, Setaria italica
  Peptide Sequence Number=SeqID_109097
cttctcgcgcactggggttcctctattcatcttgcctgaatcctttccgcaaaggcggcggcctgatttgggagcagctctttcgcttcccggatcgccgggatcaggtaccactctcttaactcttgttgcatcgatcggctaaagaatttgtcttgtgaattggatct

SEQ ID NO: 43124 - DNA, 2263 bp, Setaria italica
  Peptide Sequence Number=SeqID_109098
gtttcgctcgcgcgatcgaatctgaaaatctgctgctagttattcggttgttgttacagggtccaaagcccagcagaggaatcgcatctaggcgaactctcttctcgcgcactggggttcctctattcatcttgcctgaatcctttccgcaaaggcggcggcctgatttgggagcagctctttcgcttcccggatcgccgggatcagtattgggctttcagtaagagatagaaatatcaagggatgctgaaattatgtgcttgcatgatagagtagcttgtctaaggactggcagggtagccaaccatattcgtagttctcttgattttgatgacagcagagcacaatatgaacaacatttgctccatgtgcacacgcacaatggggctaggcatggcagttcaaccatcaccttaggttactttcttggaggagacgggtgaaattgttggttatttgcggacaccttctacatcatttggtgctcattatcaactttataagtttaaaaaatcattacttttgtccataaaacattgggaagatgaccgagaaaggaaatattctgatgcaaagatatgagatgggaaagttacttgggaaagggagttttgccaaagtttaccatgctcgttgtgttaacacttcacacagtgttgctatcaaggtgattgacaaagataagatctttaagtgtggtcttatggatcaaataagtcgagagatttcggtgatgaagttggtgaaacatccaaatattgtacaaatgtatgaggtgatggctactaaaaccaaaatatattttgtgttagaatacgtcaagggaggagagttgttcaacaaggttcaacgaggaaggctaaaagaagatgttgctcgtaaatatttccaacaactaattagtgctattgatttttgtcatagtagaggagtttatcaccgtgatttgaagcctgaaaatcttcttcttgatgaaagtcgcaatctcaagatctcagactttggtttaagtgcacttccagattgcaagagacaagatgggttactccatacaagttgtggtactcctgcatatgttgctccagaagtaataagtagaaaaggatacgatggtgcaaaggctgacatatgggcttgtggagtgattctctatgtgttgttggcaggctatcttcctttccaggataagaacttggtagacatgtataagaaaatttgcaaagcacaactcaaatggccaagttggttttcttcagatattcgaaagcttttgcggcgtcttcttcatccaaaccccagtgcacggatctctattgcagaaatcatggaacatccttggtttagaattggtcatccaaatcatggaaaattgtttgattataccatgaattcgacagataatgttatgcccattgacatgaatttggctttggatcattccaatgccaatactgttgggggtaatcaagcagtagaaaaacttactaatttgaatgcttttgacatcatctcactttctaatggatttgatctctctggcatatttgaggagaactcaaacaaggaggaggctaaattcacatctaccaacacagcttcgacaatcattacaaagctcgaggaaattgcaatgagcttgcgactaaagataacaaagaaatgtggtggattgctgaagatggaatgttccaaaccaggaaggaaaggtgtgatgtccttaaatgctgaagtatttcacatcacaccaaattttcatctagtggagatcaagaaaaccaatggcgatacccttgagtaccaaaaggttatgaaacaagttatgaggccagcactgaaagatattgtgtgggcttggcaaggtgagcagcctgaaaaggagaagcaacaatcttagatgttgtgacaagtgtaataatagtagagattgtgacaaaccaaaactctaattgttgactcaataatgtactcttctttttttctcatcctcatattttagtccagagttttacacttctattggctgttcaagtggaaatggtttctatcttgacgaagcttttcttaaaccaatgatttgattgctgaaaatctgcatattgttaaaaggaaggcggttttacatcaaccaagattcaatacatttgttagcacagtagcaaatgtatttattttaataatatctgaaaaaactacgtgattcgatctattttggctcggctgtagactttctacttccacatgaatagggaatggccacgccata

SEQ ID NO: 43125 - DNA, 1503 bp, Setaria italica
  Peptide Sequence Number=SeqID_109099
caacgcctttccttggctctctcgggccctccaaagcgcaaagcacacgatcggcaggagctcgaacaaaatcctcaactgtcttgggcccgaaccagttctttgcatccggtgccttctccatccttcagctcgcgcttcctagtgcggtgctgctattcttggtgggaagttatattcttggttgctcgaatcgggtgcgcacgaatcgctgaagctcgcgccttttgtggattgattcctcgagagctcgacacaggatcgagttcttggaagcggctttggctccctgttggctactggcgcgcgcgaatcgaataaaaggcgcgctcttttgctcggttgtcgcgactggaggcggcgagaggaagcatgggcgcgggcgcgtcggacctcgcggggatggagcccagcggcaaggtcgcgcgcgctgggctgggcgacctgccggagctgtgcgccgcggaggtgctgctccacctcgacgcgccagacatatgccggctcgcgcggctgaaccgtgcgttccgcggcgcggcggcggcggacttcgtgtgggaggctaagctgccggagaactacggtcgtctcctacgtttcgtcgatggtgctgaggagggagaaatggggaagatggacatcttcgcgaggctcgccaagcctgttccgtttgacggtggcagaagggaattctgggtagagaagaccaaaggtggcatttgcatggcgctgtcatcgaaagcgctggtgataacggggattgatgatagaagatactgggttaacatgccaaccactgaatctaggttccactcaattgcatatctccagcaaatctggtggtttgaggtagttggagaagtcgatttctgcttccctgtagggacctacagcctatacttcaggcttcatcttggcaagtcttcaacacgttttggtcgccatatctgcagcacagagcaaatccatggctgggacaagaagcctgtacggtttcagttctctgcatcagatggtcagcatgccgtgtcccagtgttacttagatgagcctgggagctggattttgtaccacgttggtgatttcgttgcatcaggctctgagcaaccaatcaaactgaagttctcgctggcccaaatcgactgcactcatacaaaaggtggtctgtgcgtcgattcagtactaatatacccgaaaggctttgagccagaaagggtgatcaggtctcagaaatgagttggcacacttgatagagtatcactatacattagagttgtagaggaatctaagcggcctaccctttttatcttgggctaattttatgctaagaaagcatgtgcacatggtagagtgatttttcttttttatttttgggaatgatggcatcagtgtgctttagttttcgctttctcacagtggtcatggtgctgaccgcctaggacaggaaacctgtatgtattgagctctggattttagttacctgttgtgatccacacggctata

SEQ ID NO: 43126 - DNA, 285 bp, Setaria italica
  Peptide Sequence Number=SeqID_109100
cttcctttaaaaaaaatttctcgtggttccactgtcttagcttcgaccaatggaacgaaattgagtaatttacatttttggtctatggagaagttttccaacgtgtacttttctgctttgtccggcaggaattctgggtagagaagaccaaaggtggcatttgcatggcgctgtcatcgaaagcgctggtgataacggggattgatgatagaagatactgggttaacatgccaaccactgaatctaggtaaatattaactcacatctttctttccttgttcctac

SEQ ID NO: 43127 - DNA, 618 bp, Setaria italica
  Peptide Sequence Number=SeqID_109101
gtttacaaaataaacaaaacttgtttctgcctgataatctgaaacccaatgaggaataaatatgctcagtagtaaagtagtagaatccaaaggaggctgctctaggaactcttccaaagtaatttgcctttgtcctgcaacatcctgaagacaaacagttgtgccagcactgagaagtatggttgcaatgtctgaaggaaatgggtatttttgtgccaagattatgtttcctccaatactagctgtgttacggacaaatggtgtggcaactttactcatgtggtcagcaagttttctgaaaaccacactgccatttggagaggatatagattcacattcttgcatcagtatctcaatggtcctagaaattgttgtagctgctccaatttcaaagcccgactctcttttcacaatatgtgaaagttctggaatgccacctatatcaatatacttattgtagaggtcttgatccttgtatcctggtacaccggtactagtattcccaacaaccattttgacagagtcactacatagacaagaatctattagctcatagtactctttgatacttctcggatgataccagcctccctggatcatttgaatgttgcttgtatt

SEQ ID NO: 43128 - DNA, 472 bp, Setaria italica
  Peptide Sequence Number=SeqID_109102
gagctcgacgatggcccccgcccgcggcgccgcccgaggatggaggaccggcgggccgagaagagcggcttctggccgtcggcgcgggagcccaggaagccctcccagcgctggtgcagcgacgggcgccgccggcgaacggtgaggagcggctccccggccggtccgagcagcgcgagctcgcccgacgacgccgcgcccccgccgtggccccggccgtaggtgtcggcgcggaaggccaacccgcccgtgcggctgtcgtaggccgcgaagccgtcgccgggggagaagtgcgaggtcttgcgcaccgtcaggacgcgctcctcggggtcgcagtactcggcgcccacgatcgccatcgcttctccctccctgcctgcttgcttcctctgagctcgagcttgacgccgcgcgcgcgtgcttgcttgcttgcttcggcggctcgagtatgccgctagctgctagctctgag

SEQ ID NO: 43129 - DNA, 655 bp, Setaria italica
  Peptide Sequence Number=SeqID_109103
tcctagctggcgcgattgtcccaaagaacccagcactgacccaagcgcctgttgagcaccaaactgtgcaggttgcccaaaccctgactgctggccaaccccaatttgtgcaggctgcccaaatcctgactgcggcccagatacaatttgtgctggctgaccaaaaccggactgaatttgtgctggctgcccaaatcctgcctgatgaacagatccaagttgtgcaggctgtccaaatccagtaaacccacttgagaacgtactagaaaaggcactagagctagttgactgagatggctgggctggctgggctgaaggaatgcttagcgatgctggccggaaaagctgccctggactggttgtcaaagcaaatggcgtgccagaacttttattttcagatgtaccaaaggaggtcccaaaaggattcgacttttgaggacttgaagaaggctgagacccgagtccaaacccaccaagggctcccaaattgagttcggcacttgcagaaggcgcctcctcttccatatcatcttcatcggttgagttgttgtttggtccgacatcttttcctgtagaagtgacaacagattctgctgttgtaggtgctgttttaggagcaggggactggagtagaaggcaaggttggcaccagttg

SEQ ID NO: 43130 - DNA, 445 bp, Setaria italica
  Peptide Sequence Number=SeqID_109104
tttcaggaatcaggatgcgctatgactactagctatatgatctcctactagcacacgaattacacaagcagagcagtgagactgagttcaactaaacaacagaacaagtgaccatgctatgttctagcagttttccttcccaatacaggtcttgcagagttgatcttcacttaagcatggatacaacaggacctgcagcaacataatattcagactaacaccgcacatacttctgagacaggttttgcagtgccaacgatgacttctaagcggcctgcaccagctgaggcgaaggcagccagatgctaggcgagggcttgccttcctactcattctcgtctatccaatcgccatagatcctgctgattttgtcaggtcccttccatttctgaatgggcctttgcacttgcccggacctctggttgaggttggtggaacgctgtga

SEQ ID NO: 43131 - DNA, 1107 bp, Setaria italica
  Peptide Sequence Number=SeqID_109105
aacttaacccaaataacaaggtacttagacaagaagttagatacttacacttaagcatggatacaacaggacctgcagcaacataatattcagactaacaccgcacatacttctgagacaggttttgcagtgccaacgatgacttctaagcggcctgcaccagctgaggcgaaggcagccagatgctaggcgagggcttgccttcctactcattctcgtctatccaatcgccatagatcctgctgattttgtcaggtcccttccatttctgaatgggcctttgcacttgcccggacctctggttgaggttggtggaacgctgtgactggatgcctagatggtacacgtctgcatgagggggtatcgcggtagatgcagcagcagaatctgcaggagcttttgcagaagcaccagcttgcttcgagtcgggagtggacgcgacatccctgccgtctatgtcgacaagtcccccaccatacttgtgaagttcagcagctccatgagcgaaatggcacttgctcccgaaggggcagtatccagtcatctcccacttgttacagatcctcgtcttccagttggacggcttctgcaccatggccccattggcagcagcggcagcattgtatcccccaccgccaaccgtgggcgagagactgatggccacgctctcccgcgccttggactgctcgtcgtgcaggaatgtgcaggcgtcgccgtaggggcatccttcctcggtgtagaacttcttgcagtggcggcccttgtacgccttcccccctgggagccggcgcctccgccatccccggccacgacgctaccagaggtcatgatggggatctggtgctcctcccgctgctcggtggcctcctcgtgcgcggccacgatctcctgccagttgggcggtggcttgcggagctcctccatgccgtgcgcgaagttgcagttggtgacgtaggggcaggtccccgcacggaacttgcagcagagcttggtcttgaagaacatcttgccgatggcgcgggacttgctggtgctgctgccgcccccgccgtcaccgccgccagcacctccgccagcaccgcccccgccgcgagccttcttctttgt

SEQ ID NO: 43132 - DNA, 360 bp, Setaria italica
  misc_feature (317)..(317): n is a, c, g, or t
  Peptide Sequence Number=SeqID_109106
gaacagaagcatagtggagccagctactactgttggtgttaacagcaaacctgatattgaaaagattctatctgaggtcatcctgactacccagaggcatggactgaacgaaaaggctgctaaaagtgatgttcttgaaacatcctggttattaccaccatgtgaattcttccagttgaaaatgttgacgaaattccatctatgagggatgaaaccatgacatacaatgtgtccaacggagctacgagcacctggaagattagaagacttactttccacccttcacagtattcctcctgtaatgatgtgttttttcnctagtagaatctagttttttttcttgtagaatcattatttcgc

SEQ ID NO: 43133 - DNA, 461 bp, Setaria italica
  Peptide Sequence Number=SeqID_109107
tttacagaaaacaagccaacccaagtattctcgtaagtttttgaacgtgtagacaaaaccaagcccaagtattctcgtaaccagtgtatgatacgcttgcatgatgcagttctgataaggagaatttttttgaacgtcaatgtagctttgattacgtagtaatggctaataactgtcgtttcttctagcattgattacacaatgaccggctccgtcgctcaggcgcctcagctcgcttgtcccgtaggagcccggatcagcagggaggtggaccctcgtagtaattccaatcatggactctgccaagtgccctggctatagaataattattttatggttggctttagagtatactcaccctacacacacacttctccgtttcaaattgtatgcttttttaggtcatagatattattatgcatctagatacgtctagatgcataatatatctattaaccaag

SEQ ID NO: 43134 - DNA, 324 bp, Setaria italica
  Peptide Sequence Number=SeqID_109108
ttttaacaattcaacaaagttccaactgaaggggtgaaaaacatcttatacatcgtactttgtgcatgccaaccggcaatatggtgggcataccatattgtaccgtcagcacataaaagagcagtgcattcatcttccttgggaaccacctaacctagtatttacacatagccaattatatacagagaagcttctacacgaccctacactaggctaccacaccgactcaccgagatccaccgaacatctagttctcaggcagttcatgataatgaaaatggaagacagaagacctgccaccgagtgttcagcagccctgtgttc

SEQ ID NO: 43135 - DNA, 402 bp, Setaria italica
  Peptide Sequence Number=SeqID_109109
tctagtctagttgtttgtctacctagtcgttcctttgtttcttgtcccctattccctagtcgtaaggtcgttgtcttggcttcaggtatgaagtcagtcccgttgcttgccccagagtctgtgatcacgattgtcactccacttggggagcagtagtgaggatttgtgcacctaacctgttggcagtcacaaacaatcttagtttgatcaaaggagttatgtttcgtagtttacacaactactgctggcggaaatgaatttacctggtagcatgcaccacagcctaccccattcctgtatagacttgctgatgctgaaacatctccattgttgagcgttgccccaaatgcaccatattcacatgctccagctgaaaaatctttgttagaaacttaattgtcc

SEQ ID NO: 43136 - DNA, 724 bp, Setaria italica
  Peptide Sequence Number=SeqID_109110
ggctcttggaatatttcatcggatgctgcaggctggagttagacctgtgcctgtgactttctcaagcctcatacctatttgtggcaatttggcgtcgttgcgctttggaaagcagctgcacgcctatgtgatccagggtgggtttgaagataatgtgtttatatctagctccctgattgacatgtactgcaaatgtggggagattagcattgcccgttgcatctttgacaggatgccttcaccagacattgtatcacggactgcgatgatcatggggtatgcattgcatggtccagcaagagaggctctcgtgctgtttgagaaaatggaattgggaaatgtgaagcctaatcatatcacctttcttgcggttctcactgcatgcagtcatgctggattgctggataagggccggaagtatttcaatagtatgtcagagcagtatggaattgttcctactctagagcactgtgcagcttttgcagatatccttggccgtgcaggagagttagatgaagcatatagttttatatctaagatgcaaataaagccaactccatgtgtatggtccacattgttaagggcttgcagggtccataaaaataccttttagctgaggaagtagccaagaaaattatggagcttgaacctaggagcatcagttctcatgtaagttttatcaaatgtgtattcagtcttctgggagatggaatgaagcagcacg

SEQ ID NO: 43137 - DNA, 387 bp, Setaria italica
  Peptide Sequence Number=SeqID_109111
gactaatcatgcaaaataatgtattcctagagcaaatgagtgaaacttactaataattagccacatgggcttgacaagccagctgaatgtatatcggggtatataactgccataatcaaaagaaatcagtttgccatgcagccatgtgtgtaaaaccatgatgctaggatacatacaattgaaataggtgtcatctaaagaatgtcaataagtcctcacaaagttttttttcttaaggaacctaggattatgttgatctgttgttgtcagctaagatgactctgttcgcatcaagttgccattttcttggtgacactcaagttctcctggtcatgaaatgttcacacgccccccttgtttttcacattgatggttctcgacaatgaa

SEQ ID NO: 43138 - DNA, 430 bp, Setaria italica
  Peptide Sequence Number=SeqID_109112
agtcggtccatgactctgcaaggtaccaaaccaacaattcaggagtactgacatttgacaatcacggggtagagtatgccaagaaaacattattatggttaaataagcacatgtgagggtctccgtaaaaagcagagtgacagaggtcccaagcaactataacctgataaaaacgaatcagactggttgaacatgcttttggacaatttctgtgctcaactattcgtgaccgtatcttgttgttgatgacccaattaataaaagttgctgcaaaatgaataatgcaccattccagcttctaccgtagcattaaaaaaagtcagacacatcaagagctcacctcttaagaaaatccaaacttttctccactcctaagcgtccaacatacaatattagtggttttctggttctccattactgcttgaacaac

SEQ ID NO: 43139 - DNA, 1842 bp, Setaria italica
  misc_feature (1)..(70): n is a, c, g, or t
  Peptide Sequence Number=SeqID_109113
nnnnnnnnnnnnnnnnnnnnnnnnnnnnnnnnnnnnnnnnnnnnnnnnnnnnnnnnnnnnnnnnnnnnnnagttagtctaccaaagacagaatagtaggatgcaatgtagcaagcgaatgaagtagtacacgcgtatgtacgatttacaatcaaccagtcctaaacctaatggtgagtgatcatccattcaattgtactggaagctcgagcttccttcccatcaattgttgagcatcagacatccaatcgtcaacaccacagaagcagatgcaccgtccagaatgcttcctctctctctctctctgttttttttatggaaatgcttcctcttctatgattgcttgttttttaacattcttctatgattgcttcgcaacggcagccccaggcgttgtcggcctcaccagcttccggaccacccactgaacgggcctcagcagctgtgccctcttcttgcgccagaaccagatcgcagcgctgtactgctcattccggatcttcctcgtcgccgctcgccagtcgaacttctccatctccttcctggcagccctccccatcgtctctcgcaactcctcgcatgacaagagacgctcaatcttgctaacgcagtcatcaacatcccctggcgtgtacagaaagctggtcttcccttcctggtcctccggtataatatcaggtattcctccagctcgagcgccgactaccggaactcctgatgacatggcctcgagcaccacaaagccaagcgtctctgactctgaaggcatcacaaacacatccccactggcataggcctgcgatagctcttccccttgcaacgtacccgtgaacactgcaggcatacctgagaacatctgctcaagctcagccctgaatgggccatctccgataaacgcaattcttgatcctggaagtcggtccatgactctcttaagaaaatccaaacttttctccactcctaagcgtccaacatacaatattagtggtttttctggttctccattagttagccttgaacgcatttccttatttcggaagcgaggatggaagctttctgaatcaacacccttgttccaaaggcgtatcttattggctgctgtaacgcgggcagcttgaagatccctgccaatagcaactgatggtacaagtgtgagatcggcagctcggtgcaagaatttaataattagccacatgggcttgacaagccagctgaatgtatatcggggtatataaattgggacatgggtgtggtatgacattacaagagggacgcagagcagctttgcgataattagcgcaccaaataccataatcccaggggaagaggcatgaataatgtcaggcttgaatctagcaacttctccgatgattcgagggctcaacgccagcgagagcggaaccttttgataccaggggcaagggaagctccaggatccgattagcttggctccgtggaattcttgaggcacgccctcgtgcgtggtgaccacaatcacctcgtcgcccatctcccggaggtacttgatgaagttctggaagcggttcttgtagccggagacgtaggcgaagggcgagggctcgacgaagagggcgatgcggcggggcctggactcgtcctcgtgggcgggctcaggctccaggtccggatcgggcatcaagacggaggaggacgatgcggcggcgcacggaagggggcggcggagcatgcttcttaatcttaggggataccgcggggagaggcggggccacgaggaggaggggaaggccgttataggaagaggaggaggcggcctgggaacgacggcgcccgccgccgccatcctttgttgtgtcgctggctg

SEQ ID NO: 43140 - DNA, 326 bp, Setaria italica
  Peptide Sequence Number=SeqID_109114
tgatggaaggaattggtaccagctgtacggtagatggcatcctgcagtgagcaacctgtgaagcaaaatctcaagtagccaagagctgttgaatgctgatgtgtgctatccttggtatgcagggtaccctttttcagatgataggaccttaggtcttgttaatagcaggatatgtttctcagtctccctagttggctattggcatagacagaacgtggcttgcaccctgattcagaattgaaatgctgggcctttgatagtacatttttctggttagtacttgtaatggtggctgttgcttcggaaatcagaatgcggatgctgcc

SEQ ID NO: 43141 - DNA, 405 bp, Setaria italica
  Peptide Sequence Number=SeqID_109115
tttaattatctagaattcatatcttgcatgtgaaccacaaaatcacatatatgattcaaaggaaatgggtacttggtttcatccgtcatcattaaaacaacactagtacatgcccacactttcaatggccatgattgttccaaaggttattaacaaattattgggtcggacaaggcagcctaattggttcgtattccaaaattatgatagattacaagaaaacagaaacgtattgttcaattttcattgtgctcaaatagttagcagcatctcttcaataggccatcgtcagtatgattatataaaatatgcccttggagacattaaaggatatataaataggacagtagcagatttgtattgtaggctgcatccctatgaacaaaagtagaaaacttactagat

SEQ ID NO: 43142 - DNA, 861 bp, Setaria italica
  Peptide Sequence Number=SeqID_109116
gtccacttttgtgtatataggatgcaaaacgatttcatttaatacaatagggttcatgtgccaggagattcaaacaatacatttgtctaccatctgcacctgttaatgtccgcatcggtacacgtaacagagagtttccacatcacctgtccacactaagttttagtcatagcaaagtaaattaacctagacctattgaggcttgtcagctcagctgagctgatgctaagttttggattataatattacatctcatccaagaaaattgtaggtcatccatgctgtctacaaaaactgatagtttattttcagagtctttctccaccagatcataacacaatattgaaggaaatgcattatgagtttatccaacaagaccagcaaaacacaatagttttatttctgaaaatgttagcaccaataattatcgtttataaagcactcaccgagcagtagtcatcttggaccagatctaccccttttcctcttgcctgataaccctgacggggctgttcttttggcttgtttgtaaccatccgggctttgagactgcttctccaattgggggggccgcctcagtatcctggtcaggcaccatggaattatttatttcttcctccatacccctctggttcaccacctctggttcagctgtagctggtgctgttattgatgagaatggaatcacatcagcaatgtcgcaaagtgacgacccaccaagttcccctataacttctacacatgctctagtgaccctctcaacaaaagcaagacattcgcctctcgagcatcctttttgagcagctgcatccttcgtcaggacagtgagtttgtcggtcactgaatggatcaaatgagccc

SEQ ID NO: 43143 - DNA, 536 bp, Setaria italica
  Peptide Sequence Number=SeqID_109117
tcttttgcaagttccttggcaccaatgcagtccatggtacatataaatggctcatcgttctctcctaggccagcaataactggttgacagaagtatggcccaaaccttttctcatagaggagggccgaaacaaggctcgcaaaggtctcgggcttcatgtccctctcctccctcagctggtacagcttgtgcctgaacaccagcctctgatacagcgtctgggcgtcagtggcgagccccgagaggccgatgtagagcttgtcgtggaccttgaacacccgctggaagtcggtggcgatcgtctgcagctggacgccgaggcggcggtcgctggcgatcgcgaagcagttcttccccaccatggccaccacggcgctcccgttgtactcgaagatcgacatggctggcggcgatgtggtcagcggcggcggtggcgacgacggcgagaagggaggaggcggcgagttcggttgatttacgccggcggaaaaaaaaaacttgaagaaagagtgcggaagttagggtaccttttagta

SEQ ID NO: 43144 - DNA, 744 bp, Setaria italica
  Peptide Sequence Number=SeqID_109118
ggttactctggtgattctgccaagaatatattcctccagccagaatataagtatcgattcagtattccaccattaagctcaaatgcaccatgcatgaacggcacaagtctcgccaaacaaagatagtggggtaaagaaaacaaacgttccctctcagagaatgcaacatcaactgtcatgatacagtgttacttcagaatccaaacacaacactccggaggtaacattccggcatcaaagcatcggaaagcagctaagaattctatggtgctgatttagtccatcctgcccttcacaacatgttctctcacttcagtcggtgttacgatcacaacgtagcctccccacccgctaaggcagtcacggtctacagatgacatcagtgcttgagatacagtctcgaagagttcgtcaggttccatgtttggcttgtacatggattcacaagcaccatacaaagattctgatgctgtcccagaaacaacaaaatccttggctagttcctttgcaccaaggcagtccgtaggaagatacatcttcaatcagttcactagaacacagcagtgacagaggcataaaggcggagatgaacaagagatatcaaaatttggtggacaaacaaattatcatcaagcgaaacttcctccgattccaaacattgttttaggatttttagacttttagttggttggacttctttaacttgtccattactaaatacaaagttacatagattgacaaaaa

SEQ ID NO: 43145 - DNA, 1032 bp, Setaria italica
  Peptide Sequence Number=SeqID_109119
gaaactgccattccaagacacaacgcgtgcgccaaccaagcatgttaataacggaagtggcacaagctcatgcgactctaaactgcgtgtttgaaaacagaagcagatgtctgaagcatagagagatgaacaagcaactgctggatcttccatgctatggtctttgagaaggaaacatcgagcgcgggttttccgaattctgtaggcctggcaaggcgaatgacgaaacaatctcctacgcggctgcacggcagaggactcagtccatccttcccttcaccactctctcctgcacttcagtgggtgtgacaatgacaacataacctccccagccagcgaggcaatcacgatcaacagaagccatcaatgcttgtgatacagtctcgaagagttcgtcaggttccatgtttggcttgtacatggattcacaagcaccatacaaagattctgatgctgtcccagaaacaacaaaatccttggctagttcctttgcaccaaggcagtccatggtacaaataaacggctcgttgtcttctccaagtccagcaatgactggctggcacaaatatggcccaaatctcttctcgtaaaggagcgcagagacgaggctggcgaaggtctcgggcttcatgtccctctcctcccgcagctgatacagcttgtgcctaaacaccagccgctgatacagcgtctgggcgtctgtgccgagccccgagaggccgatgtagagcttgtcgtggatcttgaacacccgctggaagtcggtcgcgatggtctgcagctgcacgcccagccgccggtcgctggcgatcgcgaagcagttcttccccaccatcgccatcacggcggacccgttgtactcgaagatcgacatggccggagctgcggcgaggtcgcggaggagggtccggagggatgcgtcgccgtcgaggagaggagcggagcaggggtagtagcgatggagatgttcggtcgatggaggccgagttgggcttcttggtgagcaagaaggtccagcgatgccgaatcgcc

SEQ ID NO: 43146 - DNA, 338 bp, Setaria italica
  Peptide Sequence Number=SeqID_109120
ggttctcgctccagtccagtcctccttcttatcccccaagcaaagccggtcgggggaagcgaaacggggcccgtctctacctgcggacggactgcgtctcatcctcttgctctcagctcagtcccgcgatccagtgagcggcggcgcttgccgattgtcgtcgcgagtccagctaccggcgggatgggtgaggaagaccagaggaagcaggtggtgggttcggagcgggaccaagaactggagcggcggccaggggaggagggggaagaggaggaggccaagaaagccgcgcccggcgaggcggaggccggcgccggcgccggcgcggatgcgccgag

SEQ ID NO: 43147 - DNA, 620 bp, Setaria italica
  Peptide Sequence Number=SeqID_109121
aactctcgttctattggcatgaccgtcaattcacttaattcgagtttaaattgggcggttctcatatagccaatcgtcttatatgcttgcaactttagtggagcaccatcaacttccaactggccactgtggacgtcgtgacatgccctaccgctagtcgatgctgcccacctccacaccacgaccgctgtggatatcgccctgctatgtgacatgcaagctcacacgatgcacaatcatgatggcactgcccaccattcgccgtgcaccaagaaaccaccacgtcttcatgttgtcacaggagctcgagtgccttcacaataggttcgttgcacaggcaagctcggattctctagagaaacagttatatgcatttggaagcatttaggaacctttggctctcctgagagaatgtgtctgcatcctcggagtaatacctgcaggatgattacactgattccactagtgaacttcctttgagaattcctctgcttctttcactcctattcagcaagcacaatgagaaagatttagccttacaaaggatcagaaggaatcaatcagtgtcactgaagataattcatctttcctactttgttcaggttcactggagatatagg

SEQ ID NO: 43148 - DNA, 460 bp, Setaria italica
  Peptide Sequence Number=SeqID_109122
tccatgccgaggcatttgtgagaacgcaccgggttactatgaatgcaaatgtcctagtggttaccacagtgccgatccactgaatattccctgcaaccctaattctccacttgcagcaaaaattgtcacaggtggaatcagtggacttttcatcatagcaattgtggtgttcatctttcttcttggcaaagagaaacggaagatgaaagaattctttagaaagaatgggggccctataattgaaaaggttaataaaattaagctattcaaaagggaggagctagagccaatactaaaaacaagtaatcgtattggacaaggtggcttcggtgaggtttacatgggttatcttagagatgaaattcgaccggtagcagtcaagagcctaagattgatgttaaattggcaaaccaatttgcaaatgaagttatcatttcaatctcgagtcttgcataagaat

SEQ ID NO: 43149 - DNA, 470 bp, Setaria italica
  Peptide Sequence Number=SeqID_109123
cggtgtggaacgcggacggggaccatggcgccgccctcgttgacgtacgtcatcaagcccatcatcccgaagggttgaggtggaagatggtcttctcgtcgaggtacttctccgggatgatgggcttgatgacgtgctccttgaggtcggcggcgatctcgtcgttggtgacggtctcgtcgtgctgggtggagatgaggacggtgtggacgcggacggggaccatggcgccgccctcgttgacgtactcgacggtgaccatcttccacctcaacccttcgggccgcttcgtcatcggcgggccgcacggcgacgccggcctcaccggccgcaagatcatcatcgacacctacggcggctggggagcccacggcggtggtgccttctccggaaaggaccccaccaaggttgaccgcagcggcgcctacatcgccaggcgggcgaggccgctggccacgatgctcttggcc

SEQ ID NO: 43150 - DNA, 665 bp, Setaria italica
  Peptide Sequence Number=SeqID_109124
cggtgcgtgcattgtgaagcatgattagtatacagcagtagtggctgtgtgctaattgagtgattagtgtacagcgtgtggctgtgttagtggagatagctgcgtgagtgttcttggccgggttgtgcggctgagacgcagtttagtgcgtgtgtgtttgtgctgtgttaaaatcagtgtaaccaatgtgttgaactgtggtgaattttagtgcaaaagagggtgctggtgtgcagtgccacaaaagtagtctgtgtgttcctcacctgtgagtggctggtgtgatcttgggaggatgatgaagagaacgaagaagaaggtggcctgagcaagtctggcaaggaattaaaaaagctgcttgggcgcgctgctggactaaatgattcagatgctgacgaggatgaagaagaagaagatcaggaagacgagtcatctccagtgcttgctccaaaacagaaggatcaagttaaggatgaacctgtagataacagcccagctaaacaaacaccatcaggacatgctcgcagcacacctcctgcttccaaattcaagcaaaagagaaaatcaggtgctgatgatacaaaaacttctggtggtagacaagacttacaaaagaaaagacaaaaggtaggaaatacggaataacgaaaagacaatacgggaca

SEQ ID NO: 43151 - DNA, 712 bp, Setaria italica
  Peptide Sequence Number=SeqID_109125
caggggaggagtgtagtggtgtggtgttgatcagtttgcaagtgaagcaagttgatcagtgtgtgagtgaagcacggagtgcgtgcattgtgaagcatgattagtatacagcagtagtggctgtgtgctaattgagtgattagtgtacagcgtgtggctgtgttagtggagatagctgcgtgagtgttcttggccgggttgtgcggctgagacgcagtttagtgcgtgtgtgtttgtgctgtgttaaaatcagtgtaaccaatgtgttgaactgtggtgaattttagtgcaaaagagggtgctggtgtgcagtgccacaaaagtagtctgtgtgttcctcacctgtgagtggctggtgtgatcttgggaggtgctagaggctaacagtttctcattttcttttccatggttattgaatttcaattgcaaatggcaatattctgattgagatacttgcaggatgatgaagagaacgaagaagaaggtggcctgagcaagtctggcaaggaattaaaaaagctgcttgggcgcgctgctggactaaatgattcagatgctgacgaggatgaagaagaagaagatcaggaagacgagtcatctccagtgcttgctcaaaacagaaggatcaagttaaggatgaacctgtagataacagcccagctaaacaaacaccatcaggacatgctcgcagcacacctcctgctcccaaatt

SEQ ID NO: 43152 - DNA, 864 bp, Setaria italica
  Peptide Sequence Number=SeqID_109126
ttcgatttggatgatgaaattgagaaaggtgatgactgggagcatgagaaacattcacagatgatgatgaggctgtagatatcgatccagaggaacgggcggatttagctcctgaaattcctgctccacctgaaattaagcaggatgatgaagagaacgaagaagaaggtggcctgagcaagtctggcaaggaattaaaaaagctgcttgggcgcgctgctggactaaatgattcagatgctgacgaggatgaagaagaagaagatgaagacgagtcatctccagtgcttgctccaaaacagaaggatcaagttaaggatgaacctgtagataacagcccagctaaacaaacaccatcaggacatgctcgcagcacacctcctgcttccaaattcaagcaaaagagaaaatcaggtgctgatgatacaaaaacttctggtggtgcagcttcaaagaaagcaaaggatacgaaagcatcgggcattaaagaggaagcaccagcttcggcaaaacctacatcaaagacctctgctttatcaaaaagtgggacaaatgtgtcacctgtcacagaggatgaaatcaggagtgttcttcttgctgtggctccagtaaccacacaagatctagtatccagattcaagtctaggcttcgaggtccagaggacaagaatgcttttgctgaaattctgaagaaaatctcgaagatacagaagacgaatggccacaactacgtcgtccttagagatgataagaagtgaagaaccaacttaggtgttgacttcgtttgttgcaaccggtagctgtgctgtgtacttcggatataaagatatttgtaacatgctgcactttggagataaataaggt

SEQ ID NO: 43153 - DNA, 1241 bp, Setaria italica
  Peptide Sequence Number=SeqID_109127
acagggggctcgggaacgccgatggcgtaggacacctgcacgaggcagcggcgggcgaggccgctggccacgatgctcttggccgcctgcctggcgatgtaggcgccgctgcggttcaacctttggttggggttccttttccggtagtaaggtcaccaccgccgtgggctccccagccgccgtaggtgtcgatgatgatcttgcggccggtgaggccggcgtcgccgtgcggcccgccgatgacgaagcggcccgaagggttgaggtggaagatggtcttctcgtcgaggtacttctcaaggagcacgtcatcaagcccatcatcccggagaagtacctcgacgagaagaccatcttccacctcaacccttcgggccgcttcgtcatcggcgggccgcacggcgacgccggcctcaccggccgcaagatcatcatcgacacctacggcggctggggagcccacggcggtggtgccttctccggaaaggaccccaccaaggttgaccgcagcggcgcctacatcgccaggcaggcggccaagagcatcgtggccagcggcctcgcccgccgctgcctcgtgcaggtgtcctacgccatcggcgttcccgagcccctgtcggtgttcgtcgactcgtacggcaccggcaagatccccgacaaggagatcctcaagatcgtgaaggagaacttcgacttctaggtcccgggtattgtatcaccatcaacctcgacctcaagaagggcggcaacaggttcatcaagaccgcggcctacggtcacttcgggcgcgacgacaccgacttcacctgggaggtggtgaagcccctcaagttcgacaaggcgtccgcttagagaagaagagtgtccgtctccgtgcttatcatctacctcttgctgctgatgttacccgcaagcactgctgctgctgctgctcctgctcgtggatgtgtgtctgatcagtgagtgactggctgcttccttagaagaagaagaagatgcagaagaagataagaaggctttggcaattgctgcagcaaagccatgtcgccgcccggcggcttagtgattggtataatttggtgtggcagccaggattacgcgctggtctttacctgtactagtttggtcgtccggtatcttttcctcttttgtttctccccctttttcgagtctgtactaccgaaactgccgagagatttgcagttttgatctatcataattcctgtgttactgctgtcaaa

SEQ ID NO: 43154 - DNA, 1163 bp, Setaria italica
  Peptide Sequence Number=SeqID_109128
aattgtacgcgacacctgccgcgagatcggcttcacctccgacgacgtcggcctcgacgccgaccgctgcaaggtgctcgtcaacatcgagcagcagtcccccgaccatcgcgcagggcgtgcacggccacttcaccaagcgccccgaggagattggcgccggcgaccaaggccacatgttcggctacgccaccgacgagacccccgagctcatgccgctcagccacgtcctcgctaccaagctcggcgcgcgcctcaccgaggtccgcaagaacggcacctgcgcctggctcaggcccgacggcaagacccaggtcaccgtcgagtacgtcaacgagggcggcgccatcggtccccgtccgcgtccacaccgtcctcatctccacccagcacgacgagaccgtcaccaacgacgagatcgccgccgacctcaaggagcacgtcatcaagcccatcatccccggagaagtacctcgacgagaagaccatcttccacctcaacccttcgggccgcttcgtcatcggcgggccgcacggcgacgccggcctcaccggccgcaagatcatcatcgacacctacggcggctggggagcccacggcggtggtgccttctccggaaaggaccccaccaaggttgaccgcagcggcgcctacatcgccaggcaggcggccaagagcatcgtggccagcggcctcgcccgccgctgcctcgtgcaggtgtcctacgccatcggcgttcccgagcccctgtcggtgttcgtcgactcgtacggcaccggcaagatccccgacaaggagatcctcaagatcgtgaaggagaacttcgacttcaggcccgggatgatcaccatcaacctcgacctcaagaagggcggcaacaggttcatcaagaccgcggcctacggtcacttcgggcgcgacgacaccgacttcacctgggaggtggtgaagcccctcaagttcgacaaggcgtccgcttagagaagaagagtgtccgtctccgtgcttatcatctacctcttgctgctggactaaatgattcagatgctgacgaggatgaagaagaagaagatcaggaagacgagtcatctccagtgcttgctccaaaacagaaggatcaagttaaggatgaaccttgttagtattaactagtccctagtct

SEQ ID NO: 43155 - DNA, 1130 bp, Setaria italica
  misc_feature (1)..(49): n is a, c, g, or t
  Peptide Sequence Number=SeqID_109129
nnnnnnnnnnnnnnnnnnnnnnnnnnnnnnnnnnnnnnnnnnnnnnnnnaaaggcaggggaaacaaagatgtatgtgatttcagcggtttgcggcaaagccttatagtacaataaatgatgttagtgggttctacaaggttgaatgatcaccaagaattacggtacacagcaattttcacatgtaaacaaccaaattctggggattcagggaaaatcgctgcctccctaacatgaacccaacagcatcaacctcgagtcttgtaaccacgcttcacgagaaatttaacttacagtagattcatacaatattggtcgtttttgtttcttctggctctttgcaaccatgactgacatgacggagtttatagtatagtgcagcattgatttgtcttctttgcttgtttgtagaacatctgcgaagcagcactcagatcggagcttttctcaaccaagctatccagtctctctcctctctcaaggacactctcaatagttttatgtaggatgatctttgtttcatccaagtccctctggattttcattaatttgtcagcttctgcagggtcctgaaattttgtcaaagcatctgtcaggaaaggccactgttgagttccatctgcagtagcagatttccaagagtccccaaaatccttctggtactcatcaagaaccttattcagaagagaaaatgcacttcgtacaggatagtgatcatccatgaatgccaccgcacaaagaccatttctgttgtgtgagtggaccttgtactcttcgtgctggacggactgccgctggccgggctgggtacgctgcgcgacggttcgggcgacgaagacgatgaactcgcgggcggcgctgcgctggaagtagccgaagtggctcacgtccgtcgcgttcgcgagcaccaccgcctccgggcccgacccgccgccggacgaggagcttccggcgcccgaggtcgacggcttcaccaccaggagcgcggtaatcttcatctcgtaacgcacagatctacaccgctcgcagtctcctggctgcgccgcgacggctggatggacggagatcgcagacgaggacgaatagaagcaagcgccactttcccctccccctagattcctgagacacgcaa

SEQ ID NO: 43156 - DNA, 318 bp, Setaria italica
  Peptide Sequence Number=SeqID_109130
tcgagcggcgaggcacagccgcgccacagcggcatagcccgacgagataccgatgtcccacgtctgtccccgctccggcccgccgctagcgctcgccggccgtcaccgccgccgcccgcatggggcccgagccgtcgcgcccaaatgtgaggcccacccctcccatcctccgctcccgacccggagggccgtatccgctgccacgctgctcctcgccgccctccccttccccgcctcgtcggcgcaactcgaggcggaggcgacggcggaaggacaaggagaaagtggagttccagatgggctagaactggagcgcta

SEQ ID NO: 43157 - DNA, 394 bp, Setaria italica
  Peptide Sequence Number=SeqID_109131
caattgtatgtagtcacaagaaaaagaacatttacataccattttgcgcaatctagttctctaataagtgtacaacaagaaaaatgaaggacgcagacttgagttcagctatccaatattcacaacaatcacatgcggcaatgtaggttccaggtaagaataggctactgcagtactttctaaaattttaaatatatgaagtcgtcaaataaataaatatatatatgaaagcaagtagtaaaaatgcaaagaaaaataaaatggtggcccatacttggataattattaactgaacattatagatgcatgaactaaaacaggatgaaatatgtcaaagcacactagctttttttagcatgactctgatatatcttttacacactcacccctagca

SEQ ID NO: 43158 - DNA, 511 bp, Setaria italica
  Peptide Sequence Number=SeqID_109132
tttcataaatctgctgaatcaactctgactatgatcctgatggggcatctgcaacgatcctctacgatcagacagtaggagcttgcgccccatgttcttgagttcaggactggcagtctcaggtggctcactggaaaccactccttccttcagggaagctagtgatgaatcatccattcttgcgccggcatcgccattgtcgccggcgggcgtaatcttcttgaccgcaacaaaagcctcagcaaaccgacgggtgtagatgacgcagtagttctgcggcaagctgaacgcgctcaacgtgtcaattgggatggcaaggatgccgccatgcttgagcacccgatcggcgaaggcgaacctgtcgccgtcctcgtcgaagtacccgaaatccagcaggaagtctaccgacgagtcccctagcatcagcatccgccgcagcgaggcgggtcgcaggacgccgtcctggtcctgcttcggaggcgcgtcgcagttgccgtcggagccaaggacg

SEQ ID NO: 43159 - DNA, 343 bp, Setaria italica
  Peptide Sequence Number=SeqID_109133
taaaggaaaacaaggaacaaaaactcttcgctcgcggctcgcccaccaaatcccggagcagagcacactgataaaactacacttccaccgatccctcgctttcttcgaaattaagcatatattccagcagtttccatcaatccatccaaaatttgctccagtacaccgtgtaggagtcccgttttccttgacgagcgatagctgcagcggttgggggtggtggcgatggagtgcccaccacctgttcgacgggaggacggcgaaattgattgggccgaggcggcgaggaaatacctcgacgtggtctcctcgggccacggagggggcggcggtgagggccaag

SEQ ID NO: 43160 - DNA, 869 bp, Setaria italica
  Peptide Sequence Number=SeqID_109134
gccccgcccgaggactgacgacgaccagccgatccctgctctgcctcctccgccgcgcccccacaaggacaagaaggaaaagatcgccacggccaagaagcgccgccgggcggagcgcgctgcggaggccgacggggagcgcaccagcaggaccgacgtcaccgtcatcgacaccagtatcgacggctggaaagccgccaaagtgcttatccgcaggggcgacatctggaaggtccgcgacaagaagccctccgcggtgtctgaattggaggatgccatcgccaagggcaagaggagggctggccttgtctccaagctgcaaagagataaggagaaggagaagcttaaggagaaagaagcaacaacatcaggatacattcaagctggtagtggagatgtgacaaaagaatcagatgactccgacaaggtgttagttgttcaccagagccagaaggccaaatagaggcaagaaaaatgggtcaagacagcccaataggtgacttgagagggaattgggaacaagacatggacaacattgtcattacattgcaattaacatattcagtttgattaatgtcctattgatcctttttttgtgtcttgatctcatcctattagaaatttgaaattccaatcgcgaacatgggatgttctggagctggtaggatataatgtttatagatgaaccctcgcgagttttccattttcccccttttgtagagaaatgtcatggtcatcaaaatgttattgttggctgttgttggagttgatgggcgtctgattcaattggtctgtttgcgtgtactgcaacttggttgggtactgtaaatgtaatgttcatattggttgctcagttgctagtaaaaaaa

SEQ ID NO: 43161 - DNA, 717 bp, Setaria italica
  Peptide Sequence Number=SeqID_109135
tatttgttatttcggtttaaacccccctacttgtttaattgttgtattctaaaagggctgccgaatcttggaaacacatgcttcttcaatgcagtgctgcagaacctccttgcgcttgatagcttgcgcaggaagatgttaggaccagatgttcctacaggggcccttgctatgtcattgaagaagctctttgcagagacaagtgcttcaaatcatgcaggaggcgcgcttagccctaagaacctcttctcaagcatttgctcaaaatatccgcagtttagaggctaccagatgcaggatagccatgaattactccgctgtttcttgatggtttacgtacagaggaaactgaagcacggaagctagcagaggaagcttcagatgcaggggttcccacaattgtcgactccatctttgggggtctgctgtctagtactgtgtccagcacagaatgctcacacagttctgttaaacatgatcaattccttgatctctcactcccagttccatcaaggaggcctcctaccaagagtgtttcatccccacccgcaaagaggaccaaacagtccatacgagataggaacaaaagtcgcagatatgggaagattcctgctcgagcatctccatcagtggagagtaacaaagaaaagattcaaacaattgctgagcgcaacaattcccaaattcctggttcagaactcgaacaggtagtcagcg

SEQ ID NO: 43162 - DNA, 371 bp, Setaria italica
  Peptide Sequence Number=SeqID_109136
ctgtatgcaggcttgtaactttcagttaagctcaccaatgtctctttggttagagccatggctgccatctgctggattccaggtcgcaacgcatagtggttacctttcagggggaccgggactatccaggctgaaatgtagagtacagtgctctcagctgtggcactctactagtccagttgataatcagaaagagaaggacagatattcttgcatcgatcaatcaacatcgtatctgcatgtacaatctcttaggaactttccgactgaaaaactttgtggagaagtggttgtggtgcgtcttgattctgcacttctcttgggacacttaggaccatgcactttcgctcttgaaagagcattgctaacta

SEQ ID NO: 43163 - DNA, 339 bp, Setaria italica
  Peptide Sequence Number=SeqID_109137
ttacccgacaaatactagttgccaatactaggaaagccacaacaattaaggttctttaagtatttagattaaataaacaagaacaaagctgatttaggtgtggaagtgctgtgttcttataacgcaacaaaattaatcttttctgaaaagaaacaataaatgcttttaacaagacaaaaaatggcatagatctctttgttcatcaaaatagaaatgaacctataagtttcccttaattaacaaaaagaggatcatagcagcgagaaatgcagagttgctgacctagcatgcacaaacagagatcagaaatgtagtcttcactgcccgattggtcatcta

SEQ ID NO: 43164 - DNA, 425 bp, Setaria italica
  misc_feature (370)..(425): n is a, c, g, or t
  Peptide Sequence Number=SeqID_109138
tgcgaggcaagatcgggctagccaacaaggtttacgcgaagatgcgaggcattgggctggtgcctgatggcaagacgagggcgttcatgcttcagcacattgcaacggactgacactggactgaatgggatggactgctgtgcacagtttcagatatctgcacaaatgctccgatttgtaatatttgttcgatgattctactgcttccctcggtatcgcctgcctgagcttctctgcacaatctcgcggggatgagttcctttgtgcgtgcccgctgcccccttcgcgccggaacgatacggagctacgagcaccgtgactaagaaatgaacacgctaatcggcagaaaaaaaagtgcgctggcctgttnnnnnnnnnnnnnnnnnnnnnnnnnnnnnnnnnnnnnnnnnnnnnnnnnnnnnnnn

SEQ ID NO: 43165 - DNA, 641 bp, Setaria italica
  Peptide Sequence Number=SeqID_109139
ccagcgccagtcttccgcttcgcacaagccaaacgctcgatcgatcgctagttttttttttttggtttctctacgcgcgctcccacagcaggtttttgtcgcagcgcagcgtaggcacccgaccgagtacgtcgatggcggcgcacgggcgggcgatgaggtgcgtgctcctggcgtgcctggtggcggcctcggcgtcgtccaccgcgtccgcgttcgtgttcaaggcgggcggcacgggcgagtggcgcgtccccgcgcagcccgccggcgccaacgcctccaacgcctacaacgcctgggcgcagcgcaaccgcttccgcgtcggggacgccatcgctttcacgtaccagcccggcaacgactcggtgctcctcgtcgacaggaaagcctacgacgcctgcgacacgggcgcgccgatggacaccttcaccgacggcaacaccgtcttcaccttcacccactccgggcccttctacttcatcagcggcaacaaggacaactgcaaccgcgacgagaagctcatcgtcgtcgtcatgggcgagcgcgcggccgtcgccaacgccacccagccgggcgcggggctggcgccgtcgcccaacagcggaccatactcggcctactccccgccgccgctttcg

SEQ ID NO: 43166 - DNA, 393 bp, Setaria italica
  Peptide Sequence Number=SeqID_109140
taaatttagcaagagtgtcactcgcggcaacttttcggcttgccaagagcacatatctcctatgtacgaaacattaaggaaggactacctctcttcctattcaattatgatgatcgcaaattgtatggcatctatgaagctgctggcaatggtaagttctgtcctgaatcaaatgcatggtcaaatgatggccagggaaagacaagctatcctgcccaggttgcaatgcgggtaagggtgtggtgtttcccgctagcagagaatcagttcagaaatgctattgtagccaactactatcagaagaacacgcccagtatccctggccagaagcttcattatttccagtttgaattggatcatgctcaaacacgtgttttgatggatatgtttact

SEQ ID NO: 43167 - DNA, 535 bp, Setaria italica
  misc_feature (62)..(62): n is a, c, g, or t
  Peptide Sequence Number=SeqID_109141
gatgcctctctaatcttgctttatgtcttaaagctgactcaacctcaaccactctgttgacngaatctgggtttctgctgaaattactggaagccgccctctgaaactgtgactcctgtcgaatatcctgcatccagaatcaggatttatatctagtcagcagttctctaaaaaaaagagaaagaaaaagaaaacaatgttgcatagtatcgtctgaatttcttaaactctgtcacacaatgtaccatactaacagaaaacacctacccgattggacttaaaaccctccttgaaagacggatctgtaccgttccctccgttctcttgcttctgcaagagccttctcagcctttgccttttcgattgcccgctcccgagcttctgcagttgctcgctcaactgccgcacgttctgcttttatcctagcttctctagcagccctttcagcagctgcttcagcacttgctgagaagaacatgcgggatgtgctagctcaaagggagcaagcagagaaacataggttgtcagatttccc

SEQ ID NO: 43168 - DNA, 242 bp, Setaria italica
  Peptide Sequence Number=SeqID_109142
aaaacttgttccaagcatccttaagaagatcaaaaaccttctcacagatgtatttctgtctgattgtagcacccctttgttgtaatttatctggatggacacagagggttgccttcctgtaagctttcttcacagcaacagctgtaatgagatctgtaagtggcaccggttgccagccactatcagcaccaagaatatattgcaatgtggacacaatagcttcagacttcatcaggcttaag

SEQ ID NO: 43169 - DNA, 220 bp, Setaria italica
  Peptide Sequence Number=SeqID_109143
caagcaaaatggaagaaaaagacactgcagcaaggatatcaaagggtcatggtgaagcagagaatgtggaagaaggaatggggtttcgtctgcttctttatcattaacatcagagacgagtccatccattccttcttccacattctctgcttcaccatgacccattgatccatgcacttcttgatccagttctcttttaatcaaattgctagctacctca

SEQ ID NO: 43170 - DNA, 1988 bp, Setaria italica
  Peptide Sequence Number=SeqID_109144
gtttcagcttcctgctcaattttactcggtcttggtctcgggaaagtatcacatacatcagattctttaagttcttctaaaatcaatgatttgatgttgcttccctgggaaactgcagcattaggcacatctgagggttcctgtaatttttcattacttccagaagtgcattgcatcccaccattgcatggtacttctagtaccagtttactgtttgtgtcctgtgatgttcctgctactggacttacctttggaatactattaccaaggtctctaaaatcgctggcatttcctgatgagcaaggctctggtaatgaaccccgcatatccttgatgacatccagctttgtggaggcatcacttgtagaaggaagctccagacactcatcagtatcatggctttccttagcaacttccggtgttacaagtccctcactaattgaattattagtttcttggtgtgccatattttccatagaagcttctaaaatcacggatgccctatctttgtccactggaaccgtcttgccctctcgcagatctacatgcttcacccccagattcctgccatcattaacctcccaaagtttttcataccttgccaagtcagaatccgctgcactgagttcagtttcactgtgatcattgatgacactagtaatgggattcatttgctcacatttatcatcctcccttctggcttcatcagttttgcatttctgatcatctccagttagctcaaaaaagtcattaccggacttccacttgcctaatttctctagtttactggaaatttgacaggactcagtggagcgttgcatcatcttctgaggcttctccagcggaaataccttttttccattgtcatcaaaatgataaaatctatccacacttagttttttatgcttgtcagacaaagaatcatcatggttcttttcttcttccgatgactttttcactgatagtatttgttcggaagtatctacctctacggatactggagccttgatttctgtagaccttgtgcttctatggtgacttggcttcttccgcaatttaaaactgtcaccttttatctctaacaattcttttgcagcctttaacctagcttcagcaaaatccattgcctccttcatagctgctgaagcagaagtgggattggcaccagctttcttgtcagcatgaggcatgttgctacttgaactgttatgtgcagcagcagttggagtgtgactgtgatttacaagattgatgccccctttagctgcactttctctcttgtttatcagtttaggttgctgcctcaacagtggctgtactttgactgactgtgcctgtgcatcagtgtcagatccccgaagaaatgcataatcgggtgtcacagtactgcgtgttgaatgactatcagaggtcttgtggttttcatttgcagaaacatttccagaaataggtgtccacgatgcacttggctgcttctgatcaactataaaatcactctcaggactcctcacactcgcactaacagagcttgggttcttgtcactatcgtcattggccattgtgccattgtcagttcttgaaacatgatttgttgctggaccatgcgacaaattgcgtgaatcaatcacaaagtccatcgaaggttcaactgtgcaggtcggcatctcaatcagatcatcaggtctcctctcagtagtcttgttatatgacataacaaactgctgactttctgtctctggagagaaggatattggagaaaacttatggtctttgaaatgatgatgatgatccagaatttgataatgttgaggaagtgcaggaggctcatcctccagctggctgaaatccttttttatcgatgatctggagctcccgctggacggcgacgcgatctccggctccttctcctctggctcggcgcccggcccaccgaagaggtcctcgtacggcagcgcgaagtcggcgaagtcgaagcggccgaagatctg

SEQ ID NO: 43171 - DNA, 2492 bp, Setaria italica
  Peptide Sequence Number=SeqID_109145
caaaaaaaagataatatttggatatataaataccgaaccaattttctgtccctacaaaagaataatcaaccgcctattttccccgctagcgctcttcagaattgtacttattccaagcttccttcagaagatcaaacaccttctcacaaatgtatttctgtctgattgtagcacccctttgttgtactttatctggatggacacaaagggttgccttcctgtatgccttcttgacaccagcagctgtaataagctctgtgaggggaactggctgccaaccactgtctgaaccaagtatatattgcaatgtggacagcaatgctcgcaggtttccttcttttccatttgaccatctcttgacttcaggatcaaggaattcagccaatctatgtttctctgcctgctccctctgagccagcatgtcccgcatgttcttttcagcaagggcttttgccgctcgctcagctgtgcgttgatgcctctccgattttgctttatgtcttagagctgactcaacttcaactacttcaatatctttgctttttccgtggttatttgaagccgtcttctgaaattgtacctcgtgttgattatcctgattaggtgccttaaaactgtccttgaaagagcccctgaacctctccattctctccttcgcatctgcggcagcctttgccttttcaattgccctctcccgagcttcagcagttgctctctcaactgctgcacgctctgctttcattctagcttctcttgaagccttttcaagagctgcttgacaggttgtcttttcttctttctcatgagcttctgcggatgctcgttgtcgtgctgaggtaatccgttctaatgctattctttcagccttggcacgaacctcagcaaatgccctttcatgtgcttctctagtagccctctgaacagcaagtctatctttcgctcgttccatttcccgttccttctcttcttctaactctcttctctgtctctctttatcttgttctttttctttttccagtttgcgcaccttttctttctcttcatcaagccttgtgaggacctccttctcaatttctccagtctcttttacgtcattcctcactttagttctctgaacaccaatgttctcttctcttgattctagtacagtttctgatgcagtatcttctgcaaccttatctctttcttccactttgcttccagtattttgcccctcttctaatgttgtaattttttcagttggaatttttctatctgcttccctgcaatccacttcaagatttttaagaaaatcgtccttctcagcagaaacagactcagtattttgagacaagtgcttcatgctagtgcatgcttctgaaaatgaagcctgcagattatttgacaatgtgcccatcttcatggcataatcagcgccttcatcggtgataaattcatgaacagaatcaaattgatcatcatctgtgtcactccttacattaacttcttcatatacaccatccgctcttctgtaaacacaagtttccatggatttctggccttccttaccatcatggcttagtacttcttccaccagtatcttgtcaacattctctagcaaggatttttgcacctctctttcctcaccatgagatacgatatcctcaactctgtccattctgttctccaaatcttggggtccccatgacccttgtgattcttggaactgatatggatcttcgtcacaagtaccacatgttctcacattggattccaccaattttccttctcccaaaaatgcatcaacttctgcttcttcatattcgctttcattagcaatagcacttcccgaagtaagataaccttcctcttcaggagatccagatacctgatccacatcgccctcttgaaaatatccacgtgcatcttcgttctcctcaatcccatgttttgtcatctcttcatggatgagtgattctgaagttacttcatttactctttcatttttgttctgtaggcatgcttcatcaacaaaattgaatagcatttctttctcaaaaatttcatatggtttggcagactcttctaattttgatattttcactaaaccttccttgatttcgtcagtattaggaacatttgcaggttcctgtaaaacctgactccttgctgaagtacaagagaattcatcagtgcatggaagctcgagtccctctttattgttgttgccttggttagagttccctaccaatggagtttcctgagccgtgaagtcagaattatttttgttaccattggcatgccctccagataaacaaggctccaaaaaggaacaggacatttccaggtcagcatggacctctgcaggtaaactattcatgcatgaaatctcaaactgcccatcattaccgtggccttcattcccaacccctgaacattgtttcaaatgggaatcagttggctcttgctttggtaatagtacaaccctttacaatacaacaaaaaaggaaata

SEQ ID NO: 43172 - DNA, 2642 bp, Setaria italica
  misc_feature (1)..(96): n is a, c, g, or t
  Peptide Sequence Number=SeqID_109146
nnnnnnnnnnnnnnnnnnnnnnnnnnnnnnnnnnnnnnnnnnnnnnnnnnnnnnnnnnnnnnnnnnnnnnnnnnnnnnnnnnnnnnnnnnnnnnnnttttttttttaaggaagagcaatgaagctcttctactgaaccgattttagttaacaggtaatagcctgcggcattggcgctgtttctgacatggatatctagagctagaactgcatatttacatcaatattgaatgaagaaactaaccatatagctatataaatactaatgaatctcctgcctcaaaagaaaccgctgcttagctttcatcctagcgctcctccgaagtgaacttgttccaagcatccttaagaagatcaaaaaccttctcacagatgtatttctgtctgattgtagcacccctttgttgtaatttatctggatggacacagagggttgccttcctgtaagctttcttcacagcaacagctgtaatgagatctgtaagtggcaccggttgccagccactatcagcaccaagaatatattgcaatgtggacagcaaggccctcagatttccctcctttccatttgaccatctcttgatctcaggatccaggaactcagacaacctatgtttctctgcttgctccctttgagctagcacatcccgcatgttcttctcagcaagtgcctttgtcacacgctcagctgtgcgttgatgcctctctaatcttgctttatgtcttaaagctgactcaacctcaaccactctgttgacagaatctgggtttctgctgaaattactggaagccgccctctgaaactgtgactcctgtcgaatatcccgattggacttaaaaccctccttgaaagaggatctgtaccgttccctccgttctcttgcttctgcaagagccttctcagcctttgccttttcgattgcccgctcccgagcttctgcagttgctcgctcaactgccgcacgttctgcttttatcctagcttctctagcagccctttcagcagctgcttcagcacttgctctctcttctttctctctggcctctgcagatgcccgttgtcgtgcagcagtaattctttccaaagccattttttctgccatttcgcgagcttcagcaaatgctctctcatgcgcttctcttgtcgctctttcaacagcaagtctatctttttttcgttccctctccctttcctcctcttccaatttccgtctttccttctcttcagcaagttctctttctttctgcaatctcctttcactttcttttgcttcttgcgtttttcgagaagaccaattgtccttttcaaatgcactatctgctcttgttatattttccctctctttggccctctgaactccaagtgagtcttttttccatgtctcagcagaagctggtgaggcatgcgtcgtctcaaagggagatggcccatgctctgcctttgatatccttgctgcagtgtctttttcttccattttgcttgccctgctcttctcttcacatgtagacctttctgttggtaattctctttctccactgttcgaaatctctccagtttctccaagactaggaacagtacaagatgtctgagatgtagcagagtcatctttttgcatcgagtgctgcatgcgagtatacatttctgaagagggagcctgttcatccttcgaattaatagttgttctggtggcactgtcacttgcagctttgatggcaacttcatctcctgaaaaggattcagatccaacttcatcacaagttgtatcgcactttgcatccacatcactttgtcctctgttggtactttcaggtgacttctggtcctcccagttacaaggatcagatccttcttcactacctgtcttgtcagtattttctaatggggtttcgtctgcttctttatcattaacatcagagacgagtccatccattccttcttccacattctctgcttcaccatgacccattgatccatgcacttcttgatccagttctcttttaatcaaattgctagctacctcaaatacattcagcatgtttgattcttctcggtctgccaaattatcattttgtaaaataatatcattctcatcttcaggacactcagcatccagatccacaactgtttcttcagggagtgtatatggactaaccttctcctcaatttcgactttgtctacttcctcaaagagcacttcatttatcttagcacctttattatgcaagagcgatccatcaataaaactgaatttttctcttccataagtttcagcttcctgctcaattttactcggtcttggtctcgggaaagtatcacatacatcagattctttaagttcttctaaaatcaatgatttgatgttgcttccctgggaaactgcagcattaggcacatctgagggttcctgtaattttcattacttccagaagtgcattgcatccaccatagaccaatttacgacgaagacttacaagacaaaatagactactacattgagacgacgcatgcctcaccagcttctgctgagacatggaaaaagactcacttggagttcagagggccaaagagagggaaaatataacaagagcagatagtgcatttgaaaaggacaattggtcttctcgaaaacgcaagaagcaaag

SEQ ID NO: 43173 - DNA, 505 bp, Setaria italica
  Peptide Sequence Number=SeqID_109147
aacatttctcaactttcacctctcatcttctctctccttcaccctacataccccccatcttcttcctcgacagcaaccacattctccttctctctcctccatcctccctactattatttattgaaggctgcttattgatggtatcttaattcttttttccctcttcttcttcttcccttcttccttctctagcaggagtacatttttttgccagccttccttcctgcagtactagtgctccctccccttcttcttctctggctacttcctctcctcctccccccttctttcccttcttttccctctcctcctttcctcctccactctctatctctctgaggtccgcatctctcctctttccagttgtcctcgcctcccatctttttcacctgtccctcatgtactgatcgtctcatcacctccattcccccacgtggtaacacggggcgacgcgcacgagtgcgcgtgtgcgggagcaggagctcttagcatgcactagtctagt

SEQ ID NO: 43174 - DNA, 327 bp, Setaria italica
  Peptide Sequence Number=SeqID_109148
gctgaggtccagcgtctccatctgcgtgagcttcgcgaaggatggcggcaggtcgccgtcgagaccgttgttgaagagcaccagaaacctgaggttggacaaatcgccaatgcagtcaggaagcgcgccggtgaggttgttgttcaccgcgccgaacgcccacatcgccgagcagttgcagaggcggccggggatgccgccgtggagcgtgttgttgccgaggtccagtagctgcaggctcctcaggtcgccgagctccggcgggatgccgccggtgaagttgttgtcgtacagctcgagcagctcgtgctgtacgacaacaacttc

SEQ ID NO: 43175 - DNA, 392 bp, Setaria italica
  Peptide Sequence Number=SeqID_109149
tttttttttttctagtagtcattatttcagttcggtccgtatccgagcatctcagaaatcaatctcagaagagtaacaatacagacatgccatgaaggcggctgttgctacaaacactggttcctacagctcaaggatcctcacagtaattctctgcagctgtaccgggcataaagttctgatgataatgctgagcattcctctaattcgatcagagctgtgccactgtgcaaccatatagagtcgtgaaacaacaggatgacgaaaacatcaacaaaacttccactcctcacactggtaaacaatgatatgctacactccacttatttttcattgggtcttggaataggcttgtagtcgtagctgtttatgtctaaccttttgtttgtcta

SEQ ID NO: 43176 - DNA, 327 bp, Setaria italica
  misc_feature (312)..(312): n is a, c, g, or t
  Peptide Sequence Number=SeqID_109150
acgaacatcgtccggcagggttattgggtgtacacatgtacaaattattgggtgatttacctatactgggtccgcccctgcagcggttgccttattgatggacctagctgggtagaaatggatagcagtcaagattcccaagaagagaggcaccaaagaagggagaatggtgaagaaacagaaaaggcagctgattatgggagtgctttgagccgcaaggaggcaacagaagagctccttggttgcatagtccatagtgaggaagaggcatacagactgtactgcgactatgggcatcggatcggttttagngtgcgaaagggcaag

SEQ ID NO: 43177 - DNA, 501 bp, Setaria italica
  Peptide Sequence Number=SeqID_109151
ccccttcttaagatccgatttgcccccaagtcgatgaaataaaatcttcatcaaaatcatagtaccacctggatcccatggcagttgcagattcttggcgatcagcagcaataagaatggccatgcctgatgactgaaaaccacttctgcatgtgcttcatatctgaaccttttacatggttggttatataatgttgctatcagactgtccatatttattagcactgcattttctaacaattccatccagtttttcctttcccccctaggagaatggaatgcccctgtatttagctcaaccacaatgtcaccaattgctaaactgaagcaattatgaacctgggaaggcaaaacaacagtaacactgacttcttgtaaagccattggcaaatcccaaaactgaaccaataaatcaggaatatcatcacaacatttttgctgcttcatctctcgtgcaaataacaaatttagattgataattcctggattgcatagcttaaa

SEQ ID NO: 43178 - DNA, 574 bp, Setaria italica
  Peptide Sequence Number=SeqID_109152
gttaaggtcctcgcgatcacatgcgcgcagaggcgtgtcatctcggaattaagcaagccccctgactggaacggctcggggcgctgtagcctttcgtcgggggatcgttgttggtgtcgtgtcataattgtcccccccggtctttagcaatgccctgtgtagggctgctatatcccttttttaggcggttctccccgtcttaaaagatggcggcatgctaatggcatgatgattagccattaatacatgattgcgaggctccaaccgcaccgcttctagctctccggggcgcattgtgttatccactgcgtaattcttgggtgaggtagcaataggaagatcagtactctacatgcggatcactgcaccagtctatctggtggtaacatatcggcgccatgtggtggtagcttggtctcggccgttgctctcgtggaagtaattgttgatgtgggacttgacagggcactgataaccagccaatcatggacttgttgtacctcgcgccattaagccggcccggccgctccccgcccatgaagatctcacgtggatgggatccactgtcactgta

SEQ ID NO: 43179 - DNA, 458 bp, Setaria italica
  Peptide Sequence Number=SeqID_109153
cagactgaattattctgattgcattattacatcagaaaataagtgtggagatattcacagctggcataacacacggtgcagagcaccgcatattcacacggatcacattgctgttctctagagaagatgtgccgccgtttccatctttgtcggcgttggtcttgctgtaccatagcagaagctatgaaagaaatacaagcaggaagcttaaatttcctctgaagtctgtaacagaaataaaatctcctgctatctcgctgaggcacctaagagcagccttaccatgctaacttagcatggagagacaactcatagattgtaatgatcttttaggtcctgatccgcggtcatcgccgatgcctggagcgtatacaatgtcattctatgcaacggcctgtccctgatgtaaaggaacagactctgaagcttgtgttattttcagacaaagaaagatcata

SEQ ID NO: 43180 - DNA, 673 bp, Setaria italica
  misc_feature (624)..(624): n is a, c, g, or t
  Peptide Sequence Number=SeqID_109154
gggcggcggacgcggcgcgcattgcggagctgctggagggagggcggacgtggtggtgtgcccggaggggacgacgtgccgggagccggcgctgctgcggttcctcggcgctgttcgcggagctcacggaccggatcgtcccggtggcgctggaggcgcggcagggcacctactacgggtcgacggcgcgagggtggaagtggctggacccctacttcttctacatgaacccgcggcccgggtacgaggtggcgttcctgccggcgctgagggcggaggagacgtgcggcggcggagggaggagcgccgtggaggtggccaaccacgtgcagcgggtgatcgccaaggagcttgggttcgactgcaccacgctcaccaggaaggacaagtacatgaagctcgccggcaacgacggcacggtcgtcgtcgggaagaagggctgcagggatgatgacgatgctggctcgggatccaagaagcttgcatgaagaataatgtgtattgtcaagctgctggactcattggaacagttctgtgacaacatgtagttaggcttaagtgtttttaaagattacggatgggagctgatctcgatggtatgaatcttactgttttttttaaaangaatgatgaaaggaactgagaagaaacattgttgtagcagttgtttgtt

SEQ ID NO: 43181 - DNA, 498 bp, Setaria italica
  Peptide Sequence Number=SeqID_109155
ctaagccacataatggagcttgtttcaatagtttctagcaggggtaaattagatatcagtttacttatgatgctccttgaactagtataagttcagttggatcataccaaatctaaaagttaactttcacagcagtagtattgatgactttatgaggattcacagacacgcagaattgacatttaacaaagtgttgagtcttgtttactaagatgctgattgctaaatatatatcagtatgaatttcatttcactgattttggagctcccttttcagtctgtttctttcttggtgagtctaatttgcttaaggttagctgcatgcatggttcttcaagcagagagatatatgtgctgccttcctaaatgtttcttctgccagcctaagagcacatagtttagtcagagttttatttcacttatgggatcatgttacagcattccaaagggcttcttgatcatctatacgtgccattggactactttctcatgcactac

SEQ ID NO: 43182 - DNA, 406 bp, Setaria italica
  Peptide Sequence Number=SeqID_109156
tggaaagtgtgagactataatgcagcatgactcttctgatggttgtcgttttacaagtcagcagaagaatgaaatacctattggtcctggctatcaagcacaggtaccacaatggactggtgaggtgcctgtaaattatgatgatccggaaactctgaaatggttgggaacaaaggtctggcctccaataaatgggaactgtaaagcattgttctgtggtgaccctattggcaagggcagagaagttgtttgtggttgcaaccttccaggatcagtggaatgtgttaggtttcatgtagcggaacggagatttaagttgaaacgtgaacttggtgcagctttctatgcgtggggatttgatcgtatgggggagagattgcactttcttggacagatgaagaggagg

SEQ ID NO: 43183 - DNA, 326 bp, Setaria italica
  Peptide Sequence Number=SeqID_109157
tgtgcatttgaagtgaattgtgcggctactacaactccaatctgtcagaaatcgattgatcaaaaagggatcaagacattagcgtttactagcaattggacgatcagattggagaagaaagtgctgattgttgagacctaagtgtggagattgaggtaccagatatataatacactgttaaattgatgtgtgatgcccataattcaaagcgatttaatagctccgatctttggtcatgagatgtctgtaatactccttgatccatactttacgtacttctattaatttttctctgtttgggtggtaagtgctctttgtctcttttt

SEQ ID NO: 43184 - DNA, 660 bp, Setaria italica
  misc_feature (528)..(528): n is a, c, g, or t
  Peptide Sequence Number=SeqID_109158
tgctgacggttacaatggtcatttcaggaactaaagctgtggaacaagagtgtaacctgttcctgtttctttgtgtttggatatcttcagttgccagtactgatatggttgatttgtgaatcatttgtgaacaaaatgtgcagctcaaggtgttgtaacatgatttttcatatacaacaacaatgcctgggatctaaaactcgaggaattggttcaacttcattaagacatgtctcaactctcaagtctcaagtcaggaataggaattcatcgttggtgcactgcttcaatctctccaacttgccccgttgactgatgaattgtgcatttgaagtgaattgtgcggttactacaactccaatccgtcagaaattgattgatcataaagggatcaaggcattggcttctactagcaattggacgatcagattggaaagcaagtgctcattgttgagacctaagtgtggagggtcattgtgatttaccgttgatccgaaggatgcttcttagcaaaaaggatgcaaaggngaggagaagcattgtaccttcaagcttcattctattcctcccagttactatgtaaaatgtacttggtttgtatccgtagtgcaattaactcttacgaattttgattgttcaatttaagcttgaagtttggtc

SEQ ID NO: 43185 - DNA, 593 bp, Setaria italica
  Peptide Sequence Number=SeqID_109159
aacaatgtgcaaattatagtgattgaacgtgcaaactgtgtcttagtaaattagtttttccccttaactttgattctacatggtacttaacattcctcctcccattatttcttattttccatctcataatctgcatacattaggcattcacatggatataggaagcgttccctcatagctgaccgtattacgcaacgttatgcaacaatattgagatttttttttttcaaaataataggttcattgtaatttactgttgatccgaaggatgcttcttaccaatactgtccgggcttaccctttcaccaatgaaccaataatgtgtaaaatgtaagctttctatataatcacccttgaactcaataagttgtccctgcttgaatccatatgctttatttgttggttgccatttagccaatcttcccatatttttttatttgtttaaaaagtatgaatattgaatgatgcgagaacaattcattttagattgcaatagtggtaatcacaattccttttttcgcagattgaggtaccagatatataatacactgtttaaatttgtattgttgttgtattgtccctattaatttcta

SEQ ID NO: 43186 - DNA, 784 bp, Setaria italica
  Peptide Sequence Number=SeqID_109160
actagaacggttaacaaattagacaattttcaggaactaaagctgtggaacaagaatgtaacctgtcctgtttcttttgtttggatatcttcagttgccagtattgatatggttgatttgtgaatcatttgtggacaaaatgtgcagctcaaggtgttgtaacatgatttttcatatacagcaacaatttctgggatctaaaacttgaggtgcgctgctttaatctctccaacttgccccgttgactgacgaattgtgcatttgaagtgaattgtgcggctactacaactccaatctgtcagggatcaagacattagcgtttactagcaattggacgatcagattggagaagaaagtgctgattgttgagacctaagtgtggaggttcattgtaatttactgttgatccgaaggatgcttcttaccaatactgtccgggcttaccctttcaccaatgaaccaataatgtgtaaaatattgaggtaccagatatataatacactgttaaattgatgtgtgatgcccataattcaaagcgatttaatagctccgatctttggtcatgagatgtctgtaatactccttgatccatactttacgtacttctattaattttttctctgttttgggtggtaagtgctctttgtctctttttactacatcaagtatgcagtcatgcaagtagcgcagcacagaatattttccactcttataatgtatttatgtgagcgtgggaggaaaaatgttgttagttcatgaataggttcgacaaatgttcttgcgg

SEQ ID NO: 43187 - DNA, 837 bp, Setaria italica
  misc_feature (832)..(832): n is a, c, g, or t
  Peptide Sequence Number=SeqID_109161
aaggccagccacatgttctggtggtgtatgttcaccagctctcgcaggcaccgagtttcttctccaatccatcttcaggctaaacatacgaagagagtttagccggctaggccaatcatacctgctccagctctgcttcgccatctttttgatgagtagaggctccccatctcggccctcctgccggttgaggccggcagagtgatgagtgatcggagtcatgctcgtgagattgggcttcgtcgttgtagcctccgtcgcagctttaactcttaagagagttaacagtgggggcaggcataataaagacaatggccaagcaagggaaaggaaggacaagacacaccattctgaacatggtgagaaagaagaagagaaggaagaggttaaaacaatcagtggcataatcaactcagcccggtccctagacgatgacgacgatgatatgctttctgagattgagagcctcctgtcaggagacattgacatccctataccaagcgatcggttcgatgtcaatggacggtcacagtacaacgctcacatggctaatgaggccgctgagatagacaggctgcgcagcctggtgagggagatggaggaaagggaggtgaagctcgaaggcgagctgctggagtactacggcatgaaggagatggagaccgacgttactgagctgcagaagcagctcaagactaagacagcggagatcaacatgctcaacaacaccatcaactcaatgcaggcagagcggaagaagctgcaggatgaggttgcgcgtggagcggtagccaagaagagcttgaagcggctacgagcaagattaaggagntgcag

SEQ ID NO: 43188 - DNA, 949 bp, Setaria italica
  Peptide Sequence Number=SeqID_109162
tcgtgccgagagctcactgctcacgtcagtagagatgaggaccgcgtcgtcccccgtgcccgccgccgtcctcgccgccccctcctctgccgctgccgtcgtaaagccgccgcctcgcgccgcagcaccggccgcgaatgccgccgccgtgagcaccggcaggcgggacgtgctcgccgggacgggcctggcggcggtgcttctggcgctgggaccggcgtgcggcgcagcgcgtgcggcggacgacgagtacgtgagcgagacgaaggaggtgatcgggaaggtgcggtcgacgatcaacaaggacaagtcggacccggacgtggcggacgcggtggcggagctacgggagctgtccaactcgtgggtggccaagtaccggcgggagaagtcgctgctggggaggccttcgttccgggagatgtactcggcgctcaacgccgtgtcgggccactacatcagcttcggccccacggcgcccatcccggccaagcgccgcgcccgcatcctcgaggagatggacaccgccgagaaggcgctcctccgcggcaggtaggccttcaagatccccagccaagccggccatggcggcgatcgatcgccgtggttaaacttgtggcgggaacacgcgtgccccggctcagcgagtacctcttttttgtaactactactgcgatgtatatgcattcgtacgtgatgcgagctgtctgcaccgtgttccgcccggctgggagtgtgtactgtgagtgaaaaaaaaagtcggattctgagctctgagttcgtgattttcagcacactttgtgcattcatcttgtaagactttttgtatcagctgcctggctgacatggtgagaatactcatggatgggattgggacttgtccatcggctgtcccggtagcctgcggccattctcggttcttgtttgcgttgaccaaaaaaaaaaaaac

SEQ ID NO: 43189 - DNA, 429 bp, Setaria italica
  Peptide Sequence Number=SeqID_109163
aacgagattgctattaccaccaagaaaccatcaaatctttagtgcttaaaggtgcctgttgcctacaaaaagtagctgaatttcttttcctctgcaagaatgtttaaagcaaacaactaaaccatactactacaggacttgtcaatgtgcatgacaccacctagtgatcaagattatgagaaaaaaacaaggggtggatgaaaactagtccaatacgctacaaaaatttacatctatccagaggcacattggctattttaatccatttgtatccataactaatgctgtattgttctactgcaatcatctgaagagaaatctgctatgaacaagaggaattcatcccagtccccaagccgaagtgagcgcagtccttgagcctgtaatcctgcagccagttaggatttgctggctgccgcacttgcacgg

SEQ ID NO: 43190 - DNA, 466 bp, Setaria italica
  misc_feature (1)..(30): n is a, c, g, or t
  Peptide Sequence Number=SeqID_109164
nnnnnnnnnnnnnnnnnnnnnnnnnnnnnncgtgggtttaagtaagattgtggcatgtgaaccataaactttataatagaagtattgagtttagaacagtggtcagtggacttgggaaagatacgggaaggtatctgaaatctaaaatatctgaacaaccgaaatagacagcacgtacaagtgacatgaagaaggtcctaattggaaaattacgacaggcaatgccagcttctatccatataacattagcttacaggttagctgactagttcattcgtctatagcctcagccacaagcagaatcatcatcatcttcctggatgccctgtgcagcaccttggatcatttcatcatcaactccttcaatgaaggattcaaattcatcttcatttggttcccttggtgcgattcggctgactgattgattaatctccatccagtttggttgctcaactgggccagagaa

SEQ ID NO: 43191 - DNA, 922 bp, Setaria italica
  Peptide Sequence Number=SeqID_109165
aatagaaacaaagacgtgagtttccaagccatctcagtcccctcacagtgctgctgtgaacagaaaaactgacagacactgcattggccacaacatctacaacttcaatagttccattctgagtccctagagcaacaagtggtactgctggagcaggattgtttccaccacgagctactgttgcaagtaatgaaggggatggcactgctagtgtagtcacagtagaggacaaaagatgaagctgtcccatcaaattaatctttattgtaaaatcaggtctattggagcctgtgttggcagttgcagcatggctatggttcagtctacctagattagctttgttaggatgtgcagacttgtcaaatgtcaaaagccaggaccagatcttgccatcttcagatatggatgttacatatgtcaaagtccctttataaacattctgctctgaatttgtatcagtgatgaaagaaagtgaagcgttcgtctgtgacaaatcctgacactgtttatcaatgtttcggaaaatagactctgactgccatattgtagttgcaagaacagccggaggaggaacaacagtaccaattgatggcatgagctcttccactgcacacaataaatgcacctgttcaccctccttgcgcttccagatgctcagcttgccatcaacatgtgtgcaatagagcaggtcgagatcaggatcggccataacatccaaaaacttgccaaatcccctgggcaatggagtaacagagagtgcagtactgtaactgaggtcgaagacaatgagctcccgtgggaacgtgacgaagaggatctgcctccacagcggggagaagcaaatcctcgtgacaaagagcgggaacgccgctagcgcggggccggcgcaggcgccgctatctccttctccagcctctgcacg

SEQ ID NO: 43192 - DNA, 1042 bp, Setaria italica
  Peptide Sequence Number=SeqID_109166
taagaacaaaaacgtgtgcaaacgcagaagatggcaacatggtccagatgggggctcaggaagggaatcaaggtgcccaggaagttgtccttgggctgcaggctcctattcaagagggagtaggtcttggtcagaatgtggcccaagagggtcatatgtttgttaatctcaatataaacatggtcctcactcaagatcagcaggtgaacttctcccacctgcccaagaatatcacgggcagcatgtcatcgctcttaccagactgtctctccactcccaaggactttaacatggaaaagcaaaggcctgggcagaaccccaatgtttatagactttgggcccaacacttctctcctgttggatgtcctgagcaggtgacccagataccttctgattgggctgctttctttatcaatatgctcatgtctccagaacattttgattgggctaagcagtttctggcctccaagacctgggaatttctgctctcgtgctccaaccagacagctttgatggcttttgctattcctcagaaatgcccaagttctactcccttcatctgctcgctctctcaggaagaggtgggaacttgacccctgaactctgtaaggcagctaaacctgatttgaaggaagcaaggtcacctaaaaaagccagagctcgtttgagcatcaaagcggcaccagaatgtgaatcctcggtcagaaggagtgaccgcatcaaagctaagagcaaaggttttcgcagatcttcttgtcaggacaacacatgcttagcttgcactgcttgcccacctacaatcagcgctgatgtcatccagagcttaggtacaaaggtgtgtgcgctcgacagaactaagattggcccgggaaagctgtccttcaactccggatctcagaagcccatagggaggacgacgaccacaagattttctgaagcttacagcaaggggaaggaggtcctgtcagaagcttcgtccaacagctccaacggagtctaaggagattcttgaggccgtcttattctatttgtttcttttttt

SEQ ID NO: 43193 - DNA, 404 bp, Setaria italica
  Peptide Sequence Number=SeqID_109167
ttagtttaagtttagtaaactagtagtcaactaagcagtgatgccaattgaattgagttgaattgaatcaccattgtttggggcattggcattctatccacagtgtaaatttgaactgcctacactttgtataaacagttcatgcagtacatagcttgagattttaagagcacaaagatttaactgaaagttaattgttgatgaccatggccactcaacatatttctcattttcaaaatgtctttccgttaagatcatataacgctgagtaaattgcaagaggggtttatagatatctgttgcagtggaccaattgataacagtaaggtatcataaagctgaattgtattgagtgtttaccccctaagtgtgctattttcaatgatgaaggtcagcaagatacc

SEQ ID NO: 43194 - DNA, 743 bp, Setaria italica
  Peptide Sequence Number=SeqID_109168
gagaaagaagaggaggagcagaagaaaatcatgaagcaagaggctctccagctgcttaagaaaaaggagaaggcagacaacatcatcaagaaaaccaaagaaaagcgccagaagaagaagcaggagaatgttgatcccagcaggcccaagaagcctgcctcttccttcctcctcttcagcaaggaagcgaggaagcagctactcgaggagcgcccgggcatcaacaactcgaccctgaatgcacttatctcggtgaagtggaaggagctgagcggtgaggagcggcaggcgtggaatgataaggccgcacctgccatggcggcatacaagaaggagatggaggagtacaccaaggctcacagctcgtccgcttgacaggataacagattcatgtgcacgttgtggtgcagttcaactgttggattgggttgaacattttcaaataaggattctcatctctgaatcctggtgtgatagatgacttggtgtgaattgttaacttcggatcagtttagttggcgtagttgtattagatgtagcttgcttcattcttgaacaaattggtttggttaaattttgtggcagttttccacaagttaagaagtttcagtgagtttcacaagagtcgattactcgattcggagttctgattcttggaatttaccgagttgaatttgatacccctgtctgctcgtacatctcggaatttcatttctaacatcaacaatatttttagcaaaaaa

SEQ ID NO: 43195 - DNA, 339 bp, Setaria italica
  Peptide Sequence Number=SeqID_109169
tttgagtttagttgcagaactgagcggccctcagaagcagggctgttttccagccaccaaccaacgttcagagccagcaccatgtggccgctgtgcctctagcctgctctcctccaggtgcagggggacacaggacctgccggccccatccagacatggaggagcgttttgctgcttaactcatgcttagccaaggcaggcagaggctgtgggaactgctgagccccgctgtgatgtctgggacacgctctgggcagcagccgtcactctacagcaatgccagccctagtctggctcctcagaaaccatctgggggcacaagtgcagcctctgccccga

SEQ ID NO: 43196 - DNA, 268 bp, Setaria italica
  Peptide Sequence Number=SeqID_109170
gcgagatgcaggccaaggtcgccaaggagatgcaaggtgtagatcctaatgcaaccacatctgaaaacaaagaggagatggatgctcggtcagtattcgttggaaatgttagtctgctgtaatcaagcctttcaatcaaagttttggcatctggttgaatctcagcacaagttctagtgttagcttaatgggggaaagaaaaagaggaaaaatcctataaagaagttcttagaaaaaaaagaagagaaaaaatgaaaaatagaaaaaa

SEQ ID NO: 43197 - DNA, 626 bp, Setaria italica
  Peptide Sequence Number=SeqID_109171
aatttaagaggactgatgtacaattcagtatttcataacctatggctatgcatatatctgatgattcgcattttggtccttgttaccagaatatgtttttcgtaactaaagatataaaatttgtttaaatattttattaaattaattagtatgatgtgcttgcctttttatttgtttttttcacttccagtatataatatgtctctttgggtgggggctccattagtaatcttatttcaacgtggggtttgtattatctgtagtccctgctgcaaaattccatttcattgaacaacaggacttggtcttattgtcagttcatgatacaaataataagttgtctcctctatctttatctactttctttttgttttctctgttgcattgattgagcaatggccatggtcgcaggttagtctgctgtaatcaagcctttcaatcaaagttttggcatctggttgaatctcagcacaagttctagtgttagcttaatggggggaagaaaaagaggaaaaatcctataaagaagttcttgaaaaaaaagaaagagaaaaaaatgaaaaatagaaaaaaatgatttgaaaaaagtaaaaaaaagtacagaaaaaagatgaaatatagagagg

SEQ ID NO: 43198 - DNA, 844 bp, Setaria italica
  Peptide Sequence Number=SeqID_109172
atccccggcccccccacgagcctcacccggtcacccctcccgaatcgcggaccgcatcaggtttcgtctagcagccgagttcgcacgcggcacggcggccatggaggacgaggagcacgaggtgtacggccaggagatccccgtcgacggcgaggacgtcgacatgtccggggccggcgacgacgcggccaagctgcaggagctcgacgagatgaagcgccgcctcaaggagatggaggaggaggccgccgcgctccgcgagatgcaggccaaggtcgccaaggagatgcaaggtgtagatcctaatgcaaccacatctgaaaacaaagaggagatggatgctcggtcagtattcgttggaaatgttgactatgcctgcactccagaagaagtacagcagcacttcaattcttgcggaactgtcaacagagtgacaatactgactgacaagtttgggcagcctaaaggttttgcttatgtggaatttgttgaagttgaagctgttcaggaagctgttaagctgaacgagtcagagttgcatggccgccaactcaaggtggcaccaaagaggactaatgttcctgggatgaagcaaccccgcggccgaggtttcaatccataccatgggcacccctacatgaggccgtatggttatagtccttctggctatgggtgagttgtcaactgtctacttagcttcatggcatctgggcagaccttattacgatcactcagcttttctaactcccgtttgtttttgttgatgcgcaggaggttccccagattccgccgcccgcgcagacctttatttttgaagatcaggtctccatagagttgtcagcac

SEQ ID NO: 43199 - DNA, 728 bp, Setaria italica
  Peptide Sequence Number=SeqID_109173
taggcggcgatcatggcggcgacggcgaggtcgctgaggcagactgcggcggcgacgccccggatgcccatcgttctggagaggcagagggtgagggggatgtggagggcgaggccgagggcggcggcgaagagcggggggagcgtcacctcctgggagctgaggtaggccttgagcgggttgaggaaggaggtgacggcgaggtccgggaggaggcagaggacgtaggtcctggccgtggcggcgatgtcgggctgctggccgaagcgcaggaggacggcgtcgacgcgcagccagaggagcgcgatggggacggaggcggcgaggagcatgaccgtggccatgagcagcgtccggcgcaggaggccgacgttcctggcgccgtgcgcctggccgcagatgggctccatggcgccgcagaggccgctgaggacggcgaagcccgtgacgttggcgaagctgtagcccagcgtgccggcggcgagctccatctcgccgaggcggcccaggaatgcggtggtgacggcgagcttggcgaaccacgtgaggttcatgccgaccagaggaagggcgatgccgcgctgggcgcgcaactcggcgagccaccgctcctgctcctgcttgtgcttgtgcttgtgcttgtggtgtggcggcggcggaggagcctcaggctctgctggtggtggcggcggcggcgtcatggcaatcgatcgatggatcgatttggg

SEQ ID NO: 43200 - DNA, 2162 bp, Setaria italica
  misc_feature (2064)..(2162): n is a, c, g, or t
  Peptide Sequence Number=SeqID_109174
cagcacacgcacacgcagcagcagtgacaccgccccgccactgcaggcaccagcagccatggcctcctccgcgtccctgcagcgcttcctcccgccctccgcgcacgcgtcgtcgtcgtcctcgtcccgccgtcgccccggccgcgccagggcggccgtctccctgccgtcgtcgtccccaccgtcggccggcgaggtccccgcggagcggctggagccgagggtcgaggagcgggtgggagggtactgggtgctcaaggagaagtaccggacggggctcaacccgcaggagaaggtgaagatcgagaaggagcccatggggctgttcatggagggcggcatcaaggacctcgccaagatccccatggaggagatcgacgccgccaaggtcaccaaggacgacgtcgacgtccgcctcaagtggcttggcctcttccaccgccgcaagcaccagtatgggcgcttcatgatgcggctgaagctgcccaacggcgtgacgacgagcgagcagacgcgttacctagcgagcgtcatcgaggcgtacggcgaggacgggtgcgccgacgtgaccacccggcagaactggcagatccgcggggtgacgctccctgacgtgccggccatcctcgagggcctccgcgccgtcggcctcaccagcctgcagagcggcatggacaacgtccgcaaccccgtcggcaacccgctcgccggcatcgaccccgacgagatcgtcgacacgcgcccctacaccaacctgctctcctcctacatcaccaacaactcccagggcaaccccaccatcaccaacctgccgaggaaatggaacgtgtgcgtgatcgggtcgcacgacctgtacgagcacccgcacatcaacgatctggcgtacatgccggcggtcaaggacggcaagttcggcttcaacctcctggtgggcgggttcatcagccccaagaggtggggcgaggcgttgccgctcgacgcctgggtccccggcgacgacatcatcccggtgtgcaaggccatcctcgaggcgttccgggacctcggcaacaggggcaaccggcagaagacgcgcatgatgtggctcatcgacgagctcgggatggaggtgttccggtcggaggtggagaagaggatgccgaacggggtgctggagcgcgcggcgccggaggacctcatcgacgccaagtgggagcggcgtgactacctcggcgtgcacccgcagaagcaggaaggcctgtcgtacgtgggcctgcacgtgcccgtgggcaggctgcaggcctccgacatgttcgagctcgcgcggctcgccgacgagtacggcaccggcgagctccggctgacggtggagcagaacatcgtgctccccaacgtcaggaacgagaggctcgacgcgctgctcgcggagcccctcctgcaggagcggctctcgccgcagccgtcgctgctgctcaagggcctggtggcgtgcacgggcaaacagttctgcgggcaggccatcatcgagaccaaggcgcgggcgctgcaggtgacgcgggaggtggagaagcgggtgtccgtgccacggccggtgcggatgcactggacggggtgcccccaacagctgcgcccaggtgcaggtcgccgacatcggcttcatgggatgcctcaccaagggcagcgacggcaaggtctgcgaggcggcggacatcttcgtcggcggccgcgtcggcagcgactcgcacctggcggacgtgtacaagaaggccgtgccgtgcgatgacctggtgcccgtcgtggcggacatcctggtggagcggttcggggccgtgcccagggagagggaggaggacgaggagtaggagcgccggatcgatcgatcgatgctgctgcttcggtgatcttcggagcacatcgagttgccgtttgttgtaaagtagacgctgctgccttgttccatggcacgatttgtttttggtccccctgttgtagccaaaaaagggttcccttgttcacgttattacagaaagagaatgctgataaataagaataacatgttgcctgccaaaaaaaaaaaaaaaaaannnnnnnnnnnnnnnnnnnnnnnnnnnnnnnnnnnnnnnnnnnnnnnnnnnnnnnnnnnnnnnnnnnnnnnnnnnnnnnnnnnnnnnnnnnnnnnnnnn

SEQ ID NO: 43201 - DNA, 285 bp, Setaria italica
  Peptide Sequence Number=SeqID_109175
ctccgagcagtgtgttacgaagaaatgtcaaagccactggatctggtgcgctctgactcgtcgatcccccaccgcgaacctcctaaacctcggccatggcggcatcgccgtatctcctcctcgtcctgctgctcttccacccagcggttgcaccagcctaccgcgcgccgccgccttcgcagactccgccgccgcggccgcctcagaaggtgcaggtctggcccaagccggtgtccatttcgtggacggacgcggtgtacgcgccgctctcgccgtcgttcagca

SEQ ID NO: 43202 - DNA, 273 bp, Setaria italica
  Peptide Sequence Number=SeqID_109176
catccttcctcgtccaaactcctgtgtgtgtggcttctccgctgcgctgccgcctcctagtccacatctctccctccggcgccgccgtcgcccgccgcgggccgtacgtagcgctgggaggggatcgccgggcagcggcgcggggcgggggaggaggagccgcggtttcgtcgctcggatggcggcggggcgatgacgcgggcggcgggagcggtgcggcgctgggatgcggacgatctgcgatgtgtgcgagagcgcgccgggggtgctttt

SEQ ID NO: 43203 - DNA, 456 bp, Setaria italica
  Peptide Sequence Number=SeqID_109177
aaaaggggaaggagaaaggcaatatggtcatggtcacaactagaatcccagaggtagcaaaatggttaagacagtcgatagttggttagaactggggcgtttggaagcagaagatttccatcgtttctttgaagcatgtgttttttggtgaagaacagtcatttaagatcatgatgcattgcttggcgttggagaacaaatactggacaagttgaagggtttcccgttggcagcaaaaactgttgggaggttattaagaaagcaacttaatttggaccattggagaagagtactggatagtaaagaatgggaacttcaaaccagtgataatgacattatgccagcactaaagctgagttatgactatctccctttccacctccaacagtgtttttcttattgtgcattgtttcccgaaggaatagaatttgatagcaaagagttaattcactttgg

SEQ ID NO: 43204 - DNA, 345 bp, Setaria italica
  Peptide Sequence Number=SeqID_109178
gcccctgatcaccgccgccgccgcctgggcgatgcacgcgcggcgaggacggccaccatgatctccagcctagggagcaccgggaggggcaggagtaccactggtaccaggagctcgtccgtcgcacgctgggccccggcaagcgcggccagtggacgtggaaggacccgcgccgcgccgcctggctggtcaagctcggcccgctcttcgaagacctgcggggcccgcctaagtccatgctgacgcagatcggcggcggcggcggcggcggcgggaagcgcgccggtggtggcgcgggaggcggaggaggaggggggcggatcatggcgtcggaggacgaaggac

SEQ ID NO: 43205 - DNA, 552 bp, Setaria italica
  Peptide Sequence Number=SeqID_109179
actagacaaggtttaccaaggaacgaagacggacgaatagaacccaaccaatgagcgcaccgtttcttcagtttgctgaatcaaaaacaacaagctgatgatgacgatgacggcgacgtccaccgctgatggatcgtcgttggcgatcgtctgaaccctttgcaacggcaagggaggaggaaaaaaaaggcgggcgcgttcgtcgccgtcgccgcggcggcgagacggcgcggtgggttttggtgggggtccgtcgaggtcacgtcgcgacgaccatgccggccatgaagatgtcctcgtggatggaggagcaggacgagcgaggggagatgctcgccgtgttgttctcggcttcctcttcgagctggatctcttggtcccggcaattggcgctgcagaaggccttctcgccacggtaaatgtagatgtcattgccttccagcttcttcttgcaagtgaagcaggtgctcaggaagtcgtcggctgccggggcagcaccggcggcgcacttgaccacgaagtagcacccggcggctccttcctccacctccc

SEQ ID NO: 43206 - DNA, 406 bp, Setaria italica
  misc_feature (1)..(27): n is a, c, g, or t
  Peptide Sequence Number=SeqID_109180
nnnnnnnnnnnnnnnnnnnnnnnnnnnaattaatattttttcttctcccaaaagaattaacagtgatgttatatgaacagtgcagaaagtcgaccagtgcagttgtttatttcattcagataagcgtgcattctgcaagatatctctttttaagggggtgtttggctccattcagcccggtaaatgtagatgtcattgccttccagcttcttcttgcaagtgaagcaggtgctcaggaagtcgtcggctgccggggcagcaccggcggcgcacttgaccacgaagtagcacccggcggctccttcctccacctccatggcggcctcgtcggagtccccaaccgtgtggggctccaagatgcagtcgccgaagatgtgcgtcgtcttcgggttcgggccgcgcgcga

SEQ ID NO: 43207 - DNA, 1093 bp, Setaria italica
  Peptide Sequence Number=SeqID_109181
agaaaaaagacccaagaatacccctagacaaggtttccaggacgagcggcgatgacccaccaatgagcgcaccgtttcttcagtttgctgaatcaaaaaacaacaagctgatgatgacgatgacggcgacgtccaccgctgatggatcgtcgttggcgatcgtctgaaccctttgcaacggcaagggaggaggaaaaaaaaggcgggcgcgttcgtcgccgtcgccgcggcggcgagacggcgcggtgggttttagtgattttgcccgggtttattttggaggagtttcttaggttacgttagttcgttagtacgacgtggggtccgtacgaaggtacaacgtcgacgacgaccatgccggccatgaagatgtcctcgtggatggaggagcaggacgagcgaggggagatgctcgccgtgttgttctcggcttcctcttcgagctggatctcttggtcccggcaattggcgctgcagaaggccttctcgccacggtaaatgtagatgtcattgccttccagcttcttcttgcaagtgaagcaggtgctcaggaagtcgtcggctgccggggcagcaccggcggcgcacttgaccacgaagtagcacccggcggctccttcctccacctccatggcggcctcgtcggagtccccaaccgtgtggggctccaagatgcagtcgccgaagatgtgcgtcgtcttcgggttcgggccgcgcgcgatgatgcgggtgtagtcgtccgactgctcgatctcgctcgccgagaccgagccgatgaagccacgggtcccggcggcgatcgacgccggcagcgatccgggccccgggagcttgccgagatcgaacgagtgccgcttgccattgctgagttgagcgccatccgactgagtggcctcgggaccagacttcagatccccgtggtggaacctgctgcacggcaccgacatgccggcggcggccgcggtgtccggggcggggcaagacatcgtcttgccgagctccggcggcgaataaccgccgccgccgccgccgcagtccttgggcagggagctattagatttgagccgcaagcgcgggctgagcaggcagttgg

SEQ ID NO: 43208 - DNA, 918 bp, Setaria italica
  Peptide Sequence Number=SeqID_109182
ctccgcccccgccgcggccgctgcgccgccgctacggcgagtgggccgtcgtcacgggcgccacggacggcatcggccgcgcgctcgcgttccgcctcgccgccgccgggctcggggtcgtcctcgtcggccggaacccggacaagctcgcgaccgtcacggccgacctcaaagccaagcatcccgcggcgcaggtccgcatcttcgtgctcgacttcaccgccgacgatgccgccgcgaaggtgggcgcgctcggggagttcctccgggggctcgacgtcggcgtgctcgtcaacaacgtcggcgcgtcgtacccgtacgcgcgctacttccacgaggtggacgaggagctcacgcggaagctgatacgcctcaacgtcgaggccgtcacgcgggtgacgcacgccgtgctccccggcatggtggagcgcgggcggggagccatcatgaacatgggctccggcgcctccgccatcatgccgtcggacccgctgtacaccctctacgtcgccaccaaggcctatgtcgatcaattctcgagatgcatgtatgtcgagtacaagagcaaaggcatcgacgtgcaatgccaggtgcccatacaggtggcgacgaagctggcgtccatcaggaagcccaccttcctggcgccgtcgccggaggcgtacgcccgcgccgccgtccgacgcatcgggtacgagccgcggtgcacgccgtactggacgcacgcgctggtggggctcctcatctccctcgtccccgagcccatcgccgacaggatgttcctccacagaaacctcagcatccgcgccaggggccgcgccaaggacgccaagaagaaggcgctgtgacgacgagggtggtcggtctccgtatggatcagacgatcactggatttgcagctgctttaagctcctagca

SEQ ID NO: 43209 - DNA, 1574 bp, Setaria italica
  misc_feature (905)..(905): n is a, c, g, or t
  misc_feature (1527)..(1574): n is a, c, g, or t
  Peptide Sequence Number=SeqID_109183
ctttagatagtacttaaaccgtagtggctaaaaacctttgtaggttaaaacttgaataacaacaaacatggatagattggacgtttgtgatgtctctgtttttcatatgagctacagagctcatagtactgaaacaataccatgtttattgaattttaaacgttatgttcagttgctaagataatcagtttgttcatatttatatactgttgaaagcctttgtacgggttgaaggtttacttaaagtttaatattctagcatatacctaaagtaaatattctgccagattgaagaaatgaaaatagtttattgtttggaggcactgttgccatcaaatacattttggtgtcaagtataattgtgggtagatcatatggaagcactagattattctatagtacgaatttacttttgttagttatattctttttattaggacagtgtggactaataaacttggagtagaatcgatcatataccatctatgaacttttagtcatatatgcttattttagtttaagtgttctcatgaatcattattataaggaaaagaaactttagttatttctaacatgcaactgtctacgaccaagtaggcaagtacaatgtacaagctaaagttttatggtatttcagcaagttattaccattgtgcaaatgttttatgagaacaggtgataaaactagttgtggtttatttgccagctatgtcgatcaattctcgagatgcatgtatgtcgagtacaagagcaaaggcatcgacgtgcaatgccaggtgtgaactagtcacttttcataatgatttcactttacctaactgctaaaaaagtttcaaaaaatgtactataatatatatagctacccattttttatttctccattgaatccgtctaaattggtccanaccaagcaataacttttgcatttcatcggtaccgtactaccctcactatggaatgctttaatgcgcatcaccgagcaaagggatcgacgtgcaatgccaggtgcccatacaggtggcgacgaagctggcgtccatcaggaagcccaccttcctggcgccgtcgccggaggcgtacgcccgcgccgccgtccgacgcatcgggtacgagccgcggtgcacgccgtactggacgcacgcgctggtggggctcctcatctccctcgtccccgagcccatcgccgacaggatgttcctccacagaaacctcagcatccgcgccaggggccgcgccaaggacgccaagaagaaggcgctgtgacgacgagggtggtcggtctccgtatggatcagacgatcactggatttgcagctgctttaagctcctagcatggccatttcaagttaattttcaaacttatttgcatctgctcagtaggttggtacacttggaaatgttgatctgtaattcggctatctaataacacacgggctgactgatcggcctacgatcgagttgtatcctggaacaagtcaagtttgatgagattttagacgactacggctatttggaggataaaaaacnnnnnnnnnnnnnnnnnnnnnnnnnnnnnnnnnnnnnnnnnnnnnnnn

SEQ ID NO: 43210 - DNA, 969 bp, Setaria italica
  Peptide Sequence Number=SeqID_109184
cacgtagccacagtgacatcatttgttttttgaggttattacaacacgaacaactagagaaactgcatggcatccgaagaaaaaaaaacaaacaagattcacgaacgaacacacatgcagcaccaaagatacctgttcttttgctgtacaaccaatgttacttccatgtatatacacgctggcacctaacaacctccacgaactatcttaccggagccacttgaagttgtaaggcatttttggggttgcatttgctatccaatgttcagcttgctacctgaatctatacagttaacggtgaccatcaatggatctacaactcaactgtacagagagctgcagtcctgaaatcaatgggtgcatggacaggtggatgtgtggtgagcactctccatttctttgtcccagggttgtacacctggaactccagagccagcttcttcttcagctgcctccatggacctgagggttcaacaggaacttttgcagatctgagcacgtacagttccccattcatcgatacgaaaccgcaagattcagtattcgggatcatcctcctcatggtagcctctctcagccacctgttcaaagcaaagtcatacctgaagacatcgttgccatcgagcatgaacacctcagtaatccttccatcatccgcagataaagctgcaacaggtccaagccgcctcctctccccttcctcccacatgtttccgatctccctccacttcccgctccagagcccgagcgccaccgcgttccggcagtacacgtcatttggcaccactcccgcgagtgtggtgtacccgtcgtagccgcccatcacccagaactcatcctcaccgccgtccccagcaccgtgagccacgaaccccacgcacccagcccgatcacggggcatcgaggcggcaacgcgccacgagcgcgcggtggcgtcataccactcggtgctgtcggtgcggctgccgt

SEQ ID NO: 43211 - DNA, 465 bp, Setaria italica
  Peptide Sequence Number=SeqID_109185
attactagaaagattaagaagctcgaggagacgatggagcattgaaaggacccagacatctgttagcacaagtacaatttacaaccaaccattgagtgaagatctgaaaactgacatgtcaaagaatacaaagaattcaaagaatcgaagagaagtttcttctaggttacctagttttatgaagccaacagcttctagccagcagaggataggcttgactaaacacattcctgtcagtaacaggacaaaaccaccaattccaccaaagagaaggccttcctcagtttatgctgagtctgtaaggctgccagtaaatcgtaccacttggcagtcagaatgcagctctgaatgcagtatctccatgacaagtaatatgttttggatgccaagcgtacaagatgggacagaatgcagccagcaggatacatcagagtatgagaccaacaggtgattttctcagaagat

SEQ ID NO: 43212 - DNA, 589 bp, Setaria italica
  Peptide Sequence Number=SeqID_109186
tattgctggaattaaatgttattaatttgatacattgtgattgctaacattgatgaattaagagaacgagaagaaggggattcgaaccctcggtaaacaaaagtctacatagcagttccaatgctacgccttgaaccgctcggccatctctcctccataatcttattatggaaaataaactgagtgaatagcgagttttcgtattcctgcagtacaggtacagccacaacggctgggggattccatggctctatgggaaaaattccttttcatctaagtggaaggatccagtattttttttactaggaattccgctccctcgaaaagtttttctttggggaaaaccaaaataaaaagagaatggaagaattcttcttattccataagaaaataaaggaaccctagaattctatttgcataaggtacgttacgccatacaatctaaaatataaaaaaagggtatggggcaattaatgactttgaaaacgcgaaatagctgatgagagaagttgttgtttagaaataggaaagtggaatgaaatctagtcttagtcaaatatttcatatctcttcttgtccaaacagaagg

SEQ ID NO: 43213 - DNA, 1925 bp, Setaria italica
  misc_feature (1865)..(1925): n is a, c, g, or t
  Peptide Sequence Number=SeqID_109187
ccagctgctgctcctcgtcgccgcggcgctccgcgcggccgcttccctccggagggcggcaggggccggcgagttcgacgtccgccgccacctctccaccgtcaccaggtatgatgtggccagaggctccaatagtgtcaattctatgccgacaatcccagatgggtgccgtgtgatccacctcaatctagtggcaagacatgggactcgtgctcctaccaagaagcgaatcaaggagcttgatagattgtcaatcaggctggaagctcttataaatgaggcaaaacaaggtctcaagagtgattctctcaagaaaattccatcctggataaagggctgggagtcgcgttggaagggtaggactaaaggtggtgagctgactagtgaaggagaagaagagctttacaacttagcgaccagagtgaaggagaggtttcaagacctttttgatgacgaatatcacccagatgtatattcaataagagcaactcaggtttctcgagcatcagctagtgcggtagcatttggtttgggactgctttctgggaaaggaaagcttggaccagggaacaaccgtgccttttctgttctgagcgagagtcgtgcaagtgatatttgtctgagattctttgacagctgtgagacatacaaggcatacaggaaaaggaaggagcctgatgtcaagaagcaaaaggagccggttctagagcatgtcacagctgcacttgtcaatcgttatcacctcaattttacaactcaggatgtctcctctctctggtttctttgcaagcaggaagcatctttattgaatataaccaatcaagcttgtgggctttttaatgaagctgaggtttattttctagagtggacagatgatttggagggttttgttctaaaaggctatggtgagtcaattaactaccggatgggactgccattgctcaaggatgttgtccagtcaatggaagaagcaatcatagctaaagaagaacaccaccctgatggtacgtatgaaaaggcaaggctccgatttgcacacgcagaaactgttgttcctttcagctgccttcttggtctttttcttgaaggctcagattttgagaagatacagcgggaggaagcattggatctgccacctatgccaccacagggaagaaactggaagggcagtgttgtagccccctttgctggtaacaatatgctggttttgtaccagtgcccaggcaaaacatcggatggcagcacttttgggagtcaaaataactcatatgtcattcaagttctacacaacgaaatcccagttttgatgccgggttgcggtaacaaagatttctgcccatttgaggagttcaaggagaagatagtgaaaccgcacctgaagcatgactatgacatgatatgcaagatcaagccgcccgtggcaggagaggagcccgccacgttcagctccaaggtgtccggtttcttcacaggattgctctcgcagaagggatacagggtcgctagcgctgagagcgtcaagacagagttgtaggccatactagcagccagtgtctgctgccttttcaccatgtgccgcaggccttcgtctgcgtgcgaccacgagcaaggaaccctattgaccgatgcactaacctgcggtgtttttgtacgggcgagtcgaacgtgtacgaggtctctgttgtccaagttcttcagggaaagatgcatgtcctctgataatgtaaaattctgttttcaatttggactattcttcgtggttgaaacggcatgcacgtccttgttgaggtcaagccacgagtacgctgtcgcagtcatgtagcttccatgtaatgaagacgtggactgtaccgtgaccaaatttnnnnnnnnnnnnnnnnnnnnnnnnnnnnnnnnnnnnnnnnnnnnnnnnnnnnnnnnnnnnn

SEQ ID NO: 43214 - DNA, 411 bp, Setaria italica
  Peptide Sequence Number=SeqID_109188
ttaagttttagatgaagtgaagcagtgctttaaaaacagcaggctgcatatcctcaataatcattatctgccttcgcttatctgccattggtccgtaaagctctgcctcgaagacaggtgatcgcattgcgagaacaaacttgtgggcttgaaaaacctcttcttcgaccttgaatgtgatgtccgtcctcttctccgcctccagcaatttcctaagatcatccattaagtctgagggtggaacatagatttcacacactgtctccgatgcatgcactagcgtccccacgacaacagcaatgtcgcactcgattacaatgcggtcatccttcagatacggtgacgtctccagctcgcaggtcttcataaaatttagttccccagaccaagtgtacaccctcgaacatcctt

SEQ ID NO: 43215 - DNA, 510 bp, Setaria italica
  Peptide Sequence Number=SeqID_109189
taggaatagggacaacaatcctggctcgaaggccaccggcgaaaatggtggtggatgccagagcagcagtagcaccgtcaacctcagcaaactcaataaacgctaagtttgtcgagcgcttgccattatccaaaagcttaaggcggcaaaccttgccaaagtatgcctcacagtaagctttcagattactactttggacagtcttgctgatattggtgcaatagatagtcctcgagcatatctcccactcatcttcagactgaggaaggaacctgggattaacagggcagattgcagtccttgaaggtaaaactctcagagggcttatcccaatgatgattccatcaagaaataatgcagcatatgcttcctcctcatgctgaaactctacaaacccatacctgagaccattcgaggggtctccacagatgcggcaatccaccacattaccacatgactggaatagctcagccaggatttgctcagtaacagtgtgtcaatatacttaga

SEQ ID NO: 43216 - DNA, 769 bp, Setaria italica
  misc_feature (1)..(30): n is a, c, g, or t
  Peptide Sequence Number=SeqID_109190
nnnnnnnnnnnnnnnnnnnnnnnnnnnnnnttttttggttcaacaacattaacattaacatgcttggcaaaattggcatcgcggagggtgtacagtgtcttcctttagtttcttttacgcacaacaccgcccattttattccaaaggagcacataatgtacaacacatactgaaacatctacaaacagcccagaaacgtgcagcctgtgtctaaccctgcttcttccgccccctgaataatggtgtgccaaaatgatcttacttctcctcgtattctacatcaatcacatcagcttctgctcttcgtgaacttctagcaccaccggaggagctgttatttggctgccatacaatgttttggcaattcatgcaccggatcacttggctgcggtagcccacaaaccgccttttgcatgctgggcatgttccctcaatggcaaccctgttagcaaaggtcccaaggaaaagaggggcagcgaaaggcagcacaaatgtaccaaaaatgaaaattctgaatagccaccctgacagtgcaagccatagaaaaaacagtgtagctaacgctctcccgatgggagttgccatgaagtcattgagctccctccgatacctgggccagttgcgggagaaatcaacggagaaggagcgccacctccggccgatgccgagctcggcgtcgatctccacggcgcgctcgcgggcggcacgggaggcctccgcgagcctccgggagatcgagaacctcccgtccaggcgctgcgcggcctgc

SEQ ID NO: 43217 - DNA, 549 bp, Setaria italica
  Peptide Sequence Number=SeqID_109191
actcagtgacgtatgtccatcagatgcaaaaataataaatttatcttgtggatgaagtgctcttgtatatatagatggctctgctgtaagaacagggcggcggagaggctccgaaagtcgaaaacgagtaatggagggatcaagagcaaactcccgcctcttcaaataagcatccccaattgttcttgaaacctgaattatacccttaatgcgccaaacaccatgcttgagaacaacaatttgagaatcatctggatgacgggatataagttcatgcctcacttcctccatacttgcattatgatctcttgtgagtggctcagcaacaatcttgtttgatctacctaaacggccaattacagccctggaatcacctagattagccacatacagcgtccctctccatatgacaccaacgagacagcaagatccaactgcagcaatcaaaggctttataaaaatgtgttctccgcacaagtgtcaagaaaccttcctcagtagcagcaaatgcactccggacaacattctcagatattgttccattttctt

SEQ ID NO: 43218 - DNA, 399 bp, Setaria italica
  Peptide Sequence Number=SeqID_109192
tgacaaaccagagcaagatggtgcaattgatatgttgtgggctgattttgactttgctttagagtcagagaatattgggacttattatgatgacgagggtcaagaagagggcaatcagctagaatttgctcttgccccagtaacaccttgttctcgagggaagcatgaatttatcattgatgatcaaataggaatcagatgcaaatactgttccttagtaaatctggaaatcaaattcatgttcccatcattggtctcaggttttgctgagaaatctgcatggccaaatgcaaaaggtgtgaagaatgcattgatgtttcatgatctttatgacgaagcaggcggtgccactgagcactctcaagatttccatctatatggaacggtgtgggatctgat

SEQ ID NO: 43219 - DNA, 627 bp, Setaria italica
  Peptide Sequence Number=SeqID_109193
aatgcgacaggtcgcaacagcaattacagatggatcactccaagaacagctacagcaatcttcctgctgctcaattgacggagcagttaaccctacagctgcagaacactcaggatcatcgctctctgcatcggcgtcgatgaaatcaacctttgtttccaacgcttcactaagcagcaacaggcgcttgtcttcgccggccatctccttggccgcctccttcactggtactaaatggcaggctttatcacattgctcgttgagcacttggatccaatcgccttcgtcggaatcccagtccggcaaggccgagcaggcgccggccaattccttgattctctgggtggggctctctgacacgtcgccctcgtcatcggagtcatctgagtcggactcccagagcgcggcgtccagcgtgctcttgggggacacccatctcgccgcgacctcctctgtcttcacgccgcagccggctgacgccaggaacgggtgctccaagagctgcgccgccgtgcaccgatcccgcgggttcctcgcgaagcaccgggccaggaagtcctttgcctcggcggacatccacgcgggcacctccggcacggcgtcggtgtacccaatccggtgcacggc

SEQ ID NO: 43220 - DNA, 397 bp, Setaria italica
  Peptide Sequence Number=SeqID_109194
aaaaagtttaaagtttaaattaagacaattttagatagaatcctgtgattttctagcctgtgcatgatggatatgcatatcactatttataaggctttccttactatatgtcatattatgcattctggttttatggcagctcccatgatgtgtggaagatcctgatgatgtgttctctaagcaggatcacaaaagccgctgtaaccaccagcagtgccctctgttttgacatgcatctgaaactccagacctcagctgctggtgccacttgtaagtgcataccgctatgatggaccagaggtcaacacaaggctggcacactcggaagccaaaatacttcatgagaagatccatcacaaggcttatagtgatgatgagatcatcagaactcctcacg

SEQ ID NO: 43221 - DNA, 1219 bp, Setaria italica
  misc_feature (1158)..(1219): n is a, c, g, or t
  Peptide Sequence Number=SeqID_109195
ccgccgatggcgacgctcaaggtccccgccaccgtcccggccgtcgccgacgactgcgagcagctccgcaaggcgttccaagggtggggcacgaacgaggcgctcatcatctccatcctgggccaccgcgacgccgcgcagcgccgcgccatccgccgagcctacgcggagacgtacggcgaggagctcctccgctccatcaccgacgagatctccggcgacttcgagagggccgtgatcctgtggacgctggacccggcggagcgggacgcggtgctcgccaacgaggcggccaggaagtggcagcccgggaaccgcgtgctcgtcgagatcgcgtgcacgcgcggctccgcgcagctcttcgcggtcaggcaggcgtaccacgagcgcttcaagcgctcgcttgaggaggacatcgctgcgcacgtcacaggagacttccgcaagctgctggtgccacttgtaagtgcataccgctatgatggaccagaggtcaacacaaggctggcacactcggaagccaaaatgcttcatgagaagatccatcacaaggcttatagtgatgatgagatcatcagaatcctcaccactaggagcaaagctcagcttcttgctacattcaattattacaacgatgcatttggccacccaatcaacaaggatctgaaggctgatcccaaggacgagtacctcaaaacgctgcgggcgatcattcggtgcctcacctgccccgacaggtacttcgagaaggtggtcaggcaggccatcgcgggtctgggcacggacgagagctccctgacccgggtcatcaccacccgcgccgaggtggacctgaagcacattaaggaggcctaccagaagaggaacagcgtgccactggagcgcgccgtcgccggggacacctccggcgactacgagagcatgctcctcgccctcctgggccaggagtgatgaggcgtcggctgtcgcgcgtcgccgaccggtgccgtgctgtcgtttgcggtctgttcgggtaattaaacctggtatgcgtagctgttggccgttgtgaacgtgagtgggatcgtttcttccgtgatggtactgtcgctgcagcttgcatataacagtggtgatcaaataaattgtgttcacgatgagtcatggcaaaagaaaaannnnnnnnnnnnnnnnnnnnnnnnnnnnnnnnnnnnnnnnnnnnnnnnnnnnnnnnnnnnnn

SEQ ID NO: 43222 - DNA, 826 bp, Setaria italica
  Peptide Sequence Number=SeqID_109196
ttaaattaaatagtaatggatggatactgtagcattgctagttagatcagttttttaagtgctttatcaatctgtcaggaacttgtagtggctgcacttaatctcttgtggttgtggttgtgcttaatccatactgtagcatgcttagtagtctcttgtgcaaactttactacaagtaggagttgcatgtgcttccactacactttaagtgtttataatcttgagcttgtcacgagttacgagttaactagtgtcatcttggcgattagaagcgatgtgtatttggggtggcaatcgggatataacccttattctcagagataatttttaaaggttctcattgatccccctctggtcatgtgtcccggtcccatcccagtccttcagttagtaagatggtttttccgtcaattggaatctcaggttttgtttcagcgaattgatagaaaaaaaactaaattctaattttggccgggaataaaagaactcatcaaaattgaatgaagaatcgaacaaatctagaatgtagaaagtagaacagctttttccagtgctaccaaacgaagccgatgattatggtgtttgctgccgaacgtctcctctacttcgcgagcatgacccttgaaatttgtcacggtgccagctccgtctttcacgttagcgtgatactgactgagtcacactggcatcaccctccaaaaagtagcgctaaccaatcaccgcatctctgagtttgacgagggagcaagaggtgacacgcatcaacatttaccaaacccaccgcttctgttgacaggcaggtgggtttggtaaatgttgatgcgtg

SEQ ID NO: 43223 - DNA, 458 bp, Setaria italica
  Peptide Sequence Number=SeqID_109197
aaaaatttcaagttcagaaaggtctcagtaagcagttgagaaacgttagttcattctgattgagtttttgattcttctgttgttgacagtattgagacttgtctggagttgaaaatctgatgtatgaattaccagcatactgtaaactcttactgtcatttttatataaatctgatgctttttgcaggttacttcaccatacgggaacaccttacatcacaatgagaatgctacagttggtcaatttgcattcacaactgcagaagctggaaactaccttgcatgcttctggatagatagtgcagagaaaggatcaggagtatctgtgaatcttgactggaagattgggtttgcaacaaaggactgggatgctattgctaagaaagaaaaattgaggttggatatgaactgtagtaccaagccacagttctatccaattgtcatgaactcatattcaa

SEQ ID NO: 43224 - DNA, 985 bp, Setaria italica
  misc_feature (911)..(985): n is a, c, g, or t
  Peptide Sequence Number=SeqID_109198
agccgctactactagtctccagctgacaggctctcccttcccttcctccccgacccgaccccgggaggcggagatccctaggccggcggccgagatggcggcggctctggccctcgcggtggtgcttgccgtcgcgtcgctccgcgcggaggcggtgtggctggaggtgccgcagtcggggaccaagtgcgtgtcggaggagatccagtccaacgtcgtcgtgctcgccgactactccatcatgtacgagtcccaccccgactctcaccccaccatagccgtcaaggttacttcaccatacgggaacaccttacatcacaatgagaatgctacagttggtcaatttgcattcacaactgcagaagctggaaactaccttgcatgcttctggatagatagtgcagagaaaggatcaggagtatctgtgaatcttgactggaagattgggtttgcaacaaaggactgggatgctattgctaagaaagaaaaaattgagggtgtagaactcgagcttcagaaacttgaagtggcagtccaggccattcatcagaacttgatatacctcaaaacaagggaagcagagatgcgaattgtgagcgagaaaacaaacgcaagggttgcctggttcagtattctgtcgctaggtgtctgcattgcggtatcaatcttgcaattgtggcatcttcaagggttcttcagaaagaagaagctcatctagattttactcatttgatgttgcactgtggctcaaatgtaaaatgttgttcaccttggatgggacaattttgtcttgtttagaacgtttcacaccagtgatgactgatgagcaagttgtactgtatgcaatttaactacgattgaatggaatatcaatgtttctgggaaggtctgcataccttcaggcttcagcnnnnnnnnnnnnnnnnnnnnnnnnnnnnnnnnnnnnnnnnnnnnnnnnnnnnnnnnnnnnnnnnnnnnnnnnnnn

SEQ ID NO: 43225 - DNA, 397 bp, Setaria italica
  Peptide Sequence Number=SeqID_109199
agaagaacaacctttagtcaagaagcccataacgcatggacccatgttgattaaacccaaataactggtggctggaattctggattattctaatacacaaacatgtgtgcattatcatctcatcgcaaaataggatgaaaagccaatgatctagatattttgctgattacctccacaccagaagatgataaacaattttcttttcatagtatttgaattcaagctctaaaatgcaatcaaatgaggcaagccaacatcgtaatcctttgctcgttaccagtagagatctaaatcttaagcatcagaacaggaaaacagtagcatattcaattattctacaagacatggctagctaggggttacaaaacattgctgtacaagtgtgaaggagatagat

SEQ ID NO: 43226 - DNA, 445 bp, Setaria italica
  Peptide Sequence Number=SeqID_109200
tttttttgggttaagggattttttggtgggacacatttattttaagagattaatttgggtagaaacatactatggatgcattacatgcaagcgtagtattctggtatcggctgcatccatgaaatgaatctaaccatcggcgtccattttaatctattcagagaagtgcattatcttcctcccgataaaatgtgcagcaacactccttaggtgtggtgcactcaggttcaataggtaggtcagtatttttgttctgacattcatcctcgcatttcggatcagtgcatgagtccatagggtcacactcagtgtgatcttccaccagctctgagagggctgaagacattatcaaaagaatgcaaagtgcagtgcacatagacctcactgtgttgctcctgaccactgccatatggaaaagaacactattggtatgcctctagatatt

SEQ ID NO: 43227 - DNA, 373 bp, Setaria italica
  misc_feature (366)..(366): n is a, c, g, or t
  Peptide Sequence Number=SeqID_109201
aaaacaaaaacagcatgacaaatatgtagcaaagtaagccccaaaatggatgatgttgaacaggggaggcagtcgctacatcacactaacaactggccagtcacttgttagttacgcccataataagaatgttgcacataaaagcatctccatctttataagatcaaccaaccataaatgcaatatggcaatacatgtcacaactgcaacacaagagttaccaataacctgtgtgcaatttataacaacatttgttacagttgtatatattagaaccaccttaaagagggaaatcgtcaagagaacataaaataaatgtacatggatcaaactaatgccagtgttagggaaagaagatccttgctnagatgct

SEQ ID NO: 43228 - DNA, 326 bp, Setaria italica
  Peptide Sequence Number=SeqID_109202
ccgtgcattaatagccgcttccttgtgatagtcctctccctccctcccctctcctctcgctcgtgtccttggttctgttcttgggagtggcagcctggttctggcaacaagagttcttggagagcgtcctgcgccgttccgatgggttgcttcgggtgcttcgcaccggaggcggacgagggagacggggaccacaagccctccaaacccgatgattcatcaggggctgatgcgaggagaaaggtggcgccggatgtggccaacggctacgcgcacagcttcaccttcaaggatctgcttgtggcgaccggctacttcaacgaggc

SEQ ID NO: 43229 - DNA, 449 bp, Setaria italica
  Peptide Sequence Number=SeqID_109203
ggccaacttcttcgtcgtaaaattgctcacgccgaccgcgcgagctttgccaaaatcgtacagcttctccattgcttgccaggtcttgggcatgtcgaactggatgaagttctcacggctgatttcactgcctttcttgatctgaaagggccagtgaatcaggtacagatcaagataatccagctgcaaatcattcagagtgctgtcgattgccagcgaaacgtcttcgggtgcgagatcgctgcaccatatcttggaggtgacgaacaggtcttctcgcttgacgacgccatcagcgaagactttcttcagagcaacaccaatctccttctcgttgttgtacagggacgcgcagtcgatgtgccggtacccggccttgacggcggcggcgatcgcgtcgccgacgacgccggggccggccttgtaggtgccgagccccaccgagggga

SEQ ID NO: 43230 - DNA, 1598 bp, Setaria italica
  Peptide Sequence Number=SeqID_109204
aaaataaggaaaggaacccccgaaccgtaacaagaccacgacggtggcggtggcgatcagcgggagcaggagcagcaggcacgcgctcaagtgggccctcgacaagttcgtccccgaagggagggtcctcttccgaatcctgcacgtgcggccggcgatcaccatggtgcccacccccaatgggtaattttatcccaatctcacaagtacgcgaagacgtagcgtctgcatacaggaaagaagcagaatggcaagcgagtaatatgcttcttcctttcaagaaaatgtgtgctcagaaaaaggtagaagcggaagctgttttacttgaatcagatgatgtcgctgctgctataagtgaagaaataggaaaattcaatatttgcaaattagttttaggttcttcatcaaagaatatattccgaaggaaactcaaaggaagtaagactgcaacaaaaatttctgagtccattccgagcttctgtacagcatttgttatttcgaaaggcaaactatcatttgtacgctcagcgacatccgacattgttgaaacacctcgatccatatcttcttcaactgtttcttctcctagttctagaagtctttcctcctgtacaccttcagaatggggagatacgtatggaacagcaaatgtatcattccgccaaccttccctgccattgcagcgtgatcaagcattggcaatcataaacaatttatcgaataggagagctagctcttcaggcagtgttgtgagcgagatctctaacaatgatgacccagccctgacgagttcacactcaatcatatctgagatgcagttcagtagtggtagcagtggaaattctatctacaagagcttccacagagataatttgactgataactctgatcgtgcatcagtttcagaaatatcagaaaatgtaaatcattctaatgatcaggatgatctcaggcttcagattgaaaggttgagggacaaattacaacattttcataagctacatgaatgtgctcagcaagaatcatttgacaccactcaaaaactgcataagttgcgcactcaacacattgaggatgaaatcaagcttaaagaaactgaacttacagaggacagggtaagaagattggtaaagaaaaaaggagatggaagaacacaaagccgggagagaagctgagtttaagcaatgctctggtgaaattgaagaaaaacacagctatagtggccaggaagctaatgagaacgaaacgggaaagaagattgcaggacgctgttttgatgactataataggtatacatgggaggagattcaggcatcgacttcatcgttctcttctgctcttatgatcggcaagggatcatatggcaccgtttacaaggcgaaattccaccatacagtagcagctgtcaaagtattgaactcccctgaaggctgtggaactcaacaattacagcaggagctcgaggtccttggtaaaatccggcatcctcacctgctgatgatgcttggagcatgccctgaacatggttgcctggtttatgagtacatggaaaatggtagcctggatgacatgctgcaacgcaggaataatacaccgcc

SEQ ID NO: 43231 - DNA, 482 bp, Setaria italica
  Peptide Sequence Number=SeqID_109205
ggaagaccgcgaggagccgttcatgaagtccatggaggtctgaagacctgcattctgatccctgaagctcatcagcacgccgccgccgttgtccgggtacgggtatcctgccggaatcgccgcggcggccgcctggtcatgccccgtgaacatgccggccgggttagtgacgacatcgtacattgccggcgccgacatctccggcggcggaggggccgtgacggtgtcgtaggcggcggccttggttggggagctgatggtgaacggcgtggtcgcgccgccgttggcggtggcgccattggagtggaactgggcaggattattgctagggtttgccgcccgttgccgtggaggagagacctggacgccggcaggaggttgtgggtcttggggtcgaggcctgcgcgatgagcttcttcttgatgcacgagttccaaaagttctgacctcgttgtccgtgcgccggcaggtgcttggcgatc

SEQ ID NO: 43232 - DNA, 564 bp, Setaria italica
  misc_feature (412)..(412): n is a, c, g, or t
  Peptide Sequence Number=SeqID_109206
ggcgcactcttctggagaatcaacacgacatggcacctgcattatgtaacaattatattttttaggtcaatgtaacgagtatatgtatcaacatatattaaaaataggagtgacccatttaaaacctgcttcgagcattatgtgaaatttctgaaaagttcttgcataatgcaggtgcactggaaaagcaccccatgttccaaacagagcttaagtgcatatgcaggcatttcagtgcacagaaatgaaaggatagtgccagatagttaccgacaatatattattcagctgtttgcaacttgcaagaggtcatgttgaatagctaagaaaaattctgaaatgaggaaaattccccttcagaccaacaaaggcgtagaagcgccagaaaatcctgctaatcttttttttttcncaaacgatgcaggagagctgcatgtcatttcattaagagatgaaagagagtacaacaaatcctgctaatcttagttaaatataaaaagagaatccaggcttaatagttggcttagcactttactgataggatatatggcatgagctttattt

SEQ ID NO: 43233 - DNA, 1160 bp, Setaria italica
  misc_feature (1087)..(1087): n is a, c, g, or t
  misc_feature (1094)..(1160): n is a, c, g, or t
  Peptide Sequence Number=SeqID_109207
ccgcgccgccgcagatggcggggggcacctcgccggcagcgcgcgccctcgtcaaccgctggctgcctcaactcctcctcatcttcatctttgggtgctgcagctgttgtgctgtcgagactgagagaacccttgcgatgatcaagccggatggtttgtcaggcaactacacggaaaagatcaaggtggccatcttggattatggatttcatattgtcaaagagaccgaggtccagtttgatgatgagagggcatctctcttctatgcggagcattctgggagaagcttctttggcagcctaatcaagtatataacgagtggtccagttcttgctatggttctggaaaggcctgatgccattgcacaatggcgagctttgattgggccaactgatgcaagaaaggctaaaacttctcatccaaacagcattagagcaatgtgtgggttggattcagagaagaactgcgtgcatggttcagattcaccggaatctgcagccagagagatttcatttttctttggagatggtttagaaactgtggaacatgatgagctttagacactaactagtatcagtcaaggcagtaaattgaaacttgatatgtctcctttgaactcttagttgataacaacttgagtcagatgaggctactctggactccacattatattacttgacttggtagcttcatatactgaagactaggatggttgagggttaccaagctaaaacttttacttaaccattactctccacaagtaattgttgtgttaagatgaaacatatatttgactgtactggacacaaatagatcttagaattgatactggtttaccagaaactgtcacaaatggattgccctatcaatctgagagaattcaactttagatgcatagggtccatgaaattgggagaagggaattgccaatttgtcgaacagcagactcttaaggatcaggaattcgttctaatgtaattatccatagtagtatctgtgtttgcgtgcacgcacaacgttgtaacttgcaacatccaagaagcttagtgagtgcagcccgataatttttactaaaaaagaaaaaaanaaaaaannnnnnnnnnnnnnnnnnnnnnnnnnnnnnnnnnnnnnnnnnnnnnnnnnnnnnnnnnnnnnnnnnn

SEQ ID NO: 43234 - DNA, 519 bp, Setaria italica
  Peptide Sequence Number=SeqID_109208
cgcgcccgaccctatctgtttcgcccgacccttgtccgtcttgcccgagggctcggtggtatctttttctttgacccgagtgtatctgtgtaaaattttggggacttctctgtgttaagtctgaggatcccggtatagttattccttaggtctgagggtcagatcataagtttctcccgatccgactcctttatcttgttctctaccaacagaggcatgagatttcacacctttcctgtagtttgctgcaagtttctgagctaaagcgtgcaagtgttgttgaattaaccgtctaagtgtttaacccctgcattgcatttccgtgtagactaaatctcgccgacggcatttacgagctgcacccggtgccagaagacggagcggtagccgagctgccgaccgcaggagctgaagcagagcatccagaagatcagtttgctcccgccccgctcgaaggaaacgccccagacgcataacccattcttctgaacttgcgcatgccttcacttgtatgtatgt

SEQ ID NO: 43235 - DNA, 885 bp, Setaria italica
  Peptide Sequence Number=SeqID_109209
ataattgatatggagcaacccgccgctttcgccccgccgccggcgccggcgccggtcccgttgcttggtccgttgtcccggtggatttcacggtcttcaagaaggggaccgagatggcgatgcacgacgcgaccggccgcctcgcgttccgcatcgccggcggcggtggcggggacgggggcacggcgctcttcgacggcgccggtggtgtcctggtcaccgtcaggaccagcgggcagggcgagtggcaagcattcagtggaaatagtatggaacatagacacatcattttcactgcgaaagttatgtctgcttcttcaagccgaaaggaggtacatgtattcatcccaccaataagcagctttgaaggttcaaaaccaatctataggctcttgggaagtacattccgaagagcatgcacaataataaagggggactccatcgttgctcagacaaatctcttgtataaactcaagaagactctatattcacggcgtaagttcagagtgactatataccctggaaatgataatatcctcatcatggccatgattatgaccttctttgttgaaaaatgactgaagatataaatgcccactgtggtgagaaaactgatgactaactctgccacccctgaatcatgtatatttttctgattctggatgagttctttcattttttatgtcactcaccagatgctcttattgaaccgactgcttttgtaaatagcctaagtgtgtgtggtttctaaaaccactcatttattcttcttaatataatgacatgcagttctcctgcgtgttcgagaaaaaaagtgtgcatggttttctgtttctgtttggctaagtagatcgccaaagtgacagcgatgcaacactgaaccat

SEQ ID NO: 43236 - DNA, 141 bp, Setaria italica
  Peptide Sequence Number=SeqID_109210
catagtagtatacagatttagtgtggctgctgtattgattgaattattgacgaaccctatatacggaggggcggcgatcgcaatgccgcatcttagcatcaataattcaatcaatacagcagccacactaaatctgtattg

SEQ ID NO: 43237 - DNA, 1040 bp, Setaria italica
  Peptide Sequence Number=SeqID_109211
ttggtctagttcttctttagtttttttttgttttttttttttttgtttgtaaattttatctttctgctcatttttaaacccaaagaatataatcggcgcatcggaacagagtacatttccattcttgacgaaccctatatacggaggggcggcgatcgcaatgccgcatcttagcatcaataattcaatcaatacagcagccacactaaatctgtatactactatgcatcatcaaaggagctgctcgtagcagaggtccagcgtcttcttggcgaagaactggttcaccttctcggttgggtggaacgagtcccagaagaagtacttgccggcgtcctcgcacgtcagcgggttcttgtcgttgcacaggtacgacatctccaccttccccgtcgcgcagcacccctcctccacgttctccagcccaagggtggaagggttggtgatgaggtcgagcatgttctggtagacgttgatgtaggcgaccttgagcgacggccgggaggccgtgaggcggcggaacatggcgaggagcttgtcgttgtagtcccgtgccacctggttgtactcctcgatgcatcccccgcggagcgagttgagggtgcgctcgaggggcaggcacccgatggggctgagcccggcgaaggtgacccgccgcgcgcccagccggtggatctcggcgaggaaccgctccgcctccgccaccaggaagtcctcgaactccgccgccgtgaactccgcgaaccggccggtcaccagcaggaagtaattctccaggaagtcgttggtgccgatgctcaccacgtagagcgcgtcggagacgatgcgccgcgccgccgcgcgcccggcgtgccggcggagccgccgctggtactccttgaagtactccacctccttccacagcgggatcactgacaggacgccggcggtcttgttgtcgaggccggtgccggcggaggcgaagcagacgccgcgggcgaagtcctggatgccgtaggcggggtcgaggtaggccgggaccagcggcggcaggccgagcg

SEQ ID NO: 43238 - DNA, 744 bp, Setaria italica
  Peptide Sequence Number=SeqID_109212
taaaaagttatctgtttatgagctgtccagttttgcagttcgtgtttatttgaagctcgtattgggtttgcaagttcaggaagtttttttcatggtagtgtgtcacctttccttcttgcacttggcagtgccctatgtgatgttatttattttgtggaattacaattctcatttcattatttattgaaaatggtgctttcactcatatgaattcaatggaaccaatgttttaaatagcggctgattgccgccacgacagtgttacactaaatagcagtctgtagcgacgctataacgactgagcatagctctctgctaaattctatagcccgctatttaaaacactgaatcgaactagatatttatatcaattctgtttgagatgtattggactattgtagatatgtagatgatactgacaggtccaatgtacatttgacaatcacccacgtattttgatatagtaagcttttggaaaaacctgtacccatttgtgctagctaacaactaacaacatttatattggtctatgtcatgtgtcccacacatgtaagattttcttatatcgccatggtattcacatatattttgtgacatgtatcctttgtttggaatatatgtttctggttatgtggttgttatctgcagctgggcacttcgtttgaatattaccatttttttagagattggcaattatatgattgtattcttgattatagcttgtcttggtagtgaataaatcaa

SEQ ID NO: 43239 - DNA, 621 bp, Setaria italica
  Peptide Sequence Number=SeqID_109213
tgcgagctgacgctgttcccgacgtccggggaccattgaggccgccggggtccgacggcgacgggcatcggactgcgggcggccgcctccgccctcgggtacataaaattcgttcgcttcctgttccccctctgctgcgcaaccgccgctgcttcccacagatcggcatagaaatcgagcaaggctcaaccacatctcatagagtccaagaattcttgggaattagcaatccatatccatccatgatccatgtgttccttcctcgtagcatcccgtcgcccccaccattgttgctgttgatgttcgtgtagtgctgctgtttgtcatgttctcccccttccattgttcttgttgctgatgacataaagttagccttagagatgatatttagagggtacaacagaattgtgtctacctgcaattgagaactttctcgccttcgccatcgaagaacatctcaatccttgcgattgcgccgaggatccatggtcgaattgctctgttcttgagtgatgcaacaaccattgcttcggagcagcgacgcccctcaaagaagtgatgcaaccattgtgcattactagagttccatatggatataggcagggttgaataaccaatccc

SEQ ID NO: 43240 - DNA, 505 bp, Setaria italica
  Peptide Sequence Number=SeqID_109214
aaaggtttcaattgtgagacatgaaacactagatgaatcaaactgttgtcaagtagttcgagcttgtaagcagctgctctggaaaagatcagcacacgaaaaggaccaaagaacttgaaagccagtttaggaaacggtcggctgaccacttagtgttgtgtgcaaggctgcaacttcaataacacctgttccccaacttgaaactgcctatcattacgtttagtaccagcttgcatcttcatgcggttttgtgcagctgccaggcagtgtttcagattagtaagctgggcttccctgtcctgaatcaattccactacctctgagggctctcggtcagtcctaggtacagtgactccagagttggcttcatacccatacagggccttgaatagagagcacccaatagttgtatgataagaggaattgtaccacaactcggctaaagataaccaagccttccacttttttggggaatcatgcactgcacaacacaaatacatctcaa

SEQ ID NO: 43241 - DNA, 464 bp, Setaria italica
  Peptide Sequence Number=SeqID_109215
cccttggaagcatcatgcgttgctaaaccatctagacaaattacagtgacaacaggtgttttcggcaatatactctcaaggctggcccatccaattatttgctaagctccaccaagtattgcctgcttttggagcattgaagccttgcccagatgattgttgttcatttttcacttgttcatcttgtccctgtgaatttcctccagtcttcttctcatctctagctttgttaaatattacagtaaatccctcagctgaagcagggtcgttgacatcccactccccaaacttgggcagagggcttcctttttccgccgccatggcgtttcttgttcaaccacggcgagcgaccggaggcagaggaggcgccgacgaccaagaaagagatggggaacagggaagggggacccggaggggtttggttttggatttaggggagggaggaggaggggagttcgttggtt

SEQ ID NO: 43242 - DNA, 704 bp, Setaria italica
  Peptide Sequence Number=SeqID_109216
ctcccaaaccgatgaaagtaatggacgcatggatccaataatgatggaacagaagcctggcatatatgaaaaaacacaaatcattgtgtacaaacagacaaaacggtcgattactaacatctctggttgatcattgatggccagacatgaattgaataaatttcctttcccgaaaaagtttcatcataattggacagggtagtggtgacttgtaaatatgggtagccattttagttggcatgccaagttatgcttcacgaccgcagactattataaaaattgtggaaaggcacaaaactcagggaaaaggaaccgtgaggtggtaaaggaggtaggttcttacagtattgcctgcttttggagcattgaagccttgcccagatgattgttgttcatttttcacttgttcatcttgtccctgtgaatttcctccagtcttcttctcatctctagctttgttaaatattacagtaaatccctcagctgaagcagggtcgttgacatcccactccccaaacttgggcagagggcttcctttttccaagccagtacatgctgattgctgaccaacaattcccctgacagtaccagaaatggcaagagggcacattaagaaacacattggcacctatgctccgtgcgttcgatcccaaactgtaactccattcttaaaaccgtcctagagacaatgggactcagctccc

SEQ ID NO: 43243 - DNA, 611 bp, Setaria italica
  Peptide Sequence Number=SeqID_109217
caaaaaagtcactagcatcaatacattgcgctgactaaactaattagcgaacataaactcaaagaaacacaacataacctatgaaagtgattgacggtagttacatgtgccaacaatagtcagtggctcaatgctttgtttccaaaattagaatcaaccaaatatagaaataagcatttttcttgagaaaagaaatacattatcctaaaaggatagaaggttaagtgcactaaaacaataaagcatccttgcacatggcagaacatccaattatggaaaataagcagtactacattgttaatgaatgaaacctactttaggttactagattgatgcaagaaccaaactaaatgcgcagctagcagaactgccaggaacaacaagcccaaacaaagcttaaattcgccaaatgaaattcacaacctctgcttaccaagccagtacatgctgattgctgaccaacaattcccctgacagtaccagaaatggcaagagggcacattaagaaacacattggcacctatgctccgtgcgttcgatcccaaactgtaactccattcttaaaaccgtcctagagacaatgggactcagctcccagcagagccaattaa

SEQ ID NO: 43244 - DNA, 884 bp, Setaria italica
  misc_feature (1)..(36): n is a, c, g, or t
  Peptide Sequence Number=SeqID_109218
nnnnnnnnnnnnnnnnnnnnnnnnnnnnnnnnnnnnttttttatcaaaagctttgtttcatttcattttaccctgtaacttccccaacagctgaacaaatgttcattgagtcaactggaccaacaacgatattacgcatcaatatacaccaccgaggtttaccagatatataagctgcaaataatgtacatgcctgagacagattagtaaattacttgtttcagaaaccctcttcatcacacaactgtaaaaagaatcaccacaacatgtttccctggacatcacagaatctcttcagaaatttgacaaggaaagcacagttcagttccacaatccagttggtatctcgcgaacttcaggattcagcagcactaggttgaaagcagcacaaccatttcttagtattgcctgcttttggagcattgaagccttgcccagatgattgttgttcatttttcacttgttcatcttgtccctgtgaatttcctccagtcttcttctcatctctagctttgttaaatattacagtaaatccctcagctgaagcagggtcgttgacatcccactccccaaacttgggcagagggcttcctttttccgccgccatggcgtttcttgttcaaccacggcgagcgaccggaggcagaggaggcgccgacgaccaagaaagagatggggaacagggaagggggacccggaggggtttggttttgattaatgattgtatttgagtttgtagcatctcttatcatatgtcaatatagtagtcagtgctgaatgaaggtctattcggacaaaaaagtcactagcatcaatacattgcgctagaacttaaaacttaaattttaagttacgttaaacttaattttaaaactttacttaaa

SEQ ID NO: 43245 - DNA, 1162 bp, Setaria italica
  misc_feature (1)..(41): n is a, c, g, or t
  Peptide Sequence Number=SeqID_109219
nnnnnnnnnnnnnnnnnnnnnnnnnnnnnnnnnnnnnnnnngcggaagaaattcatcagccttcttaatttttctccgaaaaaagcacaaatgcatattagattagggttcaatgacatggaagtcaagaactacagcatatatacactttacaggccaaataatgcttaacagcttgcagcacttagcaaaaaaagaataatatctgctcaaaacatctcgacaactttgaagaaatcaaatagcttcaacagcagccatctgttccagaattcgagccaaatgtaacaatactaaaatttgagcaataggcaatggctatcgcggaaccatatcctggtgttatcatgatcccagtgtaccaccaacattacttgtaggcacatagtagaagatgatagcgtaaactcagctacccagcttgaaggcgtccacgaaaaggcccagacatacgccggctttccagtagttcaccatcgaaatcaatttctgaagcctcccaggaggcctggcgattggttttctgtacataagcatgccaattccctcaatggcagccactacaacagcagcaacaagaacatcccagtcgccagtctgccctagtattgttgccaaggcgttggcagtgtagaagccaaggaggacgaggaatatctttgtgggggagttggtactgccagagttcagcttttcaagtagctcccttccagcggcttggatgagtctgcccagccttgtcctaccaaggaagccactgtcctcatcaaaatcttggccatcagtgttagatggcccaccagtttccaaagcaaaggctggcctcaatctgcagtttttcatctggtaactgagagcccctctgctattctccttggtcggccgcaggaagcatgcccagctgagggggatgcagcattgcgccgccggagagctgccgcctccgcagagcccactggacggagcccgcggagcgcagggaggggccccacgctgcagaagcatggggagcgcacgcggggcagctcctccgtgccaactgccgaggaccgaacggacgcgtcggcgcgaggacggggaggaggcgtcgagaggaggagcgagagcctctcacgcttcgaggaggatgaggcagctccccttctggttcatgggcaaagaa

SEQ ID NO: 43246 - DNA, 949 bp, Setaria italica
  misc_feature (1)..(8): n is a, c, g, or t
  misc_feature (19)..(19): n is a, c, g, or t
  Peptide Sequence Number=SeqID_109220
nnnnnnnnttttttttttnttttttttttttttggttaccccatcaaataagcaatcatacccaaacagtgatgaaggaaaatagatccacactttacacattgcagtattacattacaggtagctaaggaaatcatcatcagccagatccattaattaattgatcggtccataatcacacacaccattatccattatccaaattccaaaccctaggcagcagttccgaaacgaaaagcagaggagaagagaagtgatggccaaattcaactcaaatgagacaaggatcagatcacacgaaacgaaaccaaaccgaatcaaatcacgggacacgggagacgaggtcattacacacgaagcgcgcgcgggggcagtgggaccggggaattatttggcgacgatgcggcggatgaagtcgtcgtagcggatggtgccgtcgggcgcgacgtcgacctcgcggatccactcgtcgaactcgtggggctcgagcttctcgccgatggatgtgaggacgtggcggaggtcggcgacggagacggtgcccgaggcgtccttgtcgaggacgcggaaggcgtcgcggagcgggcggtcgaagggctcgggcctgaggtgggcgcgcatgaggtcgaggaagcgcgggaagtcgaagggggccgtgagcttctcctgcgccgcgatgtcccggagctgcgcctgcgtcgggttcccgccgagggagcgcatgaggacgccgagctccgagggcgcgatgcggccgtcgccgtccgtgtcgaagagcgagaaggcctcccgcatcgaggcgatctggtcctcggtgaggtccttgccgcccatcgcgccgccggggagggagggtcgtcgggatcggagatctcgcggcgcggggaaaggggtgtgggggagggagaggcgtgtgcgattgattgggtggtggtggtggggaacagcg

SEQ ID NO: 43247 - DNA, 366 bp, Setaria italica
  Peptide Sequence Number=SeqID_109221
ggtcgtcgtttgtcgcgcttgctgccgtcgccggccggacggcggccgcgctgagcagaagagcgaaacgagcatcgcggacgcagaaattatggggacgagaagcagctgccgaagcaggagcatgaaaaattttcagaggtggcaactcttccgttggagtccgggctcgaattattcgttccggagccggattccagattccaggttccactcgaggtcgaggcgacggcatcgtccagccaccactggccacggcagctgccgctcccgattctcttctctcgatcatctcgttgagccgatgcagatgcaccccgcctagctaggctcctaggccgcaccagcacaggttctcgctcgcat

SEQ ID NO: 43248 - DNA, 500 bp, Setaria italica
  Peptide Sequence Number=SeqID_109222
cgtgtctcagctgggcgcgcgggtgtagcatctgcgggagaggagcggccgggcatggagctcgatgaggagacgttcttggacgagctcatgtcgctgcggcgggaggcgtcggcgtcggcgccgtggcagggctaccagcccggaggcggcgtgatgatgagcgacctcctcttctacggcggcgaagcaggcgccgacgcgacaagcagcggcggcatggacctgtcgccgttccaggagctggcgcccatacagccggtggcgccaccgcagcgcccgcacgaggacttcaacttcgactgcctgagcgaggtatgcaacccttacaggagctgcgtcgccgttccggaggaggcggcgcccggacagacgctcgtcgctcctctccacgacgccatggcggaggaggagacgagcggtgacaagggactgtattatggaggcggggggtccccgacgttcgtgttcggaggaggcgccggcgagagctcggagat

SEQ ID NO: 43249 - DNA, 438 bp, Setaria italica
  Peptide Sequence Number=SeqID_109223
taacctaaagtaatccaccgtgtccttatgtatttgttatagacttcaactcaaacttctccgcaattcactgcttcaaaaaaaatgttggatccactacaaactttaaacaagtatatcgtttcccggaattggttaaccggagaatgcagatgcatgaaagaagctgaatggtggctggttaggggacatgatataatgtggacccgcacgcagccttcgtcgcagggtggcgccgccgagccaagccaaaaaatccagcaacttggtgtacttctagttctaggctcagaaaaccgtgacgcagtctgcaggtggcttggagacaaggccattacccacgagccaaactatgctatacttttttcttatgcagcaaatcatgatacctgtcgattgcaaagcatgctagttaggtggtgaatattagtaaacgaa

SEQ ID NO: 43250 - DNA, 1506 bp, Setaria italica
  misc_feature (1)..(26): n is a, c, g, or t
  Peptide Sequence Number=SeqID_109224
nnnnnnnnnnnnnnnnnnnnnnnnnnagtcaaggacgcagtgaactaatctgaaaagcaacatggttgcatcgttctggtagtttctggactgtaaagaaggcgaagtaatgaattattattgaactggacaagttttaatcgtacaaggatactcttccttcagcagagcattccttagattcctggctcatcctacaggcctgggggcttcagaaatgggacggggaagagactctccacatcgattggggtgcccacaacgttatttacaacctcgttcacaacagttgtccctttccacccgttgaaccaggggccaccaccgatctccagggcagccatgttgcttgtggcgtcgagtatcaactttcccttgccaccatcatatttcttttcccacaattgtagcctgagatctccatagaaggtgtctttgcatgctggcgccagtccagcctccgtagtaggagctcgcaatgtactgcctggttctgtagtggttgcttctatttctaccagatgagttttgttctcgccagacatcttccagcagccccacagtgcgatgtcccagcttactgtcccagtccaaggtacgaattcaaaaaaatttccatcacagtgtattccaatcagtgaaggactctcgtaggtatcaccaagtccaattttcctcaatccaccagcagcagttaaagaaacttcaccagaagcgcctgagaaaacgttgcactggatccaataccactttcttgggaaagctccaccccagttcttttccgagtaggatggagcattttcaaattcaaaccgttctccatcccattctatccatcctgtggacaagccaccagccatgcatatttgccaatgaggttcaaagaaaggaaaagctgcaagccaaccagctgtagataactgcttagaattgacatcaccccatccataaactggacgagtgctgtactcccaacgagctgtttggacatttggcacatactttgaccttccattatcacgtatgaaaccctgatgccagattggagtgacttggaacccttccaaaacacgcttagagaactcctgaggggggacctccccttgtgggggaattgagtctttattgggaatgaaagtgtttcccagcgctagttcatgcctacttccccaaaagttgtttgatttctcagagaactgaaatatgtacttatcatctgcgccaaggatttgtgctcccaccccggtaaagcgtgggccgtgtaccaacttgtcgagatcactcatcccatcacggaacagcgggttctcaacagagtacatgaagccaaagctttgcctgatctcaggtatggacaccttgaagtaccatccttcaaagaaaggcctggaggtgccatcaaagtggtacccgctgtgcggcgtccggagcggccgatcctgcggcgtgggcgcgtagacgggcgccgccgccgcggacgccgccgaacgaacgaaggaaggagcg

SEQ ID NO: 43251 - DNA, 564 bp, Setaria italica
  misc_feature (37)..(37): n is a, c, g, or t
  misc_feature (79)..(79): n is a, c, g, or t
  Peptide Sequence Number=SeqID_109225
cggtctagtacgtcgtagtctgttcttttcttttttnttttttttttttttttttttgtagcacaacacatgttcatanacttttttttttgaagcagccggcacatgttggtacacagcaaagagagagcaagaaagtagcagctgctctttgtaattaagaaaagaaaataattattataaccaatgctttttacaacatcaggatatccggatccctgaagatcagtctctttttctacagttttgatgcatatttcttgagggcatcccctgcgttcttgtgctcctccggcaggggcaggttgctcagcagcgtgactctggattccgcgatctgagggcccttctcccccgtggatggatccatcttccacagcttcacctcccaaacctgggtggagcggccgacgtggacggggagggcccgcgcgaggacggtgtcgccgagggcggcggcgcggaagtggttgatgctgagctgcatcccgacgacgcggcggtacccggacgccatgtgcgcccccatgctcgccagcgcctccgccagcagcgccgacaccg

SEQ ID NO: 43252 - DNA, 568 bp, Setaria italica
  misc_feature (542)..(542): n is a, c, g, or t
  misc_feature (565)..(565): n is a, c, g, or t
  Peptide Sequence Number=SeqID_109226
tcaggatataaccccaaccgctgccatcggagatcgctgcctctgaaggcagggcgtagcgccactcactaactcactccaattggacgacgaacgaaacaagacatcgatcgctcgtttcagaagcagaaaggaacagcacaggcgtaacacgatctctgaaatcgaatggcggaatccacacgcgactcagagcagcgatcggttagctgcgattcaaagcagcttcgatagacagaattggagacggagacgacggtgatgaattaattaataagggagggatgacgcggagcacctgggtggagcggccgacgtggacggggagggcccgcgcgaggacggtgtcgccgagggcggcggcgcggaagtggttgatgctgagctgcatcccgacgacgcggcggtacccggacgccatgtgcgcccccatgctcgccagcgcctccgccagcagcgccgacacgccgccgtgcagcgccctgaacggctggcagcaggtcggcgtcacgaggaggcgcccggcgacccgcgacgggganagcctcctccatctcgaacccgngcg

SEQ ID NO: 43253 - DNA, 645 bp, Setaria italica
  Peptide Sequence Number=SeqID_109227
aaaggacgaataggaacaacgggtaagggcaggcaatgccttgcggaagaaggccagcaggagcagagtgatgccaagcccagcaatgatggcaaggtagcaggcgtacactgtcatgtagtcatacatcgctgccctaccgaccagaacactgtagaatatgaagtcccccaagccgagcttgatcgccccagatgagctcaacccaatgccatcttcatcttcctcctcttcccctgatctctctggacgtggctggatcaaaggtaccctcatttcagcaacagccactctatgctcccgcaatgcggatacctccccagcttgttcaactgtagaatctgagctcaaagcagccgccaatgtctccctgggccttgaattattaacattaccagctgaaatggtagcttcatgaacttggggtgccgaactgtttccggaattggcatcaagacgcctcccggatacctccccagtcacgtcgaccgtggtggaactggcatccaaatccgcaccaggttgcctcccttccctccacaagcgccaatttcggccgtgtcggggatccaccggcctcgcctcgtagaccagcgccggtatctcctcgttcctctctatggcgagctcaagcagtactctcag

SEQ ID NO: 43254 - DNA, 2082 bp, Setaria italica
  Peptide Sequence Number=SeqID_109228
agaaaagcaagaagcgtgagcacttccttatcgtctcctcctttcctccccgcaaccccgatcgaatcgctcgaaccattcccaggtttgcgcgtcgatctaggtttgcgtgaggatccaattccatctcctcccgtttgagcttgcgatcctcgaaggagttcttttgttagccttctttcccccgatttttttcgctcatttttccgagcttttcaagagcagaagaggcagtttcgaattccgatgcaccgaagcctcaagatccaaatttgaggcctttcccaagctctccgcgtcgatctgcgcaagaggatgggtaacgcgggcagcaacggtggaggcgccgctcctggtcaccgccgtcggagctccagccacggccacggtcaccaccaccaggcgccaccgcctcccccgccgcaggaggctgcgcccaaccgctacgtgttcgcggccgccacgccgtacccgccccagtaccctaaccccaacccgtcgcagcattacccgcagtacaactactacccgccgcccccgccgtccgtgccggtgcctctcccggcgccgtacgaccaccaccacaggccgcccaccgccgccgccggggagttcccgcccccgcccccggctcatccccaccactaccccggctgggctgggcggtatccgtcctacggaccgcatctgcctatgccgacgccctacgtcgagcaccagaaggccgtcactatccgcaatgatgtcaacctcaagaaggagacgctccggattgagcctgatgaagagtgccctggccgcttcctcgtctccttcacctttgacgccacggtcgccggcagcatgactgtttacttctttgcaaaggaagagctcaactgcaatttaacagcggttaaagaagaccttattaagcctgttactgttagcttcaaagagggtcttggtcagaaattcaggcaaccttctgggacaggaattgacttttcagtgtttgaggaatctgatttattaaaacagggggaaatggatgtatatccacttgcagttaaagctgaaacagcattatctgttgatccaccattggaaggggaagaccaaaagatgaaaactcctaactcacagatcacacaggctgtgtttgagaagaaagaaaatggagagtatcaagttcgagttgtttgtcagatcctgtgggtgaatgggactaggtatgaactgcaagaaatatatggaatagggaactctatggaaggtgatactgatgcaaatgatccagggaaagaatgtgttatttgcctctctgagccaagggatactactgtcctcccatgtaggcatatgtgcatgtgcagtgagtgcgccaaggtcctacggtaccaaaccactcggtgccccatctgcaggcagcctgttgagcgtctcctcgagatcaaagtcagcaacagatctgaagatcagcagcaggcaccccaatcaccgccgcgcccacccccaaccccgcagcaggaagacgtgcacccatgatcagagtcagtgctcaaacattatatgggtctagtttgcggcctttgggccttccctgaacgttgctctctcccatttgagcaacggggaatgtaatcgatactttacctttagcatatgtaagcttctggcatcgccgcggctcgccgacccccgctgtatccggaggccgaagaccaagatgccatgaagagtgtgtgtaccatatacatcatgcttgcgtgtgccatggctacctgaagaagtgtagggaggacgactcctcgtgcctgattgacttcctccatcaggtaaagaaagggaagagaaggtggactttaaaatttgtacaaaaaatggctcgtatttcaccttgatgacattcctctctgttatgcctggaaagccagtgattattttacttgtgtacgggagttacaagaacaattatagctcaccgggcgaggagagctttgtgcccccccaatgcctctgttgtttgtttgtgatttttgctttgtacaataagtggtaaaatcagataaaggctgcgataaaatgttgagtattgctcct

SEQ ID NO: 43255 - DNA, 429 bp, Setaria italica
  Peptide Sequence Number=SeqID_109229
tttttttgtttttttttttgtttagaagcgcaagtatgatatatatttatattaataaatactcggaatatataacatgatttcataaatacaacaatacaaattcagttaaactagacgcaatagagaataactacaccatgacactgatgagtataactagttataagagatcaaaggtacgtatgacttccagagagcattagctaacaccatacaaattcagttaaattagatataatagagagagtttgctgctgccaggcagagataatttgaagttgccatccagagccttagctaataccctccagcacctttcaggcaatacagcgaacaccttgtgtgcgtaatgaacagaaagcatattcaatcgatccacgcatccccattgtcatcgattaagacccaactgatgtacacaccaag

SEQ ID NO: 43256 - DNA, 285 bp, Setaria italica
  Peptide Sequence Number=SeqID_109230
aacgaaacgaagcctacagacgtttcttgctcccacgccggcaatggccaccgccccagcccacgcagccgccgccgtcgccgccggtgaagcggtgatgtaccacggtcgagttgagacccgttcgaccccacctcgtcttggcttccgtcccggtgcccggtgggccgcgatctcgctgcctccagggcctcgccacgcggctccggcggcagccgcggccaaggagaggggtcggtggggggagggggaggggccggcggtggggtggagctgggagcccat

SEQ ID NO: 43257 - DNA, 770 bp, Setaria italica
  Peptide Sequence Number=SeqID_109231
gccttcaacaaggttttgattaaaatcaacatttcttcatatgtacatggaggaatttaacaaattctcagcagccaacagtgcttcaagtcgcaactcgtgcagctgccctgtgctcagagttgaaacccaacccattttcttcacaagtccaacgagcgccttcacagtttgtacacacggcagtgggagcgaatagcgatgtccacggttccaagacttcacacatcacaaccacagaaacacaacacctcttcctacacagaacacatgaacgaactatacatcggttttctctctggaaaacaaattgggcgtaagtatgcgggtcatcggaggtaatggtatcatttgcgacactgtcagaagaaccgccgcttcaagtttctggtcgttgcttggtaggagcgcatgagcagcccgacacctatgccaacaccaacacagactcccagcccgatccccacaccgactcgaacgccagcgttgaaccatgagagctgcccatcgtcgtcttcggagtaccaaccttcagggtattgcatgctgctagtattcatatcattgtcgccttcatcgcctgcagccgccaatgccccaggccggcggcgaaccaatccgcctgcagcttcctcaggcgtggcgagccgcagggcgcccgtgagcaccgcgggctcgccggcgcagcacccagcgacatatacctcgaaggccgaggccgaggcggccgccccagcggcggggacgcagtcgatttcccaggcgggagg

SEQ ID NO: 43258 - DNA, 422 bp, Setaria italica
  misc_feature (399)..(399): n is a, c, g, or t
  Peptide Sequence Number=SeqID_109232
aggggcatgttcatctatgttgatatgcacaactactcattaagcaaataacaaattatgttccttaaaaacagaaaataaaacacccaaacaacatttagccaatacagcactaaaacgatcataaataggcttcacagtcacctgtgtgtttgctatatagagatacaaagtataggactacagttttatatcatttactgctctcgaaatccataaaatgtttaaaggccaacaaaacatagatgtaaggtggaatcatctgtttttctgtatataaggtgtataaaaaaggatcataccaaactaccaactgtataacgaaaaataacatacacatatagggcatataatacaaacagaaattagatataaagagagggaagagagaacctgctnacaaggtctatcccaaacagttg

SEQ ID NO: 43259 - DNA, 525 bp, Setaria italica
  Peptide Sequence Number=SeqID_109233
ttttttttttttttttgtttattctttagttggggggatacgggcacgaagtgccttgtaaatggcaactgatttacagaaaattcatctctccttttttttgcattgatgaattgccatacacagcaaatagcctgcttttttagctgcaacttctgttgcctccctagtcggttccttcagatcagaagctagacctgctgggagagcaggatgagcagtccctgcgggccgacgaggatctcgttgaggaagctgacgagtccgaaccagacgacgggcgtgacgtcgacgccgccgagcggtgggatgaccctgcgggtgacggcgaggaatggctcggtgggcgcgtaggccagcacgtaggggaactccgtgacggggagcctcgggtaccacgacatgacgatccgcaggatgaagaggaagccgaacgccgacagcgccggccccgccacgcccgccaccgtcttcgccgtcgccgggtccagctcgcccagcaccgccaacgccgccgaagacgaa

SEQ ID NO: 43260 - DNA, 247 bp, Setaria italica
  Peptide Sequence Number=SeqID_109234
gtggaaggaaaggcagcagctgtgggttggcgcccttccatgtggtagagtgatgtaccgtcctcctccgtcgacgtggtggagctaagcgaggcggttgacaggaacgccattgatgtctgaggcgccattgttgctgctgctcgagctgcagctgatgatgccatgattgtgccactgtatggcttgttcatgtgagctgatgatgagtggccaccgtcgaacattggtgccaagcgtggcgatg

SEQ ID NO: 43261 - DNA, 246 bp, Setaria italica
  Peptide Sequence Number=SeqID_109235
ctctctctctcggtctcggccttcctttcctagcggcgacgacagggcgagtggcgccgcccgccagttcttcgtcgggcgctttgccggcgacgagcatccgaacaaaggtgcctattgactcgggcagggatcaagcctagtgcctattgactcgggcagggatcggatcttcttctgagctccgactctgaagctcttcttttgccctgatctctgcggtgtcattgcaaaacaagatggttt

SEQ ID NO: 43262 - DNA, 662 bp, Setaria italica
  Peptide Sequence Number=SeqID_109236
ttaccttactaccgtaactaagtaagtaccagtccggaagacattaatatatctggttctgactcttggccacatgtatccagattatgatttcaggtaattttgtctttgtagcgagtgtgttctaatataatctggaaggaaggatatttgggtaatgtcatagtcagcttttttggggcgatatggcaaacccgcttttgtcctttcctaccagcctaaagggggtgttgtcagatggtatgacagacggattaataaccgttgctctttgagctgagagttcaattctctccatttcccttggtctttggtatttgataaatctaactttcttaaggtctcctggctgtcatgccacacattcatgatagcacgacctttagattaaatttaacacccttttgtcaacatttgttcacttatcagtgctgttcgggcacacttgttcttccaagaagaggagatggaaagtttcaagcagatgatagacacctacttatcggacgcttctaggcaatgggcagcaacaaatgagggcagttctcttctggacagtatgactaaggctattgatgaggttatcaaaatcagagagtgtgacatctacagctataacccagactctgatggagatccagttcaagagaaaggggccatat

SEQ ID NO: 43263 - DNA, 353 bp, Setaria italica
  Peptide Sequence Number=SeqID_109237
gaagaggaagatgccttgatcgacatggacatatgactgaccgcattctgctcggaacctgttgtgtgtgtaatatagagcgttatgccccattcctgccaggaagtcatctcctgataatttgctagtgcagtaacagcgaaagctcacaactcgctttagcttcctattgtagaagaagtagtagaatgaccatatggcccctttctcttgaactggatctccatcagagtctgggttatagctgtagatgtcacactctctgattttgataacctcatcaatagccttagtcatactgtccagaagagaactgccctcatttgttgctgcccattgcctagaagcgtccg

SEQ ID NO: 43264 - DNA, 226 bp, Setaria italica
  Peptide Sequence Number=SeqID_109238
cggcgacgacagggcgagttgcgcccgccagttcttcgtcgggcgacgggcgcttcgccggcgacgagcatccgacagggatctattgctatttctctggtgatgcctgcaattcggatcaaaactgaaggataggaggaatatatatatatatatctatgagttgaggaacttgttttcatagaatttggatgattggattacttaattatgtttgaatctcatt

SEQ ID NO: 43265 - DNA, 702 bp, Setaria italica
  Peptide Sequence Number=SeqID_109239
cgtccccggaccccgggctcctgtggagcggattttcggcccaggctctttctcctcccaccacgccttatcctctctctcggtctcggccttcctttcctagcggcgacgacagggcgagttgcgctgcccgccagttcttcgtcgggcgacgggcgcttcgccggcgacgagcatccgacagggggtcctatactaggcccgcccctgttgtgggacgcatccgatcggatcgactcttttatgagttcacaggacgcccagcatgaagtttctagaatacacccccttcgacagcataaacttgttcctcgaccaactcaaccttggggattgcgcaatcagaggaaaccttgaggccttctcatgcaagcacacttcgacagaccgtcggctttcaataagcctagaacatgagattcttgattacctaggcaagtcctctgacagtgatccttcttcaccagtggagcacctatcctccagatccagccggaagacattaatatatctggttctgactcttggccacatgtatccagattatgatttcagtgctgttcgggcacacttgttcttccaagaagaggagatggaaagtttcaagcagatgatagacacctacttatcggacgcttctaggcaatgggcagcaacaaatgaagggcaggttctacttctggacagtatgactaaggctat

SEQ ID NO: 43266 - DNA, 1064 bp, Setaria italica
  misc_feature (1015)..(1015): n is a, c, g, or t
  misc_feature (1024)..(1064): n is a, c, g, or t
  Peptide Sequence Number=SeqID_109240
caggttcactttaaatgatcctgaggctgtatgttttgcctttctcactgatttgatatgcgtaacctgaactggctgtcatgccacacattcatgatagcacgacctttagattaaatttaacacccgcaagtcctctgacagtgatccttcttcaccagtggagcacctatcctccagatccagccggaagacattaatatatctggttctgactcttggccacatgtatccagattatgatttcagtgctgttcgggcacacttgttcttccaagaagaggagatggaaagtttcaagcagatgatagacacctacttatcggacgcttctaggcaatgggcagcaacaaatgagggcagttctcttctggacagtatgactaaggctattgatgaggttatcaaaatcagagagtgtgacatctacagctataacccagactctgatggagatccagttcaagagaaaggggccatatggtcattctactacttcttctacaataggaagctaaagcgagttgtgagctttcgctgttactgcactagcaaattatcaggagatgacttcctaactggtgcggcgtctgatggtgaagaggaagatgccttgatcgacatggacatatgactgaccgcattctgctcggaacctgttgtgtgtgtaatatagagcgttatgccccattcctgccaggaagcttttaatataactacccttgtatcgcagcctgtgaaaaccatggcccttgttagtgttgtttgtatatgcggattgggacttcgcagcggcagacttttaatcctgaaagcttgagctgccacggtaatttggtactctagtgtttgctggaactggagtctatgttctgcctggttaaacaataagatattcagacaattgggtgaattgaagtgtcaaatttgctcaattattcattcaatggtgctgatggagctttgttgtaaaaggaaagtagttaggttaaatttttaagaaaaaaaaaaaaanaaaaaaagnnnnnnnnnnnnnnnnnnnnnnnnnnnnnnnnnnnnnnnnn

SEQ ID NO: 43267 - DNA, 1870 bp, Setaria italica
  Peptide Sequence Number=SeqID_109241
gtctcggactatcggccttcctttccggcagcggcgacgacagggcgagttgcgcccgccagttcttcgtcgggcgacgggcgcttcgccggcgacgagcatccgacaggggaacttgttttcatagaatttggatgattggattacttaattatgtttgaatctcattaagcaatattctgcaacagatagatgactccaaaatggagcgaatgctcttcaaatagctacagagaactatcttcacatgaaaatggagagtgcaaatcaaccttaacagaaaaagtccctttgcccaaaagctgttttgatttaccaactgccaacacaatgtgctccctatctgcacagaagaaggatggcaatgtttataaaaggcggaagatggacaaggattcaaattctcttacaacatatgaagaggctaaagaaacgatgactcaaaattgtgcaacgtctgatgaccactcgtcattagtgctaccggttgtctcctcagaagcaatgcctttcaattcaacagccaacacgacaggtcctatcctagattgtgaagaggctaccgaggtttcattggagccaaattctgctacgaatggtagaagcttggtttcaagtatgtcaccatcttccatggttctagacaaaaaggatgctgctgaatgttcgtcctcaaatatcagccctacagaaccaattactgagcatatgtcaccaagggatctttgcattgccatactgaaaaaagatggacttataactgaatcaagagcaagaataaaagatgatttcactgatagtgatgccaacccaatgttggcatgcaatacttgtggctgcttggagcattcattaaagatgctaatatgtgattcttgtgaagcagcatttcatctgtcttgttgcgcccctcctattaaggaactaccaactgatgaatggtactcgtgcgccatgcttgtgtaagaaacctaagagtgtttacggcaaactctcggagggcaaggtcctgccttccaggaatactaaccaaaggcctcatggcatgagtcatatagattacatgctgaaggatgctgaaccatatgttactggggttcgaattggtagagattttcaagcagaagtaccagaatggtctggttcaacttcgagcagtgatggttattttgatgagccctctgaatttgaccccgctgaactaaccaattttaatttgtgcaaaacgagtaatcaaagccaatcttccattggtaattggatacaatgccgtgagactttgaacccaggagactccgacaagcaagttgtctgtggcaaatggagaagggcacccctatatgttgtacagacagatgattgggaatgtttttgttgtcttctttgggatccagcacatgctgattgtgctgttccgcaggaattgaagaccagtgaagttcagaagcagctgaggtttgtaaacatggtgaagaaacagctggtggaccaaaaccaaaatcccgcttaaattccagtatcatagcggggcggttccttattgtatgaattactgtatgtgggggttatcatgttactagccatcggtagtcaatagaacatatgggaattttgctgttgtagcctgctcaactaatctgactgtgtacaccgttctggcgttcccctctgtactgccctctataggtttgtggtacaaaaagagttgtacaacataggtctgtccagtttttggaagcagcgtgttgatactgttgtagtcgctgctaaatgtttctgtaatcctgccccaagttttggtccatgtaacttttggatgaggtttgatcaaggggggaaaaagttggaaagtcctaacttaaaaaaaaaa

SEQ ID NO: 43268 - DNA, 1130 bp, Setaria italica
  misc_feature (1090)..(1130): n is a, c, g, or t
  Peptide Sequence Number=SeqID_109242
acacggccacacgggagacggtctcatcatctctcaagcctccccttccagatccagccgacagaccgcatattccaccgcaaggcaagggcgtcatcgtcttcctcatccccttccggccccggccttccccattcccctctccccgtccccggaccccgggctcctgtggagcggattttcggcccaggctctttctcctcccaccacgccttatcctctctctctcggtctcggccttcctttcctagcggcgacgacagggcgagtggcgccgcccgccagttcttcgtcgggcgctttgccggcgacgagcatccgacaaggtcttttgccctgatctctgcggtgtcattgcaaaacaagatggtttccttcgagatgaatgacctcaagaagattgggcttggcctgacaggttttggaatattcttctcctttctgggaataattttcttctttgacaaggggctcatcgcaatgggcaatattcttttcctgtcaggattgggtttgacaattggtctaaaatcaactatgcaattcttcaccaagcctaagaattacaagggtacaatctcatttggtgttggctttttcctagtcctcatcgggtggccctttttcggcatgctcttagaggcatatggctttattgtactcttcagtggattctggccaacacttgtagtgttcttgcagaggattcctatcatcggctggatatttcaacaaccgtttgtgacatcgttccttgaccgctacagaggaaagcgggttccggtctagcatcctttttgctgtgtgttgcttgtggcgtagtaactagcacatgatgttttttagtggcagtagcaaaatggctatgcttgcgtctgtctggtccttatttctcttatgtgctgtagttccctattataggattgttctttgtaaattatagccccagactaaatccaactcgatggtttcgtgaagaccacagaccaggatgcatattcaccccatgaaaaatgaatggatcgaggaaactcttaaagtacttaaaaaccaaacaaccaaaaaaaaaaactaaagaagaactagaccnnnnnnnnnnnnnnnnnnnnnnnnnnnnnnnnnnnnnnnnn

SEQ ID NO: 43269 - DNA, 1039 bp, Setaria italica
  Peptide Sequence Number=SeqID_109243
tagacataccatctttcatgtccaattcgactaggttgcagagtatctgattttctcacacgccacgtccacgctctccaaattcgtcagttgcttgcgtacaaaaatcatcttgtacgcatacggcactagctttcctcttaatgcctgcatcattgtacgcatagtacatggcctttcgggatgtatctgtacaccgtatattttcggctggacatcgacgctgcacgtcctcaggctgctgttgtccacgctgcgcacgcaaagctaatctcgttcaggattccgtccacgttcgcgcggcccaggcgcccagcccaaccgctgggcgcgctgtcgctgccgatgggacccacggtgtcccacgtggcaggctgagtagggcccaccttgtagtcgccttccggtgataataacggcgcgcggcgcacgtggtcacccgcctcgcgctaatctcccgataaaatacgcctcgtggggctccccgtatcgcaccacctcacctcacttcacttcaattcaccgcggcgaccttcccatcggcatcgcgatcccactgacccgatggccgcccgcctcggcgtccccgcgctcctcctcctgctcgcctgctccctggccgcggcggccggcgacgagggcccggggaaggtggccgtggcgctctactacgagacgctgtgcccctactcggcgcgcttcgtggtggaccacctcgccagggtcttcgaggacggcctcctcgacgccgtcggcctcacgctcgtcccctacggcaacgccagggtccacgccggcggcgagatcacctgccagcatggcccgaacgagtgcctgctcaacaccgtggaagcttgcgccatcgacgcctggccggatttggacgtgcatttccgtttcatctactgcgtggaggagctggtgatgaagcgccagtacaagaagtgggactcctgcttccaaaagctggggcttgaccccaagcctgttcgctcttgtagcagtcagtaacaggcttggggtcaagccccagcttttg

SEQ ID NO: 43270 - DNA, 1673 bp, Setaria italica
  Peptide Sequence Number=SeqID_109244
gtacattgtcataataatttgcaccatctcagcctcctatctgaagtctacatcaaacccgaaccattactcctgcggtaacgcataaaatcgcgcacttcttcaacagccttatgtaaccttgtaataggggcattgaaccgctaaaaattatcaaagaagtaactttggaacattcttgctccaataaatcacttgtcttctggggcctgggcataagccaaaagaaacaagaaaatgctattccctcttgtcctcttcagcctcatcttccaaactgtaagcattgctaacaccaacgttcctgtccttgtctatctttaccatccctacttcaccatctccctttgtcagggattgagcttcctcatcatcatcgtcagcagcttcaccagaatatgcatatctttgcgagctttgtgacggtgcccacagataacagatcacaacaagcaacacgaatgcgagaacatcccagaaggcagttatgatccaggcactctgccacctctcgctaaaggggtctgttgctttgaagtagacctcataaccaatccaggcaactgaagctatcacagaaatagccagtgaatttgtaaattttctgtatatatccaatttcacggaactcctccttgcctgtagcttctctagagtgcgcgagagagaagtaaatatccaaagtatgagaaaagcatccaaaaaatgcatcaggaaggaccaggaaaagccttgctttgcctgatatatcattaattgttccaacattttctgcaatgtccagcatctcagatgccaggaaatatgtgagtccaagaagcaacaccttggaagtgagacctcccaaagttgggcgaacaacaccatatcccattgagatagaaaggatcagtagccgcgaaactgtttttctgatggctccaacagtgaccacccaagttgtgattccaactggccgcacgccactgctgttgaagtttaagtattcaaagtaccatagtgtcatctcaaacaggccaagtgcaatgactagtgtgatccaattctggattggcaagatatccctccaaaaccttatgtactggctaaaccaaacaatcattaccaacagatatgccagcgacatgagaacataaaatttcatcaaaggagccattctcccaggtagatacccaccaggattcctccagatagtcttcccactcattgtaaggcctctcagttttggatcacaggaaatgaagaacaagttgtacatgcctgtctttgtaacacgcaccgactcatcttctagcttcactgaaaggtgattagcactgaagtgtgtgtctagcacatagggccaatctggatcatcagaggatggccttctgattacttctccttgcttgcagccctctagtttagcgaggtccggggtacaacatatggacctctgtcccccataggcagatcccccgatgttatccctgtctgcggcttcaaacagaatagcttgtaccaagcctgtactatgtgccatttttgtgtgtgattccgcagcttccggggttctccagaatgtaacattcacaaacttgatgaaggatgagggaggggcggccaggtcggccccgtcggcgacgatgccctcgctgccgccggagaggaggaaggcgttgcccacctcgcgg

SEQ ID NO: 43271 - DNA, 1126 bp, Setaria italica
  misc_feature (1109)..(1126): n is a, c, g, or t
  Peptide Sequence Number=SeqID_109245
acgcaacaaggactggtgaaattccaagttccgttcaagggtttacccagaaagcaaggggaaaagcacacgcggacgcctcccggccgggcagcatgattgctccccatccccggcgtctactcctcctgccggccgtgctcgtcctcctcgccgccggcgccctcctgccggaggcggcggcgaaggtctccctggggctctactacgagtcgctgtgcccctactgctcgcggttcatcgtgaaccgcctcgcggggatcttcgaggacgggctcatcgacgccgtggacctccgcctcgtcccctacggcaacgcccgcgtcggatccaacggcgacatctcctgccagcatggcccgaacgagtgcctgctcaacaccgtggaagcttgcgccatcgacgcctggccggatttggacgtgcatttccgtttcatctactgcgtggaggagctggtgatgaagcgccagtacaagaagtgggactcctgcttccaaaagctggggcttgaccccaagcctgttactgactgctacaagagcgaacagggccacaagcttgagctcaagtacgcgaaccagaccaacgctctcgtgccgccgcaccggtacgtcccatgggtggtcgtcgacgggcagccactgctagaggattacgagaacttcgaggtttacatctgcaaggcctacaagggtagcaatcctccgaaggtctgcgagggtctggtccatccggcgatggcgcttgagactgcggtggcgcgccacggcgtcagctacaactccggcggcatcgagcttgcgactgcagaagaggagggaagggagagcaagattaagatgcggctcccagataatgataactgatacattgttgggtcatgtggacataggcagttgcgtgttactgtccggaatacatattatgggttgctgtaggtcgtgcactcgtacagtaataatgatatgctaagctgctttgccgcttaattatagtctgatctggttctgggtgtactctttggttatgacattgtgggtgagaatcaattggacgtttgacaaagtcgcattgatatggcacggcaaattggaagaaccgtaaannnnnnnnnnnnnnnnnn

SEQ ID NO: 43272 - DNA, 354 bp, Setaria italica
  Peptide Sequence Number=SeqID_109246
tctattatttcttagtagcttgtcttccttgtgcataaaaatagcacatcattagaagtttggaccacaacttagcatacatgtacatttaaaagtctcgagtcaacatctatttatgtttcatgaacataaatcatcttggaagtttggctccagttgaacagggcagtatctgaaactgtgctgttggatggataaatagactatactgtctaaacatgatagatcatatggacaaatataggataatttctaggtttcaaactaaacacagagctcgggggagtggttaaaggaagaaatgatttcttaacaatccaaacaagttgttttctggggacaaggacaacgtgg

SEQ ID NO: 43273 - DNA, 422 bp, Setaria italica
  Peptide Sequence Number=SeqID_109247
ctttacacttgtgggagttagacaccttggatgaactcgaagtggcagccgtagacgttggtgcatgacagacattccaccttgtggagctttcagagagcaatggatactgcaaacgggtattttcttgacgttgttcacttacacactcattgtgagcagatattctatcatcatcagttccagcatctgtgcctttagaatgggcggctgtcctacctgtctttgacaacttcagttctggcctgggctttttcttcacaacattagtttcagtaatattttgctttgcatttatgtcggtattactatgccccaggtcaagatcatgctggcttgactgcctttgtttcaattttctcttcttaatagataagtctgaaagaccagaattttcctttttagtcggtacgtttttaatt

SEQ ID NO: 43274 - DNA, 2462 bp, Setaria italica
  misc_feature (2422)..(2462): n is a, c, g, or t
  Peptide Sequence Number=SeqID_109248
cccacctcgctgcgactgcgaacgctgctgccacgattcacgagcggcgaggagaggagatgcagaacgtggtggaggtcgagccgggccgcccggccgccgatggccgcccctccgtggggcccacctaccggagcgccttcgcccgcgacggattcccgcccccggtccccgggctggacagctgctacgacatcttccggatggcagtggaaaagtatccaaacaacagaatgcttggtcaccgtgagattgttgatgggaaggctggtgcatatgtctggaagacatacaaggaggtgtttgacattgcaaacaaaattggtaactctatcaggagctgtggacttgcaaagggtagtcgttgtggtatctatggtgctaattgtcctgaatggattatcacaatggaggcttgcaatgcccatggaatctactgtgtcccattatatgatacacttggagctggtgcggtagagtttattctatgccatgcagaagttgagattgcttttgctgaggaaaagaaaattgagttgctcttgaagaccttacccaagtcaaatgagttcttgaaaacgattgtgagttttggcaaggtaactcaagaacaaaaggaagaagcttccaaatttgggctgtcaatctactcatgggatgaatttctgtccctggaggctgaccaagaatttgatcttccagtcaaggagaagacagatatatgcactataatgtatactagtggaactactggtgacccaaaaggagtactgatatccaatgcaagcattatttgtctcattgctggtgtggaccggctacttaactgtgtaaacgaggagctggcagaaagtgatgtttacatgtcttaccttcctctcgcgcacatctttgaccgtgttgtggaggagttgtttattttccatggtgcctctattgggttttggcgtggggatgttaagctgctggttgaagatattggtgttctgaaaccaacaatcttgtgtgctgtcccacgtgttcttgatcggatattttctggactacaagctaaaatttcctctggtggttttataaagagcactctgttcaatcttgcttacaagttcaagcagtttagaatgatgagaggagctaagcacgatgaagctgctgccatatgtgacaaagtagtttttagtaaggtgaaagagggtcttggtggcaatgttagggtcattttatctggagctgctccacttgctacccatgttgaagaatacttgcgagtggtgacgtgtgcacacgtcatacaaggatatggtctcacggaaacttgtgctggatcttttgtctcgttaccgaatcagatgtccatggtagggactgttggccccccagtgccaaatattgatgttcgtctggagtctgtcccagaaatgaattatgatgcacttgcaagaacagctcgtggagagatctgcatcaagggagaaacattattctcaggatactacaagcgtgaagaccttacaaaggaggtcttggttgatggatggttccatactggtgacattggtgagtggcagcctgatggaagtatgaaaatcatagatcgcaaaaagaatatattcaaactttcacagggagaatatgtggcagttgagaatttggagaatatttatggccttgtttctgctatagattcgatatggatatatgggaacagctttgaatccttccttgttgctgtggtcaatcccaacaaggaggctcttgagagttgggctgctgcaaatggaataagtggtgattttgagtccttgtgccagaatccgaaagcaaaagaatacattttaggagaactgtcaagaataggaaaagagaagaagctcaaaggttttgaattcatcaaagatgtacacctcgaaccagtgccctttgatatggatcgtgacttgatcactccgacatataaaaagaaacggccgcagttgctcaagtactaccagggcgtcattgacaacatgtacaaaagtgccaagtgagctcagcatgccatatagaagaacatctgagatgaagattcccaacgccgaaggagctgatagaagtaccaaaccgaaaaatattctcttttgctgtgtatatgtccgtagtttggatgccagaattatacatcacctttcaggaattatttgccacttaggagtatatgacaatcgggcaaatgggcaatgttgccagcatgcagagctactctgcaactgccagttagccaacatcgaacactgattagcagaatagtttgtcggggtgaactttcaggcattgtatacttgaatcgcaccctttacttgtgtcgcttccagaatctcaaattctaccgagatccaggaatacatttttctttttgagtgcgatctgtatgaatcgtgacaannnnnnnnnnnnnnnnnnnnnnnnnnnnnnnnnnnnnnnnn

SEQ ID NO: 43275 - DNA, 477 bp, Setaria italica
  Peptide Sequence Number=SeqID_109249
gtcagctcaacaagatcctcttcaagtccaataagtgcctctttcaggttcttgccttcttcaacaagggcttggcgcacagatgggtctagtttccctttcatcttgttagcaactgcatttctttcagctcggagccgttcaacctccttctgcagcgcgaggtactggtcatagagcttcaggacgaggtcgaggttcgcagcggagttcctgctccggatgttgtcagcgacggcgtcccggttgtcccggatccatttgaagtcaatcgacgccttccactgcggcctcaacgcaccacctccacctgcacccgcgccgctgccgactttggtgtcgggctcgacggcggtcgtggcggcggcggcggaggagcagaagaggaggcggggatgggggcggcggaggagggagcgggtcagggtccggagcggagaaaaggaagctgtggttgtggcggcggatgaggagagg

SEQ ID NO: 43276 - DNA, 185 bp, Setaria italica
  Peptide Sequence Number=SeqID_109250
tattggtgattgcttgctcggtggaggcagagggagaagagaggctacaaggagtagggctggtactgtgtctttgcttgagaggagctagcttgctggagaagaagagattaggagggtctggaggatgccgtgacctgcttcgagaagcgccgctgctgccgccagcggttgcgagtcgcgat

SEQ ID NO: 43277 - DNA, 368 bp, Setaria italica
  Peptide Sequence Number=SeqID_109251
tgctacctaagtgattgtcgagttcctcaagtttcccaatcatgtctttggaaactatattttgtgatggttcaagtggtcatattgttggtcattgagctttataatccgcacatagttaagtagacaatcatctctagctttacataataagtagccaatcatgctcttactttgggcatcttagtcaaaagttctgaccaagctttccacttgtcgttgtcttggactcgtggtcctacatggatttgcacagagacctgtgtgcaatcgaaggcttattgttattggttttaaagtgggatgccaacctttgccatgtgtaggatgcatcaccagtggaaagaactggctgcagtgactcgctc

SEQ ID NO: 43278 - DNA, 359 bp, Setaria italica
  Peptide Sequence Number=SeqID_109252
gtccctatatcttttgctccttgctccagcctacctcttcacctaccttctccctccctccctccctctctctctcctcctggcattgatatagtggtcttgcttgtagcttgctgtcagggtctaacggttgcatggaagggctgacgggcgagcagaggatcgcgttccaggaggccttctcgctcttcgacaagaacggcgacggatgcatcaccatggaagaactggctgcagtgactcgctcccttggtcttgatcctagcgatcaggagctcaacgacatgatgagcgaggtcgatacggatggcaatgggatcatagatttccaggagttccagagcctcattgccaggaag

SEQ ID NO: 43279 - DNA, 437 bp, Setaria italica
  Peptide Sequence Number=SeqID_109253
gttttgagtatgttaaattcatataagatatgtagtcttgctggtgtgcattctttttttcaaggggtgttgtggagtaggactccaggtgtatggctcatttcacataacccctggtgtgataggaacatgatataccttttgtaagagcaggaattttgctggtctgttatttatttggtaaagtccatttgcgtttgcgcgctttaaatttcagctattgcaatgttcatttctggttggattatattaagtaactgttgcggcctgcgggtattacctattcttgtggagcttctgatttctttaagctcactttggcttagttgtatcttagtctttcgttgtgctgtcctatagctatactttctttgactaatttgcatgcaacatttctaactcaacttactatttcaaaggctagcgataggttcaac

SEQ ID NO: 43280 - DNA, 486 bp, Setaria italica
  Peptide Sequence Number=SeqID_109254
gcattcctgtccacgacaatggaacattagttagtttaacattaatattctgcaagaatgtacagttctagacttggagagttggcttaaagaaaggaacctgttaacacaattaattcaacaacaacttctgagagcacaacagaggatgaaggctctggctgactctcagagatctgaaagggaatttcaagaaggtgacatggtttatctaaagctccaaccgcacctacaatcatcagtagctccttgaggtaacaacaagctgtccttcaggttttgttccttaaaaagtgctcaagtgagttggtgctgttgcttacaaacttgaattgccaccacaagctcaaatccatccagtgattcatgtagcacaattgaagaagcatgtaccaactatgacagaggtgagcctctgtttgcactgaccctgaacaacctttgctgcggatgattggtcctatttttagtaccgttcttaagtta

SEQ ID NO: 43281 - DNA, 609 bp, Setaria italica
  Peptide Sequence Number=SeqID_109255
gagcgcggcaagctcccgaagctgctgcctcttgtgctcgttcagcacctcatccaccggggttagcagcttttccaccatcccagcagccgcatccagtgcctcctgagtctctgcctcaacaagcacatggaggtcctcattctcgctgggatccggcttgagatccctcttctgcaacagcttcccttccttgacgctccccttccccctgatgacaatcttggcaccggtctccttctccatccgcttctgcgtgttgccgcgcgggccgatgatgagcccaatgaaattgtaccctgggtactccttcatggggatgtagagcttcttctgaagcttgggcgggcggtagtcggaggggggcttgaaggcggggttgcggcggataagctgggagatgatctcctgcctctcgcggttgaggcgctcccgggcgcggtactcgcgggtgttgatgcggatgccgaggttgtcgtagacgggctcgggagacggcgagcgcgcgccctccgggcggtcgtcgagcgggaggcccgactgcagcaggcgcgagatctcgaggaggcgcgcgttgagggcgtgcacctcggggtccatctcggcggc

SEQ ID NO: 43282 - DNA, 1861 bp, Setaria italica
  Peptide Sequence Number=SeqID_109256
tgacatcacatgataatctacaaataatgacaataaatatcataacaaaagcattagtaaaaggttccttaaaacagttccagaaggagatagcaaatattccgatgcctgctgagccagtaatgcttcatgctttcttaagcatgcaacctctgcaaaggtcacaacagcacacagcaaggttaagatgtgagtcccaaacttccaacaagaaataaatcaggttggtataagctccaagaaagatcaagccttttgccctttgttggaagaatcacccaagcttggctcatatcacttcatttctgacataaacttatcatactccgcatcagcaccataggaagctggctggtcggtggtggaggacaaaggtggtggcggtggtggcactgcattgtgggtggcccaaggtgccgttgcaatactctgagagggatcgacactagctggtggcggaggaggcggtggctgatatgtaggatagtatgtggagtaactataaggtggtggagggtacattggtggtgcatttggtgcgccagaggatgcatatactggagctggggcagggtgagtgggtgcaccagaactcggtggtgttacaccagggggataattctgagctccatcacttgatgcagcagtgcctggtggagggatcggagctgctgggggtggtggtggaggaggatactgcacaccatatggaggtggggccgtctgacctggtgcagggggtgccggattgtagacgctagagcctggtggcggcggaggatacgaagcatatggtggtgggtgcccccatggaactggagtgtaactccctggtggaggaggaggtggtgcccccatgtaggattgggaagaatagccaccagaagtaggatctgtaggaggatatgacggtggtgctgacactgcaggtgcaggctgtggaggcttgccggcaactctaacggcaataactctgccttcaaaatggtgaccattcattgcagcaatcgctgcattagcctgtgagacatctgaatacttcacaaatccatatcctttgctatgcccagtgtttcgatccttgatcaccttagccatgacaatatccccaaattgtgaaaacagactgatcaatcctgcatcatccattgtaggtggcaagtaaccaatatacagatttgtctcgtcgtagtctttcttgataccattggccccaatggcagccgcaccaccaccagcagaccaaggcgggttactcccactaccagcagaagcgccaccgctgccaccgcttcctgtaagagccaacatgggaccaccagattttgtcatggactcaggtgcactcccaccaccaagctcagccaggaagttctggtattcatcatccatcttcttcccagacgtgcccttgaccggacaatcaattgtcgggtgcccaccatcaccacaaatcttgcactgcacatcactcttaaacgtgttcatcttattggggcaagcatactgccggtgaccaggctccccacatgtcctacagaactcatcatccctaattgtcccattgagcgcggcaagctcccgaagctgctgcctcttgtgctcgttcagcacctcatccaccggggttagcagcttttccaccatcccagcagccgcatccagtgcctcctgagtctctgcctcaacaagcacatggaggtcctcattctcgctgggatccggcttgagatccctcttctgcaacagcttcccttccttgacgctccccttccccctgatgacaatcttggcaccggtctccatcccaagacaagaccgacaataccaagtagacctacctagaagtactactagacca

SEQ ID NO: 43283 - DNA, 1651 bp, Setaria italica
  Peptide Sequence Number=SeqID_109257
cttcctatctacagcacaatggaaaagaagactttaaagacaggaaatagagcagataacacacctacaaaactatggaggcaatgccaggtagatggtgtaacagcaacatgatataaaggtagctaatgctggttgtgacgactgactattgcatcctttcactgggacaaggatatgataatgtcctactttccttccaatacatctagaaaaacctaatctatgctaactaccttccaaaccttcacatgagcccatggatatcattttgaagcatgcatcttgagcatagactccagactacatcctgcatgccggcatgtcctacttgaaccgcaaacaaaattccaacaatgttaagaatattagcaatataaaatatatatctgtaagttctgcgccgtagatttccagcatggtatgatgcctaatgcacacatcaactaccaacagtgagaaactcgttactgtgtgtcagtaggaaatgtaaaggagaaaccaaatttaaagcgttaggttccacagaacaattcacaacatctccattatacctgagattcatcaagcgctataaactctgactgcctgtgccaatctgtcacaaaaagtcgaaaactgccaaacaacttagccaaaaacgtaagataggaagcttgacatattcatcagatgccaaacatgcatttcaaagtcataccaaccagcaaggggcagcaatctttctgcttctgatgatgaggactgctagcacttaccaaatcaaggggaagaacatgtgaacaataaagtgagaataacacttataagggtcacagaacaatggagctttaagtgacatcacatgataatctcaaataatgacaataaatatcataacaaaagcattagtaaaaggttccttaaaacagttccagaaggagatagcaaatattccgatgcctgctgagccagtaatgcttcatgctttcttaagcatgcaacctctgcaaaggtcacaacagcacacagcaaggttaagatgtgagtcccaaacttccaacaagaaataaatcaggttggtataagctccaagaaagatcaagcctgtcaaaaaagttgagacaacatggaaaaggtgaggtctagttagtaaaccactgcacatggaaacagaggggaaaagcataaagcaagcatataatctattgagaaattctttattatatactgaagtgcataagaaagtgcattgtatcatatcctacaaaaaatatccaggtggaattcctttctcgattgaaaaaagaatctgagaatatcatatcttatcaaaactcaatattgccttgcaaagagttttaccaacttccttaccatcctagtgagcatgttagtgctagccacattctaacatcagggcaatatggttaacctacatcttaaaaaatatccttactaaacaagtagaaatattgcatgacttcgcggtgcttaattagttcacaccatgtagtgactccaggaatttttgcagtgcaagcacattcgaaccaaacattggataatgaacaacttgaaataacttgtgcaactaatagaagaaggtcatgttaagttacctttgccctttgttggaagaatcacccaagcttggctcatatcaacttaa

SEQ ID NO: 43284 - DNA, 503 bp, Setaria italica
  Peptide Sequence Number=SeqID_109258
cgtggtggccgttcagttcagtccgccatggaaggtgcagctgcccagatggccgtcccggtcctcggcatcatcgccgcggccgccgtgaccttctacaccgtcagcttcatgcagctccgagacaaatcattcgaggagctcgacgagaagtactcggagttcgacgacgagtccggcggaaggcagcggcgggcgcgccggagggccgagcgcgagaggaagaggcgaaattgactgaaacctcgcctcgcctccatgttctgcctgatcgagaggaaacaagatgccgttgcggcttgatgagtacacttagctactggaacaatcgaaacgatgggtttgtgcttgtgtttacctgtagtgccagcgacgtgcttaaatggctctacgagtatgtgtgtaccatcctcgccctgttcttgtgttccagcaggagttgtaaaataatttgccatttcatttgcaaacgatggtacacctttctttgtaccccgtatttt

SEQ ID NO: 43285 - DNA, 479 bp, Setaria italica
  Peptide Sequence Number=SeqID_109259
accatgctcttgcatatcactgaataaactcaatgcttcattaggttggttactttcagcatatcctgaaatcatagcactccaagacaccacgtccttctccggcattccatcgaatatagagcgagcaatctcaacttttctgttcttggcatatccaaaaaccatggcagttgatgataccaaatccttccttggcatcccattgtatagcttttctgctatatccattttggcacagctagcatacaagtttatgagagcactactgaggtgagcattgataagaatatccgacaccaacatgtatgagtggatggttttcccaattctcaaatgtcttaaatgccgacaggctgatagaacagtagcaaggatcaattggtcaggaacaactccagatctcttcatctcagcaaacagaagcaaagctgctttgtagttccgagtctgacaataactgtcagatgatattacat

SEQ ID NO: 43286 - DNA, 357 bp, Setaria italica
  Peptide Sequence Number=SeqID_109260
aatttaattgcatgctgagataatgcaatcttaaactcagccatgctaggatatgttgagccaactatcattgaagggtcttctttgtcatattccatgtttggaatatgttctgcctcatgtcctactaactcttggtcatcctctaattcaatcctgactcaatttccaattcatcctcatcctcatccgcactctcagcctcactaacatccttttctttgtcctgattcttatgcacaatcacagccatatttgcaccttcacaaggtgtcttctctaagtacatgacctcctcatcaacacctacatgctcgttctctggtactaggttgcaaaggtacctatcctcatctt

SEQ ID NO: 43287 - DNA, 576 bp, Setaria italica
  Peptide Sequence Number=SeqID_109261
cacgagcaccagcgacacgagcgccccggccaccgtggcggcggtgatgatgaggaacgccttgcggaagcactgcacgccgatgcaggtcttgtcgccgccggcgagggacccgccgtgctgcctggcggcctcggcgtcgtagagcccgccggcgacgcggacgttgagcacgtaggcgccgatggggctcgcgacggacccgaagttgtagagcgtggagtagtacttgagcccgaacacctcggagatgatggcgaacagcagcggccactgcgcgccgaagcagaagccgatcaccaccgacgccgcgtagagggactgcggcacgccgaaggcgatgaggaggtggcccacgcacgagagcaggagcaccagcgtcagcatcagcggccgcgggaacctgtaccgggtcaggaagatctccgaggcgaacccggaggtgacgcgccccgcgtagttccagatgctgatgagggagacgaaggtgttaatgctcttggccgggtaccccagggactgcccgatctggcccatgttgtcgatcgccgtcagagtgccgcccacgccgcagat

SEQ ID NO: 43288 - DNA, 288 bp, Setaria italica
  Peptide Sequence Number=SeqID_109262
ggggggtaggtaactggttgttcaattttcggagggggggagagcttttggttcagtgctaatgctggaagagtcggtatcaataccattgtgggagtcttcactgctcctggaaatcttctcagatgaatcctgtgcctccacattaacaccaataacaccagcactgtcccgctttactacagagccaacactttcaaaccccccatgtgaaggcaagtcaatctgctgggggcgctcatccgtcacatacacggcggggaagcggttgaagaggaaggcgatcgg

SEQ ID NO: 43289 - DNA, 463 bp, Setaria italica
  Peptide Sequence Number=SeqID_109263
gcgggcctccccggcagctccggaagcgccggtggcgggatcctctgcgacggcgccgccactggggcggcggccggcggagaggctgtcttcttggggagcgtgatggtgagcgtctcgctctcgaacttggcgcggatgccgtcgacgttgcagttgtccgggagctggaagtccttctggaagcggctccacctggtgccggcgatttgccgctcgccgcgcgtcctcaggtgcccgtggttgtccaccagcacccggatgtcctccctcttgaaccctgggagcgtgatcctgacgctgtcgacatcggcgccgcggctccactcgacggaggggtcgtactcctcgtaggcgcggttgctggccctggtggcgtccatggctgctgcttctcggtctctccctgagctagcttacagcgtgggatagaggtctccgatggtggcggtgatcggcggtg

SEQ ID NO: 43290 - DNA, 443 bp, Setaria italica
  Peptide Sequence Number=SeqID_109264
taattattggaaaaactgattataaatatacacccttggcattgcttagacaaaatgaataatatcttcttgagagcaaatgtttactgacttctgcagcataactctattttctagcgtacctcacaatacaaattgttcttatgtaagccacagcaccttaatatgaaattatttacttttaataacagaaaagttatttttgactgcaaagaaaccataaatctggcctgttttgcttcagttcatttgtttggacggccatctggcaaattattcaacacagtgcagacagactattcctcagtacaagtcaaatatgttctatttaaaagctgatgttgtgcctaaggctgagctgtaattcttttttcatttttcttctcttttgtcttttttatagccaaataaacaaggatttgacttagaacttcttgtacttc

SEQ ID NO: 43291 - DNA, 657 bp, Setaria italica
  misc_feature (1)..(27): n is a, c, g, or t
  Peptide Sequence Number=SeqID_109265
nnnnnnnnnnnnnnnnnnnnnnnnnnntttttttttttttttttgtgaaaaaagaaatccttttatatacatcggaaaaggtaaaacatgaccaaattctgtaaccagcagaacagcgacagaagcaagatcaccgaacctatgcacacacctatactagcaagcagcagcctaccaataaaatcttctctaacatgccgccgctgggaaacgctgcgacgcagcgatcaacggcggcagcatgtcgacgccgaaccacggtgatctgatcaggtggtcgcgtcagtaccccgcgacctcggatccctgctgcttcttgccgccggtgctctttttctggcacttgtccttgatccactggaacccgtgcgccgtgccctccttcaccttcctgagcccggtcgccgcggccgccttggtcttctcccccacgcccccgccgccgccggccttccccgcgtggccgctgtcgcgcggcgccctcgggctcgcgtcgccgccgtagtcccactggtccgcccacgacgtcccgaacgagttgctccgctgcatgactgccgcccacccaagaaaactcaggaacacaagacgagatcacgagctgcgcggcgcgagacaaaaactctgcctcgcgaacgaaggaaagggtggtggatt

SEQ ID NO: 43292 - DNA, 2078 bp, Setaria italica
  Peptide Sequence Number=SeqID_109266
gatgaaggccatgcataaggagcacagcacaggctgcgtgtatatatataatatatattctgataaccaatctatctgtagtagtatagaaccaagaccatcgcctcctgctgatccaggaacaaggggaatggcagttttacaccagcttattagaatgtacaaagttaacccctagtatctaaagggtcgtgattgatgttcataattacattcgtgttgtatcactgccaaaaggtttggaggaaccagatggtaccggactcaaatggcatatatccggtcgatctcggaatctgagaactccgagttatgctgccatgagtttgagccgctcctcctggttgatttcaccttcttcctgattttacgcgtgcgcttggacttcaccacgtagtatgtcattgtcccaagcacaccggccatgatcaccccgccaatcagggtcacaagaagcgcagcccattggaagtgccgccccacaacaatgtacgaggaggatatgaatgcgactgtcgtgcacactgaagccagccacatcagcttgttgatgacctcgacaacacgcctctctgctttggtctcacccctaaccactgttatctggaccaccacaactgctaacgaggtgaagagggcaatggcgttgaaaatgaagaagactttgaaggctgccgcatgcacagctaccgctacaccatggtcatcgttaccgccaggcactgtaaagattgcagcaaatgccaccgtagcgaagagcacagccacaacagtgaccgaattcgttgcattgttgatgccttccctatggagtttccttagctcctttgcgataccatagacatttttgttggtttttctggcctgctcaagctgagtatgcacatcctttttgatctcggtcactgtttttctgagctcatctctaggctgattcagatcatttgccctgactgcaccagcacgggctaaacactcctttatttcttgagactcctctgatagtggcaggccctctgctatgtcaaatgcagtcttccgatccctagtcaatgcattcacattcatatctggaagaagcagaagcacatttacaatctctgatcttttctttctggttgcaacatgcaaggctaagttgccatttctgtcaggtagcatgactatggccggatcagcattcacaagcgcctgaacaacctcagcactggttcctttcaccgccatgtgtagagcagtctggcctttcttatcagtcctccgagcaagctgggtgtcagcatctaacaaagccttcacaatttcaacatgcccctgccgcgcagcgaagtgcaaggcattctttccatttgcttttgatagctcaaccaacccagagactcgatctagcagcaggttgaccacctcagtgtggcctctaatggccgccgttatgagaggagtcacatttgattggccaaacgttttcccgagggatggatcatggtccagaagtaccttcacaatatctcggtggccctctttcgcagcgacgtgcagagcatcgaatccggacttgttcttccttgtgaggctctccttgtcggagtgcttaagcagctcaacgacgatgtcaagaaaccccttctcggcggcgatgagcagagcagtctcctccacctcgttggtctcgttcactatggcggcgcggatctcagcgacctcgctgtcgaactcctcgccggtgccggtcatctgcgcgtcgatctccgcgatgatctggcgcacggcctcgaggtccccgcgctgcgcggcaaggtggagctccgtgtcgttgtggcggcccgtcacctgcttgacgtacttcttccgccccgcctggtccatccgcttcccggagttggagagcaccagcaccgccgccgcggccgtcggcgacggggacggcgacggcgacggctgcgagctgtcgagccgattgctggagccggacatgaccagcacggggcccctcgcggtcgccggcgacgacgccggggaggactggtccagccggttgctggagcgcgacatgacgagcaccgggcgcgcgggcgacg

SEQ ID NO: 43293 - DNA, 447 bp, Setaria italica
  misc_feature (1)..(1): n is a, c, g, or t
  Peptide Sequence Number=SeqID_109267
nttttttttttttagtaaggatccaagagatttacaacttggatcaaagcaagggtaaaataatgtccatttccattttcacagaacagaaataacgtctggatgcaaccagatgtttgagacaacgagagagaaagtgtgaagatcccagcaaaagaagccatattgacatcttacacagttacactaccctaactgacctaatctccataccaattagcttatttaaccaactagtatgctgttgagtgcacaaagcactagctgaccacacaaaacaacactgctcttccagcagcaacaccatcttaaacctgcttcagacagaggaaatgcaacttcacgattgatctgaacttctcgcaactgagtttccaacactgtcaaccttgcagttcagacagcagcacttgcttcttctgaagcgggtagcagtggacattcaca

SEQ ID NO: 43294 - DNA, 1365 bp, Setaria italica
  Peptide Sequence Number=SeqID_109268
ttttttttttgtctgcaggaatcaaaccaacttttacagtatatgacggtgcatgtcactccacatttacacaaaatacacatgtaatgtgccacccatattgatgcacgtcacacacttcccaggaaagtagcagtcggattgttccgctaagtctataatatgtgaacaccaaaccccaaaatgctggctaccaacttcaagctaaaacactagctgattggaataaaacggtatgctcaacacgttttcatgctagtgttttccctcttttagatcacggaaacacccaccgcccagcacactgacatgcccaataccacatataggtatcaaaatcaacattttcagagaatcacggtttgttgtgtgcatggatggatgcatgtgcaacatgatgaggagctggagcattctcgttaatcagaatttgttccggaaagtccactcgtattgatctgaactgatagcacttgtctttccatgatgcatccaggattctgtagtatggttcgtataatatcactcgatcaccctctttaattgcatcattccgtagcccatagactgaaagtataaaataagactgatccaagtcacatgttaaataatacaatggagcaatattgtcatgtcttatcaaaagaataacttttcccaaaacagcaactgctttgttcaaaccctctgataatttgcttatggtagctttcttgtgcgatgatttcaaagtgacaccattcaaggatgacaccaatgatgctaatcttttggatcgtaattgtccctgtggaagaatattattataagtcagcaatttcccataaaataaagcaaactataatttttaatagcacaatactgtgttgttttagtcaatgcattctcatcaaaagcacctactcgagcaaaatgcaaaactgaatagtagattgattcagcacatctgcgataagtacatgggtaagatctctagatgcaagtcacacagaaagaagaacaaaataattctatagattacttatgccatgaccaacttcattaatgcagtagctatcccattaatttatcacacgaacaaattgaagttcttaagaagataaccaacttgaccacatagaagtggccatatgatatatacctgtgacactgttatcaaacaaatatgaagttcaacttttaaagaaaacagaaaatgttaggcttgcatcactacagttccagaaaaagagtaatgttatttaagcttccaccttccagtattgacaaatatgcataaccattattaccagccattcttcattgcattctctagcttatcaaggagactgacgattttctgaacttctctatcagcaccaaaga

SEQ ID NO: 43295 - DNA, 1521 bp, Setaria italica
  Peptide Sequence Number=SeqID_109269
taagacctaaattagcatggtacagcagctattaaagaagaaaaggatggggtagtctcaaaattatttgctaagtcacaagctaatcttgcaacacaaagaattcaacaaaacaattaagttgaccattatcaatgattgtgacaaatcaagtggttattctttgactggaaatgaacttgaatcacattgatttctaattccagttgtagttccttctgacttgtttgtgtgttctagtaacagatgtgggtgaggaggtgtggctattgactctaccttttggcctcattttcattaaataaaatggggctggatatgcctttagttttaaatatttcactaaaatagaccggttcttgataacacgtaactgaaaataactaattcaactaaagctgaaattagtccaatactgatcttaggaatgaaagctgtattgtcagacattacacaaccatgatgaaacaaagattaaacaaaagataacaataaggataatcaaggaacacagtgcacactctttactacgtgagcattcaagaggtcttactgcatcattccgtagcccatagactgaaagtataaaataagactgatccaagtcacatgttaaataatacaatggagcaatattgtcatgtcttatcaaaagaataacttttcccaaaacagcaactgctttgttcaaaccctctgataatttgcttatggtagctttcttgtgcgatgatttcaaagtgacaccattcaaggatgacaccaatgatgctaatcttttggatcgtaattgtcccttcattgcattctctagcttatcaaggagactgacgattttctgaacttctctatcagcaccaaggccaggatcttttaaagctgcagcttcgaatccacgaagggccctttcataattctccaaatatttgtcagctgtggcacaattatagcagaggtctggatttaaactcatagttttatccttctcagcattctgatacgctttcaccgaatgatgaagcttagtgtggtcccaggctcctcccacaaaaaaactagtgagataagcattacccatattgtaccatgaattgccatctttaatgtccagcataactgcttcttttgcgtgctgaatgctctcttccactaaaaccgccgggtcttcactaccttgagccatacttctttcaagcatggagagctggcacagtattttcttatctgaaccctttcttagtgctgacataaagcaattctttgctgcagacagatccccccttcttccaaatgcagctacccaaacataaccatgcatctacaagagatggattcagctttactgctttggataaatgatcttcagcctccttatgatagtcaggaaagacatccagtatttttcccctcaaatattcaaaaacaccacgctgttgtggagatttcttttgttcgggcgggagggcgtcgaggagggcgagtgcggcgtcggcgcgggcgcggagcgcggcggccttctcg

SEQ ID NO: 43296 - DNA, 798 bp, Setaria italica
  Peptide Sequence Number=SeqID_109270
caaactgaaggaagactggaaactgcagagagaggagaaggaagcaatgttaaaggcaatgcatgagagcctagaacggagcaaggctgagatgatagccaaattctctcggtctgcagatgtccctgactcaacttatgtttctcattattctcagaagattcctcctttgcaatcagctagaaaaaataaggatcagggggtagactcattcttggttgaagaggaactgaatagtgactacctatctggtgacggttcttccaggagtgctgattccaggaagcatttttcaaataaagttgcttccacccaaaaccaaaagacatctgttgctcctatccataagcgttcgtcaaggactgtcagctccagttatgcaaaccgcaggaatccaccagaaaatcctcttgcacagtctgtccccaacttctctgacttaagaaaagaaaatacaaggccttcacctggactcagaagagcaaccaccagggttcagcaaaaatcatttgcccgtagcaagagcattattgaagagtcaaagagtatcttgaaagaagatcaatcaaggaggtcacagtctatgaggaagagccaaattcctgatgagctaaaggacagtccatcagtgaatgaggatgtttacaattgggctccctcaagaatttccaataatgaatcagagggagcttttgcttacagtacccgtagaacgggtccaccaaaggcttttcttaggaaaggcaatgggactcaccctgttgtaggtatagctggatttcaggactagacggacaa

SEQ ID NO: 43297 - DNA, 729 bp, Setaria italica
  misc_feature (729)..(729): n is a, c, g, or t
  Peptide Sequence Number=SeqID_109271
taacagatgctgatgttcgcggatgcggaaaagtggggcagcgcacagatgccttttgccggtgtcaatgcatctcaacagccacgcaaagatgtttccaaaggattgaagaaactgtggaaatttggaaggaagaatagaggcggtgatggcttagtaaatgattgggtatctgcttccactgcctcagaatgtgatgatgacatggaagatggacgcgatctagtagtaggatcttctgatgatttcagaaagtctcgaatgggttatcttgcttcatatgatggttttgtggagaacgaggtttttgctgaacaagaacaatcactacgcagctccattccaaacccccctgcaaatttcagactgagggaggatcaactcagtggaagttctctcaaagcgccacgttctttcttctccctctcaacattccgaagcaagggaggtgatgccagactcaggtgatcctcaaaaggcaccagggttggagtgtataaaatatcttccagaattaggtacgagtatcaaattttcatgggtggtacgcgatgctgctatcttgtgatttataaatatatatatatatatattgtgtatctatggcaattcatataagctggcagttgagctttgcattgttgctgtttgattattctttttcttaatattcttttaccccctatgtagagttggacttcaagatcatttgcaattcttttttttttn

SEQ ID NO: 43298 - DNA, 1476 bp, Setaria italica
  misc_feature (562)..(562): n is a, c, g, or t
  Peptide Sequence Number=SeqID_109272
gcggtttgcataactggagctgacagtccttgacgaacgcttatggataggagcaacagatgtcttttggttttgggtggaagcaactttatttgaaaaatgcttcctggaatcagcactcctggaagaaccgtcaccagataggtagtcactattcagttcctcttcaaccaagaatgagtctaccccctgatccttattttttctagctgattgcaaaggaggaatcttctgagaataatgagaaacataagttgagtcagggacatctgcagaccgagagaatttggctatcatctcagccttgctccgttctaggctctcatgcattgcctttaacattgcttccttctcctctctctgcagtttccagtcttccttcagttttgcatccctcttctgcatgtactgctcatagaacttccctctcgattcttctaaactgaggatgccaagtttttgtggtgtgctaatgttataccctggattgttcaccatcttcagaagctcgttggcatcacaatcatttgttgttatactctccttcacaacttgtttcgtntaaattgtatcgggaagagccgctataggctttacctcactcaccataggtgtgctatcaacctgcacatctgtaggcttgactcttcgagaggatgttagcttatgtgcagcatatagtttctctaactcattggccttcatttgtagttcaccatgtcgatcttggttcccttttcctggtcttatcctagcctgcatattaagctcttgatcagtaatggatgattgcctgctcaaatttgttccctggcgaccagaacaatctgaatcagaaccagcagtaacctttctccctacatcctcagccttccgtgctggacgattacgttgcactctgacatcatggacctcagtttctgtagaggtaacctcatccctaccagatgagcctctaacattagctcgggaattagatgaggcttttgatttaacaccaccagatatcttttcaaatgttcgggatggttgatctttccttccgatcacttctgcttcagtgcgaatatcttttgtacggaggcgaggacctctaatatcattttgtggaatctgctcacttgaagctggtacttcatgagcaacaccttcaatttccttatctatcatgcggaaatgctcctctgatgatgggctagttaaaatatccttatctttcatcaaggtttcctcaactggctttgcagaagtttttaaacggcttctagtggaaacgtttgaatcagccttatttgacatccttgtgtgtccttgaatgaatcctggttcttcccaaaggatgactcactctcaatgctagagtttataaccatgtcatcttctgcactatatgtactctcattatgaggagcaggcgttatttgtcttctaaaattttgggggtcttgggtctactaaattttttagttggttcgt

SEQ ID NO: 43299 - DNA, 1050 bp, Setaria italica
  Peptide Sequence Number=SeqID_109273
taaacttaaaataaactaaaaagtaaaagtaactaaatttaatttagtaaagtaagttactaaaagtaagttaattcttagaaagaagatcaatcaaggaggtcacagtctatgaggaagagccaaattcctgatgagctaaaggacagtccatcagtgaatgaggatgtttacaattgggctccctcaagaatttccaataatgaatcagagggagcttttgcttacagtacccgtagaacgggtccaccaaaggcttttcttaggaaaggcaatgggactcaccctgttgtaggtatagctggatttcaggctgcggcagccatgatggcgaatgccctccagcacaatgagagtagtggtgactttgaagatcagcaagaggattcccctgatgacgccaaagaagaggaagaatatgaaagcattgaagagaaccttagggaaagtgactttcctgctgattctgacagtgagaacccaagagtgagtcatgaatttggaaattcagatgacccaggatcagaaaatggtgatgttcactttccaagtgaagtaactggccttggtggtactaagttcactgcttttacaggaaatgtgcacaatcctactggtgatcttccagcaccctggagctctcgccttccgcagctattcccttatgcaaatgataattcggatggtgatgcttttgctgattctccatctggaagtccatcaccatggaattctcattcacttgatgaaataacagatgctgatgtttcgcggatgcggaaaaagtggggcagcgcacagatgccttttgccggtgtcaatgcatctcaacagccacgcaaagatgtttccaaaggattgaagaaactgtggaaatttggaaggaagaatagaggcggtgatggcttagtaaatgattgggtatctgcttccactgcctcagaatgtgatgatgacatggaagatggacgcgatctagtaagtaaggaatacttactagaatagaatttacaagaaaagtactacgaaatagggttaatacttagtaca

SEQ ID NO: 43300 - DNA, 512 bp, Setaria italica
  Peptide Sequence Number=SeqID_109274
tccttaagtaattctaccaagattggagccaccgaagcacccgaagagcgcaagatcccaagagccaccgtggcgcgcatcatgcggaaagccaccccgccgaactccaagatcggcgccgacgcgaaggaggccgtggaccagtgtctcgtggagttcgccgcgttcatcacccaggtggccgcggaggagtgccggcgggacaagcgcacgacggtgaccggcgacgacctcatcctcgccttcaagaaccttgggttcgacgactacgtcgggaccctgaccttgtacctccgccggtaccgcgagatcgagggtaacatgccacgcgcccggcacagcactatgaggtcgcagggagcgccgccggcgcctgcggcgctgacagtggaggccgcggcggcgccgtcgtcgggtctgaccttgcagctgggcccgccgtcggtgcctgacgtcacggagctgggactacacgctgacgtgtacgcggtgtggcgtgggggctggcagcg

SEQ ID NO: 43301 - DNA, 590 bp, Setaria italica
  Peptide Sequence Number=SeqID_109275
agaataatagtactagacttaggtacaatagtaccctcaaacaatgacccccacgcccccacccagatcttcatctgtatcccctgagcaataatttctctagcggaagtgcagaactgtaatctgaaatcaagaaaggaaagcatcagctaatcaaatcaagtttccaatacgacaaatgaaacctggtcttaataaacctgttatgattggttctgatgggcaagcaattaagcattcctgctacaaagaaaattagccagataccaatatgcttcaacatcctcggcaaattgatccaatataatatcaacgataagtcccaaggatctcaatgggtgtaacacgaaaaataaaaggttagccaatatttatcatgtgctacttgtgctatccactcaaaagactttcgagcagcgtattacttgcaattgaataactcaacaagacctaagtcggaacatgacagatcaaaacacaaaacaaaatgagtacgtaatgagtacgtaatgagactataaccgcattggcacatattcaggaaaaagaatagcagctgcactgtgcagattgtcggtaagagtcacagc

SEQ ID NO: 43302 - DNA, 1913 bp, Setaria italica
  Peptide Sequence Number=SeqID_109276
tactacgaactacaagtagtagaagtaagttagcttgaggctgcaatgtttggtggtgttcctgaagaaatgccgccccactcagatgggaaatcatctccattagactggcgattgttcagcgcagggctaggagggcctggttgccagagaatttccgtgaccattgtgcactgatggatccggattttcagcaacaatttttcgacagagttggctccactgatagtgccagtcgtgggccgatggtttcacaccctagagaggtgagagagattcctatcgaagttaaggatggtgatcctcaaacgggtccatctggtcaggcccctgttattgaggatgttactggaaatgagtcttcacatggccctgaagttcatgaaactatcataattgatgatgaggatgacatactgccatctgcaccatccgctcctcatgctaatatccctagcaatacatcttctacgccatctgctcctccattggttcatgttaatgattatgatgatgacatagaagaggaaatgattagggcggcaattgaagcttcaaagaaggatgctgaaggactggcaaatatagaagagcaaggacgagatcaacatccagagggagtgaacttgggtgagcattcttctgatggagcagacatgggaactacgggtgggacacttgaaaggcaaggactagcttcaggaaaggctggaacatctaggcaaccaatagatgaagagagcttccaagaggatactgaagatgtagaagaacaaccgttagtcagacgtcgttctaggcgtgtcccatctgaaaacactgagtcagcacaaatggtgcaaccaggccctcctagccctgcgctgaacaatcgccagtctaatggagatgatttcccatctgagtggggcggcatttcttctgaagaacacgatgaagctgttatgcttgaggctgcaatgtttggtggtgttcctgaaggaccaacatatcatttctccatgccttctcacagaagctcaacttattatcccccactggtgcattctccttcaccagcattaaccgaacaacggttgttacgagagcagcaggatgatgagtaccttgcatctctacaagctgaccaagaaaaggaattaaaggccttacaggaggctgagctccgccgcctagaagaaactgctgcaagagaagctgctcttgaaaaacagaagcaagaggacgaggaaagacgcaaaaagcaacttgaggaagaggagctagagtccaatctcgcgtctaagcaagcatcattaccatctgaaccacctctggacatagaaggtgctgtgacagttgtagttcgcatgcctgacggtagtcgacaggggcgtcgctttctcaaaactgataagcttcagttcctatttgatttcttagacatcgggaggacttgcaagccagggacctacagattggtcaggacatacccaaggcgtacctttaccaccagtgagggtgacgtatcattcagtgatcttggcctcacaagcaagcaggaagccctgtttctagaacatatcacagaatagagcccgcgtgttcagtgcccctgcgtgtgttaggcatggttattagagatatatcatctggaaccggaggtttcacattatactcgcaccttttgtttcttggtaaagattcagtccgtcgaatggttggttgcggaaaggctaaattcttttgtggcgccgtgtcatgacgctctgcgctttacatggtttatattgctgtactatacatatgcctgctaaagaaaggtttatgtcagagtaaaccgtgaaaagagccaggacccaggatatgtatacaatgtgacaccatgtacctatgcatgatcattcaattttaaatatacaaaaaaaaaaaaa

SEQ ID NO: 43303 - DNA, 390 bp, Setaria italica
  misc_feature (372)..(372): n is a, c, g, or t
  Peptide Sequence Number=SeqID_109277
tcagcccgacgagcgctcgttcgaggacctcagatatgtgcacctgcacaactgcccgaggctgctgcacgtgctgcccctgtccatgtcggtcaacctgggcagactgcacaccctcgagatcgtgtgctgcgacagccttacagaggtgttccctgtgccggccaagcgggaggtggtgaacttctggaggctgcggcgcctccacctgcacgagctccctgcgctgctttgcctgagcggccgcagaatgttgacgcccgaacttgagaccgttagggtgaggggatgctggagcctcaggcggatgccggctgtcggggacggtaccggtgtcggtagcaagaggaagccgacagtggactgcgaggnggagtggtgggaccggct

SEQ ID NO: 43304 - DNA, 271 bp, Setaria italica
  Peptide Sequence Number=SeqID_109278
acctgacgagagctagctgattagccattggtggcccgtgaaggctgcaagcaggtcgatcaccaaagagcttcaattcgaccgccgacactagccgtgtgcggtactggccgggtctagaagaccgtgcatggctgcgtcgttgtcctctgctgcgaagggcgctcttcttccgtgggcccgcggcggccatggcggcctcgcgagggtcctgctgggcggggcgttgctaacggccggaggaggaggaggcagctgcccgcgccggtgg

SEQ ID NO: 43305 - DNA, 395 bp, Setaria italica
  Peptide Sequence Number=SeqID_109279
tttctcttggttggaatagtaatgtgtaatagatgttccatctgtttactttttgtttggccaaagaattgaatagtctatgttactgtagagaaataagaatacctggctatgcaattgttcttatagagagatgccatctccattatttttagaggcatctaaaatattgtttttagactttagaggctgctaaagaaaaaaaggtttccatgtattatcttcaatatgcatggcaagtttctaatgttctaccgcacgaactttactgtcttatcctttctcccatgcaaaagtttggctctagaaaatttgtttagactaattgcagagacattggcggtgtttttttcatgtgcaaaactgcaaagcatctccaatacttgaacgagcat

SEQ ID NO: 43306 - DNA, 1105 bp, Setaria italica
  Peptide Sequence Number=SeqID_109280
gtagttttgccaaacagccgttgagtgtgaaaaggctcctaccatcatatcattgtgcaacattgacctataagcattgaccgttgtaagctctttcgcatggattgatcgacaagatctaacagttacaggttcctggaagtcactgaatgtaaaccaactattgtactgatcaatagcaaacaatacaggcacatctttaacaagggacagttccttccttaagcgaaccacaacaccaacagatgcatgtgagtgggttatcccagtttgaatgagatcatacaatgtcgacccttcaggcatttccactgtgtcagcccctttcatcattccaacaccagcaccttctcccagggggatgggctcgaaaatttgacatggtaattgttgtaagcgtgtttcgttgtacttcgtaaaatcctgcaagatcttggcagcttgtattggtgtatcaaaaaaatcactgtatgtgtttctatagaagaatcctccatgagtccaatctttcccttgtggaacatagaataccagccatccttgagttcgtgcccagtggacaagcatcgcaagtgcaatgcttttaccacaactccgtgggccatccaaaacaatttgtttttttatatctttgagattggtcgtaatggctggatcaacaatcctacggaagttatcccggagatctaggaagctcttcctcaccatcacagcgcaccgtcttgtctcctgaaactccttcatcatgcctgctggcaaaccttctggtaacatggcattccattcatccaaagtgaagtcgacatagacgttggcgttgcggtgtgcgaacgacccgaacgtgtcggtgaaggcgaagagcgggcggccgcctgggccaacgtcgagcgctgggtcgtaggtcgggggcagcgggtccgtgggcagctcgaactccgtatcaatgtcgtcgcccccgcccccggcggtggactcgtccccatcggcgtcatcggccgacgccacgccgcgcgggtccttggcgcggaccttgccgcggttcgacgtggacgacgccggcttgcccccgcccttggccttcgcgtaggatcgggacccaggagga

SEQ ID NO: 43307 - DNA, 1284 bp, Setaria italica
  misc_feature (1)..(46): n is a, c, g, or t
  misc_feature (1193)..(1193): n is a, c, g, or t
  misc_feature (1255)..(1255): n is a, c, g, or t
  Peptide Sequence Number=SeqID_109281
nnnnnnnnnnnnnnnnnnnnnnnnnnnnnnnnnnnnnnnnnnnnnnttttacctttgagacaaaacatatgaaaacttctccaagaacaatgatacacatcagttggttattattttgtatctagcatcactaacaggactgcaggggacctcatgatattaaatgagcgccacaaacttgtgttttggcttcaagatctacccagcacaaatgaatggtattgtaggcaattttccacctgggattttcacaagacagaccacaagtatacaacaatggagaacagtgttgtcaaacagcatgctgaaatagaagtgccaatctttctaaaccgccatcaaaggtgaacataacctgggtatgagaaactcaaacaaatgcagcaagccatctcatctctgagccatttccatttgataaataatatatctttttccacttctcttctgaaaaactctcgcgtcgaatgatcttttgcctcatgtaatagtgacacacagtctcagcttcttctaaggtgtaacgtggaaacatcaaacgagcgtcaggaggaacatctggcagctcctgccgtagtttgccaacagccgttgagtgtgaaaaggctcctaccatcatatcattgtgcaacattgacctataagcattgaccgttgtaagctctttcgcatggattgatcgacaagatctaacagttacaggttcctggaagtcactgaatgtaaaccaactattgtactgatcaatagcaaacaatacaggcacatctttaacaagggacagttccttccttaagcgaaccacaacaccaacagatgcatgtgagtgggagtaagcaacaagtgaaagattaaatgtgtacctaattaccatttgtctttagtagtgtaaaagcatcaactgtagtactggaccaaactaatacaattcccaaaattatggtcataagaccaaaaagaattcctctaaagaaagaccaaaaagaatcacaaaacctcatcttacatatgtattttgattcagaaccacaaacagttggttaaagaacagatgtatattaagtaaaacttgctattatcaattctgaaccatgtacggggaatggattactactgttcaaaaggtgctacaatgctacacacttaacagacctagtaaatgttttacagattttcacctagaaaaaaaaacnccacctccattaaaaaaatacttccaaaccgtgcatttgcagtattaggcaacataacggancacatgaaaggttacagaagataagagaa

SEQ ID NO: 43308 - DNA, 1085 bp, Setaria italica
  misc_feature (1052)..(1052): n is a, c, g, or t
  Peptide Sequence Number=SeqID_109282
tttttttttttttttttcgttattcaagttttatcgggtgatccaagttttagtaattaattagatgctgaagtcggtctacatctccccaaacaggaagaaaattggctgcaactgtagaagtcagatggttgtcaccttctgttggcttacactagctcatttggctggttgtcaccttcggttggctcacagtcatttggcaggcctcctttgtccaatttcatgaagcacgttgtttcctcattatcatcggcgtctagtagttctttcccgcactcagcatcgatcactgccacatcttctccaaggaaatattctctgctcccttgagatctttccaactcaatcctctgcagctcagacgatatcagagtatcctccattcttgccctctccctgtcacgggggtatgtttggtacaacagggagtagatgaaacagtagagaagcattgggcctgcgattgcagcgtaaagagccttagcaagtgcagcagcatttgctctgtccctcgcaatgctgctcatgccaactccagcaagtgaccggactgtaaccataggcatgctctgctagatatccaacaactagtggagcaaacgctgcaaagacagattcaaatgaacgatcgagcgcgtagatacttgtcattgatctctcaggaacaatctccgcaaatatggggttatttgtagcaggagcattccaggatatactaagacccacgatgaagataacaaaaccatgcagaaaacctgtagatgggtcatccggtaggcctagcagcagcaaagcagcaagagggactgcagaggcagagtttatctgagataggataattctaccagaatttggagagcgcctagcaagatagtcccccatctttccacctaaaaccctcccagagaacttgcagctgcaaatgtgatcattagaattccagttcctgtgtgtgtaaagcccatcaactccagccacatcggagcaaatgatagtgcacaccatggaaacgaccctgtgataccctgagccacaatgatatgaaacgntggtatcttgataacagcttagcgtctatcacc

SEQ ID NO: 43309 - DNA, 472 bp, Setaria italica
  Peptide Sequence Number=SeqID_109283
ttaggtaggaacaagtgggaatacaagagaaagccaaatgaaattaagaaattatgaatgctgcactatgtgcagacctacaaaccatctatgcgaataaggaatggttcacaaagtacaaattcaatgtgccacagaattttggcactactttatcttttattttgtttaatagaaaagaaactgtgctgctagtttaatattctcttgtttgaggcagtttttcagatcattgcacatttgtggcacatgtaacctacctactaagagcaaaaaggaaacatttgtggcaaggaatttagaaaggattagttctcagccaatatttccagttgcatttaatatgtgttcctttgcatgtaaatctatccacaataactttctcagcttcatgtagcacaaacatatataaagatgtcgatccatgaacaaatagttctagcagattgaatttggagttccacggtcaatc

SEQ ID NO: 43310 - DNA, 369 bp, Setaria italica
  Peptide Sequence Number=SeqID_109284
cttggagactgcctggcgttgcgccgtttgcattctgtctcttcttctccaagctcgtggcttataccttcctctactggttgccattctatatcaggaacaatgccgtagcaggccagctcttgtcacacaaggcttctggaattttatcgattgtatttgacataggaggggttttaggagggatttcagctggtttcctctcagatgccataggtgcccgtgcagtaacatcagttctgttcctcttcctctcaatccctgcactcatcgtgtaccggacatatggaagcatatccatgcaccacaacattggcctcatgttcctctccggctacttcgtgaatggtccatactccctcatcacca

SEQ ID NO: 43311 - DNA, 1001 bp, Setaria italica
  misc_feature (932)..(1001): n is a, c, g, or t
  Peptide Sequence Number=SeqID_109285
tctaaattaacttctaaaaattcttagctcattaatgtaaatacctctccttccatggtaaggtgaaaccatgagaattatgagctcagaaattggaggattgttttacttcttggaagcattgttacaatagaattttcattctggagtattaatcattctcaagttctcctacttgtgcttgataccaacctctactgttgccattctatatcaggaacaatgccgtagcaggccagctcttgtcacacaaggcttctggaattttatcgattgtatttgacataggaggggttttaggagggatttcagctggtttcctctcagatgccataggtgcccgtgcagtaacatcagttctgttcctcttcctctcaatccctgcactcatcgtgtaccggacatatggaagcatatccatgcaccacaacattggcctcatgttcctctccggctacttcgtgaatggtccatactccctcatcaccacggcagtagcaactgatcttggcacccaagatgcgatcaaagggaattcgcgagcactggcgacagtttctgccataatcgacggcactggctctgttggtgcggcattggggcccttgcttacgggttacatctcaactagaggatggaacagtgtatttttcatgttgattgtttccatctcacttgccatcttgtttttgatacggctggcaagggatgagatagtagccaagcttggcacaagaagttaaagagtagtatatgtttaattggtgatgcttcagagttcagacttcaggctgtaggtacttcagcaggagcttagttaggccatttcttgcaacatgtatttagaatggttgtttgttgccatacacttgtacaatgtgaaactatacacccccagaaagaggaatacaattttgcccgtgactgtagcnnnnnnnnnnnnnnnnnnnnnnnnnnnnnnnnnnnnnnnnnnnnnnnnnnnnnnnnnnnnnnnnnnnnnn

SEQ ID NO: 43312 - DNA, 470 bp, Setaria italica
  Peptide Sequence Number=SeqID_109286
aggtggggctgcttgggcaggataagaaagaggcccaagggaatgaggatgacgagttggagctggagatgggatcgcaattgccgagggcgattgggttcttggaggcttggagactgcctggcgttgcgccgtttgcattctgtctcttcttctccaagctcgtggcttataccttcctctactggttgccattctatatcaggaacaatggtatgtagtcaattgacattatactgtttgatctcacattaacagtggtagagtatgagcttgatacttgtccattagttttctcagtgagcaaatctacaactatacgctgaaggttagttttaacttgtttgtgacatgaactctaatttggttgctaaaatgtcactcattagaatttgctcagtgcggtagttcccagttttacatttcaggctaaatagttgattgcttcctagtgtggtttaaatcatcta

SEQ ID NO: 43313 - DNA, 205 bp, Setaria italica
  Peptide Sequence Number=SeqID_109287
ccaaatgatctgaaggacatttgtgttagtgtaagtaataaagtaataaagtacagatggtcatctcctcatctttgtttgatcaccatctgtacttttattactttattacttacactaacacaaatgtaataaaagtacagatggtgatcaaacaaagatgaggagatgacccaaaattcagttgacactgagaaaaaagggg

SEQ ID NO: 43314 - DNA, 3134 bp, Setaria italica
  Peptide Sequence Number=SeqID_109288
ggtaggggcagtcggcagacgcggcgcgctcccctccccatctccggctggtctcgccgggagtaagggaagcgaagccgccgacgcggcatggagcccaagccgtcttcggcggcgcacggtgacgcgcccgcggccgaggccccccgccgccgcggcggcggcggcaagcgcaagtcgtccgggtcctcgttcacgccgtcgaagcggcaggccaaggagaggaacgctgccttccacgtgcccccgcacctgctgcacagcgggccactcacccgcgccgcgcgccagtcgccgcacaagctctccggcacgccgccggagacggggccagcgtcatcggcggccgcagctggggatggggtgagcggcgggcagggagaggtcgatgcgatccggcccgaaagagaggagacgccggcagcggagcagccgctggtggatgaggtgttcgaggccgtccgatcccgcggcgccggcgtccatgtggtccctacctttgctggatggttttcatggaaagagatccacctggttgagaagcagaccttgccctcttttttaatggcaaatctgagaagcggacacctgaggtctatttggcgattagaaattccattatggtgaagtttcatgccaatcctcagttgcagctggagtccaaagatttggctgagttgtcaactggggaggccgatgctcggcaggaagtcttggagttcttggatcactggggcttgataaatttccacccatttccaccagctggacaagaggagagtaagcctgaggagagccaagacaattctcatgatgaggataaagcttctttgatcgaacaattgtttaaatttgaaccagttcaatcatatataatgcctttacccaagaaagaagatgtgggagctccacccccactgcctagcttgtttcctgatcctgtacttcttgaagatgtagttgcagcagctgagccttctgttgagtaccactgcaactcctgttcagttgattgctcgcggaagcgataccattgtcggacccaggcagattttgacctgtgttgtgattgctataatgaaggaaagttcgatccaggcatggccaaaactgatttcatcctcatggattcttcagaagtttcaggtgctagtggcactagttggactgatgaagagacattgcttcttttagaaggtttggaaatttttggtggaaaatgggctgagattgctgaacatgttgctactaaaacaaaagcgcaatgcatgttgcactttcttcaaatgcaaatcgaggaccgcttccatgatggcgaagatattaatcaaaacaccccaggaagcacggaacaagccacaactgagaaaggcattgctgaaacatctgagaaaatggaagttgaagataaagaggaaggaagagataccgtggatgagaaggtctcggagaaaacagatggaaactgtgaagaaacaaaacctgaaggtgcaagtgctgttgaaaataaagatactcagaattcaggtggcaaagattcagctgcatctccaaacactgaagagccaaaacaatcatctgatgagcaccctatagtaaaggagaattctggagatgtcgatacttctggtgaaaaactgtcgaatgttgctcttgatatcctaaaatctgcattcgaggctgctggtcacagcccagagtatcaaggttcatttgctgctgcaggaaacccagttatggcgctagcagcatttttagctggtcttgtggaagatgataacgctactacttcatgccgtagttcactaaaagctatctctgaggtgtctcctgcgcttcaattagctagtaggcactgttttattcttgaggatccaccaaatgatctgaaggacatttgtgttagtgtaagtaataaaagtaataaaagtacagatggtgatcaaacaaaagatgaggagatgacccaaaattcagttgacactgagaaaaaagagaacaatgagaaagaagataattctttatctatggaaaagcataataattcatccatctcacataatgaccaccaagaatcagatgataagagcatctcacgtgatgattgccccgtagtggagcccaaaaccagtaatgctaaggagtcaggtgattcaactgctattgtggataagagtgcaaccgacaatacaaaaggaagtaacatatgtgcaagtgatcctaaacaagtaaaggacaaaccaagtgttgaggtggaggctcgtgatgattcatcttcaaaaggcaaggatgagctcaataagactgaagatgcagttgcttcaccagctaacgtacaggaacaaaagcaaagtgaaacattggaaaatggcaaaatgggagaacctaacagcatcgaaagtgtagttgccaatgaagagaagggctctggagttaccgctaaccagaatgattccattacgaggctcagacgagcagcagccactgctatttcagcagctgctgtgaaagctaaatttcttggtgatcaggaggaatatcatattcgaaggttgacagcaatgatgatcgaaaagctgttccaaaagatagaagtgaagatgtcattatttgctgagattgagcaggtggtccttcgaacaagagagtacaccgagaagacccgaaagaagctcctattggagcgaaatgcgataattgcagctcgcatgggggcattgccatctaggccaaatcagcctggtgtagctggaagcagattaccgcctggatatggcaaccccgctgtaaggccgccaaacgcaatgccacggcccagcagctgagaaatccggattccagacacctatacttcattcttttagaagcatacctgaaagactcaaacctaccagcttgttgtagcattttttagaaagtacattgtacaattgtctgtataactgccgctatgaaaattcaccatttttcgcttgaattttcgatgtattcgcttcccgggatgccaaagctctacaaaggttttgaaccttcaattagatatggtctatgttgtaaaatagagaataattcctctcatatttatggattggagtatgcttccatcagatttttatctatgctgcacattgtac

SEQ ID NO: 43315 - DNA, 378 bp, Setaria italica
  misc_feature (348)..(348): n is a, c, g, or t
  Peptide Sequence Number=SeqID_109289
cggtggcggcgtcgccatggcccgggaagttgagcctggcgcgcgggccgcggaactcgagcgccgcgcagtcgtaggccctggcggcctcctcggcggtgtcgaacgtgcccagccacacgcgcgccgcgcgacgcgggtcgcggatctccgccgcccacttgccccacggccgctgccgcacgccgcggtacatgttcttctttcgccgccgccgtggcctcatctgccgctcccctcccgcctccgccgccatctgccctgccgtgccacggctcgctccctgtgccagctccggcgccgcgaagaagtcgcacccgaggcacccgtcgatgctgcagaccccgnacgcctcgccgcccgccaccgtgacgacct

SEQ ID NO: 43316 - DNA, 176 bp, Setaria italica
  Peptide Sequence Number=SeqID_109290
ctacgaggagcggtacgtgctcacccgcgcgtccaggaaccgagagctcaacaagcacgcgcgcctgggctgccaggtcgtcctcgcggcggtgggaggccggctcgatgagccccgagtttgcgagcgcgcggaggagggtctgcccggagaggccgacgacctcgcggcgcgcg

SEQ ID NO: 43317 - DNA, 996 bp, Setaria italica
  Peptide Sequence Number=SeqID_109291
gatcgcggcgcgcgccctgcgccgcctccctctccacctctccccttcgctctctcgctccttctgtgccgtctccccggccgccgcatcggccaccccggcccccgccgccgcatccgccaaggtcgccgaccgcatcgtgcgcgtcctcgccatcgaccccgacggcgcgcgccgcgaggtcgtcggcctctccgggcagaccctcctccgcgcgctcgcaaactcggggctcatcgagccggcctcccaccgcctcgaggatatcgacgcgtgctccgccgagtgcgaggtccacatcgcgcaggagtggctcgagaagctgccgccgccgtcctacgaggagcggtacgtgctcacccgcgcgtccaggaaccgagagctcaacaagcacgcgcgcctgggctgccaggtcgtcctcgcgcccgagctgcaggggatggtcgtcgccgtccccgagcccaagccgtgggacatcccgtaatgacgtgccttgacgataggcaaggcagaaaggtgcggcttttgacgctgtgagccttccttcattccccaggctctgtgcagctgtgccatcccttttatgttacggatttgatgaagaataatgatttgatgagcaaaacttggtgctgttggttaacttttgttcctttgaatgtggaatataaggatgatgtaatgtgggatccccttgcaattacctcagtttaatgtttcatggtttgaagttttgcacattgtgatgtatatggttgatgttgcatcttggcctttgcatttccatttgataatcactgtttataccagtgcaactacacttgattttaaggtgaggagatagccaatcttcacaaggaaatgttgaacaatagtagaattccagaattattctctcagagctattgatatacctgcaaaatactgtatgaactagagcaagttcatagttccaaagctgtaagaaaagttttaagtaactaaactaaaaaaaaa

SEQ ID NO: 43318 - DNA, 363 bp, Setaria italica
  Peptide Sequence Number=SeqID_109292
ccccattccacacccactaaaccctagcggcgagccatgtcccgcaagcgccgcgcgccgccgccgccgccgccgccgcaggagtcgtcctccgaggaatccggctccgtggaggaggaggaggaggagcctccgagccaccccgctcgacggatgcctcctcccgccgctgcggccgacggagccgactcgtcggagggctccggctccgattccgactccgacaccgacgcgcaggccttccagatgcgccagctgcaccgcttccccaccaagctaccgccgcacccggttccccagcccgcatcccacgccgccgccgccgccgacgacgacgacgagggcgagtcgtcggagtcggag

SEQ ID NO: 43319 - DNA, 273 bp, Setaria italica
  Peptide Sequence Number=SeqID_109293
ggcgccctccgagttttttgtttgagaaaacgaaagctggaacactgtgttttagaaaaagaaaagcaattcgatctttgaatagaaactttcaattgcgtaaggaataattgagaaatttagggaaattagcatgacggctgctgcctgaacttgtttaataactgaaggagatagtgacagacagttgtggagctctggagaaaaaggaaagttgctatctggtggtcaataattcgcagcactagccaagcaacgtcaaccacaagtcca

SEQ ID NO: 43320 - DNA, 418 bp, Setaria italica
  Peptide Sequence Number=SeqID_109294
ttcttatcttgccaatagtcttagattctctagtatttttttttattcttttatgttatatccaaatagttgacatttttctggaaaatctcagtatcttaaatggaacacccatgaaaatacctgtgtatgggtcataattggaaagattgacttcacaccaccactttgttcaaagcctttagcccaagcaagttgtggtaggctagtgtcatgcatgggagcctgtggagtgtgctaccaaactggacaggtgtaagccgttgcaggggtacgcaacgagaaattgaacagctgcttctcaggggcgtcaatgaacagagcagaaagcttcatcttcaccttcacctgttttcccttgtgctgccattcacccccaattcttatctgtgatctactgcctgttctcattctagtg

SEQ ID NO: 43321 - DNA, 342 bp, Setaria italica
  Peptide Sequence Number=SeqID_109295
ctcggcctttctgagatagcggataggcggcagctgcgcaccactcgtccccgactctccggccacggacagcgaccgccggaacccgcacgagcctgcgctaaaggaaaatgacggcgctgacgaccacctccgccaccctctccgcttcgctcccttcggttcccaggccgccgccccgtccccctgttgcccacctgcgcctccgcccccgccgccgcgccctgctccgctgcgaagcagtgtcggagctcgccccagccgcctccgccgcctacggcgtgctcctcctgggcggcggcgtcttcgcatatgcgaggtcggggagtaaaggctcaatct

SEQ ID NO: 43322 - DNA, 563 bp, Setaria italica
  Peptide Sequence Number=SeqID_109296
tcctaagttcttcttgtttgtcatatgtgggagagggagtgtgttgggctgtgaaaataacattgaatatgcacaagtgagtgagtagggttttaaaaacaatattgaatatacctgttcatagattggagacgacatttgggtaataacttggtatcaggtgttgctagcataaacttgaggacatattgaaggacattctcattcgagaaactcacattgatggttgatgaaaaatatcccatgtggtcttaaggtgccagtgcaaattccaaaatgtagcatctgtgtgatgcatacaatctttaaaactcagcatcttagaagggaaaaaaccttgattatggccatagatgtgcgacactcaaacaagttatgctctttgatgttgtttcaaaggggtccgtccttatatccatgtgtgttccccatgatatagtggttcctatttgtatgttctactatgctttaagaaaaagggtgtagaaatgtgatattttcatatttcctttgagcttcattaaaaggcaaggtgtttgcctaactaacttgtctcaatctta

SEQ ID NO: 43323 - DNA, 983 bp, Setaria italica
  Peptide Sequence Number=SeqID_109297
tcaggatgcaaaatcaattttctgcctgatgttgaagtatggattaaatccgaacaggtacacgtattcaaccattatacatggtctatgtaaaacaggttctgtacgtgaagcatttgatattttttcagagtgtgactgaagaaggaatggaacttgatattgtcacctacaacagccttattaatggctttcgcttgcacggtcatacaagagaaattccaaaaatgattgagatgatgaggaaccaaggggtcgaacccgatcttgttacttatactatacttattgctggccattgtgaaggtggtgatgttgaagaaggtatgaagataagaaaggacatcatagatcaaggtttggagttgaatattgtcacatatagtgtccttatcaatgctctcttcaaaaaaaggcttggtttatgaggtcgaaaacctacttagtgagatatgcagtattggtctggatatggatgtcgttgcatattccatcctcatccacgggtactccaagctaggagaaattggaagagcacttgaagtctgcaaagtaatgtgctcttctcagagggtaatgccaacttcattaaaccatgtatctattcttcttggcctttgcaagaaaggattccttgatgtagcgaggttgtatttggaaaatgtagctaccaaatatcagccaacagatgtagtactctataatgtagtcattgatggctatgcaaaagtgggcgatattggtaatgctgttcagctgtatgatcagattattaaggctggtttgtgcccaaccattataacatgcaactctcttctatatggttactgcaagattggggatctgcatacagcagagagctattttagggctattcagataagtgatctgcagccaacggcagttacatacaccaccttgatggatgcgctctctgaggctcggagagcgcatgccatgctaaagtgttttttaaattgaaa

SEQ ID NO: 43324 - DNA, 451 bp, Setaria italica
  Peptide Sequence Number=SeqID_109298
accgtggagtcaccccggcgacggagcacgccgcgcgccgcgaagctcgaatggtgtcacagcctcctcgtcggctcctcctcctccggccggccggccgttagatctccggctccggcggcgcctccacggaggccgcggccgccgcctccgggacgaggtgctccgggcggcacccggcgacgaagtcgatgagctccttgccggactcgtcggcgcccgcgggagggggcgagatccggagcagcacggtgatggccacgagcaggaaccccgtggagacgaggagcggccagaagaatgacaccacggcgccgagcctgggcccgaccgcggagatcgagacggccgccgcggccacgaacgccaccgcggccgcggcctgaagccggtgctcccacattagctcaccgagcttcgacttggtcgccatcgccggatcggcagcgcg

SEQ ID NO: 43325 - DNA, 399 bp, Setaria italica
  Peptide Sequence Number=SeqID_109299
ggaataatagacggtaacccaatagaccctagacccaaacgcagtgcacactgtggccgttcgcctcactcaggccgtggcatccgtctcccggatcgacctgccgccacgcgctggcttgcaccgcctgacggaagcttcaagggcagtccatttgaccaattcagtgcaggacaccctctccttggtccttgtggatgaactggtactatccatctggaaccttgaagaaagcagtcctgatggaaaacagtggtcttgttgcaaggcaatacatctgatgccaatgttaccacccatcaacttctcttgtcgcaaagtggaactctcaattcaagggttatgcgagaagagcggttctttgttcttacatctggtgggtgagggcctcttcatgtt

SEQ ID NO: 43326 - DNA, 691 bp, Setaria italica
  Peptide Sequence Number=SeqID_109300
taatgaaaggtgacatacagctagggtgggagccgaaggacactcgcggtgtagatcgaatctttccagaactcgcaggggaaaaaaaaaataccatcggcaacaggataaaagcatgttaggtacaccgtacacgtatatatacgatccgtagatcgattatgaatgaatactttcacggttccatcgccaccagcacgaaaaaagcgtccagctaggtgcgtgtattttcccttttctgacggccaattggtgctctcagcctttgtgcccgctgctgatagcctggctggtgtgagtcacagaccataggaatataggatctcttctttgactcaaacagtggaggagacgacacgccgtacgtccgactttggtaccattcctaggctaatcaaccggtttgtttgcgtctgccgacatgcatagaagttctctggcaactggccatttcaacttgcactgaaatgatgaaatctagacctgaattcagacgagacaacatgaaggctatctagacttcgattcagtatcgcctcccccagtggaattgatggcaattcattcagtgccatactgccatagctcgtatgatgtctgcactcgatccacggcactgcagagttcaggttcagatgaagcgtgtcctccatcttcccccgtgaaaccaatcaaaccgttctcccaccgc

SEQ ID NO: 43327 - DNA, 329 bp, Setaria italica
  Peptide Sequence Number=SeqID_109301
ccttcacaccccctgtacacctgctaccgctagccgccgcgctgctgctctggtggcggctcgcctccctccccccacccccgtccgccgccgccgtcttctcctctcgctgcacctcctccctccctaccccgagctagctcggagctacctatcccgaggagaagggagagagagagaggggagaagggtcggtcggtcgggggttctcggatctcgtcgctgcctccccgttgggatctctcgctcgcgctcgcaccatggccgccgtcacgccgcccccggccccagcgcccgccgcgccggcgccggccgcttctgccgctgcc

SEQ ID NO: 43328 - DNA, 393 bp, Setaria italica
  Peptide Sequence Number=SeqID_109302
ccagcccgcgcttcgacgagcgcctcccgccgctgcgcgtccgacccgggagggtcgccgtcgacgtgctcaagtgcgaggtttggatgcgcagctgcgccaggcggatgctcgacgaccagctcctcggcttcgcgctcgtcccgctcgccgccgtcgcggccgccgccggcgcgcgcctcaacgaccgggacttcgagctctcgtccaccgacctcttccactcgcccgcggggaccatacggctctcgctcgccctccgctccggggtccccggcgacgcgtgcccgccgccggaccgcggcgccgagccgtcgatcgcgtcggaggtcgtcatcctccacgcccccgccgccgccgccgttgactactcgaggatcgagttcgatagaa

SEQ ID NO: 43329 - DNA, 629 bp, Setaria italica
  Peptide Sequence Number=SeqID_109303
attttagagtaagaatgacaatgaccaactttcagtgcataattagcagtgtgaaaattgtaaaaaatcatggtacaaccagcgcactttcctcagggatcaacatgactttaatgccttttagaattagtattcttccaaacctcttttgcttgtttgattggtcacccatgtcagtcagatgtagatattgacaatttgcacagggatattaagtgttaaactgcacttttttgtttttgcttgttacttttcaacatatctttgaagtcacaactatctgtgagtcagttttgtcataagtgcactgatttctacccaaaaactgcagtctgtgcctgagtttattcaatttcatccttagctgctttaactaaattttactgtctgccaacatagttaaaacttaaacactcaaatgtgtttatcgctttcttgatgagtgtttctgctgccacccctaccacctacttgccttgagatgttttgatgttcttgtacagctcatggttgatgctgtttgtaattagtcatttcagtttagttttggtgaagtctatgacctagcagcatggaccacagtactactggtctcaggataaggtgcatgtagtaaacatctatgccta

SEQ ID NO: 43330 - DNA, 436 bp, Setaria italica
  Peptide Sequence Number=SeqID_109304
tgtttctagttgtcctcagcatttcttagtcttttccctgcttttaaggctttgatttttttaaatggtactacctgcgttcccttttttcttctttcttttttgcctcatggtatcatgcaaacttggacacagcttgcatattaccatcctgcccgataatgaattttctcttgcctgaaaaagggtagagaaatctattcataatttattccagttatgatttcaactgtctaataaaacgagttgtatggaataatttgacaataatatagaaaagtatcatccagatgcgtggctggatggtaatttagtccatatatataaaccttctttcaggactgctctcatgtcatgtattttgatcatcaaacatgatgaaattagttagatccaagagcatgtcaatctgttgagttttacttcgttatttggt

SEQ ID NO: 43331 - DNA, 544 bp, Setaria italica
  misc_feature (521)..(544): n is a, c, g, or t
  Peptide Sequence Number=SeqID_109305
cggcaagctcaagcaggcacacgacgccgccatcctccacaaatgccaccttgagaacgaggtgatgaggctgaaggagaggctggagatcacggaggaggagctggcgcggctcagatccgccgcggggagccacgccgtctccggtgacggcggcgacgccatgggccgcgtcgtctgcagcgggagcccgagctcgtcgttctccacgggcacatgccagcagccgggcgtccgcgatcacctcggggacgacgacctgctctatgtccctgactatgcctgctaccctgacaacagtgtggtcgagtggtttagcctgtatggactgatgtaagcgaagctatcagtgatatggtatgccgccagattaattctagctagtcatcatagtgtcattgccgtgtgctgatttctaagtgtgcgtgttattatgtacataaaccaagttcttagtggcaaaatatagccagctaggtactgctagtacttgaatttcagatgatgttgtgtttaacccnnnnnnnnnnnnnnnnnnnnnnnn

SEQ ID NO: 43332 - DNA, 754 bp, Setaria italica
  Peptide Sequence Number=SeqID_109306
tatgcatctaattgttatcaaagcagctggacttgggtaaacccttccttttctttcatttttaacaatcatttttattctgtagagccatatcaattacaaggtgatcctagggatccagaggaggacaaatttggatttggaacagaacgcacatgtgcccaccaacgaaactaaccatatttttttgtgtccattagttagaaaaaaagaaaatgcttgttctggagccaatgacagatacagttagctaaaagttatctaaaatttgttacatgctgaaatttatttgtgtgctgacttgttgtgatctcaaaccatgctaattggttttttattgtatgttcgatcattcaaacaaagaagaaactgacctacctgttttagttgcataaagtatgacatgaccataaaaccacaaagtaagaaaattgcaactgaaaagtttatatacacgctagtttagaatatgttccttcttttgtcacaaaaaagaaaagttatcaatagccttcatttttttatggtaagcttactaaacatacatatatatgagacccctttttactttttagtatgaagtggaaacaaaaaaaataacttttagcaagagactctacatcagaacagcagccactcagattcaagaaacttttctgtttcctaccaagtcccaaaagatctatgcgaataaactagcggatgcatgcatgctacgaacctcatctgagtccctgcacgaacaccagaacac

SEQ ID NO: 43333 - DNA, 521 bp, Setaria italica
  Peptide Sequence Number=SeqID_109307
cctgctccacccccagccaagcagcaggagcctcctctcgccggcgtctccgactaccgcggccgccccgtgtgcagggggaactcggggggatggagatccgcgctcttcgtagcgggtgggtatatcactatattgctgctgctgctgctgtttcagtttgtgtgttgatcagattcgattccaattcgattcaacgtgagcatggctcacagccgttgagatcgccggcagcttcgcctacttcggcatctccgccaacctgatcacctacctgacgggccccctggggcagtccaacgcctccgccgccgcctccgtcaacgcctggtcggggacggccagcctcatgcccctgctcggcgccttcctcgccgacgcctacctgggacgatacaaatccatcatcatcgcatgctccctctacgtcctggggtatggcatgctgactctgtcggccacgcttccggcgctgcggccggcgcacttcttctacgtgtccctctacctcatcgccgtgg

SEQ ID NO: 43334 - DNA, 809 bp, Setaria italica
  Peptide Sequence Number=SeqID_109308
ctcctctcctccttccagtcgttagacagaggccggcaatggcaaccacagcagagcacacgacgccatctaatctaatcaaatgaatgacgtcctggggtatggcatgctgactctgtcggccacgcttccggcgctgcggccggcgcacttcttctacgtgtccctctacctcatcgccgtggcgcagggcgccgacaagccctgcggcctggccttcgccgccgaccagttcgacgccgcccaccccgaggagcgcgcctcccggggatcactcttcaactggtggttcttctgcatggccgtcggcatctccgtcgccgtctcggcggtgggctacatccaggagtcggtcggctggggcgttggcttcggcgtgccctgcgccatagtgctctgcgccttcaccgtcttcctgctgggcaccccaacctaccgcctctacaactgcaagcaccagtcctcctccgagtcccccttgctccgcttggcccgcggcctccgagcactactattccgacgaggcagaggcagaggcaaccatgcagaagcagaggacgcccggtgcgtgctccgccttctccccatctgggccaccagcctcgcgtacggcgtggtgtacgcgcagatcatgacgctcttcaacaagcagggccgcaccctggaccgccgcatcggcccattcgacctgccgcccgccgcgctgcaggcgctcgggcccctcagcatcctcctcttcgtccccgtctacgaccgcgcgctcgtccccgcgctccgctgggccaccggcaacccgcccgggctcacca

SEQ ID NO: 43335 - DNA, 436 bp, Setaria italica
  Peptide Sequence Number=SeqID_109309
gcttcaatcccttgatctctctcttcctctagctacatagctggatctactgcacgcttcatcaatgttttcttctaatcgggcagtgctttctgttgctatcagcattgcactgtccatggggccaccagtgatggctgacttgcaggacaattgccgcacgatttgtcgccctaagtgcgatgacttcgctattgaggtgtgcacaagtctcactaatattgtccctatccttaataatgttgatttcttctttaggacgtgcaaagtgcggatctctgcaccatgtacgtccctctgcatcaacatctgcagcctggataccctgacgccggcaccgcggccagctccccatcaccaccgtgcaagccatactgatgcctgcgagttacttcttaaatattactaatcagtaagcgtaatgtctctatgtaat

SEQ ID NO: 43336 - DNA, 485 bp, Setaria italica
  Peptide Sequence Number=SeqID_109310
tctaactaacaaatgaagttacaatctccctgcacaagattgccatgtgttattaccatttaacgtcaggataatcttgagatgatttcacaatactaagaacctagaaatctaaaatcataccatttgaatctagaaatgaagtttaatcttcggatcacaacttctagaagtgttatatgtccattatggtaggttgtatccaatttggtgctactaaagcaaataaggcaataaagataggagatggtaatgcaatggaaacaaccctcggctctcatgcagtgaatctaaataggaactcatgtccagacaagcattgccgcccatatccttatatgaacccctatatataaaaaaaatctaaaatacagtaaatgcctactccaaaatcattacattaaatagctatagtaaaagttaaaacctatgatttacaaagagtattactgcccaccaactgaagccttacttggtctttctat

SEQ ID NO: 43337 - DNA, 379 bp, Setaria italica
  Peptide Sequence Number=SeqID_109311
tttagtaaaaaagtagtagtgacaaattctcataaaaattaaaaacatcaaacaccaatcaaacaccaatcatgtaaactctaataatcatagccactgatctattatattttctaaaaagttacccaccactctcattgtgaaaatattcaaaaatgagctctaaaccaatatctaaattaccgagctcagctattataaaaaaataatctaaagaaatcctagaatcttcatccaattcactaatacacatcattataaagcataactcgaaatgtcattctaaaattttatctatgttacccacgtgtgtcgttattaaaaataacctaaagtaaacacgtaaatattaatctaattatcttcacgtgcatcatac

SEQ ID NO: 43338 - DNA, 369 bp, Setaria italica
  Peptide Sequence Number=SeqID_109312
tctttcgataaaaattggctggaatttgcaaaagatgctaggaacattagacttggccttgcaaccgatggttttaatccatttggaaacatgaccaactcatatagtatgtggccagtatttgttgtgccgtataacatgccaccatgagtatgcatggaagaatcaaacttcatgatggcattattgatccctgggttgagttttccatcaaaggattttgatgttttcttgcaacctcttgtagatgagctatggacttgtggaagggtgtcgatgcatacgatgcttgtagtcaacaatcctttaaactgcatgatatggttatttggtgcatacatgattatccaacactgagcacattggcgg

SEQ ID NO: 43339 - DNA, 809 bp, Setaria italica
  Peptide Sequence Number=SeqID_109313
gcaggcgagaggagaggagccatggacgccgccaagtccgtgacgccgggcgccgtgtcccacatcctgggagaagccgtcgccggccgacgccgccacggtcccggagctcgtcgtccaggtcgtcgacctcaagtccatcggcaaccgttttggtttcatggcgagcgacggcaaggacaagatcaaggcgatgctccccacccaattcgcggcggaggttcgctccggcaacctgcagaacctcggcctcatccgcatcctcgattacacctgcaacgccgtcggcggcaacaacgacaacaaggccttgattatcaccaaatgcgaggttgtgtctcaagcgctcgacgccgagatcaagagcgaggccaagaaagaagaggagcctgcgattgtcatcaagcccaaggacgaagaaatggttttgtccaagcccgtaaatgctcccccggtcgtgctgaagccgaagctggaggtgaaatccgcgtcccagatcgtgaacgagcagcgtggaaatgctgctccagcggcgcgcctgtccatgacaaggagggtccatcctttgatctctctcaacccctaccagggtaactgggtcatcaaggtgcgggttacgagcaaaggcaacctgagaacctacaagaatgcccgtggagaaggctgtgtcttcaatgtagagctcactgatgaggatggcacccagatccaggccaccatgttcaatgaggctgcaaagaagttctacccaaatgtttgagctggggaaggtctactatgtctccaagggatcacttaggattgccaac

SEQ ID NO: 43340 - DNA, 712 bp, Setaria italica
  Peptide Sequence Number=SeqID_109314
tacgggtacaacgctggtaccgtgtgttgtgtcactagtaacaagatgtgtgctaagcacttaaggtagctagctagatgtccccggctggccacctaattaatgtcctatactaacatgaaatgaaataatgcagtgctgatcgatcgattaatagtaaatcatgtgtgatggtggtatgtgcatgtcaacggatcgaggcttattagttaaaggttgggtcgagtgcccggatgcaactaacccctccacgggagatgaataatcgcacgagagctagccatctcgatctgttcctattaataatctcacactactgctgctgctgctacaccgcgttgggttcagaatccaactacatgtctgcatcgcactgttgataatacacctacatcatcatcgtaactcctacacaaggacggagtagcactacatatactacgcactggctcgtacgtttgacctgcagcaagctgcaagctcttgctaattcaaaacggagtagcactatatatactactgaatgtctgaatgcatttgcatttgactttgctcttactaagtcttggcaactgtgttaggcgccgaagatcagataagagcaccagaattgacgtccgatcgatcgatcccgtaatgaattggacagcgcccccatcgagcacccgcgcacctaactcgccagagaccagctaggccgagatgaccggcc

SEQ ID NO: 43341 - DNA, 854 bp, Setaria italica
  Peptide Sequence Number=SeqID_109315
ggcaccatagttcgcgtgccgaatggcctccgtctacgtctagcggcgcagctgaatctgaacaccacgaccgcgacgcagttacaagatgaagagcatgaaacagggcaggcgcagccgggacgacaaagcaagacccttctgccggacaacaggtacctgaattgcttgatgaaggtgataatgaacttggaagaccctcattcccggaggatcacacgtctgaccggcgacagctttcccatcctcaactccctgggattgagcgttgagagagggactctaaaaccgaacgaaattgtttcaccatactacaccatcaacgcccaaaccgtggtgtacgtgaccggaggaagcgcccggctgcaggttgttgacaaccgtggggtggcagtgctgaacgatgcgcttcgccaggggcagctgctggtcataccgcagtattacgtcgtcctaatagaagcaggtcaggatgctgggttcgaatacgtcgcgttcaagaccaacgcgaaccctctgatcagccgcatcgcagggcccggatccgtcctacgtggcttgccagttggtgtcatcgctgcttcttataatttctcgacggcggacgcgataaagattaagaatagtcggggcaacgacgaacgagctgtatgaattgaaactctctggtgattgtcgctatggattattaaggcaacgggcgacgacgagatgcatgtattgccatgagtaccggctgctaaagtaaataaagcatggcatgtgtgtagctccgtgataaccgtccacaatgtaatgcatactatatgtctacataacggttaaaaaattaaagtttacctcatcagtttcaa

SEQ ID NO: 43342 - DNA, 393 bp, Setaria italica
  Peptide Sequence Number=SeqID_109316
taccgcccctgcccgtcgccccctgccaacattccagcctgccaacctcattgcttggatcgcccgccgcccggttgttcggcgtccgatgctgcagcttcgagatgcgtcgtgctcgcgcaggtgtccgatgccgcggcgcacggtgtcggcgtggccgccatggccgccgcggccgcggtcggctcggtggcgaaggtgaggccgagggtgatgagcgccgtgacggcgaccagcgccgcagcgccgccgaacacgccgttcctggccacgtagcagtcgccgtccatccacccgcgcccgtaccgctgcccgtggttcatgctcgccgccgtcgccagcaggaccacggccaccgcgaagctcaaccacgagaggaccaggagggcgacg

SEQ ID NO: 43343 - DNA, 725 bp, Setaria italica
  Peptide Sequence Number=SeqID_109317
tttttttttttttcaaccgtaataatttggcataaattcttattgttgtgtaccatgatagctcatactagtaactattaggacaaaaacaagtatgttatgatattacataattgataatgtttgaaatgctctctcaaaccatatatttgttaagcctggcagtcaggcatctcccatgggatttcctctgctctgcgactccccaactagctacaatgtaacagccatcttgcccaacgccttagcctcttccagtttgaggcatgctcactatttgccttctccagttcgaaggctccagttcatccttcaggctttgagcttctgcatgaaatttcacctggttggtgaactttgaacagagtttctgtgtacagtcttcttaatcactcattatctctgttaagatatgaaatatgagattcaagggcttcacgcttcttgtttttagtactgtagtttactcttaaagcctggatctccataagtgcttctttgtaccccagggaagtgcgtacgtaattacagtgaagcagccaaggctcaccaatagtgaattgaattctcaggaacttgccaaatatctgaaatggaactatggtcacatttagcacatctgaaggttcatgtcacaaatgttgatgcgagagggcattggaataaagagaaacaaaggatgatgcatcttcctctaatggtaacgatttcaccttgccatagtt

SEQ ID NO: 43344 - DNA, 577 bp, Setaria italica
  Peptide Sequence Number=SeqID_109318
tttttcttttctttaatttttcggttcttaggttctattgttcgttagttgatgacatgctggatatcagggaaatcaagaccctttgatgcaacatcggtagccaccagaacatccttcttcccagacttgaaagagtcaattgcattctgtctttcctcttgatcttttcctccatggatcgcaacagcctccacacccttaagaagaaggtactcgtggatgtagtcgacatcaaccttgttttcacaaaagataagaacagggggtggagtcttttggaggcattcaaggaggtatataattctagcatcttcattgagctggacatcgacgtaccattggtgaaaaaaactgtaccacactactgacacaaaagattaaagactacgtaaccttcttcaaatcaaatggcgtgattgttcatagaattaacacttaacacgttgcagagaagcacatattgctgacatagtagtagctaaatcttaggcaaaagaatctttattaacttacactatcctgaagtttttagtcctgctgtacttagtctggggttctcactagtgcgactgag

SEQ ID NO: 43345 - DNA, 412 bp, Setaria italica
  Peptide Sequence Number=SeqID_109319
tgtacagaattgctagaagccatggcgattaaatcagcacagattctgtcgccgatgcagaacttagcatggaccaaatgccagtctagcagctgtaaggtgtcagcgagttcttgttgtccaggaagtgcttgactcctttctaaatctgaacagcagtacagcatcactgaggaattatgacatatactatcctgaagttttagtcctgctgtacttagtctggggttctcccctctctatgtactctttttctctctatcttaaatgaaatgacacgcagctctcttgatcaagcattagctattttgagcatgcaagatttgccaatgaatgcttgacttcttcatatctatgcaagatccatcacacaaacaaagaaaataaaggtaaccagaaaattagtaattat

SEQ ID NO: 43346 - DNA, 444 bp, Setaria italica
  misc_feature (41)..(41): n is a, c, g, or t
  Peptide Sequence Number=SeqID_109320
agtcctgcttgtatcataggatcctgcaagatattcgagtntaaaaatgctcatgggaataattctaccatagctgatatgtgagcatcatattttcttacttgatcaagcattagcattttgagcatgcaagatttgccaatgaatgcttgacttcttcatatctatgcaagatccatcacacaaacaaagaaaataaaggtaaccagaaattagtattatgtaatatgaaagaaaaggtaaacaaaattgaaaaagaacaaaagaaataattatcagctctagaaaattccggctatcttgattgtgtgacttccctggccccaaagtgctgatttccttctccatcatctcagtgtttctctccaaacctgattgctttcaatcttactctgacatcttgaatagcacagtgaaatcagggtgcaaaaggccaatacagat

SEQ ID NO: 43347 - DNA, 678 bp, Setaria italica
  Peptide Sequence Number=SeqID_109321
aagatcatgcccacgttgcccaccaaactactgtagtaatccaccgagaacttggcctgacaccatagttttttattacaatcctccgaatacgaatacatgctcctgtcttcactgcaaagacattgtcattaacatcctctcacaagccatatgtttgccaagcctggcagtcaggcatctcccatgggatctcctctgctctgcgcctcctcaactacaatggaacagccatcatgcccaacgccttagcctcttccagttcgaggcatgctcactaattgaatgagagtgcagttgaaggaacaccacacactaaggcctcccttgcagccagaaagcaatggcagaagagtggaacattacgtatccacaatttggtcctgcattactggcgctgatgaccagagctggcactgaccaaggaaatggcctcccagatgacgccaatgagacacagtcaaccaatgtgcctaatatctcaaaggttttcgcctaccgcagtgatgctctcactgtctcacagatggtaattgaatggccaaaagcagaaacaaattgaagctatattacaatccagtgtgactgacaaacaagaagcagataaaaactaaagcatccagtgtgagatgtagaaattttgaagattacaacatgaattatttaaactaacttgaa

SEQ ID NO: 43348 - DNA, 1350 bp, Setaria italica
  Peptide Sequence Number=SeqID_109322
caagaatcacaccttgcagcttgtaatacgtggtaaaagtattactgcatgtagcttctagtacaattagttattagcacaccttgcagcacgagattgtgtacatgatgtccattagaaactaaatgtactgatgatatattcaactcatattgatatgtgtcagcttaaatttactttgatagctgcatcctattagatcttgcagagatgaaagacattatttccattgccttgcatatttaggagaaatgttgtacagaattgctagaagccatggcgattaaatcagcacagattctgtcgccgatgcagaacttagaatggaccaaatgccagtctagcagctgtaaggtgtcagcgagttcttgttgtccaggaagtgcttgactcctttctaaatctgaacagcagtacagcatcactgaggaattatgacatatctgaacaaaacataagcaagcacaagagagctcagtgggtcagccacacaatgaacatgactacaggaaaattgggtaacctttcttagatgtaattgctattacatccttgatctactactgctaccagtttgctgctacaacggattaaaacagaagcctgagagtggttgtttagggcttgcttctttacctcaatattatatgacaattttcagaggccatgcttccatgtacaataaaagttgttccatcaaactgaacccaagttatcatataaatttcacaagaaagataacaagaattacaatgtatccatttataaccaaggtaagcaatgctcaggaatctagaaattccagaacatggacaaatcaaatgttatgttctctttcaaccaaatttctctcacaaactaaataataataataatcgaacttgctatttttcaaaagacaaatttttttgctaagcatactgtagcaaacaaacctctatagctgtttatgatacatgcctcactaattttcactcaggagcaatgctacacaattacaactcaaaaaagaaatagcacatttacctcatgctttttccttatgttctcttgcccagttcttaccaagtcaatgtgcattcagtgagcaagacaaatgctgcacaatcttgttagacagccgactaatctgttttgtgttatgtgctgaagttacacatcatcactacatcctgaaaactgggagttcgatttattgatatgtaatatattttcctttagtctatccctatttgataatgaaaaactgaacctatccatttacctaaaaaactcaaagtcgattgccattatataacatcaaaagtacgaattagaccaattaataataaacaatacaacaataactta

SEQ ID NO: 43349 - DNA, 1792 bp, Setaria italica
  Peptide Sequence Number=SeqID_109323
taaaatagcaagttcgattattattattatttagtttgtgagagaacttgctatttttcaaaagacaaattttttttgctaagcatactgtaccaaacaaacctctatagctgtttatgatacatgcctcactaattttcactcaggagcaatgctacacaattacaactcaaaaaagaaatagcacatttacctcatgctttttccttatgttctcttgcccagttcttaccaagtcaatgtgcattcagtgagcaagacaaatgctgcacaatcttgttagacagccgactaatctgttttgtgttatgtgctgaagttacacatcatcactacatcctgaaaactgggagttcgatttattgatatgtaatatattttcctttagtctatccctatttgataatgaaaaactgaacctatccatttacctaaaaaactcaaagtcgattgccattatataacatcacatactgaattcattgagctggacatcgacgtaccattggtgaaaaaactgtaccacactactgacacaaaagattaaagactacgtaaccttcttcaaatcaaatggcgtgattgttcatagaattaacacttaacacgttgcagagaagcacatattgctgacatagtagtagctaaatcttaggcaaaagaatctttattaacttacactatcctgaagttttagtcctgctgtacttagtctggggttctcccctctctatgtactctttttctctctatcttaaatgaaatgacacgcagctctcttgatcaagcattagctattttgagcatgcaagatttgccaatgaatgcttgacttcttcatatctatgcaagatccatcacacaaacaaagaaaataaaggtaaccagaaattagtattatgtaatatgaaagaaaaggtaaacaaattgaaaaagaacaaaagaaataattatcagctctagaaaattccggctatcttgattgtgtgacttccctggccccaaagtgctgatttccttctccatcatctcagtgtttctctccaaacctgattgcttcaatcttactctgacatcttgaatagcacagtgaaatcagggtgcaaaaggccaatacagatctcacccttagcatattcagacaaggaagaaaaaagatgaagatcatgcccagttgcccaccaaactctgtagtaatccaccgagaacttggcctgacaccatagttttttatacaatcctccgaatacgaatacatgctcctgtcttcagtaatgataatgtttgaaatgctctctcgaaccatatgtttgccaagcctggcagtcaggcatctcccatgggatctcctctgctctgcgcctcctcaactacaatggaacagccatcatgcccaacgccttagcctcttccagttcgaggcatgctcactaattgaatgagagtgcagttgaaggaacaccacacactaaggcctcccttgcagccagaaagcaatggcagaagagtggaacattacgtatccacaatttggtcctgcattactggcgctgatgaccaaggaaatggcctcccagatgacgccaatgagacacagtcaaccaatgtgcctaatatctcaaaggttttcgcctaccgcagtgatgctctcactgtctcacagatggtaattgaatggccaaaagctggtttgtcccagaaacaaattgaagctatattacaatccagtgtgactgacaaacaagaagcagataaaaaactttgcaaggattcactaactcaaacccctgaa

SEQ ID NO: 43350 - DNA, 2020 bp, Setaria italica
  Peptide Sequence Number=SeqID_109324
gcgcaattccaatcacaggttcagacaagacttttgttacagtcaactataccaacaaaaatgccctctacaatacttgaacactggagaacagttatgttttcagttttcctacttctgctcctctctgtcagcctgatgtacaaaggttacatcttatgcgtgcctttgcaggccaaggagagaatccatcatatggaccaaatattaattaacacatcacacacgacatggaacttaccgtggtatcacctatctgaaatgtattcgcttacagaaagggtctaaactggtgcttaacaaaattacttcaagaaatatacaccacggcattcacttttggttacattttacaagagggtaaaatctacttaccttcctctaacaagctatcccatctagcaagcagcatgatacccagcatatcgtataggtttgatcgtgcaaactgtcttccctcaatgatgagggaggagcctctgctacctcatacacataacattgttgagctgaagttgcagcgtctaagctcctcataaccacagacaagcatcaacctagagcaatcatatttctcctcggtagcccccaccgccaaagtagtctttcctcgagcctgcaattgccatggacttctggtgctccagcttcggacagtcaccaacacgatggccaagcccaccacaatacgcacatcccttaacaccactctccttggcgattatttcctcgtcctccaatgggtcatcgagttccgccaacaccggtggaatcctctgctttgcctccttcagcaggtgcttgagatcgagaagtgtggtctcggtttggttcttgttgatgaaggtagttgctatgccagtcttaccacaacgacctgttcgaccgattctgtggacatagttctcaatttcggcaggcatgtcgtagttgatgacatgctggatatcagggaaatcaagaccctttgatgcaacatcggtagccaccagaacatccttcttcccagacttgaaagagtcaattgcattctgtctttcctcttgatcttttcctccatggatcgcaacagcctccacacccttaagaagaaggtactcgtggatgtagtcgacatcaaccttgttttcacaaaagataagaacagggggtggagtcttttggaggcattcaaggaggtatataattctagcatcttccttgacatactcaacttcttgaattacatcaagatttgctgctccagctctccccacattgacagtaactggttgcacaagggcattcttcgcaaaattttgaatcttctgaggcatagtagcagaaaaaagaagggtctgcctttgatccttgaaatggtcaaaaacctccttgatgtcctcctcaaatcccaagtcaaccagcctatccgcttcatctaaggttaagtacctgcagttatcgagattcatcttcttcttggcaagaagatccttgagccggccaggtgttgccaccacaatgtgaacgcccttcttcaacacatccagctgcgtcctcatatccacacccccaatgcaaagcaacggccttatctcggggtacccggcgtccttgagtggaaggaggaactcctcaatcacatcataagtctgcttagcaagctcccgcgacgggcagatgatcatcccaaacggaccctccccaggcacaatcggcatcaatatctcctcctgcagcgccaccatgataagcggtagcacgaacaccagcgtcttccccgaccccgtgaacgcgatgccgatcatgtcacggccggagagcacaacgggcagcccctgcacctggatgggcgtgggctggacgatgcccctctcgcgcagcttccggagaatgggctcggggaggcgtaggtcgcggaagtcccgcgcgggcggcgggacgtcgttgccgtcgacgatgatgtgccacttgcggcggagctcgttggccttggcgagcggcatgcggcggaggcggaggggcggcttccacccggtct

SEQ ID NO: 43351 - DNA, 457 bp, Setaria italica
  misc_feature (425)..(425): n is a, c, g, or t
  misc_feature (441)..(441): n is a, c, g, or t
  Peptide Sequence Number=SeqID_109325
atactgaaaatggtaccatttggtacaatgttatatagtcaatggatgcttgtgctgacaatgtatgcttgttcttggcttgtatgtggttcagggtttcagccataaaaaatttgaaacatttggttctagtggcgaacaataactcataaattgacagccatctcacaatccataaattgagcatcgggggagctcactgctcactcatatttaaccctgaggcagaatcttagaaataattgaaacatttcaaactgattcatattgagatcacagctaagaaattaaaatgagttcacagcatgagttcaccgaatgctgtgattggcggaatcagctgcgattgtcagtcaaacgaatgctggattgaagataagggcatgcgggcgagctgcggacaactgacggcggtggaggccctntccgccagtggtggancatcgaatctacatac

SEQ ID NO: 43352 - DNA, 1267 bp, Setaria italica
  misc_feature (1226)..(1267): n is a, c, g, or t
  Peptide Sequence Number=SeqID_109326
cgttgccatcctgctcatcatcatcctcaacctcagacttggacttgtcagaaccttctgcttcctcaccttcaccaccatcagttttggctttcttggagctagtgctctcctttttcttgtttgtggcttgcttgccttgtcttcctgcttcttgcccccacctccgcctccaattcaaaaccaacctccaccccacttccctggccatgtaccacctccccaggttacatcagtctcacttgctctgccagcacctgcagcgtcgtccatagcacaggaagcttattatgccccatcgtcacagccaactgaggccacccaccagcaattccaagctccaccaggtccgcagcctcaggcggcacagcctccaccaccccagcattaccaaaccccacctcagtttactcaatattctcaacctccccatcctgcaactgttaacccctcagctgcacctccacccccagtgccccagcaacctgaagagccagcaccgtatggccctcctgctcagagctatccaccaaatgtccgcccaccgcctccttacatgccaccccctagcggacctgctgctcctttctacgggccaaaccctggcatgtatgaggctcctcctgctgtcaggccaaactccgggccaccaccgccctataatgctggatacaaaccaccaggtgcaggtggtttctccgattcttatggttacaccgggtctccgtcccaccatggtaacgctggaatgaagcagccctcgccctttgcccctcccgggggaagcggcggctatggcaggctccccacagctcaggtgctgccccaagccgcaccagtcagctctgcaccaggtggctcctccggcaccagagtgcccatcgacgacgtgatcgacaaggtggccacgatggggttctcgaaagagcaggtcagggcgacagtgcgcaagctgaccgagaacgggcagaacgtggacctgaacatggtgctcgacaagctgatgaacgatgccgacacccagcctcagaggagctggtacgggcggtgagcggagctgcccgggctggttcctgagcagagagcgctgcctgtgtatatcgctgaacagtcatggtgccaccattcttttacatccaccattgagtttacaacgtcaattgtagttaactgttacccgctgttatgatgatgcacgagcaaccatgttattttcctaaaaaaannnnnnnnnnnnnnnnnnnnnnnnnnnnnnnnnnnnnnnnnn

SEQ ID NO: 43353 - DNA, 996 bp, Setaria italica
  Peptide Sequence Number=SeqID_109327
ccccaacccagcagctctgatcggctcacccgccgtctcgccgcgatgaacgcgtcgcagttcatggacaagcagatccagggcctcgcggcctccggcgccgccgcgtcctcgccgccggcatccggcggcctggtcgatctgatgagccccgacccgcaggaggaggcggagagccacgcgcaccgcccccaccacggcgaggtgctgcccagctacgacttccagcccatccgccccgccagtagcgccagcgccagcgccatccccgttggctccggccctgcggtgggcgcctggggctcgctcgactccaaagccgcgtctcccaaccccctcaagacttctggtgtattggagcctcatcacatgctaaagaaagttagccatgaagaagagaggagcaactttagtgcagtcactatagtggatatcgatcgtaccatgaagaaatatgctgacaatcttctacatgcacttgaaggtgtaagctcaaggctttcacagctggaggacagaacgtaccatcttgagaactctgttggtgagctgaagttaaccattgggaacaacaatggaagtactgatggaaaactgaggcaatttgagaacacactgcgtgaggttcaagcaggtgtgcagattttgcgtgacaagcaggaaattgttgagacccagatccagcttgcaaagctccaagttcccaaagcagaagatgttcaatcagaaaatgctgatgctgggcaggcagactcacggcagcagccaactccaccccagcaaaccattcaattgcagaaccaagcccctcccctttcccaaccaccagcaccgctgcctgctcttcctgctccaaccgcgccacctccgcctccaattcaaaaccaacctccaccccacttccctggccatgtaccacctccccaggttacatcagtctcacttgctctgccagcacctgcagcgtcgtccatagcacaggaagcttattatgcc

SEQ ID NO: 43354 - DNA, 675 bp, Setaria italica
  Peptide Sequence Number=SeqID_109328
gaatcttcactagagtgagatccatctacgacaatctcatcgtcagtttgcactttgatgcatccatctgccaaattctcagaatcatactggcacttgagatccataggactagattcggataaagatgaaacagaatttgagtttgtgtccacatgactagcatggtgagctgaagctaaaaatggagattcagatggtatagctggttttgcagtccacaagccagttgcatcatttcgagtatataactgaggtggcgcgtaccattcatgctgatcaattgtcaccagtacagacttgttccgatgacgatcagtgtattttacatattctagaggcactcgtgatccccttgacaattttgaaagaactgcaataaggtcatctaaatgcacaatatcctctcctgcaagctttttaattattgcatggcgtggaacagatgctcgagagagcgtgtaccctgcttctgcaacatatacgagaccacatttgaatcggaagtttctagcctgctgatatgaaagtggatggatgacagcaccactaacttccaagaaatgatttggagttatagagtgcaaatcctcaacctgcaactttactgttaaaggaacaccacccctttctatctgcaaatcgatctcccggccaacactatcatcaagaagt

SEQ ID NO: 43355 - DNA, 879 bp, Setaria italica
  misc_feature (1)..(56): n is a, c, g, or t
  misc_feature (83)..(83): n is a, c, g, or t
  Peptide Sequence Number=SeqID_109329
nnnnnnnnnnnnnnnnnnnnnnnnnnnnnnnnnnnnnnnnnnnnnnnnnnnnnnnncctatcccctgtgtgccttggcagtcncttttagtttttttttttttttaactagcaaaccaactgcagggggtagtcacccaatcgttcgatagaacaagcaaaacaactgtttacacatgcggatgaggctggcaacagtatccggctctttccctgctaatagttaaacgggcactccagcatgtcatagccctagggtaccttccatctacaggttctccttacagcatataacatcaaaaggaacagcagcatatcaagctaagtacaaaagaagcaaacacccaattgcacagctgctgttccccatcctactatttactcctcatcttcctcctcgttgccatcctgctcatcatcatcctcaacctcagacttggacttgtcagaaccttctgcttcctcaccttcaccaccatcagttttggctttcttggagctagtgctctcctttttcttgtttgtgggcttgcttgccttgtcttcctgcttcttgcccccaccatacttcttcttttcctcatcggacatagagcgccacttctccccagccgcctttgtcacatccttgacgcccttgttctcggggtgcttctccaggtactgcggcctgaactcagccagaaacgcgaagaaaggggtgagcccgcgcttggggccgccggccttcttgcgcttggcaccggaggccttgaatgaggcgtcggcgccagccttgctcttcatggcggcacgcggttagggtttgctagggctagggcgccggtgacggtgaggatgggattgtgggaggcggggggaggcttagagtttgggacaa

SEQ ID NO: 43356 - DNA, 3368 bp, Setaria italica
  misc_feature (1)..(4): n is a, c, g, or t
  Peptide Sequence Number=SeqID_109330
nnnngttttttttttttttgtctccgactcagtgtgagtaggttttttttcttaccaaaataggagtagattgatataacaaaaggtaaatcccgcggtctaattgccacaacaaatgaatccatatgttttttttatgaatactatatatctccttcaagcaccatctatgctaatgcccaccactaatcctgcaaagtacaggataacttcgacctgcataaggcaggattttagcttaccaaacaaaagcatgaccctctaatttcctcatctccatgctacgctgaaagcatgaaaagctcacgacaaaacagactagatcacgccgcagttgattgcaacgcttttatcgttctcctccgccatgtggcagtttctggctcaaagctaagctcccaggttggccagtagtgaaggtcctgctttagggtaagtacacgaggctttccattcaaatggacggtccttaccctaacaaattcaccatcttccaggcccttcaccacctgtataaaggtttccagatctggagttggttgcccattaatttcaatgatccactggagagcatagagaccatatctatgtaccggacttccgtgacaccatctagcaacataaactccatgaccttcttctggcaagaagccaagtgcacgcactgctgaatgaggatcctggataatgcatccacaccaattaaccattcgggttgtaccattgccatctcttacatcagttccaacaataagttcaatttcttttccctgacggaagattgtcatgttcagcactccatctgatccaatggattggtccaactcttggcaagccttctcaatgtcaaggaagcatgtaattggctctttgttgatagcaagaatcatatctccctgctctagaagattttcagcttttgatccagccaaacaccctttcacccgcaggacttgtctacgaacaggatccttctttgcaaggtcctgcacccagttatcactcaatccataacttctcgccttggatagcaaagttggataaagttccacctccaaaagtctgacaaatggcattggcctctttattccattgataagtcgaaaagggccttgagtacgagagataatcttctcaagtacttggcttattgcatatattggtatgcctctaacaaactgatgatcctccgaactgctgcagccatatttcagctgagtggaaaagcttgcccacaatgcttgaactcgtccttgctcatcagtcaagatgcccgaaaatgcgctaccaaaatcagtatcgagctcaatgacctccatgtttattgcacggtatcgtggacaatcagctgagccaatattaacagctgtgcaaggattagttatgattgatttccttgatgttgcctgtaagcttctacttagcccaactagatagacagaatctcctcgtcgcaaagcaggttctggtagaagcttagcagcccggacaacagatgccccaactcctagtgcagaaggatcataagccaccagtgcaaagttatgaacaggatgcaggaaaacaacctctgcaggtatttcaatgggatatgcagcaaacgaaagcattatatcagagatagatacagcaactgtattcctatcaacagcaaccagacccagattatcagaatgatatattataaccccagttccaaagaaatgttgtgagtgcactccatcaagcatacaaactggcggcacatgaacctcaaacataacaagggctggttcaattacttgttctgccaatgacgcattacttgatattgttcgagcaaggtcagagccttctgcgttcgaaggatgcctcaaaacaccacttttcacatcctctagatctccataagatggtaaagttccctcagcagcaatttcctcatccacacgtcgcctttttttctcaatgacagaatcttcactagagtgagatccatctacgacaatctcatcgtcagtttgcactttgatgcatccatctgccaaattctcagaatcatactggcacttgagatccataggactagattcggataaagatgaaacagaatttgagtttgtgtccacatgactagcatggtgagctgaagctaaaaatggagattcagatggtatagctggttttgcagtccacaagccagttgcatcatttcgagtatataactgaggtggcgcgtaccattcatgctgatcaattgtcaccagtacagacttgttccgatgacgatcagtgtatttaaactacgtagaataccccttagaacaaattttagaaaagaaactgccgcattaaggtcaatctaaatgcacaatatcctctcctgcaagctttttaattattgcatggcgtggaacagatgctcgagagagcgtgtaccctgcttctgcaacatatacgagaccacatttgaatcggaagtttctagcctgctgatatgaaagtggatggatgacagcaccactaacttccaagaaatgatttggagttatagagtgcaaatcctcaacctgcaactttactgttaaaggaacaccacccctttctatctgcaaatcgatctcccggccaacactatcatcaagtaaagtttccagtctaagaaactgtgttacaacctcctcattgatgcaaactagaacatcaccaggttctaaatgtttatgtgcaggaccttcaggcaccactgaatcaacaaccagcattccagtctcgcctgctggagaaactaagcgcaccatctgttctgtttcattccggaggccaagacgacgagtttcttcaaatcctttgtgttgaaaggtcacctgaagtgtaccacgtggaatataaatggattctggcttggtaccaaatgcatcccaactatcacgtatcagattcagtgctctaacaacacgttctaatggaaggaagaaggcagaagcactggaagatttgcttccagcattcagggcaacagcccttccttggcaatcaacaacaggggaaccactagaaccacctttagtaccagatgcagcctgcatatagaacgtattgaaatcattgtatccatccttcttgtagtaaggtgcttctctatcaagtcgagcaagtgttcctgccaaaattgaaaccttttcgccgctgtcatttccaacaacccggatttctagcccgactgatgctgcttcaggtgccagcggaatctcatcatacttaagaaacttaatggcacctggatcatagcgaaaaaaaccaaaatcatgtacaggatctctgtacagggggtacacagggatctcttccctgttcacgaacatggcctccgcgaccacaggccctgg

SEQ ID NO: 43357 - DNA, 264 bp, Setaria italica
  Peptide Sequence Number=SeqID_109331
ttgttgtgttattttctatcttattgctccaactaaggagcatgttgtgtataatacatggtcaggacctgcttaactacctgaggtaccttaattgttctaggtcaccaggctatgtagtatatgtgcaggtgtgatgcgtttaatgaaatgccaattcttttgataaaatggaccggagaagcttttgttacaatttacttccaagtccaaattacttatttgctggttttccctatcctgtacagcagaactatgcattag

SEQ ID NO: 43358 - DNA, 261 bp, Setaria italica
  Peptide Sequence Number=SeqID_109332
gatgcatgtcttagttgatgcagcagtaccggtgctgactggtttcttattcgatgtcagcctggatgggtcttcccacctgttttcaccgagaagaaatactctgtgttccgaaacccctacccctgaaacaccattttctgcaaccacagtctgtcgaacctccgcgattcctgttacagcaggaacagctgctccgtttgtgccatctttagtcgtcccatcctccccagtcttgcctgagaatagcctctaaagtag

SEQ ID NO: 43359 - DNA, 794 bp, Setaria italica
  Peptide Sequence Number=SeqID_109333
ttctttgttaatatgtttccttctattgtacaagaaacagtatggagtatttcgcaaccttgctatgatcctgctttctgtaggatgacaggcactcaaactggccatgtgaatgcgttattcaatcacgatgataaaagtgaatagtttggtagtatctacatgcacgactatgttgttcacaaacaaggcagaatgttgttatatgtcttgcttaacttgccactactttcttcccatcacaaacatcgcataagatggaaccgaggccttcacagtatgggcactttgtatcttcaccaacccactccaaaaactgtggttcaatgttcggctctcctgttccatcacattctaagcacatgaggcggccttcgcctctacaggagatgcatgtcttagttgatgcagcagtaccggtgctgactggtttcttattcgatgtcagcctggatgggtcttcccacctgttttcaccgagaagaaatactctgtgttccgaaacccctacccctgaaacaccattttctgcaaccacagtctgtcgaacctccgcgattcctgttacagcaggaacagctgctccgtttgtgccatcctgcaagaacatcgaatctcagcagctgtgcagtgggcactactgaaaatactgcagaaggtatgcggagagttctatggttctgaaaatatttacttccctgtgattcgcggcgcacttgtattgtatatcacgaatttttaggatggagttagtttttgaggcacataagtcaggtagacatgcataaatatta

SEQ ID NO: 43360 - DNA, 825 bp, Setaria italica
  Peptide Sequence Number=SeqID_109334
cacggctgggacgcctccgccttccgcccctgggcagccgccatcgccgccggcgccttccccgcgctcgcctcgctctacctcaagcgcatccccgtcaccgacgccgacctcgacctcctctcccgctccctccccgcctcatttcgcgacctctccctgcacctctgcgacggcttctcctcacgcgggctcgcctccatcgcctcccattgcagggcgctgcgagtgctcgacgtggtggagtgcgacatggccgaggagcaggaggtcgtggactgggtggcggcgttccggccggagcccaccaacctcgagtcgctctcattcgagtgctacgagcagcccgtgtccttcgccgcgctcgaggcgctcgtggcgcggtccccgcgcctcacccgcctgggggtcaaccagcacatctccctcggccagctgcgccgcctcatggcgcacgcgccgcgcttgtcgcacctcggcaccggctccttccggccggcggacggcggcgaggagggggtcggattcggggaggttctcgctgcattcgactccgctgggcgagcgcgcacgctcgtttctctgtccggcttccgtgaactcgcgcaggagtacctgccgaccatcaccgtggtgtgctccaacttgaagagccttgacttaagctacaccccggtcaccccaaatcaaattctgatgttcatcgggcaatgctacaaccttgaaacgctatgggtgcttgactcggtgcgcgacgaagggcttgggaacgtggcaatttcttgcaagaagctcaagtgtcttcgcgtgctcccattgaatgcg

SEQ ID NO: 43361 - DNA, 1363 bp, Setaria italica
  Peptide Sequence Number=SeqID_109335
taaagaaaccttaaagaaacttaaaagaactaaacaaaccccggtccgataccccccatacacaaaattactagtatagttcatcgggcaatgctacaaccttgaaacgctatgggtgcttgactcggtgcgcgacgaagggcttgggaacgtggcaatttcttgcaagaagctcaagtgtcttcgcgtgctcccattgaatgcgcatgaggacgccgacgagttggtatcagaggttggccttactgccatctcgcagggctgccctgagctacgctcgatattgtatttttgccagacaatgaccaatgctgccgttattgccatgtcacggaactgcccggagctcaaggtattccggttgtgtataatgggacggcaccagcctgaccatgcgactggggagcctatggatgaagggttcggtgccattgttcagaattgcagcaagctcaccaggctatccacatcagggcaccttactgaccgggcatttgagtacattggcaggtatggcaagtccttgcggacgctctcagtggcgtttgctggaaatagtgatgtggcgctgcaatacattctccagggttgttcaaagctagagaagcttgagataagagactgcccattcggtgatgccggtctcctctcggggatgcaccatttctacaacatgcggttcgtctggatgtcgggctgcaacctgacactgcaagggtgcaaggaggtggctcgggggctaccacgaatggtggtggagttgatcaatggccagcctgagaatgaaaggaccgaaaaggtggacatcttatacatgtatcgatcactggacgggccaagggaagatgtaccatcatttgtgaaaatcctgtgaagcttctgctgtggaggcatcgtatgagtggctgcctgggagtatcatacttctgcacttgctgagcgtggatctaatgcaatctgtgagttcatcagcgaaatgtaaagtttttctacagcaagaccacaagcgcaggcttcttcgagggggtgtcatggccgcctcagttttgtttgctgctctgggaggctccagtttgaggatcatgtttctatgccggcgcaaccaccatttttcgatgtgaagcttgttatcagattaaattcattagaacttttcccttctgttgttattgtcagttgcatattttccgtttccattttctcgtttctgaagtctgaactatgagcaaagcctcctggactgggctatgttgttaaattccaatgctccttgtctcaagttttgtgatctctgttgattgtttaaagagaaaaattgttagatccttttgttgcgactagaccaaaggcacacaaaaaaaaa

SEQ ID NO: 43362 - DNA, 360 bp, Setaria italica
  Peptide Sequence Number=SeqID_109336
tgtgaagctggggagatggatcatgcacataatcttctcaagctgttaatatctaaaggatatacatttgatccagcagcattcatgccagtgatagatgcactaagtaataaaggaaagaagcaggatgctgatatgctgtcagagaaaatgatggaaatggcagactttaatgatggtcttggaacctattctggtaagattactcctggaagccggaggcatgagcatgccaagaatggtcagagtgattggcgtgctcttttgcacagagatgacagcgcccgcacaattatgaaaattacaaggagagtgcggacaggatggggtcaaagaggcaacgtatacgagcacaaacag

SEQ ID NO: 43363 - DNA, 339 bp, Setaria italica
  Peptide Sequence Number=SeqID_109337
ttaagtaacaaattggtcaaccggagtttaatgatcatgaccttcctcagaggcatgaggatgaacaggccagaaaaactgacaaggaagaggaaagtgatggaccggccaatgtttggctcaacaatattctttgtgtcccctccagctgcaatcttgcccattgcgaggatgtacgtcccaaacccaccactgaatgtaatagcggagcaggcgacgacacaggtttggatgacggtgttctcctggcgggtgaatggcaggtgtggcaccttaaagctatcgagaacacggatccatgcacgggagaggtagaaaccaatgaggccggctggggat

SEQ ID NO: 43364 - DNA, 998 bp, Setaria italica
  Peptide Sequence Number=SeqID_109338
actattagagcaacctccctgtccagtagtagtagatagtttattttcctcttttatttaaaagaaatggatattgttctgtactagtagagatcaataacttcaacacaaaactgcagacctttatatcaaacttttaaaaacgtttctagaacgaacttatcgccttctataggaatataagctgcaattattacaattcaagtaacttgaattcttgagagtatcattgagttttgacagcaactgcctctgcctttaagtatacttaagagttccttgttccaatcagaactccaaaataaagtaaaactgtttctacctcatgaggcccagccaaacttcttcatgacattcttggttctcttccggagcctcacaaacacgataaccatgcaagccagcacccatggcgggaagttcacggtgcccagcctggatgcaagccactcgggcatcttggcctccttgaataacactgcagctaccaccgtcattgcggcgaccccaatcaccatcttcgtgatcggcttcagcaaagaatccttgggttcgccgtcgaggaagatggtggaatcgggggcgtaggtgaggagggagcggccgttgcgggggttgaagcggatggcgacgccgcgtttgcgggttgcggggtcgaaggcgaagacggacttgaggccgtgctgctccaggatgtctcccacctccagctggtcctgcgaccacccgcccagcggcgaccggaacacggacaccggccgccctcgccggaacagctgcacctccacctccggcgctgaggccgctgccgccccggatccggccttcccgtcccgggcaggggccgtggctgcagactcctcttggatggcatcgtcgctggcctccgcggcggctgccggcgccggcgccgcggccctatcagcttccgaatccatcggtttggtcgattcggttttttcttcctttttcgatcagtgctcgatcgggttcaggac

SEQ ID NO: 43365 - DNA, 316 bp, Setaria italica
  Peptide Sequence Number=SeqID_109339
tttttttttttttctttgcaagctaggatatcagttcacttcaattgcatgtcaaaggaatagtggtacatgttaacacggcttaatcgatcatctgggattagagaacaaatagggttcaacatctaccgacatacaacacatcttcaaaggtatggtcatgccctctatagccccccacattgtcaaatatcgacagcattcttggacgcatctacaccacgagaggcacacggacgcccggccggccacttgtttcttcgactgtcctacaccctagtacaatacatgctgaccaccccttccaagagacaag

SEQ ID NO: 43366 - DNA, 424 bp, Setaria italica
  Peptide Sequence Number=SeqID_109340
gtgggctcctcctaccgtccgccgactcgacgcgcgcctgctgcctgttctgcggcaccggcaacgatgcctgcgtcatccgccacaagctcacggccacgcacggcgctcgctgcttcgggtcctacaacggccattgccccaatcgggatgcccgcttcctctacctgcccgacgcgctgggcactggcctaaaccatggccagcgtgacatggtcatcctcgcggccaccctctcgtgctcgcccgatgaccagaactgcatcggtgctggcatagtcatgcagtggcagttcatcgccggccagcggcaggtggccttctaccgggacgacaatagggaagaataggcgttggatgctgatgccaggcccttttgaagtggaggatgtcctgttccacgacggatcataacgtttcctca

SEQ ID NO: 43367 - DNA, 507 bp, Setaria italica
  Peptide Sequence Number=SeqID_109341
ttcataatcactgtcacccaccaattgttcactgcgatgtcaagccaagcaacatccttcttacggaagatatgagtgcccgagtgggagactttggtatatcaaggatcttgcttgaaagtgcaaacaaagctgggcaaaattcaaatagcacaatcggaataagaggctccattggttatgttgctccagagtatggcgaaggttctccaatctcaactgtcggtgatgtttatagccttgggatatctctacttgagatgtttacgggtaggagcccaacagatgatatgtttagagaatcagtagaccttcacaagttttctgaggctgctctccctgatagagtcttggagatagctgatccgacaatatggctgcacaatgacgccaaggttaatatcacaagaagcagagttcaggagtgtctggtctctgccattaggattggcgtatcatgctcgaagcagcaacccagagaacgaatgccgatacggaggtgcagcc

SEQ ID NO: 43368 - DNA, 390 bp, Setaria italica
  Peptide Sequence Number=SeqID_109342
tttagtacctttagccttgaaccccttcctgagcaccaacacgccgccacctgaaggtgaaggtgctggtgcagatgctgctgggtgctttggtggtgccgccgccgccgacgccgtcgtgctcattgttgcaatcccggcttgtcccatgcatgcgctggcgcaggagagcttgcagacgatgggccatccaatgcaggcggcttcgcactcgtcgcggcagttgcccagcgccgcccgcggggacgacgccaccaccaccaaccacagcagcagcgccgccgccgccgccggtgtcttggtcgccatctccgacgatctgatgctagcttatctcttctcttctctctccacgcggcctcacgcacttgcttcttgcaggtacgcgcg

SEQ ID NO: 43369 - DNA, 784 bp, Setaria italica
  Peptide Sequence Number=SeqID_109343
tgtgtgccttggcagtctagtttttttgctgctagtatgctaggatctggcattaccctcccaaaatggtggtttactcagcaagttcataaaaaagaggcacatatgtaaccggttcgtccagcgaggcgagtgataatctgataggtcacactggcattgtacaaagttacagacagggccaagtcacggtgaaaagacgccggcgcttctgttggccccgtgggtttgcttagaacatggccgacgtgacctccgcgacctcagacgtgacctggtcgtagtccgtcttgagcttctccttgacctcgccctccagctcccccttggctggcttggtcatcaccagcacgcaacaggtaggtctcttggtggtgccggcggtcgccagatcctcttttgagggaacatatacgtatggaatactggcttcttcacagagtatcggaacatgagttattacatcgatgggagaaatgttgccagcaatcacgcacaatcccttgttcccccggcgaatactcttgacaacctccttgactcctcgcttcaagcatttggcctcagaggctcggcggacgagcttgagggtccgcttgcagagcttcttgcccgcaagcggcttcgcgatgggggccagggccaccggagccctcttcttctccgcctccgtgtcgctccccatcgcaagactgcaattccctcctcgccgccggcgccgccgctgagctgggagttcgcgggctttggttggaacggcggctagggttttggggagggtttt

SEQ ID NO: 43370 - DNA, 305 bp, Setaria italica
  Peptide Sequence Number=SeqID_109344
aagaagtgataacaactatatataaagtttacacaggtacagaaaatatgaaaatatgtaagcaaatggattttttcaatcaacagtgggcctctaagaaccagtaattcatcacagaacatcagagcagtaagcatttacatggctatacgtacactgtgatgctcagtggaacttggaacacagtagcattgcatgatacatcaagggaggaactgtatctatcattagttttgagtgtacaagaatgcgtattagcgtagatgatggttttaagcacaagctagctatagtctcgtaaataa

SEQ ID NO: 43371 - DNA, 321 bp, Setaria italica
  Peptide Sequence Number=SeqID_109345
gctgaacgcagtctccatgatgccctttgcgtcatcaggtgcttggtgaacaagaggttttgattgctggtggtggtgctccagaaatagagatgtcaatgcaactggctgcttgggcaaaggagcttcaagggatggagagctactgcatcaaggagtatgctgaggcactcgaggtcatcccttacacgctggctgagaatgcagggcttaacccaatctccattgtcactgagctcaggacaatggagaatgcagggcttaacccaatctccattgtcactgagctcaggaatcgccatgcccgtgttcttctcacct

SEQ ID NO: 43372 - DNA, 1970 bp, Setaria italica
  Peptide Sequence Number=SeqID_109346
atcccctcccctggaaacaagtcgaaaagccctagcccccaaatctccctccctcctgatccagcagccagcagatttccgccatggccgccgccgccgccgctgcccctgcgccgtcccgcaagacggagacctacaccgacaccaagcgccgcgacgacgtccgcggcgccaacatcgccgccgcgcgcgccgtcgccgacgccgtgcgcacctcgctggggccccgtggcatggacaagatgatctcctcgggggaccaggaggtcatcattaccaatgacggcgccaccatcgtctcccgcatgtcgctcgtccagcccgccgcgcgcatgctcgcggagctctcccgctcccaggacgctgccggcgggggacggaaccaccaccgtcgtcgtcctagccggatccctcctccgccgtgcccagtcgctcctctccgcgggcgcccaccccaccgccgccgccgacgccctccaccgcctcgccacgcgcgccatcgagatcctccactccatggccatccccatcgagctctccgaccgggaatcactcgtcaaatccgcttccactgccctcaactccaaggttgtttcccagtactccactctcctctcacccctcgccgtcgacgccgccctctctgtggtggatcccgctcacccggacctcctcgacctccgtgacatccgcatcgtcaagaaacttggtgggactgtggacgacactgagctcgtccgtggcctcatcttcgacaaaaaggctagccacgctgccgggggaccaactcgggtggagaatgcaaggatcgctgtcatccagttccaaatctcgccacccaagactgacattgagcagagcgtcatcgtgtcggactatgcacagatggaccgcatcctccgtgaggagcgcaattatatccttgggatggtcaagaagatcaaggctgctggctgcaatgtcttgctcattcagaagagcatcttgcgtgatgcggtcactgagttgtctctgcactatcttgctaaggcaaagattatggtggtgaaggatgtggagagggatgagattgagtttatcaccaagaccctgaactgccttcccattgccaacattgagcacttccgcgcggataagcttgggtctgcagatcttgtagaggaagtttctgtcggggagggcaaggtcgtgaagatcactggtatcagggacatggggaggactgcgactgtacttgtcagagggtcaaaccagttggtcattgatgaagctgaacgcagtctccatgatgccctttgcgtcatcaggtgcttggtgaacaagaggtttttgattgctggtggtggtgctccagaaatagagatgtcaatgcaactggctgcttgggcaaaggagcttcaagggatggagagctactgcatcaaggagtatgctgaggcactcgaggtcatcccttacacgctggctgagaatgcagggcttaacccaatctccattgtcactgagctcaggaatcgccatgctagaggtgagaagaacacgggcatcaatgttaggaaagggcagatcacaaacatcctggaggagaacgttgtgcagcccttactggtgagcacaagcgccattacgctagcttgtgagtgcgtcagaatgatcttgaagattgatgatattgtcaccgtaagataagggcatgaagttgattatcacgtcagcctgccctgttgtctggattgacagtgtactacttaatttagaactttattcgtgggcttggtgtttgtcaaccttgatgttttgtacccgtggctttgatgtcagtagaggagaggagtttgtcatattgttacagtaatgtttgctcttctttgatggaactatcagaggtgccttggtgcaccccatcattatgaaaggtgtgttctgagcgatatgcatgcctgtggttgcatgttccctgcaggttgcac

SEQ ID NO: 43373 - DNA, 605 bp, Setaria italica
  Peptide Sequence Number=SeqID_109347
ccggctcctcgcaaagagcatcttcggtccatggggctactggtatgtgtcctccttccagcaggtggcatcagtgggcaacaacattgcaatccagatcgcagccggcagcagcctcaaggctgtgtacaagcactactacgccgccgacgaccgcgcaatgaccctgcagcagttcatccttctcttcggcgcattcgagctgctcctctcccagctccctgacatccattctttacggtgggtcaatgctatctgcactgccagcaccgttggatttgcagcgacaaccattggtgtcacagttcatgatgggtatcggatcgacagaaaggaagtcagttacagccttcaaggaaccactgctaccaagatcttcagagctttcaacgcgttgggcacgatagcattctcctttggtgatgccatgctgccagaaattcagagcactgtgcgtgaaccggtgagggcaaacatgtacagaggtgtctcggctgcgtacacgatcatcgtcgtgtcctactggaccctggcattcagtggctactgggcattcggtctcaagtccagtcctacatcctgtccctccctgactgctccaagat

SEQ ID NO: 43374 - DNA, 820 bp, Setaria italica
  Peptide Sequence Number=SeqID_109348
ttctcctgaaggctcttcaccgtctcgtagaggcactgcagcaccggcacgaactccatccccagatccttgagccgctggttggtgaacttgtaaccgatcaccggggggttcacttcgtccttgcacttggtgggtatggggtactccgggaagagcttggcgaggatgcggcaaagctcgccgcggtggagggtgctctcggcgcagatgtagcggccgtgcgcgccgggcgcctcgtacacccggacatgcgcctcggcgacgtccatgacgtgcacgtacgcctgcgccgcgttcacgtacgtcttggctgaccccgtcaggtacttcatcacgtggtccgtgctcgcgttcaccgttggctgcaacaacggacccagcaccagcaccgggttcaccacaatcaggtccaggccgcgcatccgcgccacctcccacgcgccctgctcggcaaccgtcttcgcgtagcagtaccagttcttggtcttcttgcagtattcgaggtcgctccagcaggtgtcgtcgacgagcttgttggggtcgcggtacgggttcatatacaccgtgccgatggaggacgtgaacacgacgcgcttgacgccggtgtccgccgccgccgtgatcacgtaccgcgtgcccaggatcgccggctcgatcatcttctcagggtcatctgtgaccggcgaggcggcgtggaagacaccctcgcagccggagaaggccgcgagaaggctgtcgggatccagtaagtcggcgcggaggagaacgaggcggtccgtggcaccttcaagcgccctcaggtggtcgttctttggat

SEQ ID NO: 43375 - DNA, 559 bp, Setaria italica
  Peptide Sequence Number=SeqID_109349
tcctttcgttagttaaagtttgttctttacctacgaggtgctacagacttctttgaaactatgggattcaaatgccccagcaggaagaatgtagcagatttccttcaagaggtaacctcaaagatggaccaaaagcaatactgggctggtgatcaaaataagtatcactaccattcaattgaaaaatttgcaaaagctttccgaatgtcatatctccctcgactagaagaagaaaaactgtgcagttcaaacagtactggaaagaacaaggaagtaaaaatgagtgcaagtcgccagatctccagatggaatattttcaaggcatgcttttcaagagaagtattgctcctaaaacggaactctccggtacatatattcaagaccatacagataactgttatggctttggtgatctccacacttttcctgagaacaaaaatgagccacaaatccgtacttgatgctaatgagtacatgggagcgctttttatggctgttgtgatagtaaacttcaatggcatgactgaaattgcaatgacaataagcgacttcccacttc

SEQ ID NO: 43376 - DNA, 441 bp, Setaria italica
  Peptide Sequence Number=SeqID_109350
gataaccgggcaaccgcgccctattgctcaactagtagtagcactactcagggccgaagcggcggctggtgagtggtgacggtgcaagtgcagtacaaaaacgcaaggggcagcaactgtcgccgtaccaaatggggcagcagcagcagaccacgccgcggccgccttctcccgggcacgccttggaatgcacgcccactgcacgcaccttattttgccggagcacgtgttcaccgccgccgctgatgagacggcggcggcgaaggccaggatggtgaggaggcaggcagccacggccggcttggcggaggccgatgccggcgccatcgctgcttcggtcggagacggacggacggacggtgcggtcgatcaggtggctgcttttgtgaaacgcgcgcgagctgccgcgtcgtagacttacttactaaataggaagttaga

SEQ ID NO: 43377 - DNA, 342 bp, Setaria italica
  Peptide Sequence Number=SeqID_109351
ccgctggcccgcgtcgccgacgccgtcgccgcgctgtcctgcgaggccgcgcgcggggacgccgcgtcattcgacgtgccggcgtccggtgacgggctctccgccaaggacgaggcggacgtcgccgccgacatcaagatgctcgtcttcggctccaagctcgtcggcagcgccggaggtgcccccgcccccgccgccgccacgttcgccaaggtgcccaccgtgaacgggatcttccgcgaggcggtgcgcgcgctgcacgcgagggtgcggatcgagctcaacgcccggtgaagttggggaagagggatggcggggacgaaactgggtgcaagggaaagg

SEQ ID NO: 43378 - DNA, 520 bp, Setaria italica
  Peptide Sequence Number=SeqID_109352
ggttagcatagaccagagcattcattcgtaccatcggagcactgtgaagaggattagacaaaaatgaaatattaattgtctagaaaggctacaggtagaattatagtccactttagaatatgatttgatatgactaaaacaaccataaaaaaggtaatgaaaagaacctctagcaaatcggcaacaaacaagacagataagtggatcaggggatgcactaaagctacacaacaccaggattgccaaaaggatacaaataggcacaaggctgataattcctggtaccaaataaaatatcaatcgattgtacccacaatgagtcaagctcttttgagttgttcatcagctatgtgctctttcgtagttgcaagagacacttgttcgttgcttatcaaaccctccctttccacaatacaacaccactgtacaagttggcaaaatggtatggcaatgactacgaaaattgaacccttgcattaacagaaaacagataagtacctcccattagttgtcttcccta

SEQ ID NO: 43379 - DNA, 515 bp, Setaria italica
  misc_feature (34)..(34): n is a, c, g, or t
  Peptide Sequence Number=SeqID_109353
tggtgtgccaatgtcaacaagcaagagacactcnctttgactggagcactggtgatcacaaaacccttggatatgcgcgattgcggagtgatagcatcaagcggttaaaaccgctgccttggaacagaccgaggtgcagcttgttaagctggtggtctgttaggggtaaaccgaattgagcatgcctggctccctgtatgcctgcaggagcgttgtccgggaaacagcaaatggggctgttgcttggaccaagtgggttgccgtggaaaactggattcaacagctgaccgtcaaacggaaagtcaggatgttggggcatccgcaacttctttctaggtggagaaaatggtcccaggtgaatgggcggaatgcttgatacaagctccaccagccatgggttgacacatttcaactatttttgtcttagttcttaaatttcgcagcaaatctggttcatcccatgtcacctgcaacaaatttgcaactataagaatgggcaaaaaagacagtgcaga

SEQ ID NO: 43380 - DNA, 2147 bp, Setaria italica
  Peptide Sequence Number=SeqID_109354
gacacaactcaaactttattccaagctaatccatcaaagaggttatttatcaacttcgactcgagcacaccaacaaccgatcacaacagagtagttctaacgacgaccgagtcttgacagaagaaagcccttacactgagagtttcaacaagacccaacaaacatcccgcttcacagcagacaaacacaaaccaaaatgcaacacttcttccattctaagcttagcctttccacaagcttcagattgttttgttgaaaggtagatgcaatcaagcccgctcgaccatatattcgatgagaggtttctgcagcctcccctcgccgcgctctgttatggtcagcctccgtgctactttcatgaagtcactgaatggttcttcaccagtatgcttgacagcaccagcggcgtcgcggtaatggaggtggctcattatttctgctttctcgattccgaacatgtcagctaactgaccatacagctcttcatatgatccaaagacagacaaatctatggtccgaccaacatcctctgattccataaataccttgcaatgcccagcttctaacccaagctctgaagcctcacgaccttgagatgagaaaccaatgcaaatagatgaaccggaaccgtcagatacatttcctgtcttctgtgcattgccatcagatgaaccgtttccagtaacctcaggggagaatgtttcccttgatccaccagaattcatctgctgctcggtaaggataggctttccaaacagcattatatggggtttctttctgtcatcagatttctctgtgccctgtggtgtgccaattgtcaacaagcaagagacactctctttgactggagcactggtgatcacaaaacccttggatatgcgcgattgcggagtgatagcatcaagtcggttaaaaccgctgccttggaacagaccgaggtgcagcttgttaagctggtggtctgttaggggtaaaccgaattgagcatgcctggctccctgtatgcctgcaggagcgttgtccgggaaacagcaaatggggctgttgcttggaccaagtgggttgccgtggaaaactggattcaacagctgaccgtcaaacggaaagtcaggatgttggggcatccgcaacttctttctaggtggagaaaatggtcccaggtgaatgggcggaatgcttgatacaagctccaccagccatgggttgacacatttcacattttgcagcaaatctggttcatcccatgtcacctgaagaagcctccacggcgaattcgaccatcgaattggatcagcaacctgaacagaagctatcgtccccataaaccagctgatccttgacgaatcctctgtctcaaatgccatcttgaacctcatccctgggcaccaatgattcctcatcgcgttctgcaccgatgcagccttcacaacaaactcaggtgtgctagccctcgggtagtacaccacctcaaatggttgtcccctcgacgctaggcttgcggcctcgacgacatctgcgatcttcaccttccccatgcctctcatgtaccccccaggccccttcatcatcttactctcctcatccttcaagaacgccgagaaggccccgtacccgggggcgttccagccggacatgcactccatgccaccgcaggacacccgcttggcacggcgtatcccgacgcagagctcgccgtgctcggtgcgcaggaagacgatggagtcccccgcgacgagcttcttctggttgacgaaggtgctccagcccgtggtgagcaaatgccggcgcggcgtgccccggtaaatgtgtcggaacttccagacctccccgtgcacgtccttggcgagcaccgtctgcaccggcgggtcggcccggtagtcgagcttggggaagatggtctcggcgcagtatcgcggcaccgagaagccgccgccgttgttggcgtcagactgcgtgagcgtcttggcgaaggaggacagcttctcccgcgcgtccgcggggtcgccgccgagctcgtcggggtcccggaggtccgcctcgccggagggcgcgacgggcacgaggcggatcttggcgaacacctcgtccgtctctggatcggccaggaagcgcaccccggcgacgcagcagagcacgtagttggtcgt

SEQ ID NO: 43381 - DNA, 376 bp, Setaria italica
  Peptide Sequence Number=SeqID_109355
ttttttttttttacttagttaattagttaattgtctgcgtgttgcctacttcgctatcttaaggaaaaaaggtgcacgccgatgccgagtctctagaactaataatctcaagactgatgtggagggactatggaggtgacgaagtggaggtaggagcagctcagcggtaggagggagtagccagggccagttcggtgcccaccacactgacactgatcccgccggcgtctgcattgaacagggccctcttccccctccagaaggctggcgccgcaggcccctgacgacggggacgaggtgtccacatgaagtcgagtcaggccggagaaatgcagcagcttttgaggactaaacccggcggcggcggcagtgccga

SEQ ID NO: 43382 - DNA, 422 bp, Setaria italica
  misc_feature (416)..(422): n is a, c, g, or t
  Peptide Sequence Number=SeqID_109356
tagtacgggtgcgggccacgcggcggggttcctggcgttcagggccggcctgtgcggccacgggcgggcgcaggtggagggcgggtgcaacaaggaagagcacgcgccggcggcctgctgttagatttgctgcgacgtcggcgccgataatgatcgatgggtctgttagtttgcttctcgtttcgtgccacgtgcgattgactgaacccttgttgccgtttgggtgaaccgcgtgccggtggttgggagttgtagcacctgaatctggaaggttaagggcctgtttggcagagctccaactctgaaaaaaccagctccagatccatagatccacctagctccaccatagagctgctccaccgtgaatctgaaatctcaaaaagcgtttggtacagctaccaaaaaaaaaaaaaccnnnnnnn

SEQ ID NO: 43383 - DNA, 306 bp, Setaria italica
  Peptide Sequence Number=SeqID_109357
tttagtactttgcttctgacatcataatagcatctgataccagcagagctggtcgtgatggtggagggggtggtggtggcaaaagacttgtctcaacctgctgtcaagcattcaggccttccatctcatccggagagacaatctacatttcagtcacatggaactagtactctgcccacaaatcatcagaaatcctcaactagcgcagcaattgaatcgctgctaacttctgctccaccatcaccaccaccaccaccaccaccaccaccaccactcgcccatactcatcatcaacgtccagttctt

SEQ ID NO: 43384 - DNA, 883 bp, Setaria italica
  Peptide Sequence Number=SeqID_109358
aaagacaagaagtacgttaagaagacttaggtccaatctctccaaccaacaaacattctgacaatcttcaacaggaaccaagcaacgactaactacctacagtctatgtgaccaggaaggaaaatgttggtggtcagagattgacactgttggagccgtccaccaattctgaagtcaaaactggaatttctgttgtccaagaaaatctaggctctctagttcacaaggttgacagtaatactgaacagtcaactgcatcggaaaaggctgtttcgtcgaccgtgaaatctatcgaaccggttcttaaggatgaaaatgctaagcttgatgagcaacatgcttcagaccaacgctcttcgcctactacaactatgtcacgtcgatttccaatttctagttcgtgctctgctctttctggcaactccagtcctagattactttcaggttgcccaagatttcatagcgcaccttcagcccttggaattacggctctgttggaagaccatgctagatgctctgatgattgtcgttccaccgtaacctcgaccacagtatcaaatgtctcaaccggcgtagtcaaaattacatcaaaactaccatcaggacaacatccagcaacaggtactcccgttataacaaagggtatgccaccaccaccccctccaccatcacgaccagctctgctggtatcagatgctattatgatgtcagaagcaaaagacttgtctcaacctgctgtcaagcattcaggccttccatctcatccggagagacaatctacatttcagtcacatggaactagtactctgcccacaaatcatcagaaatcctcaactagcgcagcaattgaatcgctgctaacttctgctccaccatcaccacc

SEQ ID NO: 43385 - DNA, 515 bp, Setaria italica
  Peptide Sequence Number=SeqID_109359
aaattaacattcaatgtatcagaatttggaaatttatctgttgattatccacaccactgcatctttgacaattgatgttaagaatgtccaatggtctactttcctaaattttattaaggcaaagtattaaaaataagggaggcatctgatgcctgctcaactgacaacaataaatacccttgcgaaggtacatggattccttttacacagtaaagaaaagctaactataaccaccattcaatgttctaaagcagtatacctttggatccatagatctatcttaagaactacaaagcatataatataagtgtaccgatgtatttatcttcaagactgcataccttttgcagttgaaatgcaagtataagcactaattatcattacctccaagtttgcgctctaattggacaatccaacttaaaactatcctatgactggaggagtgactaccaaagcttcacataatcccatcagatttaccaaagcaaaaaccatattagaaaaaacttatatta

SEQ ID NO: 43386 - DNA, 399 bp, Setaria italica
  Peptide Sequence Number=SeqID_109360
gcattgtattcactgctttgcaggcatgcgtgtaatagtgacatacctaagcacatcacctctctacgtttataaagtacattctctggaaagctccgccaataccaagatgaagagacagtattcggtgtactctccctcatattttggacattcactcttattcctttgctgaagtatgtcactattgtcttgagtgctgatgataatggcgaaggtggaccatttgcaaagcagtgaatacaatgcaaatatgcaaaacttagcttgcttccaaatcaacaagcagccgatgaggaactatcttcatactacagaaatgggtttgctcctcgcaatggatctgcacttggctaagaaggttctagagaagcacaaaaaagtgaagaactgtgctgc

SEQ ID NO: 43387 - DNA, 434 bp, Setaria italica
  Peptide Sequence Number=SeqID_109361
ttaaagttttacttttacaaagttcttcctcggatggtggttcttcctttggtgggggaacccatggtagctgccaatacctcgttttctcttcagcttcttccttgttgttcttaaatatctgcaactccgacatataatcgaaagctacataacaatgttccttcttcagctcttcagccttctcccatgtaaaatttgccctattcaatgtaaaatggtactattacatggtagggaaaaatgaataccatgaagtagttctgaaatatagtatcacctacgtgtgatagggatattttagagagagaagctgcctcagaaaatcagtaatgtgaaatccaccaacattagttctggagcatggccccaatacaggctggcctttcaaaaatggaacaacatggcacgttccgtgttcacatgaaatagcc

SEQ ID NO: 43388 - DNA, 1317 bp, Setaria italica
  Peptide Sequence Number=SeqID_109362
gttttaagtaatatctgtttcttcttttcttttaactgctctggtgtcaattcctcatctggaacagacacaagtggatacttatcagccgctggggcatctgctttctcctcgttgccattggactccccttttgctttccttagggcctgtgttgtttttaaaatagcagatttgacgtcctgctgggaaagatatttagatttacttagaatagctgttgcatctgattcctcagcttcatcaagttgctccattaattcttccaaatcagaaagtgtcttttcaagttccactatcttctgatatctcttgttagcagcatattctcgcaaacgttgaccagccttttccttcaaagctgctttccttgcaagttcttcctcggatggtggttcttcctttggtgggggaacccatggtagctgccaatacctcgttttctcttcagcttcttccttgttgttcttaaatatctgcaactccgacatataatcgaaagctacataacaatgttccttcttcagctcttcagccttctcccatgtaaaatttgccgtgtgatagggatattttagagagagaagctgcctcagaaaatcagtaatgtgaaatccaccaacattagttctggagcatgcccccaatacaggctggcctttcaaaaatggaacaacatggcacgttccgtgttcacatgaaatagccaacccatcttcgttacagttcccaagtttctggttgtacttgtaactaaacgcattgtcgatgccaaatgcaatggatggcacaccatatgtctcgaaaagtagttctgccattcgggcccgagaaaaggacggattgcattcacattctgtcataagaattggatgtcccacctctgaattggcacctaatcgatcaaagccatagtcgagaatatattccatgtactcgaactgatagacgacatcgtcgtcaaatggagagcgaactgccgatcttgtgcaatcaaagaacttcattagagctggatcagtgtccccaacaattgagacagtttcacccgtgctgcggtggcgcggcctctgcacgacgttgcggaacgtggcgcgcggctccgtctcgccggcccacccgatacggaaggtggaggcgccgttgtcgatgacgatggggttggacgacgggaagcgggcgaagtccgcctcccgccgcgggcgggtcaccgacgacatctcgccgccggaggggccaggactcgccggagtcgggggaggagaggggtttggggcttttgggagccttgtcctttcgctgcgtcctcctcctcag

SEQ ID NO: 43389 - DNA, 502 bp, Setaria italica
  Peptide Sequence Number=SeqID_109363
gatgaaccgcgtgagcccgtcgctggcgcgcgcgtcggtgacaaccgtcgtgctcgggtgctcgtccagcacgatggccgacatgagtgcgatgagcctgtcgccgttgatggccgcgcccgtgtcgtcgaccacgccgctgcggtccacgtcggtgtcgaagacgacgcccaggtccgcgccgtgagccagcacggcgtcgcgggtgagcgacatggcggtggcgtcctcccgggttgggcatgtggttggggaacgtgccgtcgggctccaggtgcaggctacccgtcgtgtcggcgccgagcttctccagtacgtcccacgtgaagaagccgccgcagccgttgccggcgttcacgacaaccttgaagcccttcagcggggtgtcgtagtgcgtcgggtgcgcgacgcgctgcttgatgatgtcgcggaggtgctgcgcgtaggcgctcatgaggtctacgcgcatcaccaccggcggcatgcccccgccgccggagcc

SEQ ID NO: 43390 - DNA, 251 bp, Setaria italica
  Peptide Sequence Number=SeqID_109364
cctcggcgctgtcgttgaaccactttgcgtacttggctagtttgatgttgctcatggacagtgtggacttgagctgaggcagattcagctcaggctgcaggtaaaacttgtcaggaaattcaggctcactggatactgaaaaacagcgataccaagttcagaaatggtaggccttatagatcaagtttacccgcaagttaggacggctgggattggtcgacgatcgccgagtacctgaaagaagcaaaatg

SEQ ID NO: 43391 - DNA, 716 bp, Setaria italica
  Peptide Sequence Number=SeqID_109365
tttttgtttttatttttctttttctttttcttttgttcgtctcgtctgggatcacactactctttcttgaggagatcgtagaacaccgccggcttcttgtggccctttgcgcacgcctcctgcatcccaaccgacatcgcagttcatcaccaaccatggttagtttcagtattgatcgtcgtcagacgagagcaaccacagcttgcatcgttggatcagattttcagacttgcctgcatggcgaaggcgatgtggagcagcgtcgcctcggaccagggccggccgatgaactggagcccgatgggggagcccgcccttgtcatgcccaaccatgacggtgatggccggcagggccgaggaagttcccggcgatgggagtaccggacaagcgcggctccgtttatgtagtccagttccccggtgttgaacgcgtcgtcttgcagagtgtaggcggtcacaccggtcatcggcgagactatcacgtcggcggtcttgaatatctccttgtggaagtacatctgccggttccgaagccgttgcgagttgaggtacgctctgctgctgaaggaaccgtacacgctcagcgcgacccttgcgtcccagccgatttcagacctcttcagcttgtcgaggtacttggcgagcgacgtggcgcactacgtcaccatcggctccgagtgcaccacgtcgctcgccaagtacctcgacaagctgag

SEQ ID NO: 43392 - DNA, 1388 bp, Setaria italica
  misc_feature (63)..(63): n is a, c, g, or t
  Peptide Sequence Number=SeqID_109366
gttttttttttttttttttagttatccgaacatccgatgtgacagggcaaagtttagcctccncctccaaacagccccaatttcgcatacaccgcctacagtgacattcataagaataagatggaactgcttgattcaccgctacactgaacttgagccattgtgctctcagaaagaaagaactgctttctttctctggactgaagaccctgtactctagacaagatcaaatttgctattccaatccttcacttggacgcatggttctgccactcatgaccaactcaaggcatgtcacctgatatcaaaacgggcagagctgatgcgtgatctcttctgcgctcgtctgggatcacactactctttcttgaggagatcgtagaacaccgccggcttcttgtggccctttgcgcacgcctcctgcatggcgaaggcgatgtggagcagcgtcgcctcggaccagggccggccgatgaactggagcccgatggggagcccgcccttgtcatgcccaaccatgacggtgatggccggcaggccgaggaagttcccggcgatggagtaccggacaagcgcggctccgtttatgtagtccagttccccggtgttgaacgcgtcgtcttgcagagtgtaggcggtcacaccggtcatcggcgagactatcacgtcggcggtcttgaatatctccttgtggaagtacatctgccggttccgaagccgttgcgagttgaggtacgctctgctgctgaaggaaccgtacacgctcagcgcgacccttgcgtcccagccgatttcagacctcttcagcttgtcgaggtacttggcgagcgacgtggtgcactcggagccgatggtgacgtagtgcgccagccgcatctcctcgatctcaggaatggtcacatccacggtctgccagccgtagtgcgcttgcagcgtcttgagagccttgtcgcagcagctccttatgtcctcggcgctgtcgttgaaccactttgcgtacttggctagtttgatgttgctcatggacagtgtggacttgagctgaggcagattcagctcaggccgcaagtaggacggctgggattggtcgacgatcgccgagtacgcgatgagggcgtcctccaccgtccccgccaagatccccggcatccccacagtccagttcagcggaagcaccccggcgttggagaggcggccggcggtgggcttgaagccaacgatgccgcacagcgccgccggcatccggacggaaccgcctccgtcgacgccgagggcgacggggcagaggccggcggagacgacggcggccgagccgctggaggagccgccggcgatcttgttggagttgtacgggttcctcgcggacccgtgctgcgggttgatgccgc

SEQ ID NO: 43393 - DNA, 486 bp, Setaria italica
  Peptide Sequence Number=SeqID_109367
aaagtagaagtgagtacctgtttccattctactagaaacttagggatatccaaagtatcagcaacttggaaactgataacaaaattgaaatttcagagactatcttacggcaggggaagcttggagggcagaagaacaccacgtgtgtaagtacacaaagggctaattgtagctttgtctccaatggctgcatcctaattattgaacttgttctgggcagcctgttcttcaactataattcagtatgcaagccttaggtgttggaagtagttttcttcctgtgcattatccaaggcatgtggtaactccagctgatttgagacgtgtcccgtgtggatttgaaattgggacttttctaggatcggtttgcctggaatagtggaatctgtgatccaccacggtagatgagcagtctggccttttgatggagcttggccagttaatgtcagccttctgagagttacctgtcttcattctcctctaaag

SEQ ID NO: 43394 - DNA, 303 bp, Setaria italica
  Peptide Sequence Number=SeqID_109368
atgccaaatttattcctgcaggaacagcagcggcttctcgaggggagcatccatgtacagaggagtgacaaggtgcgtgtgccgtgctgtgctctctgctctgctcgcccatatttgcaccccacctgctgccttttccaacacccaaaaacttccgaagcactgaggactgagctgagctgcacctcactcgtctgcgtgaacagagctgagggcctgagcctgagctgagctccctcggagtcctcgatttctgatctcaccaacacggacacgcacccacgcatcggcctgatggatggt

SEQ ID NO: 43395 - DNA, 910 bp, Setaria italica
  Peptide Sequence Number=SeqID_109369
tttgtttttttttttttagtagtttgtgttccaacttccaaaagtgagtgtagtggagttcgacaatccaggtgcagattattaacagtaccagtacaaacatacatcatcatatacctctacacatacaaatatacactagtgccggagcagatgctctctacccagaactgttaatggtgtctaactagctgaaaaaagaattcagcctgaaggaggtgctctaattgttgagtcttatgtgaagttaatggtttctagcttccatgcagagggcataattgttcgattgtgcttctgaatcctcaccattttagggaggatgccagatcctggagagattccacttgccgtatagtctgcatcttctcctgctgcttcaacatgtttgcaacagattccggatcatatccagtttgtagcttattcttttcttgctcagcttgaacctctttaagtagctcatcgacttccctgacaaaatctacccttagaagaagatcatcatcctgaggtggcagctcaattcgtccttcatgcttctccatgttgaaactagcaggaaagaccacagtgaatggatcctctcttggaaaaacttcaagcatgcgctttctacatttctttaaccacttatcatcatcacctccatcatgaagattaagaagctcattgagtaatctcatggcaggagttgcttcactctttagaatctctgcctctacccttctatataagagatcaaggcttctgatggcatcccgctcatcatcacgccgagcaacatcaagtcgattccaaatgaccataagaacaagttcagtaaggtctcctctttcagcagccttctcaatttcctcctcaacatcttcaccagctcttatgaaacttgaaactaaaatcctagctt

SEQ ID NO: 43396 - DNA, 324 bp, Setaria italica
  Peptide Sequence Number=SeqID_109370
cggcgcggtggtggcgaagtagtcgtcgtcgtcgtcgtcctcgacgtcggcccaggacttggcagtgaggggcgcgggcgcccagaagagctccggcctgggcggctcctcctcctccccccctggccgcggcgggcttggcccccttgcccgccgccgccggcttcttcttcttcttcttgagcgtctcgagcgccgcgaagacgttgccgctgccgatcctcggctcctccgccgcgccgccgcgcctgctccctccgcccgccatcgtcgtcgcgcaccgcagcagccgaacaaaaggaaaaaaaaaggaaatcccggaat

SEQ ID NO: 43397 - DNA, 1195 bp, Setaria italica
  Peptide Sequence Number=SeqID_109371
gccgcttcaccctcttcctgcaccgcggcgcggtcatcctcggctcccaggatccagaagagtggcctctcattgctcctttgccatcttatgggcgtggaagggaacgcttagggccacggcacatcagcctcattcatggagagggcttaaatgatgttgttgttactggcaacaatgggaccatagatggccaaggagggatgtggtgggagctgtggtggaatcgaactttgaaccacacaaggggccatctcgtcgagcttgtgaactcaagcaacatcctaatctccaatatcacactacgcaactccccattctggacagtgcatccagtctactgcagcaacgtggtgatgaaagatttgaccatactggctccactgaatgctccaaacactgatggcattgatccagattcgagctcagaagtttgtattgaggactgctatattgaaagcggagatgatctggttgctatcaaaagtggctgggatcagtacgggatctctgttggcaaaccgagtacaaacattgtcatacagagggtttcaggcacaactccaacatgctcaggtgttggctttggaagcgagatgtcaggaggcatatctaatgtgcttgtccgcgatctgcatgtgtggagttctgctcaagccgtgaggctcaagaccgacatagggcgtggtgggtacataaccaacatcaccatagtgaatgtgacgatggagaaggtcaaggtcccgataagattcagtcggggtgcggatgaccattcagatgacaactatgaccgaaccgcgctgccaaggatcagtaacgtgctcatcagcgacattgtgggtgtagacctgcagcgtgcaccgatgctggaggcagtggccggcgcagtttatgaagggatctgcttccgaaatgttagcttaagaggcataaggcggcaggatagatggcattgcgagtccgtgtatggagaggcgcatggagtttttcctgcaccctgtgaagagttcaggagcaatggatcttcatcatggtgtggattttcatgagcaattgtgagtttcctagtgactgatacaggcaggaatacttgaaaaatggagggtgttcatactggtgttccaagaagggacaggacatagggttttgggatagtatagtcaaattcaacattttaactttagtcttctaa

SEQ ID NO: 43398 - DNA, 355 bp, Setaria italica
  Peptide Sequence Number=SeqID_109372
tccatttgcctgtggagggtttatagttgataagattatcctatctccttctcttcctcttcaggtaatggagagtgaggagattttacctgatatggtcctgtttgcaccgtcagccagcaacctttctgggaagcatgcttattatgtaccaacatagaagcttgaatataaggtatgcagtcccaatttcctgatctcagattgaaatgttcaagctgtaaattcaaagaaccatgtaatggccacctatcttcctcatgtatcacgtacattggccacaccttattgcagtagattatcttttttgtcatagggttatcactgtaggcttaccagtcagccaatatgaact

SEQ ID NO: 43399 - DNA, 515 bp, Setaria italica
  Peptide Sequence Number=SeqID_109373
tttaacgaaaaagatggccacggtcgaaccaccgtagatcaggtacatgacattgtccaggataagtttcagccactgcttgttctcatcgagattctggacagacaccgagttggcgccgctgatgaggaggatgaggaatgtagcccacaccaggtacagttcgtttttgacgacgccctgcatcagccccagcgtgtatgaaagcagaggcaatgaaagcaggtacgctccgctgactgcgtacaggacgatcgggttgcgggagcggcggcgccagggaccaacgagcaaaaggataagcagaaccacagcagccacgatcacacaaaattccacaattcttactgttttgtttggatgaagaaatatattgatccataacaatgtacatttcttgcacagctgcttgtattgatctgcgtttgaaacgcaccagaccactccttcgccagtggtgttcatcgatcgagccaccgtctcttgctcagccattaatcgtcaccagcacgcct

SEQ ID NO: 43400 - DNA, 443 bp, Setaria italica
  Peptide Sequence Number=SeqID_109374
gtatttgtactctaccttgtatgttttaaatcttgatgttttctttggttgcaggtaaaaccacatttgtaaagaggcatctcaccggagagtttgagaagaaatacgaacgtaattgtcatgtgaacttgggtttcctttcatctacttattgttaattatacttactgcagctaatgcatttcgttaattcagcaaccattggtgtcgaagttcatcctttggatttcaccactaactgcggtaagatccgtttctactgctgggacacggctgggcaagagaagtttggtggcctcagggatggatactagtaagtcttatctgccatagtcttttaagtaaatgtgatttagtccctgctaaatttcataatgaaattataaatgatgccctactttcagtgacatgaataatcaagctatcataccctgtaaatttaa

SEQ ID NO: 43401 - DNA, 506 bp, Setaria italica
  Peptide Sequence Number=SeqID_109375
taagggttttgctgttctcccgtgctctgaagcccgcatcgccgcatcaggtgcggttcctcgcgctcgactgaaaatggcgctgccgaatcaggggactgtggattaccccagcttcaagctcgtcatcgtcggcgatggcggaacgggtgagttcttatccgtttcgtgatgcgattatttgttagaaatagtagaatctgatgtgttacgttcttaaatacagtcagtttctacgagatctgatggattacgccttctgctgttgtgtggaatctgtcgatgttattgtgctccgtgattttgtcatattagattatattttaccgtgatactgaatttaatcacgcccatgttatagaattgtccacctcattttttccccacaaactggacgatggtactcagtttatgattgtaggggtcttgttttttatttatataaaaggagtactgttttcggcatactttgatactcatatatgtattgtgatctgttaaattga

SEQ ID NO: 43402 - DNA, 1889 bp, Setaria italica
  Peptide Sequence Number=SeqID_109376
ttgggacaaagaagaaagttttggtggcctcagggatggatactatatccatggccagtgtgcgattataatgtttgatgtaacctcaaggttgacttacaagaatgttcctacataggcatagggacctgtgcagggtgtgtgaaaacatcccattgtcctgtgcggtaacaaggttgatgtgaagaacaggcaggtcaaggccaagcaggtcaccttccacaggaaagaaagaaacctagacaagtaactaatagagatttctgccaagagcaactataactttgagaagcctttcctttaccttgcaaggaagttggctggcgatcccaacctccactttgttgaagccgttgctcttaagcctccggaagttaccatcgatatggctatgcagcaacagcatgaagctgagcttgctgcagcggccgcacaacctcttcctgatgacgatgacgatctgattgagtagaaagtggatcatgagtctcagacctgagcagacggagttgtgcccttgcataagagttgttttagaacgaactctctagagttagcgttgtctaaatctggattcttttctgtctcgagacgtgttgcaacttttcaatgtgttgacatcgctggacttgttgcaatgtataaaggagccagcaaattcatggcaacaagtccagcgatgtcaacacattgaaaagttgcaacacgtctcgagacagaaaagatccagatttagacaacgctaactctagagagttcgttctaaaacaactcttatgcaagggcacaactccgtctgctcaggtctgagactcatgatccactttctactcaatcagatcgtcatcgtcatcaggaagaggttgtgcggccgctgcagcaagctcagcttcatgctgttgctgcatagccatatcgatggtaacttccggaggcttaagagcaacggcttcaacaaagtggaggttgggatcgctgataggaccaaagccatcgacaataattaatatatgtaggtatttgctgtaagctcaagatgcgaaaaattaaagtaattagttagttacccagccaacttccttgcaaggtaaaggaaaggcttctcaaagttatagttgctcttggcagaaatctcatagtactgcaggttcttcttcctgtggaaggtgacctgcttggccttgacctgcctgttcttcacatcaaccttgttaccgcacaggacaatggggatgttttcacacaccctgcacaggtcaaggccaagcaggtcaccttccacaggaagaagaacctgcagtactatgagatttctgccaagagcaactataactttgagaagcctttcctttaccttgcaaggaagttggctggcgaatcccaaacctccactttgttgaagccgttgctcttaagcctccggaagttaccatcgatatggctatgcagcaacagcatgaagctgagcttgctgcagcggccgcacaacctcttcctgatgacgatgacgatctgattgagtagaaagtggatcatgagtctcagacctgagcagacggagttgtgcccttgcataagagttgttttagaacgaactctctagagttagcgttgtctaaatctggatcttttctgtctcgagacgtgttgcaacttttcaatgtgttgacatcgctggacttgttgccatgaatttgctggctcctttatacattgctttgttaccctggttgttgatggtaaactttgctgtagcagttgctttgtactgtcttgattatctatctgctgtatcatataattctgcttgtagcgtatttgcaacgcgttctcgctgtgttttcttacatgagaggtgttttcactgtgggggctgatggtatgggagg

SEQ ID NO: 43403 - DNA, 606 bp, Setaria italica
  Peptide Sequence Number=SeqID_109377
ctcgccgccgtagtacccaccgccggtgttgtacgacgacggagggggagtcgtccgacggcgcctgctgcggcgcggcgccggcgccgtcctcggcgacggcggcggggggaaggctgcggatgtactgctccaggatggaccactgttgtccgggcggcgcctccgcgttcttcttcttcttcagccggcgcttcgccttgaggctccgcttggtggcgttccagtggttcttcacggcgttctccgatcgcccgggcagctgcctggcgatcatcgaccagcgattgccgtggatcttgtgagccttgatcagctcgatgtcgtcattctcagtccagattgtcttcgccttgtcgatgtcggggcgcaggtggttggtccagcgctcgcggcactgcttgccgatccggccgggaaggtgctgcgacaccgccgcccacttcctctcgccatacaccttcaccatctccttgagcgtctcgtcttcttcctcggtccaggggcccctgagcgtcggcggcctcatgacggcgccgcccgctcggcctgctgctgctgcccaccgttccaagcggcgtgaacgacgttggcggtacggtgcca

SEQ ID NO: 43404 - DNA, 504 bp, Setaria italica
  misc_feature (451)..(451): n is a, c, g, or t
  misc_feature (469)..(469): n is a, c, g, or t
  Peptide Sequence Number=SeqID_109378
catagaatccccttcaaacaatccaccatggacctagatcactggttgggcacttttaggtcttggccgaatgaaaccccaggttggagggaatggtatcaacggatagctgagccgaagagggtctcatgggacgagctcaaaatcggccagtgcagcaacctgtctctgtcccagatggagcgaaatgaaccgttggtgatagcggcctcttatttttggtctgatgccctcaatgctttcttgtttgggcatggacctatgactcccacactggccgatgtggttctgttgaccggtcttgacatttcctcccagacacacctttccgcctcttagccgcaacgtcacatcggctggacacaagaggaatcggcggggggaaaggatttatcagatgcaacaaaagagccgggtctgttgagaatagggagcacacggcctttttaangatgtggttagaaaaacncttcttctgtggaagagcagccggccatcaaccaa

SEQ ID NO: 43405 - DNA, 361 bp, Setaria italica
  misc_feature (1)..(1): n is a, c, g, or t
  Peptide Sequence Number=SeqID_109379
ngtcattctgttgtgttgaatggcactcagatttatttttgtgaaaacatttgttattttgaagctttttgacataggggttgtgccattttcatgggtttgatgattttgttgtgcaattgtggatgagaagacaaggtgttgataacctatcttaattctgatacatttgatgtctcaaaattgagctttttaaaactgatgcccagcctcttatgagttcatccgttatcattgtccctgaatttcttattggatctcaagtttttatcgcaggggtccttgttgaaacctgtgttgatcatgcaatttatcttcagttctgtgttcatttttcgttatgaatattaattatctgaat

SEQ ID NO: 43406 - DNA, 528 bp, Setaria italica
  Peptide Sequence Number=SeqID_109380
tttttttttgtaaatcgtgcaagcataccatttcgcacagaacttgcaaatatgtgtacaaaatatctaattgagctttaaagccgcatcattctgttggatctcttcctcaaatctgttgagtcttggctgaaacaaccgcaatatgtacaaacagctctacaactaaatctcactttctgggaactagccactgtatattacataactatgcttgcacttgtcataccttctgttcatgtcctatgaagtatggatacacaaggagtattgctcacaagtccgtgacatcaaaagctgggcaaaaggaatctagccgaagcacagaatgttgtcattgaccagtccaacatatcctgcttcagtagctcatacagtcactcttggctctggaatggatcgcttgaacttacctcattctttgcaaacgttgctgttgttattgtcgccattgtaacaggttgactagatggcaagacaaagttgctccaaaaaagtgggtcagcagaaggatcagctgggctccag

SEQ ID NO: 43407 - DNA, 410 bp, Setaria italica
  Peptide Sequence Number=SeqID_109381
tctgtgttcgagggatcaggctggtgcggacggatatgctggatgggcacaacagagagtcatcgaccttgataagctgctaccagtttcggattgtaacatctcagtctcaccttatgtgtatgctgcacgcccaccttacgtggttgccgtcgcggacagtgtcggtgtcattttcatagggaaggatgatgggctattcactgttcatctaaactccggccgggccgagaggatagtagtagagtccaattccaacttcaaggttgttccctacgtgagctcttgcactccagcactggatatggcctctacaggtgatgagggaccaaaagtggatgattcaagcgcctcacaaacttaagcactgggcgcctctacaggtgagagaccaataacggattcttttt

SEQ ID NO: 43408 - DNA, 497 bp, Setaria italica
  Peptide Sequence Number=SeqID_109382
aaggttgaacttaactatatttggcaaatcttgcggatgcaaaatattcttttgtttgtagcacgaactttgcctaacgtgtggacatattgatctcaattacgtacacgcgtcatagtatgctgctgccccctcgctcgatctacttgttgaacgcggtgcagtctctcctgatctccccatgcctgccggtcttcaccccaactctgcccagcttgaccatggcgtccttgaacgcctcgaagaagcgcgtctggttcttggcgaagtccccgaccgccggccgcgacgcgccgtcgctgtacagcgcctggtcggaggtgaacaggcccatcccgccggcgaggttgccgtagtaggcgttgtcgaaggcggtcggggtgaccgggtccatgtcgacggcgatggtcgcgccgacgtccggcgggcacgcctccatgagctgccgcgcgtacgcggggtcgtacgacgggtccaccgacgcgccgccaccgccg

SEQ ID NO: 43409 - DNA, 651 bp, Setaria italica
  Peptide Sequence Number=SeqID_109383
ccactggccgcacaacaggaccagaaccatctgcttctttctgaaagtctggagacccactatctggcttccttggttcggaaaacctgcggtcctcaaacctttgaactggagttgtttttccagatctatcatcgacaacctcaaagtagcgaggacttttcctatagtcattttggtcatagccaggactacgatctccataggaatatctggagtttctgtcatcactccgtccactataactcctacggtcagagtaacttccatttggtggacttcttgaaccaccccaattcccatcagatctcctattttcactatactcgtccttgtcatcctttcccctcggtggcctatcggcacttctttctcctgtgaatctccgttccacatacgcatgcttaatgaaatttctcaatttatcagcattactgctgtcagggtatccattgcgttgaggatcccattccttaaaaaatacttctctagcacgctcatttcctccttcttgaagagcagtaacttcttgtgcggtaaatttggccatggaaactgatttcactcgatgcgtgaactcccgatgtgctccactgcaattaggtaacaagaataagaaaaaacgtaaaaaccaaaaaaaagaaaaaaaaa

SEQ ID NO: 43410 - DNA, 236 bp, Setaria italica
  Peptide Sequence Number=SeqID_109384
tttgtgcggtaaatttggccatggaaactgatttcactcgatgcgtgaactcccgatgtgctccactgcaattggtacagatgaacgtccagaaatttgtgcagacatattgtggtcccaaattgttgcagttgatgcagcgcttgttggcgggcagcttgagcaggccccgtatgatccgctcgtgccacctcctgctcttccttgtgatctccgaattcccatctcagattcca

SEQ ID NO: 43411 - DNA, 415 bp, Setaria italica
  Peptide Sequence Number=SeqID_109385
ctgtggaggaacaccaaagctagaggtgccaagtaaggtttggggagtagtgcctgctgatgctcctagtggcccagatagaggcataggagcttgaattggaactggatcattcccaagatcaaaagggtttgaagctttcactggttggggttggggttggggttggggttggggttggggttgaggttggggatatgcatgttgcggatatacaggttgttgatatgtaggttgaggaaatgctgcctgaggatatgcttgcattccctgaaacactccggcaggatattgcatgctgtatcccattccaaattgggggagctctctgccaaccgggcatcaacagtgatgtccaaccaaggatcttcagttcaacaatctcctcttgctgcccctacagctggactcccat

SEQ ID NO: 43412 - DNA, 2312 bp, Setaria italica
  Peptide Sequence Number=SeqID_109386
tttttttttttagtttatataaatcacaaaattgattgatcacaattatacacctgatcgagtatacagtccgatattgtcatccacagtatattgaatagccaactgcactagaaacgacatgctgagctaataatagatccgatactgtccaagataacaaacgaatacgaaatatacaaactatgccatacaagcagaatgtggcgggcacaaaatatacaaggaatggggatgcatgcagcttacgccctccaaaacagagttacatttgatcattgacccaatgtaaacaagtacaacggattacgcccaacaaaatacacaaccggttgtatgaaacacattctcttgagggtttcgatgcatgttcgtcctgctatgtgctgcaaacccttggtctggagatgaaagagcaggtatttccacatttgatagttcttttatccaaacggattgctacccccaacggagccgtaaggtggggtgcttggctgggggtatctgggtggagcttgctgatcaaaacccatgttgaaggaacccagaccttgttgcgctgcatgcatgctattcggtggttgctggggcatgctgtttggaacttgttgcatcatgaaatggcttggaggtgcagctgactgatagagctggtgagtttgctgtggaggaacaccaaagctagaggtgccaagtaaggtttggggagtagtgcctgctgatgctcctagtggcccagatagaggcataggagcttgaattggaactggatcattcccaagatcaaaagggtttgaagctttcactggttggggttggggttggggttggggttggggttggggttgaggttggggatatgcatgttgcggatatacaggttgttgatatgtaggttgaggaaatgctgcctgaggatatgcttgcattccctgaaacactccggcaggatattgcatgctgtatcccattccaaattggggagctctctgccaaccgggcatcattggagttgatgttggatatagtgcagtaaagatatccgctggaagttctttcctgccactggatttactgtcattagaagatgctgctccttgaataccactggttccttgtggatttgcagttacttgagatgggagtccagctgtaggggcagcaagaggagattgttgaactgaagatccttggttggacatcactgttgaggcctggttgcctgagattccaaagggcgcatcaaacaagttatgcgactggtctacaatggatgggtgtcctccatcattcactttcaaagtgggatcatttgaagctggaaaagctgacacattggttgcagaaggtgcttcagagaatgacagttgcgcaagtgcagactcaagtggatttgcactgctggttgtttgtggcgtttgttgttggccaaaagcatcaaaagatgcccagtcaccaccactcacagaaggagcactattccctttatcaagaacaggctgtggtgcaggtgcattaacaggatgctgttgagtcgtagaggctggctgtggtggtggtgcaggtgcagtaggttcaggatctgcactaaaatcaattaaactcactgcatttgcgaccttcactggttctgaagtcccctcagaagaagcaatgctgctggcactagacatcgtctttgctagtggtggaggatcaattgctctggttccatttggctttggaggatcaattggtctggctacaattggctttggaggatcaattggtctggctacaattggctttggaggttcagtagctggctttgaaggctcaccaacccgaagttgaggagcattgtcacccagtatatccctcactggccgcacaacaggaccagaaccatctgcttctttctgaaagtctggagacccactatctggcttccttggttcggaaaacctgcggtcctcaaacctttgaactggagttgtttttccagatctatcatcgacaacctcaaagtagcgaggacttttcctatagtcattttggtcatagccaggactacgatctccataggaatatctggagtttctgtcatcactccgtccactataactcctacggtcagagtaacttccatttggtggacttcttgagccaccccaattactattctagtattcttcctaaaaacctagacggtacctacaaaacctttagaaactaggaagttagccgcttaactattttggccaacaacaaacgccacaaacaaccagcagtgcaaatccacttgagtctgcacttgcgcaacttgttctatt

SEQ ID NO: 43413 - DNA, 245 bp, Setaria italica
  Peptide Sequence Number=SeqID_109387
tacatcgacaagccgtgatctagccatttttctttccataccatgaactacagttgtggactgtaatgaatattttatggtctcctagcataattatatgtctgtctcttagcagtaaagtaatagtaccaacatcatcgcgcatatgctgtatcaccaaagcctacattttcaaactgggccttctattgattattcttcgtttgtaaaagcggaattacattctcaagctattcgtgcgtaca

SEQ ID NO: 43414 - DNA, 476 bp, Setaria italica
  Peptide Sequence Number=SeqID_109388
tcgccgtcaccagccgcttcgagccctgcggcctcatccagctgcaggggatgcgatacggcacgccctgcgtgtgcgcgtccaccggcgggctcgtcgacaccgtcatcgaaggcaagaccggattccacatgggccgcctcagcgtcgactgtaaggtcgtggagccggccgacgtgcagaaggtggcgagcaccctgaagcgcgccatcaaggtcgtcggcacgccggcgtacgaggagatggtcaggaactgcatgatccaggacctctcctggaagggccctgccaagaactgggagaacgttctgctgagcctgggcgtcgccggcagccagccgggatcgaaggcgaggagatcgcgccgctcgccaagatgatccagtgaacacctacatagtatatagttgcttgtggtagtgtattgtagtggccagcggcatatatgacctaataagtatgaactatatatatac

SEQ ID NO: 43415 - DNA, 309 bp, Setaria italica
  Peptide Sequence Number=SeqID_109389
ttactaataattattactttacttagggtactaacttgggtaagtaagtaagtttcgtagtcgtctattgtcttgtattgtagcgcggaggagaagtaccccgacaaggtgcgcgccgtggtgaagttcaacgcggcgctggcgcaccacatcatggccggcgccgacctgctcgccgtcaccagccgcttcgagccctgcggcctcatccagctgcaggggatgcgatacggcacgccctgcgtgtgcgcgtccaccggcgggctcgtcgacaccgtcatcgaaggcaagaccggattccacatgggg

SEQ ID NO: 43416 - DNA, 482 bp, Setaria italica
  Peptide Sequence Number=SeqID_109390
aagaccgaacagttctggccaagtttcgggaatacgacaaaaatagtacgacaatactgtttttacctcctatggcctctggtgaccttctagtgggtgaactagcaactacaactaaagatataggtgctgcaatacagccttcgcccactgttgctattaatcgtctaggatctgcctttccggaactactgaatactggtgatgcactggagagatatcagcatgtttggcagaaggtaatagtagtttttatattagtaggtaactgtattgaatccaattggtatcatggagggacgtcatgatccatgtcagcttgttaggtactaaagtgaacccagaaatggagtaagttcttttaatgtttgtccgtgtgttctgctgactacttaggaaccttgcatgcagatcttagtgtcatttcttctctctggtatatgcaaataatcttcaaccacaagtcatgatattagtacacc

SEQ ID NO: 43417 - DNA, 423 bp, Setaria italica
  Peptide Sequence Number=SeqID_109391
tactcaaaatgaacctgaagtttgacattgaggtcttgtttaagaatcttagtgtggacatgaaagatgtaaaaccatcttctcttcttaaagatcggattcggcaagttgtgggaaatccggatttttcaaataaagatgttagtacatctcaaacatcggcagctgcagaggtctcttccggtatcgttccttcaatgaaccatgtggaactacaaccagatattaatagcacttcacgtgctacaagccttccaaatatgcttaaccaggttacctctcacagcctgacccaggttgcaccacctcaaactccatcaccatccccattttctctgagtcagctcatggcagcaattccacgtgccgatatatatttcagaatcaatgaaaagctttaacttcttctttggtccctacgtt

SEQ ID NO: 43418 - DNA, 435 bp, Setaria italica
  Peptide Sequence Number=SeqID_109392
ttcgtcctaccaagttacgtacgttgttcaacggccattgcggccaaggcgctcaacgaaggaggcgctgcaggccgcggccgggctcccggtggaccggaagatcccgctggtggcgttcgtcggcaggctggaggagcagaagggccccgacgtcatggctgccgccatcccgcagctcatggaggaggatgtccagatcgtccttctgggtacttctcctccgcgctcatcagcatgcgctcgaacttcttcttcccagtgcccagaaggacgatctggacatcctcctccatgagctgcgggatgtcggcaggctggaggagcagaagggccccgacgtcatggctgccgacgaacgccaccagcgggatcttccggtccaccgggagcccggccacggcctgcagcgcctccttgttgagcgccttggcc

SEQ ID NO: 43419 - DNA, 541 bp, Setaria italica
  Peptide Sequence Number=SeqID_109393
ctccttttgtacaaaggaaccttaagagttctgcttgtgctattgcatgatttccctgaatttctttgtgactatcacttcagtttctgtgatgtgattcccccaagctgcattcaaatgcgcaatgttattcatattgcgtggaaaagcactaagaataacattgcgcatttgaatgcagcttgggggaatcacatgcgcaatgttattcttagtgcttttccacgcaatatgagacttccagatccctccactcctaacttaaagattgatctgttagcggagatttcaatagctcctcgaatcatgactgatgtggatgctgccttgaaggcaaagcaaatgaaggctcaggttgatgaatacctaaacgaagaccagaaggctccctctttttaactgatctaaagcagaagttgttgctaccacaaaacgaggcaaatgttgtagcgaccttctgtatccatagtcattacaaggtttctgaacatctcagtagctgtttcaatctggaatatatccatctgaggactttggttaa

SEQ ID NO: 43420 - DNA, 519 bp, Setaria italica
  Peptide Sequence Number=SeqID_109394
tggtcatgaaaagggcaagcattgaaccgaattttcatgacctgtatttgaagttctttgataaagtaaactccaaatccttgaataaggaaatactgaaagctacatatgagaactgcaaggtcttgttaagatcagaccttatcaaatctagttctgaggagcgttccttgctaaaaaaacttaggcagctggttgggaaagttcaccattggtaggaaccaggcactaagggctaaggagattgacccaaaatctcttattgtggaggcttacgagaaaggattgatgattgcagtcataccattcacttcaaagattcttgaaccttgccagtcaagtatcgcatatcgtcctccaaatccctggaccatgggaattttaagtctacttgcagagatttataatctaccaaacctcaaaatgaatctgaaatttgatattgaggttctctttaagaaccttactgtggacataaaagatgttaaaccaacttccctgcttaaagatcgagtgcgc

SEQ ID NO: 43421 - DNA, 497 bp, Setaria italica
  Peptide Sequence Number=SeqID_109395
actaggaatagaaaggaccgggaatacaatacgaagccgacagggtcctgaccgtgagcccctactacgccgaggagctcatctccggcatcgccaggggctgcgagctcgacaacatcatgcgcctcaccggcatcaccggtatcgtcaacggcatggacgtcagcgagtgggaccccagcaaggacaagtacatcgccaccaagtacgacgtgtcaacggccattgcggccaaggcgctcaacaaggaggcgctgcaggccgcggccggggctccccggtggaccggaagatcccgctggtggcgttcgtcggtaggctggaggagcagaagggccccgacgtcatggctgccgccatcccgcagctcatggaggaggatgtccagatcgtccttctgggcactgggaagaagaagttcgagcgcatgctgatgagcgcggaggagaagtaccccgacaaggtgcgcgccgtggtgaagttcaacgcggcgctgg

SEQ ID NO: 43422 - DNA, 408 bp, Setaria italica
  Peptide Sequence Number=SeqID_109396
ggcgcaccacatcatggccggcgccgacctgctcgagccctgcggcctcatccagctgcaggggatgcgatacggcacgccctgcgtgtgcgcgtccaccggcgggctcgtcgacaccgtcatcgaaggcaagaccggattccacatgggccgcctcagcgtcgactgtaaggtcgtggagccggccgacgtgcagaaggtggcgagcaccctgaagcgcgccatcaaggtcgtcggcacgccggcgtacgaggagatggtcaggaactgcatgatccaggacctctcctggaagggccctgccaagaactgggagaacgttctgctgagcctgggcgtcgccggcagccagccgggatcgaaggcgaggagatcgcgccgctcgccaaggagaacgtggccgctccc

SEQ ID NO: 43423 - DNA, 856 bp, Setaria italica
  Peptide Sequence Number=SeqID_109397
tcctgaattgccagttgtgggtgacgtgcctgggacgagcagcagcagagcagctgacatgcctgtgccatctgatgacaatgacttgaaacagaaaaatccacttggcaatgccaggatcaccgtgaacctagaggagccgatggagaaactggctccacttgaggagaccaaggactcggatgcatcacatccggtttcggcgcaaacagtcgacgaagacggggtggatgaaatcacctcagattaaagagaccagaaggctccctctttttaactgatctaaagcagaagttgttgctaccacaaaacgaggcaaatgttgcagggactcgttacaatgttcctctagttaattcacttgtcctttacgttggcatgcaggctgtgcaacagttgcagcaaaacaaggccaatgcttcagcatcagcccaaattaaccaaagtcctcagatggatatattccagattgaaacagctactgagatgttcagaaaccttgtaatgactatggatacagaaggtcgctaccttattctcaatgcaattgctaaccagcttcgctatccaaatgccatacccactacttttcttcatcattctgtacttgtttgctgaggcaacccaggaaattgtccaggagcagataactagggttcttttggaaaggttaattgtcaaccgtcctcatccttggggattactcattactttcattgagctgataaagaacccacgctacagcttctggaccagatcctttacacactgtgcgcccgagatagagaagctgttagagccaatgtgtcagaattctagtctatagtatcgacaaatgtacaaacaagacgcattt

SEQ ID NO: 43424 - DNA, 1407 bp, Setaria italica
  Peptide Sequence Number=SeqID_109398
aacgtacgtacttacgtcggacgccgaagaatggcgccttggagcaagaccggcggactcggcgacgtcctcggcggcctcccgccggccatggccgcgaatgggcaccgggtcatggtcatctccccccgctacgaccagtacaaggacgcctgggacaccagcgtcgtctccgagatcaaggtgggagacaggtacgagagggtgaggttcttccactgctacaagcgcggagtcgaccgcgtgttcatcgaccacccgtccttcctggagagggtttggggaaagactggtgagaagatctacgggccagacgctggagtggattacaaggacaaccagctgcgtttcagccttctttgccaggcagcacttgaagctcctaggattctgagcctcaacaacaacccttacttctcaggaccgtacggggaggacgtcgtgttcgtctgcaacgctggcacaccggcctctgtcgagctacctcaagagcaactaccagtccaacggcatctacagaaacgccaagaccgctttctgcatccacaacatctcctaccagggccggttcgcattctcggactacccggagctaaacctccctgagagattcagatcatccttcgatttcatcgacggctacgagaagcctgtggagggcaggaagatcaactggatgaaggccgggatcatcgaagccgacagggtcctgaccgtgacgcccctactacgccgaggagctcatctccggcatccgccaggggctgcgagctcgacaacatcatgcgcctcaccggcatcaccggtatcgtcaacggcatggacgtcagcgagtgggacccagcaaggacaagtacatcgccaccaagtacgacgtgtcaacggccattgcggccaaggcgctcaacaaggaggcgctgcaggccgcggccgggctccccggtggaccggaagatcccgctggtggcgttcgtcggcaggctggaggagcagaagggccccgacgtcatggctgccgccatcccgcagctcatggaggaggatgtccagatcgtccttctgggcactgggaagaagaagttcgagcgcatgctgatgagcgcggaggagaagtaccccgacaaggtgcgcgccgtggtgaagttcaacgcggcgctggcgcaccacatcatggccggcgccgacctgctcgccgtcaccagccgcttcgagccctgcggcctcatccagctgcaggggatgcgatacggcacggtactttcactactactgctgcgcgcaaatccccctactgaactctttcttgccttgccaatggcatcctgaaaacgatggaccgtgcctcgactgatcgatctcttgcaattgctcttgcagccctgcgtgtgcgcgtccaccggcggctcg

SEQ ID NO: 43425 - DNA, 753 bp, Setaria italica
  Peptide Sequence Number=SeqID_109399
ctggtgagaagatctacgggccagacgctggagtggattacaaggacaaccagctgcgtttcagccttctttgccaggcagcacttgaagctcctaggattctgagcctcaacaacaacccttaacttactacaaggaaccgtaacggggaaggaacgtacgtagttacgtactagcaacgactggcacaccggccctctgtcgagctacctcaagagcaactaccagtccaacggcatctacagaaacgccaagaccgctttctgcatccacaacatctcctaccagggccggttcgcattctcggactacccggagctaaacctccctgagagattcagatcatccttcgatttcatcgacggctacgagaagcctgtggagggcaggaagatcaactggatgaaggccgggatcatcgaagccgacagggtcctgaccgtgagcccctactacgccgaggagctcatctccggcatcgccaggggctgcgagctcgacaacatcatgcgcctcaccggcatcaccggtatcgtcaacggcatggacgtcagcgagtgggaccccagcaaggacaagtacatcgccaccaagtacgacgtgtcaacggccattgcggccaaggcgctcaacaaggaggcgctgcaggccgcggccgggctccccgggtggacccggaagatccccggctggtggcgttcgtcggcaggctggaggagcagaagggccccgagtcatggctgccgccatccc

SEQ ID NO: 43426 - DNA, 760 bp, Setaria italica
  Peptide Sequence Number=SeqID_109400
ttttttttttctttatcgacaattaaaaatggtacaactccatacaagtgtacaaatcgaaggtacagtgaaagaatttataacaaacttattgattgtgcaatagcccagcagacatgtcgccgttggaagaaatgaagtatcggaatcgcgagataggacccaagcctagttccttggatgatggggtttagctcatttcatcagctcccatcttacggagggcaagtgaagtcggccgggcagatcttgccgcacttgttgaggatgaggttgaggctgacgggcacgttgaggtggatgccgaggacgtcagccttgatcgcagtgcagaggcagacggcggcgtcgaggtcgacgagcccctgcagcagggggcagcactggtcgtactggggcaggccgaccttgacgaggcccagcacgttggcgcacacccttagcttcagcgcgtcgatcgggcagcgcccgccttggccgtgggacggcgtcgggacgactggaccggggcagtagggtgcgcagccgtgcgcggcggcggcgaagaggaggctcagggccaggaagagggcgagcttggcagccattggtgatcagtgcagtcgtctgatcgtgagtaagatagtggtgaccttggccttcctggttctttatgttcatgtggtttacttttcttatatgttgttgtatgttttaacgtcatgtttcgattgtttgaattaataaacaaagtcatccattgcgcaagtcatgattcttt

SEQ ID NO: 43427 - DNA, 603 bp, Setaria italica
  Peptide Sequence Number=SeqID_109401
ttttaaggaaacaaaaaacaaaataaagaaaaactaaattaaatttaccaaaagaacgacaaaagactcatctatgcaaccaaaccgaactaaaacaacaagacaaaaattaacaaaccgaaaccgttacaatattacttcacaaccagaaactaaactcaggtcccatattagcaacttcgttacatgaaggtagcaagcaggtaggaaaagcaaaaggcaactcatgtcccaacttagcatgaatcctggcgtccggaggcacaccatttcacattttattctctgcatagacaagcagcgaataaaatgtgaaatggtgtgcctccggacgccaggattcatgctaagttgggacatgagttgccttttgcttttcctacctgcttgctaccttcatgtaacgaagttgctaatatgggacctgagtttagtttctggttgtgaagaatatgaacggttcggttgtaattttgctgtgtttagtcggtttggttgcatagatgagctttgcgtctttggaaataatagtttcatgttttgtcccgcttctgtgttccttgctgcagtctactgcaattctacaaaaaaaaaacaaaaaaa

SEQ ID NO: 43428 - DNA, 1856 bp, Setaria italica
  Peptide Sequence Number=SeqID_109402
tggtcgtctagtcgtcggtcgtcctaggtttccccttcccttcgttcgttcttgtcgtcctaccggtcgtccggtctattgtaacgttcgtcttcgtcggcgccgagatggcgccttggagcaagaccggcggactcggcgacgtcctcggcggcctcccgccggccatggccgcgaatgggcaccgggtcatggtcatctccccccgctacgaccagtacaaggacgcctgggacaccagcgtcgtctccgagatcaaggtgggagacaggtacgagagggtgaggttcttccactgctacaagcgcggagtcgaccgcgtgttcatcgaccacccgtcttcctggagagggtttggggaaagactggtgagaagatctacgggccagacgctggagtggattacaaggacaaccagctgcgtttcagccttctttgccaggcagcacttgaagctcctaggattctgagcctcaacaacaacccttacttctcaggaccgtacgggaggacgtcgtgttcgtctgcaacgactggcacaccggccctctgtcgagctacctcaagagcaactaccagtccaacggcatctacagaaacgccaagaccgctttctagacaataccaacaaacaatactcctaaccaagggccggttcgcattctcggactacccggagctaaacctccctgagagattcagatcatccttcgatttcatcgacggctacgagaagcctgtggagggcaggaagatcaactggatgaaggccgggatcatcgaagccgacagggtcctgaccgtgagcccctactacgccgaggagctcatctccggcatcgccaggggctgcgagctcgacaacatcatgcgcctcaccggcatcaccggtatcgtcaacggcatggacgtcagcgagtgggaccccagcaaggacaagtacatcgccaccaagtacgacgtgtcaacggccattgcggccaaggcgctcaacaaggaggcgctgcaggccgcggccgggctccccgggtggacccggaagatcccgctgggtggcgttcgtcggcaggctggaggagcagaagggccccgacgtcatggctgccgccatcccgcagctcatggaggaggatgtccagatcgtccttctgggcactgggaagaagaagttcgagcgcatgctgatgagcgcggaggagaagtaccccgacaaggtgcgcgccgtggtgaagttcaacgcggcgctggcgcaccacatcatggccggcgccgacctgctcgccgtcaccagccgcttcgagccctgcggcctcatccagctgcaggggatgcgatacggcacgccctgcgtgtgcgcgtccaccggcgggctcgtcgacaccgtcatcgaaggcaagaccggattccacatgggccgcctcagcgtcgacgtcgtggagccggccgacgtgcagaaggtggcgagcaccctgaagcgcgccatcaaggtcgtcggcacgccggcgtacgaggagatggtcaggaactgcatgatccaggacctctcctggaagggccctgccaagaactgggagaacgttctgctgagcctgggcgtcgccggcagccagccggggatcgaaggcgaggagatcgcgccgctcgccaaggagaacgtggccgctccctgaaggcggccaagatgatccagtgaacacctacatagtatatagttgcttgtggtagtgtattgtagtggccagcggcatatatgacctaataagtatgaactatatatatacactatatattgcgagtaaataaaaggatatattagtataatctctgctgctgttctgtgtagacaaaaaaaaaaa

SEQ ID NO: 43429 - DNA, 2238 bp, Setaria italica
  Peptide Sequence Number=SeqID_109403
ctcagtgtgagtagtctgcatccacattttctcctttggcatctaatgaccctcctgttggtggaacaacagtcacaaccaatgaaataagtgctatggtgccacctacatctgctgcagaccacctgggatctattttacctgaacctttgaatacaggggatgctttggagaaataccaacaggttgcacaaaagttggaagccttgatcaccaataatggcaaagatgtggaaattgagtctgttattgcggcagttccagatatcttactcaggtgtgttagccgggatgaggctgcattagctgttgcgcagaaggttttcagaagtttgtatgataacgcttcaaatagtgcgtatgtcacatggcttctagcgaccttagttgcgataagagatgtctgcaagcttgttgtcaaagagttaacaagctgggtaatctattccgatgaagagaagaagtttaacattgaaatcatatttggccttattcgttctgagttgctgaatcttggggagtacaatgttcatttggcaaagctgattgatggtggaagaaataaaattgcaacggaattcgcaatgtcacttgtccaaacattgattactcaagattctgttagcatctcagagctttacaatgttgttgatgcgctatcgaagcttgcaaggagaccaggttcacctgaatcgttgcaacaattgattgagactgcaaggaataatgtgaacactactgctggttttgttgttgggaaggatgaaaaggtcagactgtcgaaagataaaaaggttctaacaacccgagcaaacaaagaggaaagcactgctaatgaaactacaatggttgatccaaaccaggttgcaatcctgttttctgagtggtgtcagatgtgtgatcatctaagtgctagtgatgtggcatacagtcgttttgtcacacagttgcagcaggatggcctgctgaatggagatgatatttctgaacgcttcttccgtattctcacggaacttgctgttacacactctctagtctcagagcagatcgttgccccgggtggatcatcccagcaatcaccacagttaccccaaatttcatacttctccattgattcatatgcaaagcttgtcgtcatgatgctcaagtactctccactggaaatatcatcgaataaaggcaatatactttccaagattctatctgttacagtgaggaccattcagaaagaagctgaagaaaagaaagcttcatttaatcctcggccatactttcggttgtttataaattggctttatgaccttactacttcagatgcccaccatgaatttcaggttttgtctgcatttgcaaacgcattccacctgctacaacccttgagagttcctgcctggagctttgcttggcttgagttggtgagtcacaggagcttcatgccaaaactgctgacgtgcaatttgcagaaaggttggccgttattccagcgtctacttgttgatcttttcaaattcatggagccgtatctaagaaatgctgaaattccagatccagtgaacattttatacaaaggaactatgagagttctgcttgtactgctgcatgactttcctgaatttctttgtgattatcacttcagtttctgtgatgtgattcctgcaagttgcattcaaatgcgcaatgtcattcttagtgcttttccacgcaacatgagacttccagatccttctactccaaatctaaagattgatttgctggctgaaatttccatagctccacgaatcatgtcagatgttgatagtgccctcaaatcaaagcagttgaagactgaggtggatgagtatctcaagagatcggaaggctcttccttcctaagtgacctgaataaaaaattgctgatgcctcagaatgaagcagctgttgctgggatgcactacaatgtgcctcttatcaattcacttgttctttatgttggcatccaagctgtgcaacaactgcaactcaacaaggccattgcatctgcatcagtacagcagattaaccatacgcctctgatggacattttccagattgaaacagctactgagatgttcaaaaatcttgtaacaagcttggatacagagggccgctaccttcttttgaatgcaatcgctaaccaactgcgctacccaaataaccatacacactacttctccttcattattctgtatctatttgccgaggctacccaggaaattgtcc

SEQ ID NO: 43430 - DNA, 803 bp, Setaria italica
  Peptide Sequence Number=SeqID_109404
ttttttttttttttttttttttttatttttctactttaaaaaatgaacttttcttatttgacaattaaaaatgataatacaatttcacataagtaaatcaaatcacaagatacaatgaaagaattggtaacaaactttcgatcgtgcaacaacggggtcgttgctgcaagcaattcaccatgtggaaacgcgaggaagagtacaagcgcacattcggagcgtgctttagcaagattagctcctgcctcctgggtcaacttactgagggcaggtgaagtcggccgggcaaatcttgccgcacttgttgaggatgaggttgaggctgacgggcacgttgaggtgaatgccgaggacatcggccttaatcgcggtgcagaggcagacggcggcgtcgaggtcgacgagcccctgcagcagggggcagcactggtcgtattggggcaggccgaccttgacgaggcccagaacgttagcgcacaccctcagcttcagcgcgtcgatcgggcagcgcccgccgtggccgtgggacggcgtcgggacgactggggccggggcagtagggtgcgcatccgtgcgcggcggcggcgaagaggaggctcagggccaggaagagggcgagctttgcagccattggtgatgtgtggagtgtgtgatcgtgccgcgagcaaggagtagagagacactgtgctactactgcttgctcgtgtgcttctgggatgaaaatgccatcatgaagctgcttgatagatcaaaccttccatcaacagtggctgaaagcactgatggggacttggacagtgata

SEQ ID NO: 43431 - DNA, 4194 bp, Setaria italica
  Peptide Sequence Number=SeqID_109405
ctcatcagtctttgctgaacatagtaatgcagcttcggaaagtctgcaaccatccatatcttattcccggaactgaacctgaatctggtacacccgagtttctgcatgaaatgcgcataaaggcctcagcaaagctaaccttattgcactctatgcttaaaatattacacaaggatggtcatcgtgtccttattttttctcagatgacaaaacttcttgacatccttgaagattatctgactttagagtttggtcctaaaacattcgaaagagttgatggttcggtatctgtggcagagcgccaagcagcgattgctcgttttaatcaggataagacacgttttgttttcttgctttctacacgttcatgtggacttggcattaatttggccactgcagatactgttgtcatatatgattcagatttcaacccacatgctgacatacaggcaatgaatagggcacacagaattggacaatcgaacagacttctggtttacaggcttgtagttcgtgctagtgttgaagagcgtattttgcaacttgccaagaagaaattgatgcttgatcaacttttcgtgaacaaatcagaatcacagaaagaagtggaagatatcattcgttggggaacagaggaactcttcaggaatagtgagaatgcagacggtaaagatagcaatgaggcttcaggtgctgtagctgatgttgaatttaagcataaaagaagaactggtggcctaggtgatgtttatgaggacaaatgtattgatggttctgccaagcttgtttgggatgaaaatgccatcatgaagctgcttgatagatcaaaccttccatcaacagtggctgaaagcactgatggggacttggacagtgatatgcttggtactgtgaagtcaatagattggaatgatgagctgaatgatgaacctggaaccaacgaggatattcccaatatcgataatgatgggtgcgagcaggcatctgaatcaaagcaaggtgccggtactcgtgcagaagaaaatgaatgggataaacttttacgtgtcagatgggagcaatatcaaattgaggaggaagcatctcttggtcgaggcaaacgtttaaggaaggctgtttcttacagggaaacatttgcagcacttcctaatgaagccttaagtgaggactctgacgagggagatgaaccaaagagagaatatactgctgctggactggccttgaaggaaaaatatggaagacttcgagctagacaaaaggaaaggattgctcagcggcacataatcaagaactatgctgatgataaatttgaagagtttatgacaccatatgactccattgctaatgaccatgccgaaaatcctttagtaatagtagaagacccaaattcttcacagctatctggagctaaacgtttcagtgaatcaactgcagaaatgaggcaatcctcaaagaaatcaaagagatatgctgaagtccctcaatatctttatgccagaattcctggtaacgctgcttcatctaaacaccactcaaagggtacagatgtcttcaacccagggaccccaaatcacttgctacctgtactcggtctttgtgctccaaatgctgatcaggtgaactcatacaaaaactcacttagtgggccaagcataaaggagcataaaaaggctagtggtgacgtagccaacaaacagctttcaactgctgctgaccattctagtgagcatagaaatgaacctcagtcagcttctgacaaggccatctttcctggtgcatctgaggaggctttgagaaggctaaataacatcattccagatagttattttcccttcagtcatattcctcctatatcagggaagggggttgatcctgttgaaaattctggaccttccattgcttcatttcaagggaagctgggtcttccgaactttggtctggatgacaacattccacttaagcatatgaaatctatacctgatatgcttccgaacctgtcactgggtgctcagaaagattatattcgtaattctgtcccagagttgccagatagttcattgttaccaaacttcatggcagatattgctggtacttcgaagcaaaagtcatttatgtctggcctggttccagggctgggtctaagcccagtgcaaccaatccattcagcaatgcctgataatcacaagaaggtcttggacaatataatgatgcgtgctcaatatgcctcaaacaaattcttgaagaagagatcaaagctagattattggtcagaagatgaacttgatgctctgtggattggagttcgtaggcatggaaggggaaattgggatgccatgcttagagatccaaagtttaagtttttgaaccaccgaactagtgaagaactggcgtcaagatggattttggaggagcagaaaattatagaggaaccaatgtctacagccactagacgtcccagctctacaccatttcctggaatatcggacgcaatgatgtcccgggcactgaatgaaagtaacttctccaaactgagaatggagcaacctaagctacagtcccacttaactgatattcagctaggttccagtgacatcatgtccagacttcctcatgttgaagctgctaattacatgaactcgggtgagggtggcccatctcagataccatggcaggatttcaagcatagatcaggttatggtggagattttcctggcagtacatttgacaagttagagaaacctgatattgggttgatcccaccatttatgccaaatccttttatcagtgatagcattggttcactgcccataaacagaaaaactaatagtgccgttctgccgaatgaaatccggccaagttcttgtgagaacattcttcttcatggtgtttcagacgggcagatcaacttacttcatgagatgcagcgtcgtgtgaggttaggcaaacaacccatggagatgaatctcaaccacacagaccactcaaatcctcagcttgataatactggcggtcttggaggtttgaaatcaaacaagttacctcattggcttgaggaggctgtacgtgctccttcatcgaagacacctgaacgtgagctacctgcaactgtttcagcaattgctcaatctgcttgccttcttcttggagaacaagaaccggcaatacctccattcctcataccgggaacacctctttctcgcccaaaggaccctaggattaatttaaagaagaggaaactccgcaaggttcagcaatcgacctcccatgtagagcattccaaaactggatctggccaaggcgatcatgacgcaattaccacgcccccatccattgaagcttcacctgcccctccttctgttgatggtaatgatggtgccccgtcactcaacttgaactctctgtcatcatcttccgcttgcagtcaggggaaagatgaggcacctcccacatttgaagaatcacacccaaccgtggaaggttcagaagctattgaggcaacctgtacatcgaagtcagaggctcctgacaagtctagcgaatctcatggatcatcaataaaagatgctcctgagaccgaagccagattgcctgaatcagataattcagctccagtggctcctgaattgccagttgtgggtgacgtgcctgggacgagcagcagcagagcagctgacatgcctgtgccatctgatgacaatgacttgaaacagaaaaatccacttggcaatgccaggatcaccgtgaacctagaggagccgatggagaaactggctccacttgaggagaccaaggactcggatgcatcacatccggtttcggcgcaaacagtcgacgaagacggggtggatgaaatcacctcagatgagcattagacccgtgccattagcccgacattcatttctgtctcttccgttcaacagaacactgggattttcccttctcccaatgtttccagtgtgggtgatctcttgttgtgtaatgctgtagtgcagaatgcagatagagcaaaaatccaaggactagtccttagcagtagtagttgggcgctagtccggccggagcaactctcggaaacctgtatacaagaaatgtatatttttgctaacatggtgttgggggtgtgcgcgtgtgtagactgtagaccgctattcatttatttatgcgtatatggtttaagtaaaaaaaaaaaaaaaa

SEQ ID NO: 43432 - DNA, 692 bp, Setaria italica
  Peptide Sequence Number=SeqID_109406
tactgactgatcatgaacaattctttcctctttctctaaaaagatgaacatttcttattggcaatttaaaacggtatacgaaccaaacatacagcaaaagaattacaacaaacttgttcgatcacatgcaacatctcgccattgcaaagcaatgaagtaaaagttggaatcgcgtgagtacgagagtatgttccgtggatgggtacttctgctacatcagctctccatcttactgagggcaggtgaagtcggccgggcaaatcttgccgcacttgttgaggatgaggttgaggctgacgggcacgttgaggtggatgccgaggacatcggccttaatcgcggtgcagaggcaggacggcggcgtcgaggtcgacgagcccctgcagcagggggcagcactggtcgtattggggtaggccgaccttgacgaggcccagaacgttagcgcacaccctcagcttcagcgcgtcgatcgggcagcgcccgccgtggccgtgagacggcgtcggcacgaccggcggcgtagggacgactggaccggggcagtagggtgtgcagccatgggcggcaacagcgaagaggaggccgagggcaaggaagagggcaggcttgggggccattggtgattgattgctctacggtttgagcaggaggtggtgttctagtactgtgcactgcgtagttactaagaa

SEQ ID NO: 43433 - DNA, 6096 bp, Setaria italica
  Peptide Sequence Number=SeqID_109407
tgtttccttctatgttgaagaacaccatgcacagccgtcttatgaactacatgtggcatattaacccttaccttactcttcgaggatttgttgatgctcattctgatataaattgtcttctgagaactgttgagatatgtgaagacataaagatcttgtctactgtccttgattccaccccatttgcttttagcattagacttgctacagctgcctttaggaaggaccatagcaatctggagaaatggcttactgaaaagttgagtacacaaagagcgacttttctcgaggaatgtgttaagttcttgaaagaaatagtaagcacaaattatggtgctgtggaaggttccattcaccatcctcaagctactatttcaaatatctgccaggactcttgccctgtgtttataaaggttcttcgttctcactctgggcagctgttgtctaaccaactagtggatgaacttaagagagttgaggcagtgtatgaatcaaggaatggtggtgatgtaggaagggacatgccccctcctgatggaggttctgaagacattgaagctcaggcaaatatttattttcaacagatgtttgctggacagataagcattgatgctatgatacagatgctgtcacgcttcaaagaatctaaagacaagagggagcaatcaattttcaactgcatgatctcaaatttgtttgaagaatacaagttcttcccaaagtatccagatgcacaacttaaattagctgccgtgctttttggctctgtcataaagcatcaacttgtggcccacctggcactcggaattgctctacgaggtgttctcgacgccctgcgtaaatctattgattcaaagatgtttatgtttggtacaacagcattggagcaatttatggatcgagtaattgagtggccacaatattgcaaccatatactgcaaatttcacatcttcgcggaactcatgctgagttagtttctgctattgaacaagcacttgcgaagatatcattgagtcaaaatgagccaaatttgggggccatgcttcctgtggatcagcggggttctggttcacagtctattgagaacatagagtcttctgaagcatcgtggcagttcataaattcaacaccaacacaactagataggacaatttcttcctttgctctacaacagaggaaccagggttttctaggggagaggtccaaaggttcgactaatactagtcaagcaaaaaccatgatgcctattggtcagccacctcttgcttcaacttctagtgatctgggtgttaatccaaaggctactgtgtcactgtcctctcaagcttctcatcattctagcactgcatcaggtctttcacaaccttctggttttctacgatctagaagttcagctccatcaggcatccttcgacaaccttcctacactacaggatttggagctgctttaaatattgagactcttgttgctgcagctgaacgaagagatacaccaatcgaggccccaccatctgaagttcaagacaaaattttcttcatgatcaataatatttccacttctaatatggaggctaaggcaaaagagtttaatgaggttttacaagaacagtattatccttggtttgcgcaatacatggtcatgaaaagggcaagcatcgaaccaaattttcatgacttgtatttgaagttcttcgacaaggttaactcaaaatccttgaataaggaaataatgaaagctacatatgagaactgcaaggtgttgttacaatcagatctgatcaaatctagttctgaagagcgttcattgctaaaaaatcttggtagctggcttggaaaattcaccataggtaggaatcaaacattgcgagctaaggaaattgacccaaaaattttaatagtggaggcttatgaaaggggtttgatgattgcggtcattccatttacttcaaagattcttgagccttgccattcaagtatagcatatcgtcctccaaatccttggacaatgggtattcttagtctacttgttgagatatataacctaccaaatctcaaaatgaacctgaagtttgacattgaggtcttgtttaagaatcttagtgtggacatgaaagatgtaaaaccatcttctcttcttaaagatcggattcggcaagttgtgggaaatccggatttttcaaataaagatgttagtacatctcaaacatcggcagctgcagaggtctcttccggtatcgttccttcaatgaaccatgtggaactacaaccagatattaatagcacttcacgtgctacaagccttccaaatatgcttaaccagtatgcagcacctattcgtctacctccaaacagcatggttgaagatgataaggttgctttaatcatgcctgaacaggttacctctcacagcctgacccaggttgcaccacctcaaactccatcaccatccccattttctctgagtcagctcatggcagcaattccacgtgccgatatatatttcagaatcaatgaaaagcttaactctcttggcccacagttgcagtatagcaaaatcatggatgtggctttggataaggctattaaggagattataggtcctgtcattcaaagaagtgttacgatagctagccgaaccaccaaggaacttattctaaaggattatgcaatggaatctgatgatggtaccatatctcgctctgcacatttgatggttggtacattagccggaagtttagcccacgttacttccaaggagccccttcgcgttgctttgttatctcatcttcgaagtcttgttcagaacctgattagtaacagtgaaaccactgagcaaattattcaaattcttgttaatgataatctggatcttggatgtgctctaacggagactgtggcaacacgcaaggccgttgagatgattgatggagacatcaagcaacctttttcacagctcaggagacaaaaggaactacagggctctgcgtattatgatgtttccccttacactcaaggtctttcacgtgtacccgatgtgcttcgtcctaagccttctggtaatttgtctgctgtccaacggcgagtatatgaggactttatcactgtttggcatagccagagtagtcaaaatgctgctgcaacaactcctgcaacaaccgtagctgttgccccaaccgattccagtattgcttcagctcatggcccaattttagcaccatcagcctccagtagtttctcaactctccaatttgccccattcacatctgcaaatcagtcaacagaactaatacctgataagaccgatcctggtgctacacaactttctggtgtttctgctcaagttggcacagccgacagttctggccaagtttcgggaatcgcaaatgtcgcatctgtttttcctcctatggcctctggtgaccttctagtgggtgaactagcaactacaactaaagatataggtgctgcaatacagccttcgcccactgttgctattaatcgtctaggatctgcctttccggaactactgaatactggtgatgcactggagagatatcagcatgtttggcagaagctggaagccttgattgcgaataatgggaaagatggggaaattcagtccattatcgcggaagttcctgatatcttgttcagatgtgtcagtcgggacgaagctgctttagcagttgcacagaaggttttcagaagtttgtatgaaaatgcgtcaaagaacacttttgtcacatggcttctagcaacccttgttgcagtgcgtgatgtttgcaaacttgttgtgaaagagttaacgagctgggtaatatattcagatgaggagaagaagtttaacatggacataattgttggacttattcgttctgatctgcttaatcttggggagtacaatgttcatttggcaaagcttatagatggtggaagaaataagactgcaacagaatttgctatatcactcatccagacactggttacccaagattccagtagcgtctccgagctttttaatgttgttgatgtcttatcgaagcttgcaacgaggcctgggtcacctgattcattgcagcacttgattgaaattgcaaggagtaccttcaacaacactgctaattatgctgctgcaaaggatgaaaaggttattcagtcaagagataaaaaggtactatctgttcgtcctttgatgaataacgaagaagataatgctgatggcattgcttttgctaatgctgctgattttcaggacaaggttgcggtcttgttttccgagtggtgtcaaatatgtgatcatcccgctatgggtgattcagtatataataattacattgtgcagttgcaacagaatggcttgctgaagggagatgatgtgactgaccgttttttcattagtctgacggaacttgctatcgcacactctcttgtgtctgaccaaaccattgctcctagtggactatctcagcaatcatcccagcaacagcagatttcatatttttcaattgattcatattcaaaacttgtgacttcagttgtcaagcagtcagtggatttaggaccaaataaaggcagtcttctccacaagatacttgctgtgacagctaggataattcagaaagatgctgaagaaaagaaagtctctttcaatcctcggccgtattttcgtttgtttataaattggctaagtgagcttactacttctgaccttcaccatgacagtgctaattttcagattttgactgcatttgcaaatgcattccatattctgcaacccttgagagttcctgcttggagttttgcttggcttgagttggtgagccaccgatgcttcatgccaaagttattgatgtgtaatttgcaaaaaggctggccgtttttccagaggttgcttgttgatttgttcaaattcatggaaccatacttaagaaatgctgaactgggacaacctattctccttttgtacaaaggaaccttaagagttctgcttgtgctattgcatgatttccctgaatttctttgtgactatcacttcagtttctgtgatgtgattcccccaagctgcattcaaatgcgcaatgttattcttagtgcttttccacgcaatatgagacttccagatccctccactcctaacttaaagttgtttcttgtgatatagattgatctgttagcggagatttcaatagctcctcgaatcatgactgatgtggatgctgccttgaaggcaaagcaaatgaaggctcaggttgatgaatacctaaagagaccagaaggctccctctttttaactgatctaaagcagaagttgttgctaccacaaaacgaggcaaatgttgcagggactcgttacaatgttcctctagttaattcacttgtcctttacgttggcatgcaggctgtgcaacagttgcagcaaaacaaggccaatgcttcagcatcagcccaaattaaccaaagtcctcagatggatatattccagattgaaacagctactgagatgttcagaaaccttgtaatgactatggatacagaaggtcgctaccttattctcaatgcaattgctaaccagcttcgctatccaaatagccatacccactacttttctttcatcattctgtacttgtttgctgaggcaacccaggaaattgtccaggagcagataactagggttcttttggaaaggttaattgtcaaccgtcctcatccttggggattactcattactttcattgagctgataaagaacccacgctacagcttctggaccagatcctttacacactgtgcgcccgagatagagaagctgttcgagtcagttgcaaggtcgtgtggagggaaaggtgctgatgacggaattggtctcggagatggtggccactagggaaatgcgtcttgtttgtacatttgtcgatactatagactagaattctgacacattggctctaattttgctgttgcagtacctctatagattgctctaagttattgtacagagctagcgcacctcgcactgcgagggccagtcaaccgtgattgctatgtgaacctgccctctgaagtaaaacttgatggttttctctggaaaaaaaaaa

SEQ ID NO: 43434 - DNA, 1626 bp, Setaria italica
  Peptide Sequence Number=SeqID_109408
agatgagctcctcggcgtagtaggggctcacggtcaggaccctgtcggcttcgatgatcccggccttcatccagttgatcttcctgccctccacaggcttctcgtagccgtcgatgaaatcgaaggatgatctgaatctctcagggaggtttagctccgggtagtccgagaatgcgaaccggccctggtaggagatgttgtggatgcagaaagcggtctaggacgtgccggggggcagacggtcagtttcagaacgaaatggtgtacacgaacatcaaacgatttccaagagaagaactgaaccttggcgtttctgtagatgccgttggactggtagttgctcttgaggtagctcgacagagggccggtgtgccagtcgttgcagacgaacacgacgtcctccccgtacggtcctgagaagtaagggttgttgttgaggctcaggaccgtacggggaggacgtcgtgttcgtctgcaacgactggcacaccggccctctgtcgagctacctcaagagcaactaccagtccaacggcatctacagaaacgccaagaccgctttctgccatccacaacatctcctaccagggccggttcgcattctcggactaacccggagctaaacctccctgagagattcagatcatccttcgatttcatcgacggctacgagaagcctgtggagggcaggaagatcaactggatgaaggccgggatcatcgaagccgacagggtcctgaccgtgagcccctactacgccgaggagctcatctccggcatcgccaggggctgcgagctcgacaacatcatgcgcctcaccggcatcaccggtatcgtcaacggcatggacgtcagcgagtgggaccccagcaaggacaagtacatcgccaccaagtacgacgtgtcaacggccattgcggccaaggcgctcaacaaggaggcgctgcaggccgcggccggggctcccggtggaccggaagatcccgctggtggcgttcgtcggcaggctggaggagcagaagggccccgacgtcatggctgccgccatcccgcagctcatggaggaggatgtccagatcgtccttctgggcactgggaagaagaagttcgagcgcatgctgatgagcgcggaggagaagtaccccgacaaggtgcgcgccgtggtgaagttcaacgcggcgctggcgcaccacatcatggccggcgccgacctgctcgccgtcaccagccgcttcgagccctgcggcctcatccagctgcaggggatgcgatacggcacgccctgcgtgtgcgcgtccaccggcgggctcgtcgacaccgtcatcgaaggcaagaccggattccacatgggccgcctcagcgtcgactgtaaggtcgtggagccggccgacgtgcagaaggtggcgagcaccctgaagcgcgccatcaaggtcgtcggcacgccggcgtacgaggagatggtcaggaactgcatgatccaggacctctcctggaagggccctgccaagaactgggagaacgttcttgctgagcctgggcgtcgccggcagccagccggggatcgaaggcgaggagatcgcgccgctggccactacaatacactaccacaagcaactatatactatg

SEQ ID NO: 43435 - DNA, 267 bp, Setaria italica
  Peptide Sequence Number=SeqID_109409
ttcttcagataatcggggtgggaggtgggcaagggcctcgaccttcctctttaattgccattgccaagctgatagcaagttttactccctctttttgtctttctgaaacctagctattattgctctaaaaatattctgtcgaatgaagatgctcatgtaactcggttattgcgtaatcatatggcggagttcttttaagttcttgaactgatcctcaacaagatctactgagggtcgcacttgtgcaaatcaaaaccagtagtaaaa

SEQ ID NO: 43436 - DNA, 548 bp, Setaria italica
  Peptide Sequence Number=SeqID_109410
gaatctagaaggaacggcaagaacagaacaccgaaagaacaattccggcaatggcagcaaggtgcgctctttcttccccatcctgcttggttcgtcaacccctctgcggcaacaaactcggcaagaagctcactccatgcctgccatcgccaagagccgtaagggtgagagtgagcgctgcaaagcttcctccgggggttgaggtgcccagggtgcagccaaagctgagcgagcccttcttgggattcacccagaccgccgagatctggaactccagggcctgcatgattggcctcatcggcaccttcatcgtggagctggtgctaaacaaggggattcttcagataatcggggtggaggtgggcaagggcctcgaccttcctctttaattgccattgccaagctgatagcaagttttactccctcttttttgtctttctgaaacctagctattattgctctaaaaatattctgtcgaatgaagatgctcatgtaactcggttattgcgtaatcatatggcggagttcttttaataaaaaaaaaaaaa

SEQ ID NO: 43437 - DNA, 470 bp, Setaria italica
  Peptide Sequence Number=SeqID_109411
acatatggttgatgtaatatcctacttggagaccattccgaatctaatactcaatctccatcagttgcaaatctaagaggccaacattgttctataaccttgcaatgggggagaatagctcattaatccgaataaatccacgccgaaggggagggataggaagctgctgccatcgaggagcaacgcctcaaatgcgattcatgtcctggcgagcgggattggaagggggaactggtgaggaaagaaattggaggctgccgtaagggacgggtaggaacctgccgccgccgagcttcaactccgcaaatgcgtctccaatctaggtcagctggttggtagggtgtacaaactgccgacaagtttggacctcagcccctcacgcttgtgtgctagtggcggcagtttcggggagacgtgcggtgccgagaaacgggatctagcggcgggggaggaaccggtgccgagaaccg

SEQ ID NO: 43438 - DNA, 345 bp, Setaria italica
  Peptide Sequence Number=SeqID_109412
ttactttacgttactttagtttacttaattttttactttacttaaattaggtagttgtcctttaggtcctgcactgttctttcgactaggtgaggggacttcttgggtttgcatgctattgataaaagaccttgccaagaaccttggcactggacttcctgggtagtaatactggtcttcaatttctagtgaccccaaaatagttcctatcagtaaattgccacctttaactgaaagttcaacctggccaccaactgcccgaaattcaaataggctgctctccttagctagcagaaccttttttagtttgtggtcatcctcatagccacacgaaaagcatatctt

SEQ ID NO: 43439 - DNA, 404 bp, Setaria italica
  Peptide Sequence Number=SeqID_109413
gttcaggcggacacggtcgtttacaaccacctcctcaatgttcttgtggaggggagcaagatgaagctactggagtcggtctacaacgagatggctagtcgggggatccgacctgatgttgtgacattcaataccctgatcaaggggctgtgccgggcacatcaggtcaggactgcggtcttgatgctggaggagatgtcgagccatagtgtggcgcctgatgagaccacattcaccaccttgatgcaaggctttgttgaggagggaagcattgaggcggctttgagggtgaaggcgaagatgctggagacggggtgctctccaacaagggtaacagttaatgttctgattaatgggtactgcaagctggtgctgtatgtagccaagagcatcttccactctcc

SEQ ID NO: 43440 - DNA, 835 bp, Setaria italica
  Peptide Sequence Number=SeqID_109414
agaaaggggacgcacttactcacgcccctctctcatcgatctcgtcttccccaaacccatcccaagccgccgagctcagcgaaccccccgccgctccaccttgctcgccggccggtccagatccaggagtgatctgtactagcagtgttgaggtgacacaaacaagtcgacaatgagcagcataggcacaggttacgatctgtcagttaccaccttctctccggatggccgtgtcttccaggtcgagtacgccaccaaggctgtcgacaacagcgggactgttgttggaatcaagtgcaaagatggcattgtcctgggtgttgagaagctggtaacttcaaagatgatgctggaggggtccaaccagaggatccattcagtgcaccggcactctggcttgtctgttgctggtttggcagcagatggcaggcaaatgttcaaggccaaatcagaagctgccagctacgaaaaggtctatggggaacccatttctgtgaaggaattggcagatcgtgtggcaagttatgttcatctttgcacgctgtactggtggctgaggccttttggttgtggtgttattcttggaggttatgatagggatgggccacagctgtacatgatagagccctcaggagtctcctacaaatacttcggtgctgcattgggaagggtaagaacaaggactagacaaaaaactagaagaataagaagaaagttagaaagactttacaagaagacttaacctagaccgggaaaggacaattagttagaaagttagacaaaagaataaatttaataggaagtagacaatagaacgaaagacaaaaggaacaaa

SEQ ID NO: 43441 - DNA, 1127 bp, Setaria italica
  Peptide Sequence Number=SeqID_109415
tctactaaactaagttcgtactaattgtagtctagtctattaggtctactaggtttacgtattcttgttctagtttacctacctttcttcttccggtattggtccgttgttctgtccagatccaggagtgatctgtactagcagtgttgaggtgacacaaacaagtcgacaatgagcagcataggcacaggttacgatctgtcagttaccaccttctctccggatggccgtgtcttccaggtcgagtacgccaccaaggctgtcgacaacagcgggactgttgttggaatcaagtgcaaagatggcattgtcctgggtgttgagaagctggtaacttcaaagatgatgctggaggggtccaaccagaggatccattcagtgcaccggcactctggcttgtctgttgctggtttggcagcagatggcaggcaaattgtttcaagggccaaatcagaagctgccagctacgaaaaggtctatggggaacccatttctgtgaaggaattggcagatcgtgtggcaagttatgttcatctttgcacgctgtactggtggctgaggccttttggttgtggtgttattcttggaggttatgatagggatgggccacagctgtacatgatagagccctcaggagtctcctacaaatacttcggtgctgcattggggaagggtagacaggctgcaaaaactgagatagagaagttgaagctttcagagcttacctgccgggaaggcattgttgaagttgcaaagataatttatggagtgcatgacgaagcaaaggacaaagctttcgagttggagttgagctgggtctgtgacgaatcaaaccgccagcatcagaaggtaccaaatgatctgttggagcaggccaaggctgctgctcaggcagctctggaggaaatggatgctgactaagaaacaccgaccatagtctgaacttatttcatcttctggtgctgttgaaatctttgatccctttggggtgacagactggacatggccaatttgtcggattttatttcagtgtcctgtaaacttcatacgtacttaatggaactatgctttcgtaggaaaaaaaaaaaaaaaaaaaaatgatatccgagcagtggcatttgcattct

SEQ ID NO: 43442 - DNA, 378 bp, Setaria italica
  Peptide Sequence Number=SeqID_109416
aacaaatgcagctaattgtttagtttcacagagtgtctctagaaaaggcccactggggcttggaataatacatatgagaagaagggagaaaaatttgcctggccatgtcccccattagtcaaagttggcttcacggggcagcaggactccacacttccaggtggcaccagctggcatctcctagctgggaaaagcagctcctgaaacagcagcaggagcatctgcattgtgaacacaggacctggggccagtaagtgagcgggtgtgagtcagggggactctccacctgcccatctcagcccaacagaccttgtctggaaaggccgtgtgtctacctgaatgagtagatccccgggtttcttgctcttcacagtaaca

SEQ ID NO: 43443 - DNA, 355 bp, Setaria italica
  Peptide Sequence Number=SeqID_109417
taaaggacctaacctaattaggcaaccactttttgttgtactaggtcaggagtagcagtttttgggccggcaacattattatgattacctcccaggccatcccatgggccaatctttgtgacagggccaatctttgtgacaggaatagcacttgggctggtaaaattattatgataacctctcagaccagcccatggaccaacctttgtgacagggatcgcagttggaccagtaaaatctgcagacatgccactcagaagctttggatgctctggccaatccatatgaagagcagcttgcttattcttgtcattttcatcttctcgtcaattactataactccatcacgatcatt

SEQ ID NO: 43444 - DNA, 505 bp, Setaria italica
  Peptide Sequence Number=SeqID_109418
cctcgggcaccattgtccttcttggaggcgacgacgagagaccactccccattgggaccatgtgcaccactttgatgaaggcatcgctttggagatcccctcgtgccgccatcatgaccgctaatggttttggtgcttctcgttctacatcacccatacacttctttgatctagcgactaatggttgttgacctccgtcgtgattccctaagtgttccccatctggcacctctattccgttggctgtctccttgttgatggtgccatcaaatcttatgccgagtggtgtttccacctctattgccattcccctcgaggtttcctccccttgtacggcgttggatggcggtgagcccggatgtgcggtgaatggtgttaccatcagcttcaagggagaccgtcgtgtccgatgagttttggttgcgcacctcttgccacctttagtccccattccattggcttggctctcagatggaaggtgacactagaatgacgtagctacgag

SEQ ID NO: 43445 - DNA, 603 bp, Setaria italica
  Peptide Sequence Number=SeqID_109419
ttaaaccttacttgttaacgcttcccatatttgtcaggctttctagctagcgctcttatctttttgcagaaatttcctccaccatccagtagtaccttttgttgaagccaatcagaaaagtgcctattaatcaattgctatatgttttgaggtgtcagatcctcttgcagaccttgtctagttttctcctcatccaaaaattctctccgaagctcctctagctcatcacagtgtcgcaaaacgtagcgatgtgcttgaatgagtaagacattatcaatctggtcaacatcgacaatttttccaataggttcaccagcacttttaaacatgtacaattcctttgtattgtctgaaggatcagggtttctaggtggtttggtaaaacgtgtgattccatctagaaatcttgaacagaatgttagacattcttcgcgaagatatccttcagcaattgatacttaagtatgagcctggttgcgcacaaattcctttaatcgaacgaaaaatctttccatgggatacatccacctataatgtactggaccaccaagcttaacttcatccactaagtgcactaacaaatgcaccataatagtcaaaaaa

SEQ ID NO: 43446 - DNA, 491 bp, Setaria italica
  Peptide Sequence Number=SeqID_109420
acttaagaaactacccaaggacaagttcaccatcccgatgttgggtccaggcattggggtgagcctgctgtacttgcacatggtgatattataactctagggacttcatcaaagctatctgttcagatttcactgctaaatcaacgagttcctgctggagttggtatggcatctgatccaatggtagcccgtagaagtggaaagaaacttccaatggaggacataagcttttgccagtgtcctctgcagggggctgaacaggtgggtaatcagagagttctttcaaagtctttgttcttttgtttttttgatgcctcattgtgttgcagtttggactctttggaattttcgatggacatggtggggatggagctgccaaagctgtcagcaagatcctaccagaaagtttgtcaaacattttgtctcatcctgacacaaaagaacgagttctatcatgttctgatgcttctgatgttcttagatatgctttt

SEQ ID NO: 43447 - DNA, 1845 bp, Setaria italica
  misc_feature (1828)..(1828): n is a, c, g, or t
  Peptide Sequence Number=SeqID_109421
cgaccccggttgctgtccaggatgaggatatagataggcctcttctttctgaaaactgggaaggtcactctagccagagtaatagttttcttggaagttctgtaggagaacctttgaagattcaaacaaatagaagtaatacttcgcctagcagtcatgcaattgctgatacagggaggattttatccttctgaatgttgtgctacacaaggagaaactcatgtcatcaatgttgaaaatgatacttctgaagagttccaattaggaagcacactaaagcgtacaccaccagcaaattggccaacacctgatcaaaagcacaggaaaagggtttctggagaggataaccatattggtagcatttctatgaaggataatacatatcatagcagccttgatttagaggtcatagctggtccatctcatggaataagctgttctcggcagtcaagtagaccttctatgctcccaataactcttggaagggttcccccaagtgatatagtgttaaaggattcggaagtgtcagggaagcatgctcggataaactggaatgcaaagacatttaaatgggaacttgtggacatgggcagcttgaatggaactttcttgaactcccaggcagttcaccatcccgatgttgggtccaggcattggggtgagcctgctgtacttgcacatggtgatattataactctagggacttcatcaaagctatctgttcagatttcactgctaaatcaacgagttcctgctggagttggtatggcatctgatccaatggtagcccgtagaagtggaaagaaacttccaatggaggacataagcttttgccagtgtcctctgcagggggctgaacagtttggactctttggaattttcgatggacatggtggggatggagctgccaaagctgtcagcaagatcctaccagaaagtttgtcaaacattttgtctcatcctgacacaaaagaacgagttctatcatgttctgatgcttctgatgttcttagatatgcttttactttgacagaagctgcaatcgaccatcagtatgagggatgtacagcaacagcccttcttatttggttcgatcagaataaagattgttttgcccagtgtgctaatcttggtgattcagcttgtgtgatgagtgtcaatggaatgacgattgatatgactgaagatcatcgggttgctagtacaactgaaagagctaggatagcgagaactgggcagcccctgaaagatggtgaagtacgccttagtggactaaatcttgctcggatgtttggagataagtttctaaaggagcaagattcacgcttcagctcagaaccatatgtgagccaagctgttcgtatcaccaaagcgtgtacagcttttgccgttattgctagtgacgggctttgggatgtcatcagcaccaaaaaggcggtacagcttgttgccgagggaaaagagaggaacaccgacgatggcacctctgtggataaagtagccaaccgtatattgagcgaagctaggaatttgcggaccaaggacaatacatccgtagtatttgtagatttcgacattctgagaacagatccctgtatctccaaatgacatgtcggatccgagacaccccgttccatgaatcatcctcccggctgcttatagctccaagttttgcttcgctctcggctgcacccgttttgtttttacaatgagatgtggtgatattcgcatgaaaactgcactggaatcatctgtgtattggcatatgagcaaagtgaatatatagcgtgcaatctggtgacctaaaactagagaaaaactaaaaagngactgccaaggcacaca

SEQ ID NO: 43448 - DNA, 259 bp, Setaria italica
  Peptide Sequence Number=SeqID_109422
cgcgccgagccgtcggacgccgacgccaaccacctcaaggacgggtaccagtggcgcaagtacggccagaaggtgacacgcgacaacccctaccccgagggcctacttccgctgcgcctacgctccctcctgccccgtcaagaagaaggtgcaaaggagtgcagaggacaagtcgatgctggtggcgacatacgagggcgagcacaaccacgagcaacgtgcccagagcgagtatgtcactgacgcatcgacgacccag

SEQ ID NO: 43449 - DNA, 1064 bp, Setaria italica
  misc_feature (975)..(975): n is a, c, g, or t
  Peptide Sequence Number=SeqID_109423
tactaacttaaccctaacaagcatcctcggcagctgccacattggccccaccaccggctggggggctcaggccaagcgacggagacgacgcaagggacaacagacgctgcttggatgaccgaattctgctaagcatggggttgcctcgcggactggcaacaggtgacggcggcgcagggcgtaccagtggcggccactcaccctgcacggtcgctgcagcctggcactgctcctgcaccttatcgatcccatccagatcgtcggcgtcctccagctcaagctccgcggcgaggagccagtgcaccttgagcgcgatgcggagcgacttggcgcaggtgtcaatgacgaagcggtcgagggaggggctgggcttgtggacgagcatgtagcagacctggaagaggtaggcctcgaggcccgggagcgggagcgtgtacatgcggttgcagaggtagtcgcgcacgccggcatggtcgtgcttgtagaggtagctgacggcgatccactcgcagaagaaggcggagtcgaagaagcgcacgagccagccgctgctgccgacgggcggggcggcgtcggcggtggaggggatctcccgcggcgactcctccggcccgaagctcaggctccgcagcccgagaagccgcaccatggccggcgcggcctcggccccaacccaatcagcaaactctactcaccgccgccgccgccagctccgccgccgcctactcgtcttccacctcctctcaccaccatcacaagccgactcggagcagctcgatccagcaaccccccacaatcagaaggaaccaccaccaaatccaaaccctaccctccgcgcggccccgggatccggagcttcccaaaccctagcctcgaaatcacgtccagattcgcagcgaggcgctgcggaatcgggcgggggaggcgggggcgggcggcgagagcacggggggatcggcaggggtggggggtttncgctggctcgattcgattcgggtggattcgatttgaattgtcgcagcgttttcgtcgctgggtgtgggagactttgatttgaattttcg

SEQ ID NO: 43450 - DNA, 333 bp, Setaria italica
  Peptide Sequence Number=SeqID_109424
cgcggggatccggccatgtgctgcaacccgtggaggtcaccaatgtgccggaagatgagatcctgattatttgcttcagtgaggcgcttcctgttggggaggggaactttgaacattgcattcaagggcactctgaatgataagatgcatggattctacagaagtgtgtacgagctcaatggggagaagaagaacatggctgtaacacagtttgagcccgctgatgcaaggcgctgcttcccgtgttgggatgagcctgctttcaaggctgtattcaaaattactctagaagttccttctgagactgttgctttgtcaaatatgccagtaatt

SEQ ID NO: 43451 - DNA, 441 bp, Setaria italica
  Peptide Sequence Number=SeqID_109425
taaattaaaattttgcttattttgctaaatgttttgattgtggctaacaaatggttcaaccaagattctgctacaggttatttttgtctaatcattgcttaagaacactgaatggagtaaaatttggaacctactgctgtatatcactctgaaaatatgaatgatgcaacaatggttgtgaggacatgaaacttactctcggatgaacaatcagtcagtagcaccatggaacaggtttaatgaagaaatcaagataagaagattaagattgaatatattgctggggacttgctttctgccagtcacttcttcaattgcggtttcttattattatgatgcaggagtgggtcaaaccactaatacaccttcaaagcttgattatcaatggcattttataccaaacataacttgccatagaatttctagtaacatctacttatc

SEQ ID NO: 43452 - DNA, 735 bp, Setaria italica
  Peptide Sequence Number=SeqID_109426
gaataagatgaatagtcaaacgtcgtgatcaaagttaatattgacaaatattttgatataacattttattccattaattattcgacaacaataatgcttgcattggaccgcgcccactacttattcatccgcaatgtacgtgtagccgtgtggggttattacataattcttggaacagcaacgctgtatgtgctgctgctactcgcggggttcgccgcaatcgacgaactggtagctgacggtgaggtggccatcgttgacaccctgcccgttgtcgatcttgctgaaggccgtgtcgtagtccaggtcgagcccgccgttgctgcactggtccacgatcctcaccgtcgtcgacgcgcccgtcgccgagttggtcaccaggaggcactgcccgcacgaggcctggccggtggggccggcgggcccgcagaaggcggtccagccgtacttgctgcgccaggcgtaggacttgccggcgtcccaggtggcgcagtacgcgctggcggcgttgaggtcccagttgatgttctgcgggcggtagtagttgtaggtcgcgcgcacgccggacgcctgctgcgccgccgccatggctgccgccgcgcacagcagcgccgccaccagcgccagccgccctccggtcaccttaccgccggccgccatggcaactgaatttgtttgtaagctctgaatttactcgccggtaagctatgcaagaggtctttgcttctagctagc

SEQ ID NO: 43453 - DNA, 219 bp, Setaria italica
  Peptide Sequence Number=SeqID_109427
taagacaaaccaaaaatcctgtaatacttggtactggcatcctttgttttatatgctaatggcattttttttcatgttattatggctaacatttttatagcatggttagaacaaaattgttttgctttcctggaaagaaacagctaaattaaacgaatacctctctgcaggggactttctagtgaaactgcaaagcattcctctcgttatggagattta

SEQ ID NO: 43454 - DNA, 419 bp, Setaria italica
  Peptide Sequence Number=SeqID_109428
gactacggcgacgccctgcacaagtgcatcctcttcttcgagggccagcgctccgggagggctcccgccggaccagcgcgtccggtggcgccgcgactccgggctccacgacggtgccgccgctggggtggacctgacgggagggtactacgacgccggcgacaacgtgaagttcgggttcccgatggcgttcacggcgacgctcatgtcgtgggggctcatcgacttcgggcgcagcttcggcgcgcacgaggcggacgcccgtgaggccgtccgttgggcgacggactacctgatgaaggcgacgtcgacgccggggacggtgtacgtgcaggtcggcgacgcgtcccgcgaccacgcgtgctgggagcgtcccgaggacatggataccccgcgcaccgtgtaccgcgtggacgcgt

SEQ ID NO: 43455 - DNA, 718 bp, Setaria italica
  Peptide Sequence Number=SeqID_109429
ttgtaacttgttctaacttttcctttaccttactatttctcaaaatgaattttctgggcactgtagctttgattcagttggactatggcatgtttgctgttattttgtattggtcaagtggtgtatagttgctagttcctgtctcagtatttgagctccccacttgtgagcagacattgtttactcaaccttgctttgatgcaatcgagctattctcttaatgtgcatgctagcagaccacaaggaaaaataaaaacaatgcgattgttttttctttttggtaagcaaagtgacaggaagctctgcctttcatttttggtagatagagtataagaacatcaatgttatacactgcatcaatgagccgtatgattgctaatataaagataacctatgaattctttcaagccaaaaatattgagtgctcctatatggttatgaaatttgactttttgaaaatattagttttcacttgattcatttacaggaaaaggtgaagtattatgatatagctactgagaaacgtgcagaatttgagaaggcgatgattgaatataacaagaaaaaggaaagtggagaaatatttgaggattcagattcgggctagagctgaagattttgctattccaattccagatggttcaccattactagttgaatcaatgaattgtatattacagaactgtgatttgtaaggcaatttgtaggtactagtagt

SEQ ID NO: 43456 - DNA, 659 bp, Setaria italica
  Peptide Sequence Number=SeqID_109430
ccggccgccacggaggccctgcaggcgcccatcgtgttcgggtgcgggcaggtgcagacgggcgcgttcctggacggcgccggcttcgacggtctgctgggcctgggcatggaccgggtgtccgtgcccagcgtgctcgccgcccgcggcctcgtcgcgtccaacagcttctccatgtgcttcagcgacgacggcgtcggccggatcaacttcggcgacgccggcagccccggccagtccgagacgcgctttatcgccaggagcacaaacccgacgtacaacgtgagcttcacgtcggcgaacgtcggcagcgagtcggtggcggtggagtttgccgccgtcatggactccggcacgtccttcacgtacctcaacgacccggagtacacggcgttcgccaccagcttcacctcccaggttcgcgagaggagaaccaacttcagcagcggttcttcaggccgtctccccttcgactactgctataagctgagccctaaccagacggaggtggtgcccccgatcgtgagcctgacgaccgcggggggagcccagttcccggtcaccaacccgatcatcttcttgcgcgatgacaggatcaccatcggctactgcctggcgatcgtcaagaacgacatcaccatcaacatcatcggccagaa

SEQ ID NO: 43457 - DNA, 426 bp, Setaria italica
  Peptide Sequence Number=SeqID_109431
cctgaagcacctggccgcactcgggcaccgcgcggcgacgtggttgtcagcgaagcaattgaagcagaggccgaccaggtccgccaggacctgccggcgggggcgaggaagagagcgcgactaccgccgcttgcaggggccacccacctcccagccctcctcaacgtcgtgagcatccaagcccaccgtgccccgaggagggccgtggcgcctagcgtgaagtctccatcaagtggcggaggaggcggggcagtgacgaagcggccctgaggaggtccacggcgcctggcatctgccatgaaacccccaacaagcggaggaggtggggagttagtgaccaggcggcgagaaggtgggagcttggcgtccctaggaggcggtagcggcagtgaatcggcgatccaacaggagggagggtggtgggct

SEQ ID NO: 43458 - DNA, 374 bp, Setaria italica
  Peptide Sequence Number=SeqID_109432
ttgcttgacagcaacttagaggatggtaactacatatcagctagagggagaaaggttgttgtaattggcggtggagacacaggcacggattgtattgggacttccatcaggcatggttgcagtaacattgtaaatcttgaacttctaccagaaccaccaagagagagggctcctgacaatccatggccacagtacccgaggatcttccgaattgactatggccaccaagaagcagctagcaagtttggaaaagatccaagaaattaccaaatcctcaccaaacgttttatcggagacgaaaatggaaaagtgaaggcccttgaggtagtacgtgttgaatggggcaaagtggatggaagatttcaattcaaagg

SEQ ID NO: 43459 - DNA, 361 bp, Setaria italica
  Peptide Sequence Number=SeqID_109433
ttaggtgagtgaattgggctccagcccttgatccatcatgtgctctagaagatcaaaaaccttcataacaagactgttcctgctatatccactggccagtatgttatatgtaactacatctggttttatatttgccttcagcatctgctcaaatgcttgccaagcattatctgtttctcctttaagacagtaaccgtggatcaggcatgtatagtggatcttgtctggcgtcaaacctttagccatcatttcattcagtagctggactgcctcattcatgttcccaagcttgcaataagcatccataccaatgttataaagcacgccatcaaaatggagtcctaaatctctaaatttctgg

SEQ ID NO: 43460 - DNA, 475 bp, Setaria italica
  Peptide Sequence Number=SeqID_109434
acccttgatgccaagaaaatgtcaaaattatgttattgttatgacttgttatttgattgtttatcaccaagagatcaatgattaacacgtccattttcagctacaaaaggggtgcacttacaggggaacgcatgatccgttcttgctcactggagttcagggtaccgacataccaaatttaattgtatgtaccacgtagtgtagcatacatggataaattagtgaactagttctatcaaagaagacatgcacagacttgaagaagttcctgaaagaaaggtatggaccagcatagttacaataacatttcacagtactaaatttagaggactcaaggagcacatgaaaccaagagctcatgcaggagcatagatctgcattgatcacaccgaatacataaaattggccaatgcagttaggcatatccacttatgcatgtcaacgttctatgcaacctgcccccatctccagtcct

SEQ ID NO: 43461 - DNA, 772 bp, Setaria italica
  Peptide Sequence Number=SeqID_109435
tcacatgtcgcggccacaccacacaggtttagcaccctttcacaccagtgacccttcatgattgcagaggcaaaatggcatcaccagccgaaagccggctaaatagatactaataatatatacattcctaacatcttcttaataagttaacgatagtccacaaggtaacgtaagtatgattggtttaaattcaacaggtgggcggttgtgagagttttaataacttaattgtctttcccttccatggtttcttcgcagctgcctcgcacgcttcacatcctcctacttgcacggagctacagcatgtttcgctggaccgctcaggaaatatcaggcataatttttttaagaacttctcttcccacgtacatatttaggtagccctgaacaagcttctctatatttttagcttcatcggacaaaatccttgagatggccagttctgttgagggagcattcgaggcccaagcgccagccactttctccacagccttcttcactacgattttgtgcacttcccgggatagcaccccgttgtcccacagaggctttatgaaattttttacgaactcacacagggcacacttgaatagatccattggtgcgctactttcttcaactgcgcttcgttgtggaggcccagtatttgattcagagatctccaactgtgttgccacttcagaggtaccctcctttttgtagacttctctgatgatttgattcgcctcagcttgcttatgctgctcttccttcacttgctcatgatgttctt

SEQ ID NO: 43462 - DNA, 610 bp, Setaria italica
  Peptide Sequence Number=SeqID_109436
agttgtatccaccagaggacactgcgccttcgcctgcgtgtactcgtcgctaacccgagcgtggggcgagctgttctccattccaacgccatcactggaatgtgagctcacggaggaacctggcacccttgttggggatgcaatgcattggctacttggtgagagcagcatacttgagtttcgattggacgaccaaagattagctcttgttgagcgcccattggagacgttttctgtctacaagcggaacatccgtgtgctgaggtccgagggtggcgttcttggcctcgctgctgtgaagaattttagtctgcatctatgggcacgggaggctgaccattgtggcactgcaaagtgggtgctgcgcagagcaattgaactctgcacactccttgaactgccattgatgcagcctcgtgtgggctccattcctgtctggataagtgggcttggtgaggatggcaatgtagtgtttctacgaaccacggtcggcatgtacgtgctttggaccaagactatgcagttcaagatggtcactaacaatgtactcatgaagacagtttatccctatgctaaatttactttctagaaggcctttgatctggacgtg

SEQ ID NO: 43463 - DNA, 1111 bp, Setaria italica
  Peptide Sequence Number=SeqID_109437
acatgattcagtgtacaaagcaatactctcttattagagagatgcaaacttggtcgagctgtagctgttgcagaaagctcctcttcgagctcagtatttggggtttagagctgctcctttttctatggaacttgaattgaagattaccgggcaggagcaccaaggacttgaaaaactttcatgagtgtttttttagactttactcgacagtatacacatgggatccaccgatccagtaaaaaacaagcagaaaaacttaacaagcactgaagcacattagccaggcttcagaagtctgaccaaggactcaagagaagaaacataactttagatacacgaccttctttaccctgcagtaatatttgaaaagaaaaggagaaaacctaatgataagctggcagcaaagcctaaacgtgtgccaaaagatcattcattgacagttcaaataatcctctgtttgagatcttcaaacttcccgaaaaagttgtccctgctttccttgaaaaggagatatcgtgcaatgaaccaaattgagtagccagttcctactagttccagaatttttggcagcaggggaactgaatcaattgcagaaacaatggaagatagaacccataaaatgacaaaggcaccagatccagtgaggattaaagttggagtcacttcaatgttcaacttgcttagtatctcatccaggccgccgtcatccggggagggggacggctccgacgacaccacctctgctgcaacaggcgcctccgcggggccactggacgcggcgctaacctcctcaaccttgtcgtcggcaggtgaatcgggcttgtccgtgacgacgacggtggacgaggcggaggccggctcttcggagggcaccgggtcaggcacagccgcagtggcgcagcgccagcctcgagctgggaggcggcggcggagcgggacggcggtgacgggacacgcgccgcagcggaagggcgcggcggtggcgcgggcggaggcggtggtggagacgcagacctccatgctctctctcctctccttttgggttttcctctcctctcctctttccgtggaggccggcctggtgggttttgaggtttctgtgagccgcgag

SEQ ID NO: 43464 - DNA, 435 bp, Setaria italica
  Peptide Sequence Number=SeqID_109438
atgacgtgactgctcataaatttacggtatgacctactagttaccacccctttttccaaaatgggtgctgtctgtgtgaacagtcaaactgtgtactggagacagtttgatcctaacatgatagtgaaaatcatggaggctaattctactgctatcatttctatgagacaattctaaaatctaaatacttgtatgcaaccatttggactggatgtgctacttttaacacacataggatttgttccgtccacctgtcctttttttttctcgaatacgcaggagaactgcataccattgcattaaaatagaaggaaaaaaaggccaaaatagccatacaaacctactaacccctcacacattcagttatctgagaacatacgcgcccgtgaaagcatccacctgtccttatatttcatatgttttctcgttcaattt

SEQ ID NO: 43465 - DNA, 659 bp, Setaria italica
  Peptide Sequence Number=SeqID_109439
tttttgactgagcatgagcccagctgtacctgatcttttttatttcaggctgtattgccaatgttccagcaaaactaccgttgacaacaacatgataagttgatttgcaattagtcgattcatcatacgaggaactttctcaacagcttggggaattagagctcaaaatggccaaagtagcgtgcctgttttttctttataaatcttgatatagtagggacgtcaccttggatgattatctggccatcttccatataaatagcaccatccgcgtatttcaattcttccagccgatgggtcacccataatgcggcgacctccccatcagcaactagagagttccttactgcctttatcacacccatctggtcatgttcatctaagaatgttgtcagctcgtccagcagtaatactttggatgcttcagctaaagcaccagcaattgcaactctctgcttctgcccaccactcagggtttggattggcctttgagagtagctcaacatcccgacagcatctaaagattttgacacccttgacctgacctcatctaatggaaggttgagcttaccaagaccaaatgcaacatcagattccactgtaggcatcacaacctggtgatcaggattttggaagacgtagctgcatggcccatttat

SEQ ID NO: 43466 - DNA, 238 bp, Setaria italica
  Peptide Sequence Number=SeqID_109440
gttgccctcttcctgcttttcgtggcttcatgttacatcattgttagacgccttcgatcaggccgcagcaatggcgacccagtactgccgccttcgcctccggggctgccaatcatcggcaacatgcaccagcttggtcggggacaccaccaccggaagctgcaggcgcttgcgcagcagcacggcgagatctttctcctctggctaggctccgtgcctgctctcgtggtctcctcgg

SEQ ID NO: 43467 - DNA, 371 bp, Setaria italica
  Peptide Sequence Number=SeqID_109441
accacagccagtgttcttgtcgagatccagggtttcggaataattcatgcctgggttctcgtcttgatctccgtggcactcctgcgttcctcctcgtgatctggatgggtagttggtgatccgtcttcgatttggtgatcggggctgcttttgcggctgtatgggtaccatgcaggaagtagttggctgttgacatctcgacttgttcgaatctgctgatggcgatagagttttccttaactcgaagaaacgattggcttacattctttccgatgttgcatttaaatgaacaactgaaatttgtcactttctattccttgataacaaatcgttgttctagagaatatgcggtaggagagtgtcagccttta

SEQ ID NO: 43468 - DNA, 812 bp, Setaria italica
  Peptide Sequence Number=SeqID_109442
agtcgcactagtgtggcccacaccaaagactactacagagttgagggcatttcttggtttaactggatattacaggaggtttatccagggttatggcataatttgcaggcctttgtttgatgctttgaagaaaaatgcatttgagtggacctctaagcaagatcaagcctttgcacaattgaagaacatcatgtctaatccacctgttctggctcttcctgatttctcccaaccttttatcttggaagctgatgctagtggcactggtataggagctgttttgatgcagaatggcaggcccctctcttttcttagcaagactttgggacctaaagctgcagccttgtccatatatgaaaaggaagcaatggctattttggaggctttaaaaaaatggaagcattacttggccagtacttctgtgattatcagaaatgatcaacaaagcttaaagtatattcatgagcaaagattacttgcgggaattcagcacaagttattagtgaaattgctgggtaacaactataagattgagtataaaaaggttaaggagaatagagcagcagatgctttatccagagttgacttcaatccatcaaccaatgccatctctatggtcataccagcttgggtggaacaagttattgctataaggatgatcctatttgccaggacttgataacaaaactgagtttggacagtgaggctgtcccacactactcattaacaagtggggtgttgagatataagggcaaagcggtgattggccaacatgactctttgaggactcaactattggaaaattttctatt

SEQ ID NO: 43469 - DNA, 510 bp, Setaria italica
  Peptide Sequence Number=SeqID_109443
ggtaatgcacgccgacccgtaccctgtcccggctatgttctccggccccggcgacttctctttgaaggagacgcggccccgccttggcggcggcgcggtcgccgacaaggcgagcgcgacctacgacctggtggagcaggtggagtacctctacgtgcgcgtggtgcgcgcgcgcggcgtcccgatggtcggcgaggccgtcgcggaggtcaagctcgggaactaccgcggcgtgacgccggccgtcccttcgcacagctggggaccaggtgttcgccttctccaaggagaccatccagtcgtcgtttgtggaggtgtacgtgcgcgcgcgcggcattgacgaccacgtcggccgcgtctggttcgacctcgccgaggtgcctcatcgcgcgccgccggacagcacgctcgcccgcagtggtacaacatggaggaccgcaaggccagcgtggcggcgctgaggttatggtcgccgtctggttcggcaccaggctgacgaggccttgcgga

SEQ ID NO: 43470 - DNA, 1266 bp, Setaria italica
  Peptide Sequence Number=SeqID_109444
ctcttactcagcctgttgctctgagtgaagagaggaaatgtgcaagccttactactgctaagcgctccagggttacttcctcccgagctgtcaaagatttgaccaaccattcagcttcaaaagctaacataaatgttcctagcggcaacaagtacagagacgaagaaaacataagccagggcgagttggatggggcggtcatgccatctcccccgaagaagctgcaaacatgcaaagacccttcagattcaccttcaataaggaaatcaattatcagaatcctgggtgccaaaagagctgcttttctgcccacagggaagtctgaagttgaaactggaaagaattttgctagtgtaccagcaaaagtggtttctgcaagtacaaatgttatcagtgagtcagttgatgcttctgttccattgcttgcacagcagcagcaacctggcactgcaaagatctccaatgccgtcacacaagctattgccaatgaaacaagtcaactgaatcagttggctgctgcaattattacattgcccaagcaaaatcttcaaactgattatgaaaaaaagcctgccagtttacccatagtgcctcaccaggtcagtcagttgggtggtgcaactgctcccttggttgcaccaaagttagaaatcggaaagggacagaacacttccaatcttctgtcgaatcctgcttatgcgagggctcttttaatcaagcagcaagagcagctgctccagcaatataaatcggggactccacagccacagcagcaccacatcaaagggccagctctgttcgagaccgatgagccgccaccagttgagccgttgggaacgaggtgccaactctgcaagctcgatgttgctttccggccacaaggggatgctggccatgatgctaatgctcctccagttgtcgcagttctggcatgccaccatgcatttcacagcagctgcatcgagtctatttacggcctcgctgagcctgccgagtgccttgcctgtcttgagcatggggcagtgcactgatcagtgatcactaacaagaagcttcagttttagcctgatgggctatgatatagccttatagtacaaaatttccttttagaatgcatagagagggtgaggtcttatctctattggtaggagttttcgttggtataggcggctggaatcagagtttgatacctcatttctgttggctttagtgtaactagctatcattgaagttcaatggagagctgaatcatcagacatagaaaaa

SEQ ID NO: 43471 - DNA, 667 bp, Setaria italica
  Peptide Sequence Number=SeqID_109445
gccggagcgcgtggtgtcgaggacggggatggagagcgcccggcgatgtgtcgtgggctctggcgcggaggtgttgccgtggccggtggtgaaggtgcgtcacgagtgacgtgggcgttcctcgcaatcgacggccgccgctgaggagagcccgagctcggggaggcaatcatcgcaaatggtggtgtcgtcggcgaggatgcaccgcgtggcgacgttggggtcgaggcggcgtcgacggtcgtggccggggaaactgacggcatcaacacggcgtccgcgagagcgcgggggaagaggtcggcggtcgtcgcgctggcggtaggggaggccgtgcacgagctggggctgtgggcgcttcccgcggcgtcgacggcccgccgggggaggatcacggcgcgggcgggagcatccttcagcggcgttccggatctgcagacgtgaggttgccaatcgtacctggggttggaggccgtcgtcgtccaccagtgtcggcgatgcggagggcgagggccgtagtagtgcgtcgcggaacggcgtgggggaggcctccggtagctcctcgtcggagaggtcgtcgtcggagtcggagtccatccagcggagctccttggagcggccgccagaggcgcccatggggtggaagggctgagcctgaagacgacga

SEQ ID NO: 43472 - DNA, 586 bp, Setaria italica
  misc_feature (552)..(552): n is a, c, g, or t
  Peptide Sequence Number=SeqID_109446
cctaactccattcattcctatttagaagaacaaagatgagttcaaaagacaaagatgagagcactggtgattcagtaagttgactactttgttcgcactttcatttgcgtaagaaaagtatgctcctttccctcctccaactgccagagttcactagcgcgaaagaaaaatagatggattgagcgacgggacattaaccaacctggatttagccctcctctctactatctactggctagacctcatactactggctagacctcatattagacctaatcctgcacctccaccaccacaaccaagacccaattcaatatcttaataggaagaatgtcttgatccggaaattctcgtaccaaaaggaaagagtagagaaaccatactctggcgcatagttagtggtagaatgcttattgaaaaaaatgagggtttataatctcctgactacgataaagaattagtatagtaaatggatgaataagatttctctcgatttagaatcggatttggcggcatggccaagcggtaaggcaggggactgcaaatccttanccccagttcaaatctgggtgtcgcctgacccact

SEQ ID NO: 43473 - DNA, 1415 bp, Setaria italica
  Peptide Sequence Number=SeqID_109447
ctcgtggcataacagtgccaagttgcagtaacggtacccgagtcccaacaagcgcaatgttaccggacatcatcgtatcacaccaaaatttggcagtttggctgttcaagttacatgtgaagctgttaaggaaacaaaactgctacgatcactagattgccagtaactttaccgctacaacatccggtgccattgctcacagcactgtcacgtgcttttctgcaagcaagcctcaacggcgccacccagcatctctgaacgaggagcttctgccttccaggtcttcatcaaatcacctttgtagcattgagtcagtggatttccttccgcattgccattttgcagctggcaagtatatagtatgacgcgacaaaactttgggtgcatctcactcatttgcaactgatctcttctccagcaatgatgacaagaaagcggaacatagttttgtgagaggcggaagaacatgagacgatccactgaatatggtctcccaaggcctgtctgaggggataaatggaacatctgaaacctctttctttgactccagttttcgaagctctccgtaaatagaagcgtagccaattagtgcaggttcatcagcttgaatcttcttgtctgcgttcctgctaataaccaactcctcactctttcggggatcaaagatggcatattcatgggaaccatttacataaaccaatgacactgtgtctctgtctctcgaattattagcatttgcatccaaagagatgtcacctttcacaaaagaaatgctgccaccccttgccttctttaccgaccaggaggcaacagggtttgggttttctgcattgaaaagtagaattgctccatcttgctctgttgatgctcctccatcaggacagcttagaagagcaagaaccgcaaattcgttcccatctggcgaacagcatgcagcttctgcataaatgctgtaagaccactgcatgcaaagatttgaaacattccatacagtaacctgtggtcttgaactctgacatacagacatcaaaaacactgatgtcccaacaaaagaaaggtttgtaactggcgataatgtttctgcaatgacaccaacaagcgcattattatcaggatcccacagtgtgatgacactctcagctgcaactgcaagaacagatccatcggctgagaaggctgctgatgtcataggtttcttcttgtacgagccaaccgattggcatctccaaccagcacaatttttttcattgcttgattgtgaagataaactctggacccaaaccttgaagttaccaccaaaagaagagctcacagccatattccttcctgggcggaaagcaacagcagatacctcagcatcactgtgaggctcataaatgacagtggaacaaaaattaatttcccgcactagaccc

SEQ ID NO: 43474 - DNA, 496 bp, Setaria italica
  misc_feature (136)..(136): n is a, c, g, or t
  misc_feature (446)..(446): n is a, c, g, or t
  misc_feature (454)..(454): n is a, c, g, or t
  Peptide Sequence Number=SeqID_109448
agatcaactccctgacgctcttcaagttcgggtacctaaagaaaacaaagttttaccagcttagttaagtcatatcaagaactcttgtgggaccaccaagctaatctgcttaacctactcgagaccctgaatgctnaaaattgtttgcttgctagcagtgtacaggcaaaaaaatgaatatttatgttcaaaagccctcttttaccacaaacaaaaaaaactaaggaggaatcaccaagctaatctgcttaaagtagtcaaggccctggatggataaagttgtttgctagcatcctcaatattgttatagtgcaacaaattgaatatatatgcaacacttcacagcctcgtctacaataaactattaaatccattaacaacaatggttgcagttgtaatctggaatcacaattctaacaacagaaccgaatgtccaaatcacaaanccatgatnaagcatgaaatactaagaaaagtaacaaaatttaggtattag

SEQ ID NO: 43475 - DNA, 409 bp, Setaria italica
  Peptide Sequence Number=SeqID_109449
agctgcaccaacaactgcagcagtgcatgccaaccccacattcagccgagaatcattcatttgaccatcatagtataccactgttcctcttaggctacgatcatggccactttttgctagggttgggaaaagttcgacggattcatctacagaataatatcgtgacaaatgtagtagccttcttccagcaactagatcataaaacttcaaaccaaaccagtagtatacaacctcaaaccagttaaagcaaggagtcatgcatggcaaagcatggcacagatggggagcattatcaataacctgcttgcgttccttaagtgcgtgaaaaacaagtttgagctgcccataatcaagattgaacactgccttctccaagtagcgtacgccgccgtggatgagtttggtggat

SEQ ID NO: 43476 - DNA, 499 bp, Setaria italica
  misc_feature (31)..(31): n is a, c, g, or t
  Peptide Sequence Number=SeqID_109450
tttggtctagttctcttttagtttttttttnttttttttttttagttttctaacattcattacgcgtttcttgattgatatctcaattcttaatgaaattcgtaataatagcccacctcaccagagagcataaggaactgctaacttcagaattacaatataatcgctgaagcatgcagaacatggctttgtcagggtacaaacatatcagttctttttggaacctgactctaatctaacatctcaccaggttcccaggagctcagattttcttaatcaggtcagaaatatatttgatcagatgaagaacgcttcaatggagaatacccgaatcaattctcttgcatgtagtcagcaacctatcatcacttccttgagatctgcaaatgacattcttgtacataacacagtcaacccattgcaaagtgagaagcttgaggataatatagagaaagcagaatctataaggagttcgatctgttctccgagcaatttcaca

SEQ ID NO: 43477 - DNA, 931 bp, Setaria italica
  Peptide Sequence Number=SeqID_109451
cggaaacccatggaggcggcgctgggggcgttgtgccgcgccggagggtggtcgtacgcggccgtatggcgcttccatccccacgaccctcggttgcttacattgggggagagatactccgaagatgaggctaaaacagtggttgagaagatgctcggtcaagttcatattattggggaaggcatcataggagaagctctaataagcggtgagtgtcaatggatatacgatgctacttgcaacgcgttgaaccagacaagccacgcagataaccgagagttatttgagggttatacgtggtggcaataccagttcctgaatggaataaagaccattgcagtattacctcttcagttgcagggattggtgcaatttggttcctttcggaaggttcccaggagctcagattttcttaatcaggtcagaaatatatttgatcagatgaagaacgcttcaatggagaatacccgaatcaattctcttgcatgtagtcagcaacctatcatcacttccttgagatctgcaaatgacattcttgtacataacacagtcaacccattgcaaagtgagaagcttgaggataatatagagaaagcagaatctataaggagttcgatctgttctccgagcaattcacagaggcctttaaatgatttaacctcctatgttactggtaacaccaatattgatactcacatattggcgatgcctgttaactccaagtctatatatgagctcaaaggatttgataaggtcactgacttttttcatcaaaatgttgatgccagaactgaagttcaagtcaactctagcaaagtgcctgattcttttattgccagtataatgtcagcatacaaagttcaaacaatcttcataggatgacaaatgaatcatctgatcagaacatgccatatccccataccattacact

SEQ ID NO: 43478 - DNA, 828 bp, Setaria italica
  Peptide Sequence Number=SeqID_109452
acccgacaaacaagtaccttcccaaaccaatggcaacataaatacaactctaccatccttggttttagggacaattagccccatcccttcagggggaatagtaatcaggaagtacaatgtgcacaccactacttggacagatcatgggcactatattactgttagccatcttcctcacagagtcacagaatggtcctgctgcattaattaccacctttgcaaaggtttcaaactccttacctgatagtgtgttactggtaacaccaatattgatactgacatattggcgatgcctgttaactccaagtctatatatgagctcaaaggatttgataaggtcactgactttttcatcaaaatgttgatgccagaactgaagttcaagtcaactctagcaaagtgcctgattctttattgccagtataatgtcagcatcaaaagttcaaacaatcttcataggatgcaaatgaatcatctgatcagaacatgccatatcccccataccattacactaccaccaactctcccaattccaggcttgatgaactttgttattccagtgctggtttctcatcatcacttacaacagtatccggaaaatgcctccagaccgagagtgacagatttctatgtaaatctgtatcattcagcagcaacccttgtgtttctgaaatccaagataattgcctcacaccacatcatgccctcatgcataaacaatctctgatacctgacactggagaatgtgtgaagcttctctcacctgatagtacatgtcctgaattaccaaataggacatctgaagaagctactgcaggaacatcaaac

SEQ ID NO: 43479 - DNA, 796 bp, Setaria italica
  Peptide Sequence Number=SeqID_109453
taacagtccttcccaaccatggcaacataaatacaactctaccatccttggttttagggactaattagccccatcccttcaggggaatagtaatcaggaagtacaatgtgcacaccactacttggacagatcatgggcactatattactgttagccatcttcctcacagagtcacagaatggtcctgctgcattaattaccacctttgcaaaggtttcaaactccttacctgatagtgtgtcacgaatgcgtgccccaatgattctctctccagattcatccttaatgagggagaccacttcagcataattgagaacagctgcaccaacaactgcagcagtgcatgccaaccccacattcagccgagaatcattcatttgaccatcatagtataccactgttcctcttaggctacgatcatggccactttttgctagggttgggaaaagttcgacggattcatctgcttgcgttccttaagtgcgtggagaacaagtttgagctgcccataatcaagattgaacactgccttctccaagtagcgtacgccgccgtggagaaggcagtgttggacaatcttgattatgggcagctcaaacttgtttttcacgcacttaaggaacgcaagcaggttattgataatgctccccatctgtgccatgctttgccatgcatgactccttgctttaactggtttgaggttgtatactactggtttggtttgaagtttatgatctagttgctggaagaaggctactacatttgtcacgatattattctgtagatgaatccgtcg

SEQ ID NO: 43480 - DNA, 1487 bp, Setaria italica
  Peptide Sequence Number=SeqID_109454
aatgcagcaggaccattctgtgactctgtgaggaagatggctaacagtaatatagtgcccatgatctgtccaagtagtggtgtgcacattgtacttcctgattactattcccctgaagggatggggctaattgtccctaaaaccaaggatggtagagttgtatttatgttgccatggttgggaaggactgttgcgggaacaactgattctagcacagcaataacaatgcttcctgaaccacatgaggatgaaatacagttcatattggatgcaatctctgactatcttaatgttcaggtaaggcgttcggatgttctttctgcctggagtggtatacgtcctttggccatggatccatcagcaaagaacactgaaagtatttctcgagatcatgttgtatttgaggactacccagggctaataacgataactggtggaaaatggacgacctatagaagcatggctgaagatgctgtaaatgcagcagtaaggtctgggaatttgaagccagctaatggttgtgtgaccgataacttgcatatcgttggtggatatggatgggatcctgcttcttttactgtccttgcccagaattataagcgaatgaaaaagacatatggtggcaaagttattccaggtgcaatggacagtgctgtatcgaaacatttatcacatgcatatggaactttggctgaacaagtggctactattgcccagaacgaaggcttgggaaagcggcttgctcatggatacccatttttggaagctgaagtagcatactgtgctcgtcatgagtattgtgaatctgctgtggactttgttgcaaggagatgccggctagctttccttgacacagatgcagctggcagagctttgccccggatcattgagattttagcttccgagcacaagtgggacaaggcaaggaagaaggttgaattgcagaagggtagagagtttctggaaacatttaaatcatccaagaacgctcaattcagtgatgggaagcataatggacgatgacccaaaaatacaattctgtgaataagcatgaatcttataatcacacaagttcacttgaacaagcaggcttcgatccaagattgagccggtgaatgttgcaaggttttccacatttgaacgcatgtttgtgaaatggatttacagcaaaataagatgtggtcacggcagggtagcatatatcgcagcatattagtagttgatttaaaaataaactggaatgagcaacaaaatatttcatgcgtctcatccacggatttgcccttgtgtatagttgaacttccatgcaatttcgtctcgtcagcacaacgtgtggctactagcctactaccacgtgagctgagtattgctgttggtaactgagggccatgctggcaggatcatggtctgcgttgcaagatggccattggctgcgagacttcggcaaagacactacttcttggttgctaagaaacaagcttaaaaaa

SEQ ID NO: 43481 - DNA, 456 bp, Setaria italica
  Peptide Sequence Number=SeqID_109455
tactcgttgaacatatgggatgttggaggacagaagactatccggtcttattggagaaattactttgagcagactgatggactagtttgggtggttgatagttctgatgtacggaggcttgatgattgccgtgctgaactccacaatctcttgaaagaagagagactagccggagcttcgttgttagtttttgcaaataaacaagacatacaaggagctctaaagccagctgaaattgccaaggttctgaatcttgaagtgatggacgggagcaggcactggaagatcgtcggctgcagcgcctacaccggcgaggggcttctcgacggattcgactggctggtgcaggacattgcctctcggatctacgtcctagactgatctggcatgccatctgctgccagtttagtcattgcacagtcggaatgtataaagtttgagctggcgtctagtttt

SEQ ID NO: 43482 - DNA, 450 bp, Setaria italica
  Peptide Sequence Number=SeqID_109456
taaactaagcgttgctatatgtgggacctattctggttccaaacatgacatagttagttaaagactatatagctaggaagtaggaagtcacaactgcccaatagaaacaagatcaggaacaagtttgtcaactccatgatacatcagcaaggaaggaaatggacttgcataatttcatgcaaaaaggtactccctctgtcccagaatataactagtgttttgtcctaagtgaaacatttttaactttaactataaatagaaaaataaaatcaaagattgacaaagttaaaatgacgttagcagattcatcatgaaaacaactatcataacatgtaaacttttctatatgaactaaattatttttagagattattttttatcaagggtaaatttgacttaggacaaacctaaaagtagctatattctgggatggagggagtacatgacatc

SEQ ID NO: 43483 - DNA, 1227 bp, Setaria italica
  Peptide Sequence Number=SeqID_109457
tttttttttttaagcccaaaagcattcgcttcaatggttaaatcattagctagcaccccctggtacgatagttctatcagatgacatctaataaagtacaatcatcagaggataatatatacatattacatgatacaatggcaaagcctcaaataatttactgcgatttccatccaccatgacgagaccacgtaaaatgcgttcaaccgccagcaaggttcacttcacatgaggtgaagtcggcatgcatatgtcaatttcatccaatgtggggcggtcgtgcagcgtcaagccatgctcatttgccaaatgcaagaggcagatgaaatacaggtgcggtgagatatcagttgctgcagcatccgggttgctgcttggaagatcatgcagcacctgtgacaggctcagcggtgattcagcttcctcattttcccgattatcagtctcagcagatgcatggatgtgattccaaagcacttcttttaaagcatgaacatccacttgttttgataccttgtcgtattgtatatcaatcttgttgacctgtctcggtttattgataaggtttactggctcctctacatcactgcaggcatgtccttcatcaatgtgatcagtgcaaaagttatcatcatcccaaggttcagatggcatgaagttatcattgttctccactggagtgtcatgtgattttcttcttctcttagcaaggcacaaaacatctggaagaagaaataatttaacaaggctttcaggccggtaatggcaatcttctggaagtctattactgcagatagccctatttgcgggaagcagcaatgacttcggattttgggaggtgcgaagatatttagaggctcattgtccagtgcttttgtgaaatcaacatcaggctcatccttggctcttttcttcttcatcttatttggtatttctgattcaacagatgaagttggggcagcctccaaatctttagctttgcgatatttccagtgctcaggtcctgcccaagcatttgtctttgaagtgcccatgccaagcaacaaaagatctgcaattttgtcaagcttttcatctgcaacagtaccttgaggaatctcaacagtgtattcatcaaattcctcttgatagtttgttgagttggaagccaactgggttgtagttttcgtcgtaagcatcctcatggtcatcacaaccaccaaaatcccacattccagactccggtat

SEQ ID NO: 43484 - DNA, 233 bp, Setaria italica
  Peptide Sequence Number=SeqID_109458
acatcagtatccggttgtgtgtgatctgatggtttccctgtatgatcagattggtcccctgcagtatgcaggtcctcaatttttctcttgtttggcaatgtaacacattgactgatgtctccagattcaagatagcggtacacatccttaagagagcgaaattcatatccattgactgggtcaatatagaactgtagataaaatgaatcgatcagttacagtcacagaacaaa

SEQ ID NO: 43485 - DNA, 451 bp, Setaria italica
  Peptide Sequence Number=SeqID_109459
agaattggtcccctgcagtatgcaggtcctcaatttttctcttgtttggcaatgtaacacattgactgatgtctccagattcaagatagcggtacacatccttaagagagcgaaattcatatccattgactgggtcaatatagaacatgtcacccttgattctagatccatttcgattctttctaggtctgcattcttctaaccaaccgtcaggtaacccctctccagcaggctcgtacttgccatcagccatggcatttgggttttgcaaggacaatctcactttgagttatagaatgagagccctcacaagatcaataactatgccggccggcgctacggcctggctgcggcggccatggagctcggcttccgcggagattgccgccgacaggaggagagaggagggagaggaggacacggcaaggtagctgttgctcccactgctcca

SEQ ID NO: 43486 - DNA, 623 bp, Setaria italica
  Peptide Sequence Number=SeqID_109460
atagaatgagagccctcacaagatcaataactatgcctggtttagaacagcagaagatcctgtttagctcagagagacaatgaatggtttactaagtcacgcaaggaaactttatgtatgttattaagggcatatatgcctagtgcacattgcaaaatggcttagtgtgatcaatatttatgtactttaatgaaatgcgccgcctcatgtgttgcgctaaaaaaaacaaatggaacaagggcacactcccatggagcacttaagcactacttagaagttactgcatggctcaaaatgaacgagagcaactgaaattatattaatccatccttacttcaattcaccaattcagcttcagaaagagacaacctattatgctcatgttagcagcgagcaacagaacttcatagaagaatggacccacctccccgtataatcttagattctacaaaaaccaaaacactcaaaactatgaggctaaaatctttttataacctatctagcaagttctttgaagattaactgagcaaatttctaaataagcgctaaataccctagttaacaaaaaagagcctaactgaaaggcacctttttcatgagtttgtctagcattctgactgtcg

SEQ ID NO: 43487 - DNA, 1525 bp, Setaria italica
  Peptide Sequence Number=SeqID_109461
acatactacaaccccaaccacaaattcagggaggggcattagcactacgagcatatcaagtctgctctaacgatactagaagtgaatacatgatcacattattactacaataatacaaacaaaagaaagtagcgaatgcttttgccttttgcttcctgtgaattagactgatcccatgagcacaaggaagcatgcggcagctatattacgttattagtgatggatcccctacacagttacaagctgcagccttgtttccaacgtgcatgcttgtcgagatccctaacaaatagcgctaagaagactacaattaggacatgagatggcaaggtaagaactctgtttcatattccccagatggaattcactgcggagggaaccaaccactgccgtagaacttatctgatggccttggcactgagagactaacatgatcgacttgtgtgtggtttctgttaccatcataagccgaagaggaccagttgggtgccgcccctttattcagattctgtggtggaagaaagtagcttctgtttccatcataagctgaagatcgatatgctagagtgtcatttagaacagggatatcacccatcagagtcctgaacgcaaacacaaggcatgggtctgaccagacatgtcgaaatagcgatgacagggctgatccaggcatattattatcagatgttccaccttgtccaatttgttgtggcagaacaggtgccccagctggtgcattctggcatgcagcatctcctgaagagttagggactgatgctccttgaacttgattgggaactgaagggtacttgtcttcaaacttttctgaggagctttcatctttcctctcaggaagtacagaggaattagactttcgcctaggtttctgggcttgctttggttgtgactgattggtgatgtctgaatttgtgctgataagttcatctcttggcgcactattgtttgcttcctggctaatcttcagtgcagctaaacgaggtgatgatcgaagaggtgtagcaatccctttgacaggtttagttttgcgtttcttttccttgggtctctgctccgcattcgctcctgtcctagtaacagattcagcttttcctggagtgtgttctatcaagcctgattggatgctctcggactctgaagcttcaactcgaacagcttccctttggacatttctcagtgtgttcgtacctcttggtatatgatattcattggactcaacatcagtatccggttgtgtgtgatctgatggtttccctgtatgatcagattggtcccctgcagtatgcaggtcctcaatttttctcttgtttggcaatgtaacacattgactgatgtctccagattcaagatagcggtacacatccttaagagagcgaaattcatatccattgactgggtcaatatagaacatgtcacccttgattctagatccatttcgattctttctaggtcttagttctttaaacgttaggttttgtttatttttgttttattttcgtttaagttt

SEQ ID NO: 43488 - DNA, 452 bp, Setaria italica
  Peptide Sequence Number=SeqID_109462
tgttaatgcgtaacaaatttatagttacaattgacaagaatttttttttctagtcaacctcaaccataagtatacaatggttaaagattagtttcgtaagaaagatagcagatgaagatgcatgttaactgtactcttactttctccattctgaccatttcgaattattttaacaaagcacatagaagcatgaaagcctggaaggccattatccgatattaagcagtgataaaatttcccgtacatgtttctcatacagctttcctgatcatattcatgctgtttttaactgaatatgacattacatattggcaaactcataaatcagagttgtaagagtacagttagtcaactgccatccaacactgtcaatccacgcatgataatggtaccctttactgctttctaattgtcaggtagctgaaataagccgtgtcctgagacccggtggt

SEQ ID NO: 43489 - DNA, 561 bp, Setaria italica
  Peptide Sequence Number=SeqID_109463
ttcctcctcagcatcgtctccggcggggtcgtgctcgtcgccatcgtcggcgccgtcgtcgccgtctccaacttcgaccccgtcaagcggggctgagctccgctgcatgccgtgaccatccgcttgggctgggtgtacctgtgtactgagagagcagtcgatctctgctccgcgtgcttcccaatgaacagtgtctaatgcgtcactcttttgccctgtaaatcttcgtttcatgctcgtaaaacagtgtctaaatgcgtcactcttttgccctgtaaatcttcgtttcatgctcgtaaaaatctcgtattcatggagagcctcccacgcgacacagttccatataggatagataatgatttcgattttattattgtgggatcagaactggagcttaaaaaaacagagcgtgcttctcttgagctcgttcccatgaagttgagcacaaagagtcgtactgaatatagaattggtgttgcaatttatatacctatatactagctagttgaaagggatgaattccctcaagatacttgatctcgtatgtatactactaggaaa

SEQ ID NO: 43490 - DNA, 517 bp, Setaria italica
  Peptide Sequence Number=SeqID_109464
ctgccggaggtcgcggaggccgcgcagcccgggatctcgccctcgctcaagaacttcctcctcagcatcgtctccggcggggtcgtgctcgtcgccatcgtcggcgccgtcgtcgccgtctccaacttcgaccccgtcaagcggggctgagctccgctgcatgccgtgaccatccgcttgggctgggtgtacctgtgtactgagagagcagtcgatctctgctccgcgtgcttcccaatgaacagtgtctaatgcgtcactcttttgccctgtaaatcttcgtttcatgctcgtaaaaatctcgtattcatggagagcctcccacgcgacacagttccatataggatagataatgatttcgattttattattgtgggatcagaactggagcttaaaaaaaacagagcgtgcttctcttgagctcgttcccatgaagttgagcacaaagagtcggaagtacgtaactagaaataataagaaattaggtagttagacaaatttaataataaaaaaaaaa

SEQ ID NO: 43491 - DNA, 603 bp, Setaria italica
  Peptide Sequence Number=SeqID_109465
cggcggcatcggcaccgcccggtgggccgcgtggagaccggcgtcctgaagcccggcatggtggtcaccttcgcgcccaccggcctgacgacggaggtgaagtcggtggagatgcaccacgagtcgatgcaggaggcgctgccaggcgacaacgtcgggttcaacgtgaagaacgtggcggtgaaggacctgaagcgcggctacgtggcgtccaactccaaggacgaccccgccagggaggccgccggcttcacggcgcaggtgatcatcatgaaccacccggggcagatcgccggcggctacgcgccggtgctggactgccacacgtcccacgtcgccgtgaggttctcggagctgctgaccaagatcgacaggcgctccggcaaggagctcgagagcggccccaagttcctcaagaacggcgacgctgggctcgtcaagatggtcccgaccaagcccatggtggtggagacgttctccgagtacccgccgctgggaggttcgccgtgcgcgacatgaggcagacggtggccgtgggcgtgatcaagagcgtggagaagaaggacccgacgggagccaaggtcaccaaggctgcggcgaaga

SEQ ID NO: 43492 - DNA, 2001 bp, Setaria italica
  Peptide Sequence Number=SeqID_109466
catcctgtgcggagagtccttacattcacaaatttgggccaccaggctcagttttcccagcacaatttgcctctggtacagaattgcttcatcatggacctcaaccgtacaatgctgagggctataggcagtctggtttcaatggcacagcggctcatgcatttcagagctcgttttacaatactgatagccatgttgaatctcacttcaatgaagcaacatgttctccagcaaactccaatatatctcagcagaactcccagtctttgtcagacaatcagaccgccgatcttgaagtagagtttgatgaagatgagatgaggctaaagcttcaggagcttgagcatgctttactcgatgatggtgatgagatcttttctgatttatcaggaatcattgatgatgagtggaatgataacatgaagaacaatgactggactaataccatgaagaatatcatgagtccagactctccaaaagagtcatcaccggaatcaagcctctgttgccctgacagcaataatggagaagcacggcatccaaaacagttgctctttgactgcgctgaagcaatttctgagtatagcgtcgaagaagcacaatcaataataacagaattgcgacagaaggttgcaattcagggagacccttcgcagagaattgcagcctatcttgtggagggccttgctgccacaatacagtcttcagggaaagggatctacagggctctgaggtgcaaggaggcccctactctgtaccagctttcagctatgcagatcctctttgaaatatgcccatgcttcaggctaggcttcatgtccgccaactatgctattcttgaagcctgtaaaggtgaagaggttgtgcacattattgactttgacatcaaccagggtagccagtacataaatttgatccagttcctacggaataacagtaacaagccacgccttttgaggataacaggagttgatgacccagagtcagtgcacagggctgttggaggactgaaggttgttggtcagcgactcgagaagcttgcagaggactgtgaggtaccatttgagttcagggcagtggcttctaacatcgaggatgtgacacctggaatgctggattgccgtcctggagaggccctcattgttaactttgcattcctgctgcaccacctgcccgatgaaagcgtctcaattgtgaacgaaagggaccagctcctccgtatggtgaagggtctccgaccaaaactagtgacagtggtggagcaggatgcaaatactaacaccaccccattccttgcaaggttccgtgaggtctatgactattactcggcactttttgattcactagatgcaacccttccaagggaaagcccagatagaatgaatgtggagaggcaatgcctggcacgagaaattgtcaacatcttagcttgtgaaggtcctgaccgtgtggaaaggtatgaggtggctgggaaatggagagcaaggatggcgatggctggctttgtaccgtccccatttaacagcaacgtgattgatggcataaaatctctactgaaatcatactgtgacaagtacaggttcgagaaggtacacgatggcctccattttggctggggagacaagacgctcgtcgtctcgtcggcatggcaatagaagcacatgtctcagatcttagcactgctgcattttaggcgcccctggtgcaagagtagagatttctaccaccgtattgttaacctatcatatactcatatcatatctgaccttagcgtgctgcttgtagacttatgaggtctgtctagtttgttagatgaaatatgttgcgtattgtacacatttgtgcagagtcactggtgtacagtgtacttaattttgcccttcttttggaagggtagatcgcaatatgccgacactgtttcatgtttaaaagtatgtgtggctgctagctgatagatgggacaaataacaaaccttcgtcattacgaactagaaaaaaaac

SEQ ID NO: 43493 - DNA, 338 bp, Setaria italica
  Peptide Sequence Number=SeqID_109467
tggggccttcaatggtggcgacggcgcagaaacggaggcactgcgcgcaggcaggtaggaggcaggcgaccgccctgccgacgcaggcgaccgccctgccgacggccatggcgatgcagtacaggccgagcccgaggaagcaaatggcgtacacgagcaccttgcagacccccatggcgacggcgtgcagggtcgacccgcagaacctgacgagcgccacgagcaggaggaccacagcgacgccgagcacgaacgggagtgcggcggcctggagccactgccagagctcgtctagcttctgcgatagctcgtgggtcgcgccagccagagcggcgaag

SEQ ID NO: 43494 - DNA, 450 bp, Setaria italica
  Peptide Sequence Number=SeqID_109468
gacgcctgctccgccgctcgcgtcctgccgggcgctccgcggcgccgcttccgccgccatctccgccatcacaaccatcgatctctctgcgtttgctccgtcgaacgcgatcctgagcaggattctcgcggggaacggcgcggtccgcagcctcaccgtcaattgcagcctcctcgacgactccgcggcctctgtcatcgcgaagggtagcctccgcgagctctcgcttctgaagtgctcgttcacgatgagcttctttatggctattggtgagagatgcggcaatttaagatcattaaagctggagatggcagttgccccagaagttttgtatcctcgttactctggatttggtacttgcctagcacgtatctacgcgggatgtggttgcttggagactctttgggtgaagttccctctgctagatccgcgcactgctgattatgagaa

SEQ ID NO: 43495 - DNA, 663 bp, Setaria italica
  Peptide Sequence Number=SeqID_109469
agaacaaggaataaaggacaacgaaaaaaagaagaagaaaaaaatggaaagaaaaaaagaaaagggaaaagataaattattggtttaatcatatatttactaatcgattttatttcaaatgaaataacatataaattattggtaatgatatatatcaacctactcattattggttaatctaatttctattcattatttttttccatttcatatgagaaatcacattataattgagagcaaacataaacttatgtgcacatccaaatcacatagctaagggcatataggacatttgacctcttatacccattcataaaaatacagaagaaaccgttttgccaaacactttgcagaacggctttagctccaccagagaagctgctccaccagaggagccacagctggagccgtttcagccacagccatagccttgccaaacgagcccttaaggagtgtagcatgcatggttggaatattccccatatccacaggttgtcatactcttacatttcatctctaaaacatattgaaaattcttactaaaattgtagcatcaaattcctaaagtttccaaacatttttttcaggagtgattcaaaataatgtgcacacacattttcacagtggcagaccaaaataacacacctacatttatatcctctt

SEQ ID NO: 43496 - DNA, 195 bp, Setaria italica
  misc_feature (1)..(1): n is a, c, g, or t
  Peptide Sequence Number=SeqID_109470
ngttccgatccagtgggaggctgcaagctcgacgaggaaggaggacccagagcggacgtcgggccaaccgccggatccttggcatttgcacttgttggcgatagctgaccctcttcctcagtgggcatcgcggccgccgcgcagccgggtttgggagcggggcagtggcggcgcagcaaatggaggagaggagtg

SEQ ID NO: 43497 - DNA, 419 bp, Setaria italica
  misc_feature (66)..(66): n is a, c, g, or t
  Peptide Sequence Number=SeqID_109471
taatcactcttaaccgtacagacttctctttccattgaggtatggaatacggattctaggcctccngtttcctgtagaagatgttaagcgtgtcgctgtacagggccacagaattggagaccacagcaagcacaatcatggttacagccaaaaccttgtcgcgcttggttgaaacgccataagggccctttagaaacagaaagcaaaataacaattaggtgcaaaattgccaaaagccaaatagacctacaaactaggaatacatttatatattactcgaagggtattatgataagttacctgagtataatcatggcaggaaagatgaaaccgataagcacagcagctgtggcgccagtgaattggaacgcgtcccagatgcttggtatgaagatggcagcaagataaatcacagcaag

SEQ ID NO: 43498 - DNA, 521 bp, Setaria italica
  Peptide Sequence Number=SeqID_109472
cctcgactggggaagagcaatccatcagttaagccaagggcaaagaagacaaatgggaaagcaagcatgacatgtgcagcatagctcactcgaacaatatcatcaaagactgagctgaacggaatgccaagatttgcatcaaagttggcaagcacgtcatccagtgtgccctcaccaaacaggagatatgcaaaaaagcttgtggcaatgtaaacactggagcacaggaccagcgatgttcgcacgatcggtttgatctgtgttctgtcttcaagttcattgtcaatgctgtgaacgttgtagtggcagatgtaggcagtaacaagaacagggacagctgtaaaaagattccagatagaatttagaccatctaattctggaaaaagtttgggaattgccatcatcaagcttttcaatggaactgtagcaatgcccaaactttttccagatagaatttagaccatctaattctggaatctttttactagtcttgttcccttgtttctttgtttactttgtct

SEQ ID NO: 43499 - DNA, 418 bp, Setaria italica
  Peptide Sequence Number=SeqID_109473
agaaacattgcttcaaattgcaaaattcagattttatgaaggaagatgatgatgcacttggatgcatgaacgaatacggtctctttgtccgcagttgagaatccgatcacttgaaagaatggggtgcttgaagttggatggtcttctgtacacaaaccggctcagtgtcgaattgagccacttgcaatgtatgtgtacattattgtggagaaagcttttcccgaaccatactctcttctctgctaatacaagcacataacgtatacatacattgcaagtggctcaattcgacactgagccggtttgtgtacagaagaccatccaacttcaagcacaccacttcttccagtcaaggtggaggaggatgatgggtttcatgagttcaatggtgcttcattctcaggggcagttttcaatc

SEQ ID NO: 43500 - DNA, 809 bp, Setaria italica
  Peptide Sequence Number=SeqID_109474
gggctgtcggagacgagccattcctgttccgatccagtgggaggctgcaagctcgacgaggaaggaggacccagagcggacgtcgggccaaccgccggatccttggcatttgcacttgttggcgatagctgaccctcttcctcagtgggcatcgcggccgccgcgcagccgggtttgggagcggggcagtggcggccgccgcgcagccgggtttgggagcggggcagtggcggcgcagcaaatggaggagaggagtggtttagggtttggaaggtttggaagggcgttccacaagctatggttttggtccacccaacccgacattgtgttgggccttttgaggccactgggtaggccatagagcccaatgggctcttttctctattttagatggcagagccacccaaagtccagagtcatcggttcgtcataatacattctatctgaaagtttttaagtaaaaattggaattatatgggctccaaaggcatgcccaaaaagtgctgtgtcatcatctcagttaaaaaggacttctaagtgtacctggagaactacatttctcatacctagtcatttcatctgtacgtctcaaaatgttcaaaagtaatattagaagtagagggccgaatgctgggtttaagagtacctatgataatcatgtaaacaattagcacgccgacattgtttatgatgatggaggcctgcagtgcgattctcccccactgtccaaaaacctcacccatcagccacccatctgatgtaatcttgccctggtggctgcacctgacaagcatgtcaatggatgcctc

SEQ ID NO: 43501 - DNA, 1292 bp, Setaria italica
  Peptide Sequence Number=SeqID_109475
caaagactcaaatcaaaccaattgtgcaaacttcattgggactctgctcaagtgtatacattgcaacaagcttctttgcatatctcctctttggtgaggctacccttgctgacgtgctcgccaaagaggagatatgcaaagaagcttgttgcaatgtatacacttgagcagagtcccaatgaagtttgcacaattggtttgatttgagtcttgtcctccagctcattgtcgatgctgtgaacattgtagtggcaaatgtaggcagtgacaagaacaggaacagctgtgaacagtttccagacagaactaattccgtctatctcaggaaagagtttggggatctctacagttccttggatgagtctgacaatagcaactccagcagtgatgacaacaaaaaccacagcaagagcaactgatagcgcagatgtgtatctcaatgaatccaaacgcttgaagctcaccaatggagcaagcacaagaagagttgtggcaaggagaacaacggggcgagaattccacacatgaggtccaaaccacccctcaaagatgccactgtgatgaacaccagttgctgatgtccctgataggacatcccccaattataatcatgtatacaatcaacacaccgatgttgtttattaccacagacacctgcagtgcaatccttccccactgcccgaaagtgtcacccatcaaccacccgtaggatgtaatcttgccctggtggctgcacctgaccagcatgtcaatggatgcctcagtgagcaatgccacaaggatgatcatcagaataccagggatgaggcctagcatcttgatactcgctggcagagccatgattccagcccctacaatggtcgttgacagattgaacactgcaccagagaaagaagctccgttgaactcgtgaaccgcgtcctcatcagctttgatcgggagaagcagcgtggtctcatcttgcgttgccttgtgtgacacgattggcacatcgctcgatgatccattcccaatccccatttgtttcggtcacctgtatgagagaaatttcaattaggacaacagaattttggcctcgaattgccatatccattatagtcgtcttcaatcattcagttctaaatgtagaaatcagaactcccattgatttacctagcggttcgggaactagtagtaacaactaacaactactagggagatatcagtggttttcacaccattatacagtactaaactttgagcttggaaataagcttgtggctcatgtgcagcagacacaaagcctgattcaa

SEQ ID NO: 43502 - DNA, 1185 bp, Setaria italica
  Peptide Sequence Number=SeqID_109476
ttttttttttttgtaagttgtaattgcattattatatatatgaacaggttttttcagaccatccattacaagatgactgaacaaacatccataggaaacaaaaatgttcctttcaggggcatcaatacaagcacggctgatcatatcacaaggtgctcatctcagacgttgagagatggcatatgttcagcaaactagacaaatgcggcaaactggattatttcaaagcgaccaaaacaaaaattattgaccaccatgaaatcacctcactccgcagcagtagtaacttgagttcaataatcactcttaaccgtacagacttctctttccattgaggtatggaatacggattctaggcctcctgtttcctgtagaagatgttaagcgtgtcgctgtacagggccacagaattggagaccacagcaagcacaatcatggttacagccaaaaccttgtcgcgcttggttgaaacgccataagggtccctgagtataatcatggcaggaaagatgaaaccgataagcacagcagctgtggcgccagtgaattggaacgcgtcccagatgcttggtatgaagatggcagcaagataaatcacagcaaggagtgagattgtgatgatggtgaaccttcggttgtcacgagaaatgtgccttgcggtaggaaagagcagcccatccaagttgagcctaagggcaaagaagactataggaaagacaagcatgatatggaccacatagctcactctcactacgtcgttgaacacagagctgaatgggatgcgaaggtcagagtcaaaattggcgagcacgtcagcaagggtagcctcaccaaagaggagatatgcaaagaagcttgttgcaatgtatacacttgagcagagtcccaatgaagtttgcacaattggtttgatttgagtcttgtcctccagctcattgtcgatgctgtgaacattgtagtggcaaatgtaggcagtgacaagaacaggaacagctgtgaacagtttccagacagaactaattccgtctatctcaggaaagagtttggggatctctacagttccttggatgagtctgacaatagcaactccagcagtgatgacaacaaaaaccacagcaagagcaactgatagcgcagatgtgtatctcaatgaatccaaacgcttgaagctcaccaatggagcaa

SEQ ID NO: 43503 - DNA, 2228 bp, Setaria italica
  Peptide Sequence Number=SeqID_109477
tttttgggtaacggtaatcattttattcttaatcaagacatccacgttgacaaatttcaactaaactggcacaactgtacattattgtggagaaagcttttcccgaaccatactctcttctctgctaatacaagcacataacgtatacatacattgcaagtggctcaattcgacactgagccggtttgtgtacagaagaccatccaacttcaagcaccccattctttcaagtgatcggattctcaactgcggacaaagagaccgtattcgttcatgcatccaagtgcatcatcatcttccttcataaaatctgaattttgcaatttgaagccatgtttcttgcatcgacgacagttctccttttaagtctgcagtttaggctacctcttttttacggaagatgttcatcgcatcactgtataaggcaacggaatttgagagaacagcaagcacgatcatggtcacagcaaggatcttgtcacgcttggtagcaattccataagaatccctgagtataaccatggcaggaaagatgaaaccgataaggacggcgggctgtggcaccagtaaactggaatgcgtcccagatacttggtataagaatggcagcaaggtaaattactgtgaggagagtgatggtgatgatggcaaatctcttgttgtcatgagaaatgtgcctcgacgtggggaagagcaatccatctaagttaagccgaagggcaaagaagacaatgggaaagacaagcatgacatgtgcagcatagctcactcgaacaatatcatcaaagactgagctgaacggaatgccaagatttgcatcaaagttggcaagcacgtcatccagtgtgccctcaccaaacaggagatatgcaaaaaagcttgtggcaatgtaaacactggagcacaggaccagcgatgttcgcacgatcggtttgatctgtgttctgtcttcaagttcattgtcaatgctgtgaacgttgtagtggcagatgtaggcagtaacaagaacagggacagctagtaaaaagattccagatagaatttagaccatctaattctggaaaaagtttgggcattgctacagttccattgaaaagcttgatgatggcaattccagcagtaattacaacaaaaaccactgccagggcaactgatagcgcagatgtgtatctcaatgaatccaaacgcttaaagctcaccagtggagcaaacaccaaaagagctgtagcaagaagaacaataggacgcgaattccacatatgagctccaaaccagccctccaatatgccacgatgatgaacaccggctgatgttgttccagacaatacatcacctatgataatcatgtaaacaattagcacgccgacattgtttatgatgatggaggcctgcagtgcgattctcccccactgtccaaaaacctcacccatcagccacccatatgatgtaatcttgccctggtggctgcacctgacaagcatgtcaatggatgcctctgtgagcagtgccacaatgatgatcatcagaattcctgggataatgcccagcatcttgatacttgctggcagggccataattccagccccaactatggtggtcgacagattgaaaactgcccctgagaatgaagcaccattgaactcatgaaacccatcatcctcctccaccttgactggaagaagtggtgtggtctcatctcttatttccttatgcgctgattgctggttcccgtttgatgatccatctccgatcgccatatttctttatctctgtgactctccttgccacaactcaattctctgaattatgagatcccttccggatctgaggccaaacaatgaaccactgaactgaaccagagccaagcaggcagaatttggggagacctctctccccctctctccggtctgcacagaccagctcgctttatagccaggaaacgcagagctgcatccaggtgatgcaatcagcccagccaaacaatggatccaatcagatcctgtcgctgtccactgtccacgcgctacagttctccccccgcccgcggtgattccccccgtcgatgtcgacgcaagaaccgactggcctggcccccccccttcccttggaaccttgcgggggacgaggtggcgtcaggtgattggatcgactggcctgcagttcccctcctccctgaccgcgtcgccgtgtcgctcttcgctcccgcgcgcagttcgcctacagtgtgg

SEQ ID NO: 43504 - DNA, 840 bp, Setaria italica
  Peptide Sequence Number=SeqID_109478
ctcaaaaagtgaattgtatgcttcatgaagaatcttagaccctttagtatagtcattcttcatataatctggtcgcattgggttcatatttggcccaagcacatgtatgacatgggtcacacctccctttgatgcagaggagaaattgatggaagtggaacaacaacagaggtccctggcctcagtgcatctgcacattttctggttgcatgctgtaaagattctccagcagcactgaatattgctgcgttaacccctccacctccaggttttaacctccagttggcagcattagcaatcacactgcactgaagacctctcgtgcgcaactgagtgatatctcccacgaatgtgaaaaacctgctgcagtcaatgctcttcttagaagccttctctttcaccaatgacaatattcttgagacttcgctcaggtctacaagaactagtctaatactatcaaatttctgcaagaaatcagcagctgtgtctactataatgtcagatgctctgtcaagatcaaactggaagtcagcagtagaaatagaagggaatgccagagtgcgggaaccaacatcatcagaatcactttctttagcatgctctccactttccttcttgtcattcgaccccttctccacttccattgggcaggtaatatcggcttcaaccttttcatgttttggcaaagggttttgctgctcgggcttgctttcactcaatgtaagcttggatccgctagatttctcaacactggaagtatcacccttctttagaaacttcattataccaacttgtacggtcctttgcttttctgacctaaaaactcctgatgggagacta

SEQ ID NO: 43505 - DNA, 1593 bp, Setaria italica
  misc_feature (1)..(29): n is a, c, g, or t
  misc_feature (54)..(54): n is a, c, g, or t
  Peptide Sequence Number=SeqID_109479
nnnnnnnnnnnnnnnnnnnnnnnnnnnnntttttttttttttttaggtttcacncaaaaatggctggtaaatatgcttatgatgggactgtcttattcaatcacttgagttgtgcgcaacatgcgtgttaaccaaactaactgcggtgttatacaagcaccacctcaacaaggaaacaaaagcgactgtccagaatggtggccaggccagccagccctgcctttgtgctcatgcattccaagaaaaatggaaacaggttcctttgctctcgttttctaacccggtcggacatatatcaacattcattcgtttgctaaatcgctacgggaaacaaagtgatcagctaataactttggagacaactccggcaccaacagttctccctccttccctcagcgcaaatctttgccctggttcaagaggaacaggtgatatcaactcgaaatttgcagtcacattgtcgccgggcaaaaccatctttgtctcaccaagcaactcaattttaccagtgacatcagcagtcctgaagtagaactgtggactgtaatttgacatgaaagctgtgtgccgaccaccttcgtcctttgtcagggcgtatatttctgcctcaaactttgtgcatgtctttagagtaccaggcttgcacaccacctggccacgctcgacatcaccacgcttaagaccacgaaggagaagaccaacattgtcaccagcctctccatgatccagaatcttcttgaacatctcaacaccagtgacagtagtcttcaatgggccactctgtgtcaaacctaagatctcaacatcttcaccagttttaattgttccctgttcaacacgcccagtcacaacagttccacgaccctggatagagaaaacatcttctatcggcatcaagaaaggcttatcaagctgcctcacgggatcagggatgtactcatcaactgcatccattaatttcaggatggcattctttccaatctcatcattggttccttgcaaggctgacaaggctgatccacggatgattggaatgtcatcaccgggaaacttgtagaaagtaaggagctcccgaagctccatctctacaagttcaagtaactctggatcatcaacagcatcaactttgtttaagaagcatacaagtgaaggcacaccaacctgtctagcaagaagaatatgctcctttgtttgtggcatcgggccatcaggtgctgacacgacaagaataccaccatccatttgagcagctccagtgatcatattcttgacataatcagcgtgtcctgggcaatccacatgagcataatgccttttagccgtctcatactcaacatgagccgttgatattgtgattcctctggccttctcctctggagccttgtcaatctcgtcaaaagcgatggctttggctttccccgcctcagctagaaccttggtaatagcagcagtgagagtggttttgccgtgatcgacgtgtccaatggtaccgacgttcacatggggcttcgtgcgcgtgaaggtggccatggccctcgcccagagggtcccggccatcggcggcggctgggccggcgccgccgcagcgggcgc

SEQ ID NO: 43506 - DNA, 856 bp, Setaria italica
  misc_feature (761)..(761): n is a, c, g, or t
  Peptide Sequence Number=SeqID_109480
aggacggaaagtagaagggtgcatcattacatcaaaatattggattaaaaaatagctgacatttatgtaatcactggcaatagctaattcctccactaaatattccaagagactgctgtagatagccagcacagcttacaccttgtgatgcaagttcaaaatatatcaaccatgtgaagttgatagcataggccaaaagttaagagtactaggaccatcaggtgggaagagggatccatgaaagcaagaaaagctactaagtcattgtgttcaaagccaatcaagctctttctggaacgatagtacctcaacaagatgccccaagtccaaatataatgaagcccagttcaaacacagtttattttgtccacatggttaacaaattattaagagaagtaatgcataccaatcagtatactacagcataataaaacaccagcaagaacctaccagcagtgtaatcttgattaagagttacaagttacgacccagaacattagcactgtgactgcaggtcagcctgctattctccatgctctcatagttcataaagcatacacaagtgcattgcaaacactgccacacccttattgcaccttatgtgttcaaattttaaagattggctggcagttcagcgttaacatggaaaacagatcaactactgctactacctgcttttaccaatggatattagcatactatattgtaactctgagaacatgaatgcatcaaagagaatcatctgagtatctgactaaagntcgtatgaaaatactatcttcactgcattccctacactacgagccactagtgaatttaagtgtagaacagcagttccttgaataatagtgacgaa

SEQ ID NO: 43507 - DNA, 589 bp, Setaria italica
  Peptide Sequence Number=SeqID_109481
cttagtttttttttttttttttaatttttgtaatgtccacctttaactcaaatttccatataacttatgctcggcagcaacgatttttatatgacaaatttgaaacatcctttcaacaccgcattaccaaataaataataacaaacataaatatacacacagaccgcgcaaacataaaaagaagacgcatgccacagccaccctatgtaaatcagatcgccgttccagtattctgatgaaatccaagaaaatcggtgcatacacatgcagccatactctcttgtagattagcactgacgagatctatcacttctcatgctcctctccgaacagaaacccaagcgacgacggccctcctggtgcacagcgtaccctcgtcgatggtcggtcagtgataagaaatccagagttgttgtagcttagctggctggtatggtagatgttgcaaggagatctgttagacgagagtatcgggttcgagacttctctattcggtggaggaagctgtggtggttctttatcggctccagctccgatcatcttgttgtcatccttgacactgctgctgttggtatctggagtagtcttc

SEQ ID NO: 43508 - DNA, 686 bp, Setaria italica
  Peptide Sequence Number=SeqID_109482
aaatgtcaagaacttcttcaggaagaaaaggtcaaggtcatatgctcaaaagcctcccatctggcaagaagaaagatcctcgttcacggttggggatgatttggacatactaaatgcatctgcaaatgattcaaagacagatgaattagttgaggatactgaggtggaaagtatggctaggatgtttagtagtgcaaatgcttcaatttattcattggcatcaactgactcttcttattcttcgaattatggcggtgccaatgtgctacaagattcttatctgaagttaagatgcgaggtggtaggagctagcattgtgaaaagtgggtctggcatgtttgctgtgtattctatttccgtgactgacgccaatggtaatagttggtccatcaagaggaggtttcgtcattttgaagagctgcatcggcgtctgaaagagtatgctcagtacaatcttcatttacctccaaaacattttctttcatcaggtttagaggttcctgttgttcgagagagatgcaagctgcttgacatatatctgaagaacctccttcaaattcctattgtttcaagctgcatagaagtctgggattttctcagtgtggactcacagacatatattttcatggactctctctcagttatccagacattgtcagtcggtttagatgaaagatcaaatggga

SEQ ID NO: 43509 - DNA, 1023 bp, Setaria italica
  Peptide Sequence Number=SeqID_109483
aagaaacagtacattttctttgtttcggcttaggaatataaaggggtgctgtgcttaagcatcagtgagattcaccttttctgtgttttggctttgctttctcttgcagtactgtactctaaaccttggagtaagcattttctgttagatcatgtttgttgtgcttgatgatctgtgatatggaacctgctcatgaagtttagtagagtagttaagaaaagccacataatcataactctacttgttaattatacagaacctccttcaaattcctattgtttcaagctgcatagaagtctgggattttctcagtgtggactcacagacatatattttcatggactctctctcagttatccagacattgtcagtcggtttagatgaaagatcaaatgggaagagtagaaaagtattgaattcttctggagctttgaatggaagttttatttctggaggtcaatctttccatggacatacagataataccgtgcataaggatttggactttgctgtcagtgatggtttgagatataggaaagggaatgtggaaaagaacttaggaaatagtgtttgtgacacaactaccaatctttatctagataattctggaagtgacccggagcagaatgattattcgttttcaatagattcagtaaatcctaagaagatgcgttcaagtgaaaccaatgagacacctcaacttttgggatctgatggattctctgtatctcctaatgattggatggccccaaatcttagtgtccccttgtttcatcttgttgatgtggtttttcagctccaagatggaggctggatcaggcgtcaagcattttgggtagcaaagcaactactgcagttgggaatgggagacacatttgatgactggcttgttgacaaaatccaattacttaggaaaggaggataattgctttcgctgttaagcgggttgaacaaattctctggcctgatggaattttcatgacaaaacatccaaatagaaaaacgtcaccaccaccttctggt

SEQ ID NO: 43510 - DNA, 517 bp, Setaria italica
  Peptide Sequence Number=SeqID_109484
caaatctcatcattcattattgccaaactgaaataataatagagatggagtggttcttgctgttacaattggacctgggtgtaagtatataccagaaagaaccactccatctctattattatgtataccggagtcgctgcagtataacaccagcaaccactccagaaatagaatcccaaatcgaatatcgacgaatcaatgaaacattgatcacaggtagtacaaactgaagccattgcacacaacacaagctggtattggtattcattcatacatactgcaggcgcgggccaggattgaaatgtggctttcataaaatcaccacattgtggattcacgtatcatgtgcatgaaccggcaaaagttcttgcttctcaaggggaaaacaaaaacagagaaaagaaacagcacatccatcagctgaaatcacttcccagaatgaaagcgtgtatctcagaccagctgcaaaccgtataaaggaccccagaacgtgccttgaacatggatgcctcttgct

SEQ ID NO: 43511 - DNA, 1251 bp, Setaria italica
  Peptide Sequence Number=SeqID_109485
ttattatacctactttattttgtttggtttatttttctttacgttttattttctttattttgttttgtttctttattttgtttaaccggtttcttaaaagttttcttacgaaggggaaaacaaaaaacaagactaaaacagaacaaagaaacagcacatccatcagctgaaatcacttcccagaatgaaagcgtgtatctcagaccagctgcaaaccgtataaaggaccccagaacgtgccttgaacatggatgcctcttgctccgtcagctgcctctgcttctctactagaccagggaacaacgggacaaaagacacaccaaactgtttgcccactctccgcaagcttgtgcttgatccaacgacgataccaatatctgcctccagtaagcagagcaaatctccaactgagtctccaatatacacagacagtaatggagctgtactgtccgtgccacttttgatgctcttgaacttttcaactttgtctagtggagactgaattttcctgtcaatctgaccagttgaaacagatccctcaaaggcaaactcgttggaatgtatgttcagaccatctagacaaccaactgatgaaaaggcagaccttattagttctgcacaccagcaataggaaagaatatggatgtccaaattgaggctctcccttgttcttccaatcttctggaagaaatttttacagccatcttgaagaataagccgttctccagctttcctgatatcttctaaattcattcccctaaggacaccggagtcgacaaccctagaatttgcaagtttctcaaactctgctagcacctccaggcctttgtacagttgatcataatctaatgactgtgattcttctggaggaagtagtctttccatgcattcctcgtactcttccatgtattgcttagaaagcatgttccacgaatttcgcaggtctgctgatttcgtacggtcgagggtattatcaatcccactttgacttgatttttggaatgacaaaattgcaatctccgccaaaatggcagatgaatcgacaacagtgcatgtcaaatcaaaatcagaaaagaccaagagtttatattttggaccacaatatcttgaaagtggagctataacaggttggtctacaagctgagccgaaaaaaactccacttccagtttcatagcttgctggtagagcttgccaattatctcaagctcctcaccagttaatgagacactcagtttgtccagcaactcttc

SEQ ID NO: 43512 - DNA, 788 bp, Setaria italica
  Peptide Sequence Number=SeqID_109486
aaactgcaaagctggacaccagaaggctcctaaaacggctggctaaggaaaacctgaagccgctaggccgaatggttgctaaacttgctcatgcaaatcctatgactgtgctccggacaattgtccaacaggtcgaagcatacagggatatgatcacgccagttgtggatgcttttaagtacttgactcagctggagtatgacatcttgcaatatattgtaattgaacgcttggctcaaggtggtcgtgcgaaactcaaagacaatggccttaatctgtcagattggcttcaatgtcttgcatctttttggggccacctgtgcaagaagcataatgctgtggaactgagaagccttttgcagtaccttgttaatcaactaaagaagggtgtgggcatagaacttgttgtcctggaggagctcattcagcaaatggcgaatgtgcaatacactgagaacatgacggaggaacaagttgatgctatggcaggaagtgagactttgcggcagcaagcttcactatttggagcgacaaggaactataaggtattgagtaagtctacaaacagggttgagggattcattgcttccaaaagaagagcccaaacttgcagttcctttgttactgcttattgctcagcaccgatccaagatcataataaatgcagatgctacatatattaaaatggtcagtgagcagtttgatagatgccatggaatacttcttcagtatgttgagtttctttcaagtgctgtaactccaatcgcctatgctcaactaataccacc

SEQ ID NO: 43513 - DNA, 1779 bp, Setaria italica
  Peptide Sequence Number=SeqID_109487
gcaaaatcaatcttgctgctactggaaaggaccttatggatgatgagaagcaagaaatcactatcgatttgtacacagcgttggagatggaaaatgatacagttggggagcgagcacctgagatggaaaagaaccagaaacttgggcttcttcttggttttctctctgtgcatgactggtaccatgcacaagtactctttgagcgtcttgcacacctaaatcctgttgagcatattgaaatttgtgatggattattcagaatgattgaaaaggcaatgtcttcagcctatgatgtagtttgtcaactgtattactacttacctcctaagaatggtgctgaccagaccgacacatctgccctgtccttaagttcatttgatctaccaaaagagtttttccaaatgctcaccgcttgtggaccatatcttcatcgcgatactcaattacttcaaaaggtttgcagagtattaaaagcatactaccactcatcaaaagagtcaacccgtgccacaagtgtagtttcaccagaatttcggattgaagaggcacttgggtcatgcttgcttccttcgttgcagctcatccctgctaatcctgctgttgatatggagatatggggggttctttcccttcttccttatgagacccgctatcgtctgtatggtgaatgggagaaggagactgaacaaaacccaattgtccttgctgcaaggcaaactgcaaagctggacaccagaaggctcctaaaacggctggctaaggaaaacctgaagccgctaggccgaatggttgctaaacttgctcatgcaaatcctatgactgtgctccggacaattgtccaacaggtcgaagcatacagggatatgatcacgccagttgtggatgcttttaagtacttgactcagctggagtatgacatcttgcaatatattgtaattgaacgcttggctcaaggtggtcgtgcgaaactcaaagacaatggccttaatctgtcagattggcttcaatgtcttgcatctttttggggccacctgtgcaagaagcataatgctgtggaactgagaagccttttgcagtaccttgttaatcaactaaagaagggtgtgggcatagaacttgttgtcctggaggagctcattcagcaaatggcgaatgtgcaatacactgagaacatgacggaggaacaagttgatgctatggcaggaagtgagactttgcggcagcaagcttcactatttggagcgacaaggaactataaggtattgagtaagtctacaaacaggttgagggattcattgcttccaaaagaagagcccaaacttgcagttcctttgttactgcttattgctcagcaccgatccaagatcataataaatgcagatgctacatatattaaaatggtcagtgagcagtttgatagatgccatggaatacttcttcagtatgttgagtttctttcaagtgctgtaactccaatcgcctatgctcaactaataccacctttgcaagatctggttcacaaataccacattgagccagaggttgctttccttatataccgcccggtgatgcggctttttaagagcactagtggaggtgacacctgttggcctcttgatgataacgaggaaggagaatctgtatcatctgatgatcttatcttgcatcctgacttgtctcaggaaccgatcatgtggtcagatcttattaacacagtcaggtcaattctgccagcaaaagcttggaacagtctttcaccagatttatatgctactttct

SEQ ID NO: 43514 - DNA, 331 bp, Setaria italica
  Peptide Sequence Number=SeqID_109488
gcgctcgccgtcaggttccagcggaaggacctccactggttgatggaccacgcccacccgctgggggcctccggcagctgcgacggcggcggggtgttggagcccttgtagcggatcacggcggtgatggtgctcacctccttgatgaaccgggtggacgcaaccaggaggtagtcgccgggagcctggtcggcggtgacgaggaaggacaggcactggccgatgtggaggtcgagggagtcgtaggtgttctgcacggtgtgggagccctccatctcgacgagcttgaggatgtgcttctggatgcgcacgttgaaggaggccttgatgc

SEQ ID NO: 43515 - DNA, 1988 bp, Setaria italica
  Peptide Sequence Number=SeqID_109489
cgccggaggctggggcgagttcgacgggtgggagagctccggggagggaggagcgggagcgctggggctggtgccgccgcagccgccgcggcagcagcaggcgccgcgcgtcccccaagggcgccgccgacgacgacaccaccgtcgccaccgggtgctgcatccgcctctggcccgtgggcagctgcccgccgccgccgccgacgaggtccaaggtcgacacctccaccagcagcgccagcacgcacggcgcagagaagtcaactgaaaatggtagcaagaaccaaccggctgcattagtagtctctggttctacaactactagtaacgctgagagcagttcatctgcatctaaagttggagaggaaataaagttgcctctcagctgcgtaagtttgcattcaatgatctaaaatgtgccacaaggaacttccggcctgaaagccttcttggagaagggggttttggatgtgtttttaaggggtggattgaggagaatggaactgcccctgtgaaacctggtacaggtctcacagttgctgtcaagacgctcaatcatgatgggcttcaagggcacaaagaatgggtggctgaagttgattttcttggaaaccttcaccatcccaatttggtgaggttgattggctattgtgttgaagatgaccaaagattgctggtgtacgaattcatgccccgtggcagtttggataaccatctattcagaaggtctcttcctcttccatgggctgtcagaatgaaggttgctcttggagcagcaaagggtcttgctttccttcatgaagaagcagaaagaccagtcatttatcgtgattttaaaacatctaatatactgttagatgcggagtataatgcaaagctctcagattttgggcttgccaaagacggccctgtaggtgataaaactcatgtctctactcgagtaatggggacctatggttatgcagcaccggagtatgtcatgacaggtcatttgacatcaaaaagtgatgtgtacagctttggagtagtgcttcttgagatgatgtctgggcgcaggtcaatggacaagaaccgccctaacggcgagcacaacctcgtcgagtgggcacgccccctcctaggagagaggcagcggttctacaagctaatcgaccctcgcctggagggcaacttctctgtcaagggcgcccagaaggcagcgcagctggcgcgtgcctgcctcagccgtgaccccaaggcgcgcccgctgatgagccaggtggtggaagccctcaagccgctgctgaacctcaaggacatggccagctcctcctacttctaccagacgatgcaggcagagcggatggcgcactcgagcagcatgaacgggaggaccctcaagtcacagggccctttcgcggcacggaacgggcagcagccggtgaggagcctctccgacgggccccgcgcctccccgttccgctactcgccgaagccaaacatgaagtgatccggaggcatggacgtggctgtggctccggtaccccgggtgaaacatcgggaagtgatccggaggcatggacgtggccgtggctccggtaccccgggtgaaacatcgggaagtgatccggaggcatggacgtggccgtggctccggtaccccgggtgaaacatgtggggggggggggggttcgggttcttctggtgggaaacttggtgggggtggctggtttggggctgaaatgctggcgtcgaccctgaattgctgcttgttgtagattgacctgtgcacaaaggatataggttaaaaaaggaggtgtaggtatgaggatctcctttgtggatgtttttcgctgaggttttagctgaatgctgatggaccgttttctatatatgttttgtcccaattaaggtagctttgggtgattcccaattaaatcttgatagttagttgctctttgtaggtctggttgaagataaatgccgacttactgcccttcgaagcaaaa

SEQ ID NO: 43516 - DNA, 530 bp, Setaria italica
  Peptide Sequence Number=SeqID_109490
ccatgctcggcgccgccggtgccgtcatccccgaagcctgcaacaagttcggcgccaactgtggccctgaggccgtctggttcaaggtcctgatcaccacctttaagaatcttcatacttgagtagcaatctcttcccccaaaatgtgccggacaatcgcgcgcaattgaatttatgaaaaaggaaaagaactcaacattgtttcacaaagaccacacatttcagtggtagaatagttgcaattgcaatctctgaaactgaaattctgaactgtgaactaatggcggcgccaccgtaatacaatgcagaccggcgccctgctcctggacggcaacaccctcagctacttcggcaacagcatccccatcaacctggtggttgccgtcatcgccgaggtcgtcctcgtcggcggcgccgagtactaccggatcatcaacgggctggacctggaggacaagctccacccgggcggcccgttcgacccattgggcctggccagcgaccccgaccaggccgccatcctcaaggtg

SEQ ID NO: 43517 - DNA, 545 bp, Setaria italica
  Peptide Sequence Number=SeqID_109491
ggtctagtctggcatatgggctgattctttgagtcgtggactaatcgatttgaatataactgcctcaaaagaggtcgatctttcagatgtcggggttgttgggcaattgagcaatggatctgagggtaagggcctagctgttccatggttcacggggtcagggacgacagtgagcaccggctcaggtctgcaaagcaggtctgtttttccatcatccgcaggatccacgggtggaagtggtaatttccagcagcagcagtttggaaccttcacgtgatccttattcaggatattcgttatccatggttcttgaagagttgcaatatctgatttcctggatcatttatgcagtactgctcctgagtcctaacatctcgccaatcaggtgcttcggagatgaccagtaccagtattgcaaaatagctgtcatcttcgcccttgatgtgttatacttttgttatcttatttatatttagtttctattccttaaagtttaaatttttgtttattttgtttactttacttactttgtttgttaatttaaa

SEQ ID NO: 43518 - DNA, 517 bp, Setaria italica
  Peptide Sequence Number=SeqID_109492
ctatgatataatattttttttatataaattcatttctaaagtaaaaacactaggaattgtgtgtaataaacaacataataatataataaaaattatatttaaaaataaaataatacaattagtatttcccgtgcatatttgatagcgtttttacatatcaaaagaaactatagcatcacgatattccatgtaaggattatttataaaaatattgcattttcatctttaatttaaagtaatatagctataccgtattatcgaagttgttcatagaaacaaattctgtattggttttttataaaaaaaaaatacaaacgcttaaatggagggagcgaactagtgggcacgtttatttggtagcatcattaatgaatctttcatgaaaacaccggcaaaatatttcaagaagatgaacacgtgctccatatttcgattttttaaaatgaaaatttcgaattttcatttatgtactccattcaaagtctgcgcttgtcttgctttggacttcaaggccgcc

SEQ ID NO: 43519 - DNA, 503 bp, Setaria italica
  Peptide Sequence Number=SeqID_109493
cacatcaacaaaatagccgcagttctgaaggtagccgcgccttccacgccgccgccttctcaggcgccgtcacgggtggccccgtcatcgccacccagctgtcatctacgtccaacaccgacaccatctccttcccgaacgccgtggccatggctcgcaaggtggcgtccttaaccgcctcgccgtccctcccctcctcctccgcctccacgcacccaccgccgcagttcaccatcatcctcccttccggcgccaccatcccgctcagccgttgccatgtgtccacttcctggagctccggcagcacgctcccgttggcgacaggtccaccaaggcgccgccaaacccgccggcggcgcctcggcctcgagcgcgtcaccgacgtgtacgaacaagcgcgccgcgtggtccttctcgagctcggcgaggccgaagaagtcgcgggcgacggcgaggacggcggagtcgagctcccagccatgcacggagaggtccgggtagaa

SEQ ID NO: 43520 - DNA, 753 bp, Setaria italica
  Peptide Sequence Number=SeqID_109494
tgaacactgctcttctagcatgcttccaacagtagcaacctcttgcagtgatgatgcatgcgcagacttggattctagcaccactataacagttgacactgtcatagtaggccggaggttccatgagaacattgaattgagagaggatgcaggcattacttttctgagagatcctcagaatgctaaggactctgatgctataaaggtttccatcttttccaaataaaaatatggtaatacccccctgtagtggatttttcctaataccattggtaggtgctttatgcagcgtctgaatgtgagatgcttggatacttgcctcgggagcttgctaaagttttggctcctctaatggacatgcactatgttgaatgcgagggatgtgtggttggtttgcctgaacaacagcttggcaatgttcctatccagatcactatccagaaatgtaaaattgacaatcagataaatgatgatccggagtattggcagtccttatgggaaaagttcatcagcaccgttaaaagtgaaaattttcagcgacctagcagtgcaagatatcagagaaattttaattgatgatagcagatgtgatggccaaccatgcacatgtttttagtgatatagaaagatcatttttagcttctttcaagtcgttatcagatgatgggcaacggctttttgttaggatctacactcgaaaagggccatggttccgaaagagtaccatctcgtatcgtgagatatcagatttgg

SEQ ID NO: 43521 - DNA, 237 bp, Setaria italica
  Peptide Sequence Number=SeqID_109495
tgttgagaagaaggtgctgctgttgagacggattgcacaagagcaagagcaagatggaaaagtcatcaaagattgtggcaaaatgggattcatttgccgtgaaagctttcaatgacatttgtgtggaagaagtacttattttcaattggccgcaacaatgtttgaatgtggtgggatatgcaaatcttgtcagaaagttttatgagcgtaccaagatgccataaaatgagactcaaa

SEQ ID NO: 43522 - DNA, 393 bp, Setaria italica
  Peptide Sequence Number=SeqID_109496
atttggtcgatgcatgagttgaaagttcaaagtagtaaatatttagccacttaacaagttgttgatcacgttagagatgagattggaagtatgttggatcaagtcatcaaggatgaggctgaggaggggagtgatgaacacttctatgccacataacttctttaaaaaaggagaaccgtgatgtgttcattacattgaagacatcaaatggaaggttgaattggctgaggagggcttgggagataaggaagaagcactagggtcttgcattagtgtgccatttctcttttgttcttttatgttcctaagtatgctgtgtgagactatgtaccttttatcagttgtgttgtaccaataaaaattcatctaattatctggttagtactttttgac

SEQ ID NO: 43523 - DNA, 1066 bp, Setaria italica
  misc_feature (27)..(27): n is a, c, g, or t
  Peptide Sequence Number=SeqID_109497
gtttggccctgtgtgctgacccctgcngttttctcgcaggtgctggctcccccccaggtgttgctgttgagaagaaggtgctgctgttgagaaggattgtgcaagagcaagagcaaggtaaaattgctgtgaatttttttgatggattgcgcaaatggcagattgtggattgcatagtagtacttcttgattaatgatgctctcagttcatggtcattaaacaagattctagatttatatttgattgtgattgtgcaagagcaaaagcaagatggaaaagtcgttaaagattatggcaaaatgggattcatttgccacgaaagctttcaatgatatttgtgtggaagtacttgctttcaatcggccgcaacaatgtttgaatgtggtgggatatgcaaatcttgtcagaaagttttatgagcgtaccaagatgccataaaagaagactcaaatgaagaacaagtgggatatattgaaaaacatgtatactcaatggaagactttgaacttgagagcaaccgaattgggaagagatcctgttactagttgtattgtggctgataatgaatggtgggaataacaaaatgcggtgagcccactaacactcccgattagagatagttcacatacacattgtttgttttgaacagaaggtctaatggcatactgttttggtgatattttacaggctatgtaaggttgtatccggttcagaacagccccgcttgagtacgaggatcagatgcgaatcatgtttgaatctgtcattgttacaaatgagacttcatatgttccaagtggtgatggcaatgttgatgttgatgaacatgatgttgctgatgttgggggcaacagtgatagataggcacctaaggtcccaacaagtgaaagcatctaggcctctaacttgtgttttggtaattaataacgaccttagtggactaacaatttcattgagaatatgagtataggttagtcctgaagttgagttgagcttcaaaggatactatgacgatatcttggttggtttgaacgttggaaagctcaaggcaaaggtatacgatag

SEQ ID NO: 43524 - DNA, 1359 bp, Setaria italica
  Peptide Sequence Number=SeqID_109498
gtagcctgccgagcagatcccgtccgcccccctgatgctatgttcctgcaggtgctacttccgtcggctcccctcaggtgctgccccctccttccgcctgctattgagaatgtgctgctgctgttgagaaggatacctacgtgtcaaattttactggcatcatttaccgccgaccaagagcaaggtaaaattgttgtcacttctttgatggattgcgcaaatggcagattgtgggttgcatagtagtacttcttgattaatgctactctcaattcatggtcagtaaacaagattgtagatttatatttagttctacaatattgtaatcaaattttgatggaaaagtcgtcaaagcttgtggcaaattgggattcatttgccgcgaaggctttcaatgacatttgtgtggaagaagtacttgctttcaatcggccgcaacaatatttgaatgcggtgggatatgcaaatcttgtcagaaagttttatgagcgtaccaagagaccatacaatgagactcaaatgaagaacaggtgggatatattgaaaaaaatgtatacccaatggaagactttgaacttgagagcaaccgaattgggaagagatcctgttactagttgtattgtggctgataatgaatggtgggaagaacaaaatgcggctatgtaaggttgtatctggttcagaacagccccgcttgagtacgaggatcagatgcgaatcatgtttaaatctgtcattgttacaaatgagacttcatatgttccaagtggtgatggcaatgttgatgttgatgaacatgatgttgctgatgccgggggtaacattgataaggaggcactaagaccccaacaagttctaagcggagggctgcaaaaaggccagctcctagttcccctaaaggaaagaagaagaagacttttagagaccaatgcatgaagcatttggtcgatgcatatgagttgaaagttcaaagtagtaaacattcagccacttcacaagttgttgatcacgttagagatgagattggaagtatgttggatcaagtcatcaaggatggggctgaggaggggagtgatgaacacttctatgccacacaacttcttaaaaaaggagaaccatgatgtgttcattacattgaagacataaaatgggaggttgaattggatgaggagggcttgggagataaggaagaagcactagggtcttgcattattgtgccatttctctttcgtttcccttatgttgtgtgagacattatttcaatttcctaagtatactgtgtgagactatgtatcttttatcagttgtgttgtaccaataaaaattcatctgattatctggtttgtgctttttgacata

SEQ ID NO: 43525 - DNA, 581 bp, Setaria italica
  Peptide Sequence Number=SeqID_109499
ccagttcgacttttttagttttattttaaaaaaattcgaactaaataatataagaataaataaccgataatagttgtgatacaaaaaggaacaaatagcacttgaattttcttgttctaaacttatgtctgactgaacttaactgaactgaagttctctatacaccaaagatatatgggatgatatgtgatatccctgcacctacaatcctcctctgtccctctcaaactcttcttattcacagccaattaaccaccaatcccaagcctaaatgctccaaagccccacccatcaccttcaatccaatccctttcagcaccaacggctggaccgacaccgacaaaccataattcagaaaattcttgccagcttaccacactcttcacgcatgtcgccatcaaccaagaacaatattagctaaagcatgacaatgaccacgtacatcggtgaatctggcagccaatgccggggagaggcgaggggcaagagcgaaaccaactatccttcgaatttccttccttctgagattctgtcaatgcagcggagggggcggcggtgatccgagtagttggaaccgggta

SEQ ID NO: 43526 - DNA, 462 bp, Setaria italica
  Peptide Sequence Number=SeqID_109500
ttaagctcagggcatttgcaatagcaatgacagaagtaaagaataacagtccacgggtgctgcctatagatatatgcctgctatttttagtagatgtatttggtggtgactgctctgtgcttggctcttttgctccttggtacacatgctctacatgcacatttttgacaaaaatgtagggtgaaagtttctgtgtgagtacttcctcctgatttaagtagcagcataattgccttctgtgttttgtgtgttttcttatgaatgatgatttgaaatgattgccagcttttttatatggtatgatgtcatgctaagttccatggaccataagttttttttttacattttttagaggagatgttgtcatcagtgatgacttcatcaataataactggatatgacacaggtgcggtaggtaatctgtatttgctattatactaaggtttggtttgttttctgaag

SEQ ID NO: 43527 - DNA, 328 bp, Setaria italica
  Peptide Sequence Number=SeqID_109501
aatagacctatgcctgtgtgaccacatgcttcaagaaaagcaggaactggcagttttatacaggaatggacattttcttcttattcacgtgcacgaggacacattgcatactttgcagacagacttagatctgaggaccatccatcctaatgctcaatggcaaatattggatgatgtgcacggagacaatttcttgtgacgggcaatttccgtcctatcaaggatgaagatgaggataaagtgagggcactttatcttcaaaatcggtatcagtgtagaattcgaagatatgagagggcatctagaaaaacccttagaaaaccttgcc

SEQ ID NO: 43528 - DNA, 342 bp, Setaria italica
  Peptide Sequence Number=SeqID_109502
aatgtggcaaaattgaccctagagactgcaaacagatggcaggaacatctgggagatatgtgaataatccagcaatggattcttcaaagaggtattacaagagtaaatttcaatatggttcaaagaagccaccatactttaaagaggagatttgtgatagtggaccaaacctcaaggagatggaaagttcatccaagcatcatgatccacatgtcacaggacttcatagaccagttcaagaatcctcaccatgcgagtccattgaagacagtcctagagttttgaatccagtagtaaagaagagaatggcttctcctaaaaaaaatttcattgttgcggacc

SEQ ID NO: 43529 - DNA, 1709 bp, Setaria italica
  Peptide Sequence Number=SeqID_109503
gttcggcgtgctcataaagcgcgctttatttgccttctggtaaattgtaaaaataaatacaacgtttggcccttgtcaagatgaaaacttcatttacagaagcagacaaattcccattgatcccgggatggactaaactgtaagaattaggcttggttgcaacccaatgcttaaattatgatgtacacagcttcataaggaaagtcaatgaaaatggttagtagagtttccttttaagtacgaatatgtgtacccacaccttgaaatgactggtttctgatggcgtttactaatgcacaatcagacgaagaaacttgtttgagcatcctgagaccaaccactgactttgtacagttgcaccaacattttgctgatattccctaactagtctaaaacttcaccaaaagtgaaccagttattgagctagaaaagagatgcaatctgatttcaactgaagatctccacatgatgtcaaaactgttgaaagcacaaagtcatcaacatcatacccttcttgctgcattaggtacatgtattttaaagcctctttgcagagtccattctgggtaaatcctgtaatcatcactttccatgttactaagttgtgctctggcatggcatcaaagactcttcgagcttcatcaactttcccacaccgcatatacatatcgatcagtgagcatcccacaaatacatttgagaaagcttgggtcttgttaacaacaccatggatcctctttccatcccgcagagcctccaatctggcacaagctttcaaagctgacgaataagtgtaagtatttggtgtcacaccatcccataacatctcatctaatgatttaagcgcttcaacattatggccaaggttgttgtagcctgaaatcatagctgtccatgcgacagcatcacggtcaggcattgcttctagaattcttgcagcataactatgctccccacatttggagtagaaccaaacaagtgtactcccaatttgaagattatctcccatacagttcttcattatctgtgcatgcagttcctttccaagatacttagactgcatagagccacaagcactaaggagaccaacaatagtgaggttgttaacaaatactctacgcatcttcatcttccggaacaacaagacagcttcttcaccatagccactttgcgcgtatccagagatcattgaagtccatgtaattgtgtttcttcttggcatcttatcaaatactgcctgagcaccaaacacctcaccacatctggcatacatagtgacaagagcactcccaacatggatatcatatttgtacagcttcttcacaacagcaccatgcaactgcttcccaaatcttagagccttttcctctgcgcaagccttgaggacactgcacacagtgaactcattggggcgaaatccctcggccaccatcgttgggaacatctgaagagctttgtcaccatgcccatgctgcacataagccgtgatcattgttgtccatgagacaacatcgcgggaggccatcctatcaaacacagttgaagtggcggtaacatctccacattgagcatagaagtgcgcaaccgcactgtccactatcacattgctccacccacccttcacaatgcaacagtgcacctgtcgccctagcttagcatcgtcactgctccccacaagatttcaacaggcaaaacaaaagtcaagctgt

SEQ ID NO: 43530 - DNA, 570 bp, Setaria italica
  Peptide Sequence Number=SeqID_109504
actcttcagcttagggaagcctcaaacatcccaacacttgagataaaacatcacttgaaggtactagcccagttgaaactgcctcacgatacaccataattgctgaggaagtccatttgttgtcaatttgtggtttccctaagctgaagttgacaataatattcccaagcgagagatcactgtcaaacatttgtagacataaaccagtcagagaaccaataatggtaggattgatgccaatgccatctatttttaattgttcaaacaaatccaaacctagttgtgcttcaccgtttctttcgcaagcaacaaataagacagaatatgttatctcatttggacagattcctattcctttcatctcattaaggacatcaacagcctttaggacctgatcaccatcacacagagaggtgatcaaagcattcatcattgaaacagttggggttaatttgatagacttaatctcctcgtatagctgcagtgccttcttccagtcctttgcattgcagcaagcacccattaatgaactgtaggcaagtctacccacgtgtaattccttttgctctt

SEQ ID NO: 43531 - DNA, 1136 bp, Setaria italica
  Peptide Sequence Number=SeqID_109505
ttttatgcatcctgtttacaaaatttgatgtaccttggtttccttccttttgaataatcttttcacagattactatataaatgtagtattttttatttctttccctgaacaaactcttaagacattttactatcctggacatgttctcacaaaggttaccgagatcggttgctgctggattgtcctgcactactcgagcgaaaggcttctgatgtcgcgttgctgatcagcaatcccttttgctaaacgcgacgatagaggaagcaaatcagctggcgcggcactggaggatttgctattcaactttggattgaaccatctccttaaggtgaggccattgatcctcatcctcccgtgcgactcctccccctggtatgaaattcctaatcgcctcaggagagaaccgattgcttgaccaattcttccagatagctttagtgttttttctctttcatcaatgtcaacctgtttcttttctgtgggtaacaagattgtcacgtttggtaatcttgcacctgcagcgagtcgatgcttcaaagatctcaatgttgtaagaagagaaacctcggcactgtagatctttaactttcttgcatcaataacaatcctggtatctttcatggaaatacttgaaactgcacctaatgaagcagcctcctccagcatcgaaaaagcacggatgtcatattcaccgaatccttcaaagagtgaatttatatttggattatgtggaatatcacaacttattcccatgttttcaatgaaactactcttcagcgaattgtcatgaggaagcctcaaacatcccaacacttgagataaaacatcacttgaaggtactagcccagttgaaactgcctcacgatacaccataattgctgaggaagtccatttgttgtcaatttgtggtttccctaagctgaagttgacaataatattcccaagcgagagatcactgtcaaacatttgtagacataaacctgaagagaagttgtgtcagcaggtactttcatcaaatatagaacaacagcggcacaaacaacatatcatttttgtcccaagcaagttgggataggcttgttatcaaatatagaagtggaagagataaaaggactccgagcaggcatacacataag

SEQ ID NO: 43532 - DNA, 634 bp, Setaria italica
  Peptide Sequence Number=SeqID_109506
tgaggtcgaggcttgctccggcgcaggctgggtttcgccggccggtgatcgtcgatatctgacggctgctgtagcgaaggccgcacaggaagctgacgtagtcgtcggccgccgcgtcgtacacgagccccgggtccatggcatcgttggggctgacgtggccgccgccgaagtccagcggcgtccccggcgacccgctcggcatgctgacgatgacgttgccggcgttgtccttcacgtaggccgtagtcatcatcgccgaccggatcgccgccgggctccagtcggggtgcgccgcccgcagaagagcggccacgccggcgacgtgcggcgacgacattgacgtgccggagacgagcgcgtacttggtgaagaccttctccatgatctccttgttgggcacccaggccgcgaggatgtccaccccgggcccgaccacgtcgggcttcaggatcgtcgggctgatctggcccggcccgcgggccgagaagtaggacacggccggcgccggtttgacgccgagcgccgtgccgccgaaccggagactcgccgtgggcgcccgcgcccctctgcggcccccatacgccgccgtcatgtacttggcgatggcggcgccgtccgacgcggtcaccag

SEQ ID NO: 43533 - DNA, 470 bp, Setaria italica
  misc_feature (410)..(410): n is a, c, g, or t
  Peptide Sequence Number=SeqID_109507
aagaagtaacacggtgccgtctctggagctgctggagcacaacctcgaggctgccatgcacaaggtgcgctccgagaaggaccgcaagatcgggggcgagatcacctacctcgagaacatcatcaggggcggcaggaggagcgctacggattgtgcgacaaggagtttctccgcacagaatataccttaccgaatctttgagtcagacgcactgattctctttctctgaactactcagcactgcaccagtgctggatggctgggcagtcagaagtaactttgaatcactgctcgataatgaccaacacctgctgtttgctggtacttgggttaatgtgcggcttcctcctaagatccaggctaacttttcaagcagcaatgttattgattaattaaaccaaaaaaaaaanaaaaaaaaactaaaaaaagagaactagaccaaaggacaacaacaaggggaagtaaggaga

SEQ ID NO: 43534 - DNA, 1093 bp, Setaria italica
  misc_feature (10)..(10): n is a, c, g, or t
  misc_feature (1092)..(1093): n is a, c, g, or t
  Peptide Sequence Number=SeqID_109508
cgccccaccncttaaagcaagcaaggaagcacgcacggtctcgctcccctcgcccacaccttcccctcccaaactgttacatcccgcgagctgctcgcagtagtagcgccggccgggccgatcgaggtagcagctcggcagcactagctcccgcggggtttccatattctcgcaacgccgcggcggcgggagtttgggaaggagtcaaggcgggagcgagagaggatggggaggggccgcagcgagatcaagcggatcgagaaccccacgcagcggcagtccaccttctacaagcgcagggacgggctgttcaagaaggccagggagctctccgtcctctgcgacgtcgacctgctgcttctcctcttctccacctccggcaagctctaccactacctctcgcccaccgtgccctccgttaaggatctggtcgagaggtacgaggccgcgacgcacaccaagactggacagacatccgccaggagcgtcgcgcggagctggagaaggtggagcagatgtgcgagctcatggagaaggagctgcggttcatgacggtggacgacggggagaagtacacggtgccgtcgctggagctgctggagcacaacctcgaggctgccatgcacaaggtgcgctccgagaaggaccgcaagatcgggggcgagatcacctacctcgagaacatcatcagggggcggcaggaggagcgctacggattgtgcgacaagcttgctcattctcaggccctgaacaacgaggaaggagggtcgacctcgctaagcaacggcctggaactcaagctggggttcaactagcaatggatggaagctcgagggtggagtggatggatccgaagactacgctctgtttcttagttctgttgagtcccagagtcatgttaggttaacagagtctgttgtctttcgaggctatgactatgagaatgctaatatcagagtatctgaaggctgtggcaagatagttgaattcttctgtagttgtcctagatctagtctcagcatgtcatcatgtattaatcagacaattggggaaattatctctactgctgatatattatcactagttctaggnn

SEQ ID NO: 43535 - DNA, 1199 bp, Setaria italica
  Peptide Sequence Number=SeqID_109509
aaaactgttggttgttgggcattgacagaaccagattatggaagtgatgcaagctccttaaggactgcagcaaccaaggttcctggtggttggcatttagatggccaaaagcgctggataggtaacagcacttttgcagatgtgctcatcattttagctaggaatgcagatacaaaccaactaaacgggtaatcatcttccgcacccccccctctccctagccttgtgttgctggtactgttaatattattcttgttcatctcagtatgaagctatgtctattgctgatcagtgaaaggaataccttgcttgctgacaatgaatgtgatacactattttagatttattgtgaagaaaggagctcccggtctaaaaagccacaaaaattgaaaacaaaattggactcagaatggttcaaaatggagacataattctaaataaagtatttgtccctgaggaagacagattaacaggtatcaattcatttcaggatataaacaaggttctcgctatgtctcgcattatggtggcgtggcaaccgataggcatatcaatgggagtttttgacatctgccatcggtatttgaaagaaaggaaacaatttggagccccgctggcggcctttcagctcaaccaagagaagcttgtccgaatgcttggcaacattcaggccatggttctcgttggctggagactgtgcaagctctacgagtcaggcaaaatgacatcaggtcatagtagtttaggcaaggcatggacatccaggaaggccagggaggtagtttctcttggacgagagctattgggtggcaacggcattttggctgattttctagtcgcaaaggcgttctgtgatcttgagccgattttctcgtacgagggcacctatgacataaacagcctggtgaccggcagagagatcactggggtggcgagcttcaagcctgccatgttagcgaaatcacgcctctgaagttattttcccgtttcccttgagttgatgtgttaagtagtggctggaactgcaataggatggtttgtgtgcttgaatgcctgcaaactttggctgaatgcccaattggtgctgtaaacggtttgtgtcatttgtgtccgttgcgatgcccaatttgtgatttgtagccccaaagtgtaggaatacgagaagcaaaagagtgatgttgatatttaaaaaaaaaaaa

SEQ ID NO: 43536 - DNA, 498 bp, Setaria italica
  Peptide Sequence Number=SeqID_109510
gctctctggaggccagcagaggtagtagactggttgtttgggcctcttccaaaacattaacacctcatggattcgcaggcccagttggcccatacacccacataacaggttgttcacttgttcctgttcctctttcttcttcgttcaacgccattattgacggactcacacagccacgattcaacgcccagattcaccgatgaagaggggggaagggtcttcaatctactgggtagctggggcagctgccccagcctgctgtatggggagctctgcctacggcgatggatggtttgtgctaagaaggttacagctcatgaaactcttgactttctaagaaatagctaagaaataaaggcaaaagccagtttgatgtaactttcccattcggacctaaaaaaaatcagctactttttggaacagtggagaaccgatatatgtatttgtcattcatgaaactgtacaagtatgagtggcaggtcctgtcagttgtggcgg

SEQ ID NO: 43537 - DNA, 227 bp, Setaria italica
  misc_feature (219)..(219): n is a, c, g, or t
  Peptide Sequence Number=SeqID_109511
taacctagttaaagtttaacatccgatgtgacactgttaaagtttagcacctcgtatgggtggcatccgcggtcatgagctctggagcacttttaaaaatttgggattggtgttgttgtgcaatcttgtcatcatcaaagctgctattatctcatgtagtacgtgtgatgatggcattggtccatatcgtcttgtcgactgttgtcaaccgtcagggancacggcca

SEQ ID NO: 43538 - DNA, 604 bp, Setaria italica
  misc_feature (577)..(604): n is a, c, g, or t
  Peptide Sequence Number=SeqID_109512
gacgcctgcgtcgccgtcgccggcggcaagacccgctgcggcgccaccgtcggcaccgagggctccgccggcgccgccgccggcgactggtacaaccaggagctcgacctcaccctgcagcagcgcatgcgctgggtgcagcgcaagtacatgatctacaactactgcaccgaccccaagcgctacgcgcagggcctccccgccgagtgctccatgcagcagtagccctctgcatcaagctccgctgcaatggcggcggctgcatcgatcaccgcccggatcaggacgaaagggcatggaatttctttccatggtggcgtcgtcagtgtggtaaataaataaggatttggcaattcgtgggacttgtaacgcggtagctggtggtaaattcttccgtcttgtctgtagcctctctctgcttccgccaccccctgttcgtgtcatgtaatcatcaaacacttggtgttcatgtccgtctgtaatatatcaaaacccatacgtgttcttcacttgctgctctgtgtacgcgtaacatgtgctctcctttatgcattggaagttgtgatgttaaaaaaannnnnnnnnnnnnnnnnnnnnnnnnnnn

SEQ ID NO: 43539 - DNA, 1411 bp, Setaria italica
  misc_feature (17)..(17): n is a, c, g, or t
  misc_feature (26)..(26): n is a, c, g, or t
  Peptide Sequence Number=SeqID_109513
ttatccatctgaaccanagggatcanacggcgcttacttaaccttacccacttaaatggtactgtagtaaatagtaatatacaccagaagcatgcatgttccctgccggcacacccttgacatctgttgggggaggacgcgcgccggtcagtgcttgcggtggatggtggtgccggcgtcgaggacgtcgcggtcggcggcggcgccgggcttgtggtgcagcggcgccggtactggctgcatgagcgcgagggcgcgctcgaactgcgcccaacgctgctcgagcgtgccgttgtagccgacggacatgcggacgagccccggcgagatcccggccttggcgcggtcctcgggcggcatctcgctgctggtgctgctcccggagcaggacatgagcgtctcgtagtaccccaggctgacggccatgaggccgaactgggtggtgttctggaggtggtgcatgaggcggttggcgcggtcctcggtgcccatgtcgacgcagagcataccgccggagccgtagcccgggttggccatggcgctcaggcgggcgtggtgcgggtggtccgggaggcccgggtagaggacgcgcaggcccaggcgctgcattcgggacgcgaacgccagggcgcggcgcgagtgctcctgcatgcgtagggggaggtgggggaggcgctccgagagctcgaaggccaccttggcgttcatcgtcgggcccagcagcatcagcgcgccctcctgcaggtccatcatcgcgttcaccaggctcgccggcccgcagatggcgccggcgatgatgtcggcgccgccgctgatgaacttggacacgctgtggacgacgacgtcggcgcccaggcgggccggggtgacgacgacgggggtgaaggtgttgtccaccacgagcttggccccggcctcgtgcgccacccgcgccagcatcgggatgtccgcgacggccagcgtcgggttcgacatcgtctccacgtacaccacccgcgtctccccgggcaccacggcggcgcgcacggcggcctcgtcgtcggcgtccacgaacgtggcgcgcaccccggaggtccgcggcaggaacgtggacagcagcgcgtgggtgccgccgtacaggcacctcgacgccaccacgtggccccccaccccgaccagctgcatcagcacggaggagatggcggacatccccgacgccgtgcagtaggcggcctcggtggcctccagcgccgccatctgccggcccagcgccagcaccgtagggttgaagtgacggctgtagatgtacatgtcgccgcggtcggggccgagctccccggcgaagagacgccgcatggtgtccggctccatcaccgtgaacgtcgccgacgcctcgatggacatgttcacgccgccgtgctccccgaactcg

SEQ ID NO: 43540 - DNA, 481 bp, Setaria italica
  Peptide Sequence Number=SeqID_109514
ccttcttcttctctcctcgattggcaccgcctaccactactcctcttccatcccccttatccaggaactccgccatctctcctatcttcagaaccggtcctccaaccctttccctcctctcccatccaattcctcctcctcttcttcttcctcatcgtcactcaattcctcctcctcatctgtctcctccaactcctccttgaactcatccaattcgctaccttgtccgtcctcctccgactgctcctcctcggcatcagcaggcgtctccacaggaagagccgcctgcggttgcggctggggttgctgctcgaggcggcggagctggcggcgcaggtgggggaggagtgggcgggagagcagctctatctgggaccaaatctgctcagcatcgaaggcggggtcccgtcgtggagggtagggagcgggggcgctgcgcgggggagagcggcgcaagcgaagagtagatgtgctgcgacgg

SEQ ID NO: 43541 - DNA, 538 bp, Setaria italica
  Peptide Sequence Number=SeqID_109515
aagagtacccttggttgctctgagagtgaagttgcaattgcagtgtccaagatgccatgtattctaggatactctgaggagaaccttatccgcaagattcagttcttgatcaaagaggttggaatggagcctcagcacattgttgaaaggcctgccctgttaggactcagcctggagaagcggctagtgcccccgacattgtgtcatgaagatgctgcaggcaaaggggttgactagcaatttaagcttttcttcattagctaaacttatagggaagcatttcagattgaagttcatcgactgccatgaggactctgttcctggttttgcaggttattatgctgcagcttgtgctggtgatgtgctccatgaagtccaactatcatcctgaaatatttaatattctggatatcattcaggtggattgtagaattgcaactcatgctcatcagcaactgtccatggtcttttttcagcaatagaactactgcttatctttaatggtcatagtccaagtttaagtcattgttatctatga

SEQ ID NO: 43542 - DNA, 422 bp, Setaria italica
  Peptide Sequence Number=SeqID_109516
catgattttgtatttttagactagaataacttaaactaaattggtcctgcccttcttttagataaaccgagtggaatacatgcattccaagggatttattcaccgtgacatcaagccagacaacttccttatgggcttaggccgaaaagctaatcaggttttgccttacaacccatctcacccccacccccacccaagcgcacacacaatgctcgttttatcttcttgttttcagcgtgaactgaatgcagtaatgagtttcctaagattatccccaagattcttattcatcagtgagctaacaatgagatgtatccttttgattctgcaggtttatataattgattattgggcttgctaaaaaataacaaggaaccttagactcattacaataaaacaataataccctaacaaggtagaaa

SEQ ID NO: 43543 - DNA, 712 bp, Setaria italica
  misc_feature (1)..(25): n is a, c, g, or t
  Peptide Sequence Number=SeqID_109517
nnnnnnnnnnnnnnnnnnnnnnnnnaggcaccccaaaggcaaactttagtatttacattaatcgcactaacagcagtgtcaatctttcatacatcagatcagatacatatacatagaagcccagttcttattctccaatcaccatcaccatatggcaattttgcagcaaggagtcgagaacaatatgttcttctccttcatgagcaaatccgatcttcaaaatgatcggatacacacaaatcccacgccatgaaacccgaaggcccctcttctctttttgttgattctacaacctctaatccttaaattagtagcatgaatggaatgggaaagatcgcgtctctgttggtgatcaagaacagcagttagcgcagcgtaccaatccgttctcgttgcactcgccgcagcggacgacgcggtcctcctcctcgacgaagaccttgcggctgccgccgcagccgatgcaggggacgaaacggacgccgccgcaggcgtcgcagacgtaggccggatcctggcccgctgcgccctcgaggagccgccggagctgccccgtctcgtgcagttgccgcacctcgtccgcgccgccgacgaggcggccgccgatgagcagctgcgggagcgagaaggcgcggccgcgcacggcgagcaacgcctgtagatccctgcggaaggcggcgtccatggacacgtcccgctcgtcgacggcgac

SEQ ID NO: 43544 - DNA, 843 bp, Setaria italica
  Peptide Sequence Number=SeqID_109518
agggaaggcttaccttgagacttgaggcagcatggtttgacaatatgtccatcacttgaaagagcactgctttgatatcaagaattcactcaaaaaatatatatctttgaaaatataaataaaaactacatgtaaattcctaaagtgaattcagcttcacagtatttacttttgcagttcgttgattattgatttattctacaaattacgatattaactaaacatgcaactcataaatatgccagatattctactagagaatagactgtaaagttgtgttttcatcgtttatcaatagctcgactgcaagataagctaatatactaacataattaggtttaataaagtgtcacatccatcttccgtgataaacacatgaataaaaaggggaaaaagaaaaaagaagaacacaattctggccttaggttagattgcctgcaacaaacccgatgctgcatccagacccagaatttggtaatttctatcaatttctgtagaacaaatttgaatccatcattaacactttcagcatccctgcatgattaaaattacaaaacatgtctggatattaacaagagtcccaactcccagctcaatgaagtggaacgaagtataaataattttcacatttgtactgatcatattcaagcagggtgcctactggagacagttaggacttagaatgtacaaatgtgcactcggatatggttggagaaactcttgtgaattaatgacagaaaaggttgatgacaaacagacaaggtcatagcaaccgatgcacaggaagttgtagcactgagatgagtacaaaactatatgaagtacggagatcgaaatgtacac

SEQ ID NO: 43545 - DNA, 478 bp, Setaria italica
  Peptide Sequence Number=SeqID_109519
tgggttcttgtgatagcagagcaagaaagtatgtttgaattaacttctatctgtttcttatgtctaatgatcctaaaatacacctgtgctctcccgttaggctcagcaatgaacaaagggctgcggttgctgactactttcgagtctacaagggtggtgaaaacgcactgaagaaagtatccttggctgggcctgtcctccatcctttccttgcacagtcgtacacagatgttcttgaaagcttctttgaagataagttgctacttagccaacaactctttgcaccagaggagagatatcagaagatacttgatcttatccctgatgaaagtaagaaaagacaccataagaaatgaaccttactctctgatgtagatgaaatctaccatccttcgactagcatgagcatggcataagatatattaaaagggtaaaataaaactgtacaaggacaaaagtccaaagggcacctcaatcg

SEQ ID NO: 43546 - DNA, 754 bp, Setaria italica
  Peptide Sequence Number=SeqID_109520
tgggtatacagtggccgtcgtggtgtccattgctgggtctgtgatagcagagcataaagctcatcaatgaacaaagggctgcggttgctgactactttcgagtctacaagggtggtgaaaacgcactgaagaaagtatccttggctgggcctgtcctccatcctttccttgcacagtcgtacacggatgttcttgaaagcttctttgaagataagttgctacttagccaacaactctttgcgtcagaggatagatgtcagaagatacttgatctcatccctgatgaaaatgttgctagtgagctccatgacaagtggcagagaaatagatcaacatctatttcaaaggaagatgtcaatgcagccagatggaagcaattgaagacgaccttacagtcaggaaagcacaaggggcttcggagatgtgtggaagagattgtcttcttatacacatatcctagacttgacatggaggtatcaaagcacatgaatcatttactaaaagctcccttttgtatacacccaaagacaggtcgtgtttgtgttccaattgatcccaataactgcgaggattttgatcctacagctgttcctactctatcacaacttttaggagagctcaatgctgctagttttcagacagattctgaaaataattgggaaagaacgtcccttgagaaatccatcaggtttttcagaacttcgttttcttgtctaaccgtcttgtacaaaaattagttccctttccacaggta

SEQ ID NO: 43547 - DNA, 713 bp, Setaria italica
  Peptide Sequence Number=SeqID_109521
ggccgcgcgtcgttgaggaacggagccgccgaggcgacgacgtcaacggcgccgggctcgagggtgtggtccgggtgtgctcgaggtcgagggcgaggtgagcgtgagcatctgagctcctgtgtcctgtcttgatctatggcttgcgctctgttttactactactactactacttgatctatgtcttatgctctgtaagattgatctatgttttgtgctctgagcctctgataatactactacttgtgattgatctatgtgttgtgctctgtaagattgatctatgtttccaactcaagtacaatcctgatggctctgtccatatgtgggagtacaatcctggaactctggtcaaatcgcgtatttcacgctgaggtgttgatgggctgggccgataatgcatgaaaacattgctttagttagaaaacaaaactaagacaacaaggcccagatcctaagcgaggcccagaaccagagtgccagtggcggctttttggcgggagtggcgccctccttcccaccattccccctcctcttttccccttcttctgttccgcatccttggcacaactcgaggaacgaacaccgtgccgctagcgcccgcaccgcgccacagccccgctccacccaccagcacctcgccttgttctctccactcggtctcgtgcgccgtcccttccttttgccgcctcgttaggaattaccgtaaaga

SEQ ID NO: 43548 - DNA, 1193 bp, Setaria italica
  Peptide Sequence Number=SeqID_109522
tgtcaggttcttccttaagggggccgcgcgtcgttgaggaacggagccgccgaggcgacgacgtcaacggcgccgggctcgagggtgtggtccgggtgtgctcgaggtcgagggcgaggcacgggcagtttttgatctgaggatgggaagggacgatgagcaggttgacccaatggagattgactgccagcagaagctacaggtagaagcctccactgccgtgccggaggggttcaatgccgactacctccgagtctactatggaaagctgttcccatacggtgatttctttaaatggctctgctatggaaatgatggaaagcaccctggatgtgatcagtcatatgttggacgtcgggagttttcatttacactagagaatgacatctacctgcggttccagtcctttgatagtgcttctgaattggagagttctattaaggagaagtgccctttcaagattgatattgggcctgtctacagcgtagatcctgcaaagcgtcatgcttatgcccaatctggcaataatgtctttgtacctgtggaaagggaactaatttttgacattgatatatctgattatgatgatgttcgctactgctgctctggagctgatgtctgcttggactgctggcccttaatgaccattgctatcaaaattctggatacttcgcttagagatgattttggtttcaatcacatattgtgggtatacagtggccgtcgtggtgtccattgctgggtctgtgatagcagagcaagaaagctcagcaatgaacaaagggctgcggttgctgactactttcgagtctacaagggtggtgaaaacgcactgaagaaagtatccttggctgggcctgtcctccatcctttccttgcacagtcgtacacggatgttcttgaaagcttctttgaagataagttgctacttagccaacaactctttgcgtcagaggatagatgtcagaagatacttgatctcatccctgatgaaagtattcccttgtattgtaaaatttgtttgttctttagttaagaaaagacaccataagaaatggaaccttactctctgatgtagatgaaatctaccatccttcgactagcatgagcatggcataagatatattaaaagggtaaaataaaactgtacaaggacaaaagtccaaagggcacctcaatgcccaaaaaggaaa

SEQ ID NO: 43549 - DNA, 1316 bp, Setaria italica
  Peptide Sequence Number=SeqID_109523
caaatttagtttattttgatgagtcaactttactattctaagaactgctggaaatttttgtcacacaattgcaccttattgctgataaatgattgttgtttcttttttatttcatcagattgtatatattccaatttctcaattacagttgcatctgctgattcatgctattatgttcaataatattactaattgttatatgcttcattcaggaaagcacaaggggcttcggagatgtgtggaagagattgtcttcttatacacatatcctagacttgacatggaggtatcaaagcacatgaatcatttactaaaagctcccttttgtatacacccaaagacaggtcgtgtttgtgttccaattgatcccaataactgcgaggattttgatcctacagctgttcctactctatcacaacttttaggagagctcaatgctgctagttttcagacagattctgaaaataattgggaaagaacgtcccttgagaaatccatcaggtttttcagaacttcgtttctgcaaccgctgctgaaagcgtgcaaggaggaactggaaagcacgtacaatgcaaagctccagcagtccaagaattccttgaattggtaaaatctacatgtgcaggcacaccacaactcggtaggccagtaacccatatttccacctgtgcgacctcaatcagcacccaccaagagtatttcaactgaacacgaagctctttgcatggaagaatagtcgattattccatgatgctgccagttggtgttgtgcgtcccgaaattgtaccatgtcagttccaagctatagccatcgagtgcgatcagagttttcttgtacttgtgaggatttgctgatgcctacctgtaggcatatgtgggtttcattgctggtcgacggtgccaaagctataccctgtaacttgggctatatatatgttgagcaattaaatttaaagagagaatccagatgactaaaaaaagtattaaaggggtgttatacatcccactaaattttagcaccatcggatggttgatactaataggaagtattaaatatagtttaatttaaaaaagtcataatgcattcaattcctgttttagtttgtaatgtggtaataaggtggcatctctcatctcaagagaaggttatacatacatgtccatttgaaacctctagactgcagaacaaatggggcacttaactgaactattctaagaaacaaatttagtttattttgatgagtcaacttttactattctaagaactgctggaaatttttgtcactacaatgcaccttattgctgataaatgattg

SEQ ID NO: 43550 - DNA, 452 bp, Setaria italica
  Peptide Sequence Number=SeqID_109524
ttattttactatttgactacaacagcacgagttgctacaaagccaatcattagagaagttacgacatcagtaaatggattggagcctgatccacggtagaatttgaaactcacagggaagtcaggtgatactggtcattgagcgcttacatggatgtatatccagcagtgagaaatgcaatgatttgacagtgttatcattaattcttcctttaaggtatcatgtgtatcagttcttttcttagttttattctccttatgaatcattaactgattcattatccactaagtatagctgtcagtagaatgctctaggctcctttgttgtatttctccaggggcgggatgtagatgagacatatatgtagtagttagtgtttgatagtggtgctgttgttcattgtagtatactgcttgtcattgagtaaatttatgtgaaatcttactttttac

SEQ ID NO: 43551 - DNA, 461 bp, Setaria italica
  Peptide Sequence Number=SeqID_109525
tgttccgatgggtatgtgaagaaaataaatctagtttagttctctgaatagttagatctggcaacctgtcaacctatgtgtctagatgattggttatatacagaaatacagtgtagtcttatacaattgcttgattagaattaacttaacactctaacatgacttaacaggcataatggatcaataatagatacagtggcggacgcagcagagggacacacccaatattttttttgcaaactctaacagcttacagctagcatgtgtgcgcttactcatggttagtccagaatatgtatatttgagccctagcactaatataatccagccagtctggaactcttcatttgcacgtaagccaccggtctgctgcctgcctgcctctctcattgcttctaccactgaacaaaagatgagacgtttgacgagcaacgacataggcctattacctaaccttacta

SEQ ID NO: 43552 - DNA, 326 bp, Setaria italica
  Peptide Sequence Number=SeqID_109526
agtagaatagaatagaagatgtctccaacatcatagcctttaggttctcttgaaaaggaaaatccagccccaaccggcgaatcgacaaaaaggatatgtgacacctgattcaccggcttcactggcaaagatttcaaaccgtatatggctaagattttaaatccggatacatacttgagatttatggttccaaaaaataaaatgctccggagattcagatatgtagatagtgaagccattagctctttgataacatgcaacattcatatagctaagctgaatggttgggccgtggttccaagatgagaatatgccaagaaaagaag

SEQ ID NO: 43553 - DNA, 396 bp, Setaria italica
  Peptide Sequence Number=SeqID_109527
ctgtttgagtaacttatcgtgaacccagctgcctgcccatcaagatgccaagccctccagtcatcgacgacggagaagttgagggacctgacccacgcctgcgtgcccaggtgtggcaccactgggtcatggtcgccgcaaggcacggtaacctcgtggacgtgacgttcctgtggtacttgatggcactcttgatgtcgatcgcgtacggaagctctcccacatcgcggcatctgacccactcatcgacagttccctccttgatcccaagagcatctcgggtgcgcctatcgtttgcccaaaaagtaggataggtagtaacggtaagtaaagcaatgaaatggaggacgagcaggtggatggtttagctgccccatccaatttcctcccgtagga

SEQ ID NO: 43554 - DNA, 315 bp, Setaria italica
  Peptide Sequence Number=SeqID_109528
agttggtattatatcagatcaactccgtgagcataaggcactctagagctaaaatcaataatctctcctgtgcccgggttacccactagatagcccttgagattaggaagggtccttcctgctttaataccttctgaataatctgcgcaagaaacggcacaagttttccagcataggagtctccaccgatatagaaaggattcgcaaggaactcaggatggtcattaaaccactggatgtcgatcgaacatataaacaatacataacagacattaagaggaatacaattaatttgtgtctgtatggattgcacca

SEQ ID NO: 43555 - DNA, 499 bp, Setaria italica
  Peptide Sequence Number=SeqID_109529
ttttttgtggtatagtgagtttttattaactttgatagcgttcatgcataacattaatcagccattaattacatcccactagcatagatcatacaagccaccatatgagtattattatattaaaggcttgattgcataacaccattcgtcctaataataaatatatgacgattggagagggggaaataatgaactaatatttctatctgtccatcccaacacgaatggattattaaattaccggcaaattaaagtcgttgttatgaattattctcgattcaaacaaggtcggtcttagagtggccgattcagtatccagcggctgaacatggcaaaacacttctcaggctcgtactcaggtgccgtgtgcccaccaccctgcaatcccaatccacacatttccatttccgatccgttaatgcaacattagtagcaatagtaataagctctctgatgaacgtaaattaagatggcgtcaattgatcgagtgtgcatgcat

SEQ ID NO: 43556 - DNA, 841 bp, Setaria italica
  Peptide Sequence Number=SeqID_109530
gaacagtcttcattcctgcttcaataccttctgagattatctgcgcaaggaatggtacaattttaccggcatatgagtctccaccgacgtagaaaggatttgcaaggtactcaggatggtcattgaaccacttgagtagaaactcatgcaactgtaacgaggatgagatgtctccactatcatagcctttgggttctctagagaaggaaaacccggccccaaccggcgaatcaacaaaaagaatatgcgacacctgcatgcagattgagtgacatgcgaaacacggcgacctagctagtttagtggccagtgccgataagatttggaacgagataaatacattgtatttcaaatagttttacatagtgatcattaattttgcaacaacatgaagcaataatcctagtgctaaggtgaaaagaggtgtctgtgggtgggtcccgagaggcttagaatgatacttcttaatgttgtagctttttaatttgaaatatgattgaggcccaggcgatgattattaaaatagagatataagaatggccaaaatcataaaaaagtgtaacttagggtgtatgttgtctcccctatctgagtttcatctcagagacaacattttgcagcgttgttacatcctcacttgttttaacttgtactaatacctaatagtaatgtcataatattatgaaaaatagtataatttttatgtatgcacatatattttgtaaaaatgaaagtatttatgagatgaaaaatatttgtaaagagtttaaatataccgatggtcaaaatctcaacgtgtacaatagattagagagagtataccgatgagctccctcctacc

SEQ ID NO: 43557 - DNA, 495 bp, Setaria italica
  Peptide Sequence Number=SeqID_109531
atacaaaagtaaattttagtatccaccccaacactctagattgcatctctccttatttcaaaaggctggacacatgtagagaacaaaataacagagaatccgtgaggataaggtgaggacatcacctcatcctagtttgtcactaatactactatattttaaagacaagatggtacagtcaggatggttgggatatggatatgcattgtgtctctgtcagcctgtccttgttcttgtggaagaaatgatagagagaagcaaacagagagtagttgacaggagggagcagagcaccttggtccacgagttttggttgtatcgcaggcgaggcaacgtgccgttgtagggctctaggacgaacctgatgggaccgatctcgtaggcgagaccgctgaagacggagcagcggtcgccgccggtgagccagaggaggaaaggggcggcggcgccgccggactcggacccgacgaagtagtagaagagctcggcgtcgtt

SEQ ID NO: 43558 - DNA, 1981 bp, Setaria italica
  Peptide Sequence Number=SeqID_109532
gtggtatagtgagtttttattaactttgatagcgttcatgcataacattaatcagccattaattacatcccactagcatagatcatacaagccaccatatgagtattattatattaaaggcttgattgcataacaccattcgtcctaataataaatatatgacgattggagagggggaaataatgaactaatatttctatctgtccatcccaacacgaatggattattaaattaccggcaaattaaagtcgttgttatgaattattctcgattcaaacaaggtcggtcttagagtggccgattcagtatccagcggctgaacatggcaaaacacttctcaggctcgtactcaggtgccgtgtgcccaccacccttgatggtcgcaaatgtcatgctgtttgagtaacttatcgtgaacccagctgcctgcccatcaagatgccaagccctccagtcatcgacgacggagaagttgaggggacctgacccacgcctgcgtgcccaggtgtggcaccactgggtcatggtcgccgctgtataccaaggcacggtaacctctggacgtgacgttcctgtggtacttgatggcactcttgatgtcgatcgcgtacggaagctctcccacatcgcggcatctgacccactcatcgacagttccctccttgatcccaagagcatctcgggtgcgcctatcgtttgcccaaaagtaggataggtagtaacggtaagtaaagcaatgaaatggaggacgagcaggtggatggtttagctgccccactccaatttcctcccgtaggatctttctatcatctgaagagatgtttacatttgttacaggggacgcagaaacacacctgtccagcagaacatggcccttgccaacttccgagatgagattatggacagtatccatagcctgggtacacagcacatttgcaggatcagtgtgttcttctccttggcaatgctccaatatcgtctcatacaattgatctgatactaaaccaaatccatgagcaaacggcactttagagctagaatcaacactgtcgcctgtcactgggttgcccactagatagcccttgagattaggaacagtcttcattcctgcttcaataccttctgagattatctgcgcaaggaatggtacaattttaccggcatatgagtctccaccgacgtagaaaggatttgcaaggtactcaggatggtcattgaaccacttgagtagaaactcatgcaactgtaacgaggatgagatgtctccactatcatagcctttgggttctctagagaaggaaaacccggccccaaccggcgaatcaacaaaaagaatatgcgacacctttgtccacgagttcgtgttgtagtgcagccgcggcaaggtgccgtcgtagggctccaggacgaacctcaccggacctatctcgtaggcgaggccgctgaggacggagcagcggcggccgccggtgagccagaggacgaaaggggcggcggcgggctcggactcggcctggacgaagtagtagaagaggttggcgccgttgtcattggcctcgcccacctccacgtaccccgtctcgaggtggaaggggaggcggccgtcgaagccggggaggctgggtcaccacccgaccggcgccggagccggaggcggcgaaggcgatgatgagcaggaagcagaggaggaggaagcagcgagagcaggggaggcgaggcggccatgccatcttcctcggcaccgccatgtgagctctatctaagatagacggagcgaggatacatcgagctgctcgcctgcccctccatggcctcagtgcctcagcctcagtggacaaggaagagacggctggatagagactgacgacaggaagagacgacagtctagtccatcagccttagctctgacaatgggtcattctcagcctgcaggtattcgtatccacacattcgagacaaaaatgttgactaacaaaagaca

SEQ ID NO: 43559 - DNA, 403 bp, Setaria italica
  Peptide Sequence Number=SeqID_109533
aagtaaagtaaagaactaactaactagactagacttactacctcttgcttgaacgcctcctgtagaacccgatccaggcaaaggagccaagcgcctccgtcccggccgccgccgcttgggatcggaatcacccatggcggacaaggtgagcaagcctgcagctccgttggaggtgtccatggagaaggaaccatcgtctccgctgcctgttccgtccatggacgacaagaagcagcctcctctgttggccatggccgtggtcctggacgtgaagctttctcctccaacgccggcgtccatggacaagaaggagaagcctccggccgtcctgtttgtctgcctgtgggcgctcgccaacgccatctccttcgccgtcaacgccgtcgccatgctgattcattga

SEQ ID NO: 43560 - DNA, 588 bp, Setaria italica
  Peptide Sequence Number=SeqID_109534
cgatcgcgacacccagaggtccccgcggcttcggcttcgtcacgttcgcgagcgagcaggcgatgcgcgacgccatcgaggggatgaacggcaagggcggccacggcgacagaggaggagaaggcgcccgcaccggcggagccgtccgcgccgccggccccggccgcggtggaggagaaggtcgaggagaaggcggccgagttggaggagaaggtggaggaggccgccgccgccgccgccaaggccgagtgaaggggatgccgccctgtcctgttcctcttctgaatagtatgctgttggttctgtgaatctgttctgtgatttcggagcttgtcgttgtcatggaatcatggattgatgcagagtttgaaccgcataatttcagtaccagcgccatcagtaatcgtctcgctttagctatgtacctgctttagtttttggccttttgctaccatttagtactgtcgttgatggtttgatgtgatggcatgttgtttgtgtgactgctgactgtttacttgtgatattgccagctttttttattaaaatagtggtgatttgtcttttgcagcatcaaaaaaaaaaaaa

SEQ ID NO: 43561 - DNA, 973 bp, Setaria italica
  Peptide Sequence Number=SeqID_109535
ccgcggggcggagctccgcattgtctacgggtctcgcacctagcctgcacctgcatccctttgttggcgcgcggccatgggggagttcatgcgtgaacctctcccgtgccgtcgtcctccacggcctcgccgccggaggcgcccgccgccgtgggcatcggtacggcggaggcggcgcgctgctgctcccgccgtcgctactgtcgaagcgtgccgccgtggcgtgctgctcgtcgcctggtacagcaggctcaaggccgtcgtcatcgtccttcccggtgcgcgggctcggcggtgattcatcagaagccggttccaccgccacgtcgccggcaggtcacgccggcgggattgggattgccgagttcctcggcgccaagaacttcctcatcaccggcgggacgggtttcctggctaaagttcttatcgagaagattctgaggacgaatcctgacgttggcaagatatacgtgctgatcaaagccaaagacagcgaagcagcattgaggagattgcaaaatgaggtagtggacacggagctgttcaaatgcctgcaggagatccacgggaacgactacagcagcttcatcgcgaggaagctggttcccgtcgtcggcgacgtcagggaggccaacatcggcatcgctcccgagctcgccgatgagatcgccgaccaggtggacatcatcgtcaactcggcggcgaacaccacgttcgacgagaggtacgatgtcgccatggacatcaacaccgtgggcccgttccggatcatgagcttcgcgcagcggttccgacggctcaagctcttcttgcaagtgtcgacagcgtatgtgaacgggcagaggcaaggcctggtgctggagaagccgtttcgcatgggagacaccatcgccaaggagttgggatcttcagaacacagcagcaccgtgctggacatcgaggcagagatcaagctggccttcgactactccag

SEQ ID NO: 43562 - DNA, 934 bp, Setaria italica
  Peptide Sequence Number=SeqID_109536
tagtcctaaagtactagtcgtaagtctagtctatttgtaggtagtatttgtctaaattgtaggttagttggtactacggtagtcttgtttctaaattgtccttgtctaggtagattccacgggaacgactacagcagcttcatcgcgaggaagctggttcccgtcgtcggcgacgtcagggaggccaacatcggcatcgctcccgagctcgccgatgagatcgaccgaaccaggtggacatcatcgtcaactcggcggcgaacaccacgttcgacgagaggtacgatgtcgccatggacatcaacaccgtgggcccgttccggatcatgagcttcgcgcagcggttccgacggctcaagctcttcttgcaagtgtcgacagcgtatgtgaacgggcagaggcaaggcctggtgctggagaagccgtttcgcatgggagacaccatcgccaaggagttgggatcttcagaacacagcagcaccgtgctggacatcgaggcagagatcaagctggccttcgactactccagaagacgctccgttgattctgcttcgtttactcaagaaatgaaagatctaggcctggagagggcaaacctccatgggtggcaggacacctatgtgttcaccaaggccatgggagagatggtcatcaacagcatgagaggggaggtgccggtagtcaccatcaggcccagtgtcatcgagagcacctggagggaccccttccccggctggatggaagggaacaggatgatggaccctgtcgtcctctactacggcaaaggccagctgagtgggttcctcgccgacccagagggcgttctcgatgtggtcccggcggacatggtggtgaacgcgacgctagcgtcgatggcgaagcacggcggcacgtcgtcgtcgtcgccgtccggcggtcggtacggggtacccta

SEQ ID NO: 43563 - DNA, 285 bp, Setaria italica
  Peptide Sequence Number=SeqID_109537
cgagcgccgccaccaccaccagcagccgcaggtgtcagccatgagcaaggactgcggcaaccacggtgacgacgagttcaagcagacgtgccgccgccttctcatcatcctgctgggcttcgccctcctcgccggcgtcatcgcgctcatcgtcttcctcgtcctccatccgacccacccgcgcttcatcctccaggacgccacgctccggcagctggacctctccaacggctcggcgccgctgctctcgacggcggcgcaggtgaccatcgcctcccgcaaccc

SEQ ID NO: 43564 - DNA, 500 bp, Setaria italica
  Peptide Sequence Number=SeqID_109538
ggctgacgccttgctcttcttggttgttgggtgggaatggagggatggtgaggggcaaggactgcggcaaccacggcgacgacgacctccggcgctcgtgccggcgcctcctggccatcctcctgttccttggccttcctcgtcgccatcatcgcgctcatcgtctacctggtgctccgccccacgcacccgcgcttcttcctgcaggacgcgtccctccggcagctcgacctctccaacggctcctccaacgtcctctccaccacgctccaggtgaccgtcgcctcccgcaaccccaacgaccgcgtcggcgtctactacgaccgcctcgacgtctacgcctcctacaagtaccagcagatcacgctggcgtccaggctcccgacagtgtaccagggccacggcgacgtcgacgtgttggttcgtcccgttgtcttggttccgggttccctaacgttccgttcgcgccgttcctcgccgacgccatgaggaaggacgtc

SEQ ID NO: 43565 - DNA, 833 bp, Setaria italica
  Peptide Sequence Number=SeqID_109539
agggaagaaggtagggaaggagaggaggtgggaggagaggaggtggaggtgggatgggagggtggagagcgacgcggaggcggagcggagagagaggaggtgggagaatgacgggggagaggaaggccgagaggacggctctcgacggcggcgcaggtgaccatcgcctcccgcaaccccaacgcccgcgtcggggtccactacgaccgcctcgacgtctacgcctcctacaagtaccagcaggtcacgctggcgtccaggctcccgacagtgtaccagggccacggcgacgtcgacgtgtggtcgcccgtgctggccgggcccaacgttccgttcgcgccgttcctcgccgacgccatgaggaaggacgtcgccaacgggtacctcatcatggaggtcaggatcgacggacgcgtcaggtggaaggtcgggagctggacgtccgggcactaccacatcttcgtcacctgcccggcttacttcatcagcagcggcacatacagcgtcgtcggggcgcacgggctcaggttccagacgcccacctactgccgcgtcgaggtctagcgtgacttgctcagttgctctgttctggactctgcttgctctgctccggcgaggtaggttggcttggcttgttagtctaccggaaacaaggaagaaagaggggtggtgaattgtaataaaggatggtgtggagaggtatagaggtaaaaaaagccgaggtaatttagagagtgggttaactagtcttggttcatatatactatgtgtttttgggttgaatctttgttcagttcctcgtttaattgttcataaatctgcgagtcaaggtt

SEQ ID NO: 43566 - DNA, 1212 bp, Setaria italica
  misc_feature (1208)..(1212): n is a, c, g, or t
  Peptide Sequence Number=SeqID_109540
acattgcaacaccccacctcctctgctctgctctcccttcttcctcattccctgcccctcaccatcctccattccacccaacaaccaagaagagcaaggcgtcagccatgagcaaggactgcggcaaccacggcgacgacgacctccggcgctcgtgccggcgcctcctggccatcctcctgttcctggccttcctcgtcgccatcatcgcgctcatcgtctacctggtgctccgccccacgcacccgcgcttcttcctgcaggacgcgtccctccggcagctcgacctctccaacggctcctccaacgtcctctccaccacgctccaggtgaccgtcgcctcccgcaaccccaacgaccgcgtcggcgtctactacgaccgcctcgacgtctacgcctcctacaagtaccagcagatcaccgtcgccgcatcgctcccgccggtctaccagggccacggcgacgtcgacgtctggtccccggtcctcgcggggcccagcgtccccttcgcgccctacctcgccgacgcgctcagccaggactgccaggcggggtacctcatcctccaggtcaagatcgacggccgcgtcaggtggaaggtcggcagctggatctcgggacactaccacctcttcgtcacatgcccggccttcctcgtcaccaacggcggcaacggcgcgccgggggccagcggatttaagttccagaccaccaccacatgccacgtcgaggtctagagactttggcggtgttcctccacggcgccgccggcgaggtaggtgaggttccgtcccttgtggcttgcgtctgtctccctgcctgtccatagcggaaggggaaaaagaaaaacagaggacgcaagcagagatcagagtcaggcgaggtggtaataatcgatcgataccagtagtcgtgattctgcctgcagtgatgcgggtgcgtatttaaatgtaaaggagggtaatttttcttccgatttcggtagggttgattaatacgagtagtagtacgatcgatcaatggtcttatatacagtacttcactatatatgtgatgcctgttcatcccattagctggttggaattactgttgttgaaggaagcttaattgttaataaacctttttgatgcggaattaaaaaaaaaaaaattggcatggccgttttcatgggattccggctggttagaaaaaaaaaaaaaaccaaaaannnnn

SEQ ID NO: 43567 - DNA, 432 bp, Setaria italica
  Peptide Sequence Number=SeqID_109541
taggtttggtatatatagtttgttaagaatgatgttgttcgcaagaaaaaaaattaaaaaatgtactcaaaaactatccggccactcgaggaaaagctagactaacgactacttaaactcttcgttgtgtgtattttttacacttttttatccggccggttatatgcaaacctatagtttaagtatttcccaaataattaaatatttcccatattaagagaaaagatgtgatttgagtcgtatggtcttgtgggtgtccacaaatagaatttataaaatgtaaatatactaagagaatacaattctgaatccattagataattttttttttctgacagccattcaatagtgcctgcaagcaagcgtattggctttttatttaggacgtaataattaagtaaagcaactaagagtggaagtaaaacaaagtga

SEQ ID NO: 43568 - DNA, 823 bp, Setaria italica
  Peptide Sequence Number=SeqID_109542
taaataagacaatactacgtaggtcttcgattgacagtgaagctgcgggattttaacaagtatgccaaggtagatagcgaactaagcaaagagatagaacaatggaatgacatgctgaggactgaagtagtaaagttatgtcaagacaacagttttaatactggcttttttgaaggcaccgataatagcactgctgttgatgcttatgagttgagaactcgacttgagcacattcttgagaggatttctttaatttctgatgctgcaagcactgagcgtccatcacaggtcacggattccctgtatattggtggtgctttagctgctcggtcaacacacacacttaagcaccttggcatcacccatatattgtgcttatgtgcaaatgaaattggacagtcggaatctcagaagccaggcctttttgactataggaatttctccataaaagatgatgacaatgcagacatcggtgatgtctttcaagatgcttctgatttcatcgattatgtggatcacctaagcggcaaagtacttgtgcattgctttgagggaaaaagtcgcagtgcaactgttgttcttgcttacctgatgctgaggaaaaattccactcttctggaagcatggaacatgctgaagaaggtgcaccgacgtgcacaccccaatgatgggtttgccaaggtcttgttggatcttgacaagaaactgcatgggaaagtctccatggaatggcagcataagaggcctgcaatgaaggtgtgtcccatctgtggcaagaatgctggtctcagcagcagctcattgaagctccacctgcagaagg

SEQ ID NO: 43569 - DNA, 442 bp, Setaria italica
  Peptide Sequence Number=SeqID_109543
ctgtacctcagatacaaacctccaaaggaagaactgaggtacttcctggacttccagcaccacagattgtgggccccagtaaacagtgacctaccacttggtccctgctcgaaccgacaaggtgctagcccagcattgcacttccgccttgtaggttcaaagctatatgtcagctcaagcgaggtgattgttccaagattaccggtcaccgggatgagattgcatctggagggcaagaaaaacaaccggttaggcatccacctgcaacatctgtcgaacaccccaacgttcatcaaggaaagatcagccaagcagccgatatggcgcggatcggagatgatctccgacgagcggtactacgagccggtccagtggagaatgtttgcccatgtctgcacggtgccggtgaagtacgatcctcgctgggcagcacagccggctc

SEQ ID NO: 43570 - DNA, 340 bp, Setaria italica
  Peptide Sequence Number=SeqID_109544
gtcgctggtgatgatcttccggtggtggtggtggcggccgccggagccgccgcgggggacggcggcggcgggtgggtgcttgggcccgcaggaggtgggcggtcggcaggcggcgaagcaccggcggacctgctcggagaagaggtccatgttgggcagcaggcgcgcctctttgatccagaggtcgaggtcgccgtgcaggagcacggtcttgggcttcgccggagactcgccgccggctgacgacgccatcgccggcgacggagcctcgcggtcgaggggaggcggcagcggcgagcgtctaaccgaccaaccggagccctccaatcccagagggccg

SEQ ID NO: 43571 - DNA, 460 bp, Setaria italica
  Peptide Sequence Number=SeqID_109545
gtagtctagggattagtccagtttgcttttggcggggattccaagtcctgaacctgcactgcacttcaggagctttcaagtacacaaaagcaacatcacttgtgtttgtgagagagcaaaacacaagtctgcagccatgagtgggggacctgacatgatcgcaagtgccgtgattcagcatgttggcagcatgctcggtgacaaagcctgggagaggatcgagctgctatggaactttgagaatgatgccaaggagatgaaggacaaaatgtttaacctgcaggttgcacttaacaatgctgagaagcgctcccaggagtccgaggatgcattggcgagactctggctcaagaagtacaaatctgttgcctatgacatggaggacacactggatgagttgggcgcgaacgcaatgatatggagaaatagtacatgcacggctaaattttcttctcaacaa

SEQ ID NO: 43572 - DNA, 924 bp, Setaria italica
  Peptide Sequence Number=SeqID_109546
gcacctacaaggccatcctcaagtcgtgcaacttcagcagcaccaacatctctcgcttctgcaaccgtgccatgaactacgccatgaaccaagagttcggcgacattgaccagtacagcatctacaccccgtcctgcgccgccgccagggccaacgccaccgtgctcaggttcaagaacaccctcatccgccggcgatccttcggctacgacccctgcacggagacctacgccgagaagtactacaacaggctggacgtgcagaaggcaatgcatgcaaacacaacgaggatcccctacagatggactgcctgcagtgatgtgctgatcaagacatggcaagattcagagttctccatgctgccaacttacaagatgctgatgaaaactggagtgaggatatgggtgttcagtggcgatacagattcagttgtcccggttaccgctacaaggtttgcaatcagccatcttggtctgaagatcaagatccgctggtacccatggtactcggctggacaggtaggaggatggtcagaagtgtacgaagggctcacttttcgcttcggtgaggggtgcagggcacgaggtgccgctgtttcagcccaggagggcgttcaggatgttccagtcgttcttggctggggagccattgcccaaatcctgaaggttcatacaaaaactgttgtgtacctgatgtctagctacagtctgaacaaaatgtaaaagatggatgagaaggtggtgggagagtgtttgcaggtagaaaataattagtagttgataggcgtgaagttcatagctgagttgtaattgattggggttgggaaagggatgaggagataataaggatggtcatgccatggaaaccatgagcatttgttgtattgtattgtagtctaaattaaattttcttaagtaatctcaa

SEQ ID NO: 43573 - DNA, 670 bp, Setaria italica
  Peptide Sequence Number=SeqID_109547
ttgaagtcacggtagatgacgggttttgcagcttcgtggaggaaggccaaacctttggcagctccaatggatatcttcaatcgcgctgaccacggcagggaagcagagtattttttgaagagatgcttctccaagctgcccctcgccatgaactcgtagacaagaagcctgtgctggtcctggtagcagtagccgatcagtttgacgaggtgtggatgccgcatttgcccaaggaaaatgacttcggccagccattctttgtggccctgcgagccttcgaggtcgagcagcttcacagcgacggcctgcggccgcaggccgggcctgacccgctcgtcgacgcggcccttgtacacgggcccgaacccaccctcgccgacgaagttggtcatcgagaagtcccgcgtcgccgtccggagctcttccaccgtgaacgccagcacgtcggaccccgccagcgacagcgacaggtccaggtcctccggcgacggcagcggctccggcggcctcgagctggaggccaccttcgcggcgttcctcgagccgccggagccggagtcgccggagcgggcggcgtgggaggagctgaagcagccgaggccgaacagcgagctccacgacgtcgacgacgacttgggcttccccatgcgagcgtgcggtcagctggtcg

SEQ ID NO: 43574 - DNA, 455 bp, Setaria italica
  Peptide Sequence Number=SeqID_109548
ctgcgtgcccatgacccgggtcgagacatgggtttcgtcttctccaggcccatcctttgctagcccgaaatccgacagctttgctgtgtagtccgagtccagtaggatgttggaggtcttgaagtcacggtagatgacgggttttgcagcttcgtggaggaaggccaaacctttggcagctccaatggatatcttcaatcgcgctgaccacggcagggaagcagagtattttttgaagagatgcttctccaagctgcccctcgccatgaactcgtagacaagaagcctgtgctggtcctggtagcagtagccgatcagtttgacgaggtgtggatgccgcatttgcccaaggaaaatgacttcggcctgcccagccgaaacaaataaacaattcgtcacaaatggatacaggtcacaggtcagagtatacatatcattttctaagtattttaaag

SEQ ID NO: 43575 - DNA, 261 bp, Setaria italica
  Peptide Sequence Number=SeqID_109549
actccacaagtgtactttgagaagtgagtggagcaaggggataacaaaatgaacagaaaacaagtgagttaatattgcagacccaacataccataccatgttcaggttaagtataccattcagacactttcagttactgttagtccagtgcaataaaagattctgcagtgaattggacttgattggttatttacacattacacatttacacccagtaattagagtttagaactgctccaagcacacaagtacaagtaaata

SEQ ID NO: 43576 - DNA, 619 bp, Setaria italica
  Peptide Sequence Number=SeqID_109550
tcctcacctcacctcactaccattgccggccatccaagaagagagatagagatagagagaggcaacgacgcacactgccccagtccatagaagaatgaggcttcatggagctcttgctctgcttctgctcctgtgcatccatgtaggccatcaaggagcagatgcccggggggacgggttcgtgagggtccagggcacccgcttcgtgctcaacggcagcccgttcttcgccaacgggttcaacgcctactggctcatgtccttgggcgccgaccccgcccagaggggcaaggtcacctcggcgctgagccaggccgccggcgccggcctcaccgtggccaggacgtgggcgtttagcgacggcggcagcaatgccctgcagtactcccccggccgctacaacgagaacaccttccaggggttggatttcgttctatctgaggctaggaagcatgggattaagatgatactgagccttgtgaacagctacgatagctttggagggaggaagcagtatgtgcagtgggcaagagagcaggggcaaagcattgggtctgacgatgagttcttcactaaccctgttgtcaagggcttctacaagaaccatatcaaagaccga

SEQ ID NO: 43577 - DNA, 256 bp, Setaria italica
  Peptide Sequence Number=SeqID_109551
tcgcgacgaggcatggtgcaacgcagttcacacgaatgttatggcaggcccactcggcagccaagctttcttgtgagctggtgtgcatcctcctgtgggaaaaaagttaacgatctaagaaatttacttgtgtgaaacttcttttgtgcccgaaccaaaatggcaaatagtcctgcaagttactacatctactgaaaaatgtcctgcaggttggtcgccatgagacgcgagtagtcctccgccgtgcactccaccg

SEQ ID NO: 43578 - DNA, 396 bp, Setaria italica
  Peptide Sequence Number=SeqID_109552
cttcgcaggctgtctactctctgcacaagacttccactagagaacgtatcaagaaggcagccttgcgtgatttcaatgctgccagtgctgaggttctgtgtgagctgcgatacgatctgccacagagctacaagttccacaagaaaagggaggtcgacattgctgtcgatctgtggcgctttgttcctaacgcccgacgtagcagctagcgctcttcctctgcgcgcccaggccacgagaccgtgacatgaacaaggaacattagagatggttgtcttgcatggctggacttgatagaagaaacattacacgcagtgcatctattctgactggtgtggcaactcccagccaaaccttactatatgccattgaggaacaagaacaatcgaagaatgg

SEQ ID NO: 43579 - DNA, 572 bp, Setaria italica
  Peptide Sequence Number=SeqID_109553
aacggaatccggcactatgaactggaagcaatcagcagggtcgggcagcctatcggcgagatccatgcattctacattgatctcagattgcagagaatggctgcccaggaacttatgacgatcagggtggtattgtacccgtgagtagctgagtctactactatcttagtccttctgagcgcaattcttgaccgatgaagtgcacggtgatggagtggccaagtggctgccgcatcacgttcaggagtaacaggtaccgactgctgctgctggtagtggtgaaatgatcatcgtcatcctcatcgtcctcaacgaggatgaagttgaatccatcgtagaggggaatgctgcatgtctcaaaggctctgatctcggtggtggaaggccatccatgtgcgccggtgaagtggtccaggagcgcctctgtagaaccaaggaagctgcagtccttgcccgggcagcggcgtggtgcatgtggacacgtctggcagtggacatgctgatcgtagtaagctggcctggcaccacagccatgggctgcattcgggcatgggacacagatggactccacc

SEQ ID NO: 43580 - DNA, 415 bp, Setaria italica
  misc_feature (38)..(38): n is a, c, g, or t
  Peptide Sequence Number=SeqID_109554
ggaagttggtgatcaggatacatctgagatagaagganaacggggaaccacaagggattacaacaatcgcagcacacactcactcgatacagaagaaactgaagatacaacggctgaagacactaggtgcacagacaaggcaagcagcagactgcttgaaggatccaccggaagacatcaacaccagaccatctgcgaatgcgaactgagcaacaagacaatccaatccgaagcaatgaatgttggcaacctaacgggtaggcccttaaagaatcaagtcattgccacccaattggattatgaaggtgaacaacatgtaagattggcctcagatgccgacgggaacaagtcagctgaaactagcaactacaaacttgccactgagaacaactcccaattgcaggccgtgcggagg

SEQ ID NO: 43581 - DNA, 1593 bp, Setaria italica
  misc_feature (45)..(45): n is a, c, g, or t
  Peptide Sequence Number=SeqID_109555
gggcaaaaggtgaagctgaagccctttgcgctcagttgaataatnaaggtcatgtagatgcttgcatcactgcagatagtgatgctttcctctttggagccaagactgtcattaaagtcctgaaatcgaattgtaaggaaccttttgagtgctacaacatagcagacattgaggctggccttggattgaagaggaaacaaatggtagccatggcacttcttattggtagcgaccatgatttgcatggggtacctggttttggtcttgaaactgcacttcggtttgtgcagttatttgatgaagatgaaattttggataagttacatgaaattggtagaggggtgtatccattcctagaaggattgggcaatcaacatattgatgatctcccatcatcatccacgctcaattgtgaaattgccgcactgctcacattgcggtcacccgggcagtaagaaaatcatagcaaggttgggtgcaattattgcttggtggatgcattagagaattgcatggaaaaaccagctggattcaaatgtgaatgtcctggttgtgaaaaggcacgcgatctaaaggaacagagaaaacatgaaaattggcaaatcaaggtctgcaaaagaatcgctgctgagacaaattttcctaatgaggagatcattaaattgtatctaagtgataacaatttggataaagaaaagggtgttcccttgctaagttggaataaacctgatgttgaagctttggttgacttcttaacttacaatcaaaattgggagccatcttatattcgacaaaggatgcttcctatgttatcaaccatatatttacgtgaggtggcatcatctccatctacaccattgcttctttatgatcaatatgaattcgattcgattcagcgaattaaaataaggtatggtcacccttattacttggtgaaatggaagagaggtacttggggtatgaaatctaatatatgtagcaagaagccagtaacagagggggagacaagtagtgaggtagtggtgttggatgaagatgacgaggaggatacagtggattgtgagtcttctgagttattagatgagcctgatgttccacaagtgcttactgatgatggctgctgctttctattgactgaagaagacattcaacttgtcagttcagcattccctaaagaaacggcaaggtttcaggaagaacagaggctgaaagaagcaaaatcaagatcacgaaaatccgaatcaagcacaagtagcacattggaaacacctaaaggtccaaggcctagtggagtccagcttagcatcacagagttctaccgctccaagaaagggcagaccatcgaatccgggaagaagccagctggagaaggccaagcggcgaagggaggctcaagaaaagcctcagacagggacctcaacaagagcctgccaaagtctgttcgacgccgcctcctcttcgactgacgactagcctgacttggtcagcattgtaatcttgctgccactgttgtagatgacccagagtatgccttaacatatcgaccgctgtagattccgcggccccttttgtacaggacaagcatcatctttg

SEQ ID NO: 43582 - DNA, 605 bp, Setaria italica
  misc_feature (15)..(15): n is a, c, g, or t
  misc_feature (17)..(17): n is a, c, g, or t
  Peptide Sequence Number=SeqID_109556
gtgtcgtcgtgtgtntnttcgtttggtttttggtttttggtttttttgggggaactgaagtaagcaatctgattggaatggaacggctcgtataattgttcacattcagtggctcagtctgataaagagtacaaacccgtgcacatacaaacgcttgctagttgtaacacagagggtcacagcgcacatatacaagtactgactgattctgtggttcacatgcctagtcggtggtgatgtgtaccccgatggcgatgaggaagacggccgcgagggcgaagaagatgatggcgtggacgaagatggaggcgccgctggtctggaagttgccgaactcgacgaagcggccgcccttggccggcagctgcagcagcagccccggagagagcagcacgaacagcaccaccgccaccaccaccgggccccagtcagacatctcgctcactctcttcttcttcttcccctcgccggctgggctctctttctctccctctctctcggcagatgcaggggaggaggagatgagagcctctccgcgcgtataaaagcaggcagaggagcgagcctggccgacggcgacccactgctgctgccaaaccaaaacc

SEQ ID NO: 43583 - DNA, 531 bp, Setaria italica
  misc_feature (62)..(62): n is a, c, g, or t
  Peptide Sequence Number=SeqID_109557
cggattggaactcgctctgcttcgctgctgtcgcttctttccgtttcttcgaattggaactnaccaggctttctgagtaagtgctgattctggaatgaatttattgccagaatccacaattagaattgctgttctaagggtgaagagccggccggaatctattcgattcgcttctgcagtatgtttgtcctgctactattttatcattgatttgataaaccgaatccactgaattccgttcagagaatgaatttttacgacaatcaggagaaatattttcttccgatgactgttattgagcagaaattcactattctatcctctgctccttccattttcattttgttttcccccgttgatatagttgttaggttcttgaactggcaagttcattatggggtgttagtttaatgaatcagaaactggtctccacaaaaatgttctggcttgctgcttgtgggggcggaagttgaatgaatcagaaactactttcctgctttaattcgacaatttcagttaactctgcttttt

SEQ ID NO: 43584 - DNA, 570 bp, Setaria italica
  Peptide Sequence Number=SeqID_109558
ctttcctggtatctgcagagcttcataatggccgcaaccatgataaagaacttggatgggagcttctgtcccgtactcttggccatattcagctattgctattaaccacctgcttctttatcatgcatgtaaaccgtgattggcatctgaagaacatgcgaagccatgaacaactctggctcacctccccacacatgtggcttcctaatctgagagacatatgtatcaaagtccccttcaacgaaccattcagtctctgctcgtctcttgataaactcatcagcaaccattgttctcaactcatcggctagctttctctgaagatcctcactaggtatgggtttccctgatctaatgcatgcaccatgggccacagaacggaacagacatcttccatccccaggaatgcctgttacagaataatctgtgtaaacttttttcccatgagataaatttgctgatgattcagcaggctgggtgctatcaacctcgttatccacaggaccctcagcactagccatcccagacactgccaaaaccttgtccagaggctatacctcctatttttcg

SEQ ID NO: 43585 - DNA, 331 bp, Setaria italica
  Peptide Sequence Number=SeqID_109559
taagtaacgtaacccttagttaggaccaacgctgccgatcagacccccgaagtaggcggtgccgttcacatattcagcgacggtgtcgtagccgagcacaacgtcgtccaggttccccttggagtcagggaggatcacggacatgagagtggcaccccagttggtgaccttgatggagaagtcgtcgcccctcttgagctcgtgcacgccaaccgtcttcctctcagccgccgccgcatttcctccgccgcagaagcacgctgccacggcaaggcacagggcaagaagaacaggcagccggagcagaggcagagcacctcttgccatctcg

SEQ ID NO: 43586 - DNA, 204 bp, Setaria italica
  Peptide Sequence Number=SeqID_109560
atagtgtacttgtttgttaaattttcacgggtctcgttctcaatcctgtggcctatatttcacaatcaacgactgaattccatacaaatacgacattatagagcgaaaggacctctagcctagtagttagagcaccttagtagtacccagcaggcctggtgactctcgtgggagcgaattaaacgggtctgaaataaaaaaatt

SEQ ID NO: 43587 - DNA, 667 bp, Setaria italica
  Peptide Sequence Number=SeqID_109561
ctagtttagaggtagtttaacaaatacaaacaatacaagtaggttacaaagttactaggttaccaagccaacaacgcagtggagggcgaggcagcctgaccactttttcgacccgagcagtgccatcgtagttggtgaggtggtctacttcaaggtggatattgtattcgacgtcctgatttgtggtgatgtctaccctggcattcctcttgattgcatcctttcgtttgaccttgagagagaggaatggaggggaattctcaatgggccaataagtgaaatttttgaaaccgacaagtatgctggtgatttggatggctaccgtggtctttggactcaggttactctagctgacctgagaggctccttaggtcttgtgcactatcgtaagcaccggcacatgatggacctctgggttcggaaagacattgacggtggtctctgggtgaaagagtatatcattcggattgaaccgattttcccaactactgaatcgtgtgtaaagtcattgtttatgttagatgacggaaggttagtcatccatttccctaaccccggactgttgttcatctatgatccaagaaccaacacttctgcacaagtggagatgagacatcttgatgcggttgcgatgtacactggaaatctgttgagttttacaagttgg

SEQ ID NO: 43588 - DNA, 414 bp, Setaria italica
  Peptide Sequence Number=SeqID_109562
ttttttttttttcgacaaaggcaacctgggaaatatttttcagagcaagcagcaaagtatgttccaacacctaaattacatcattcctcatacatcttgcaaatattaattttcttttgaagctttctagtcctatagtgattattgttctttgctgcatccactttctccttttctgttaatgctgtctactgcagtaacttgtatcgtatttaactatccttgcatattcctgcatgaatcccttgcttctaatataccactttgagcttgcatggtttatatttgtactgttatatattattcactgcctgagatcagataaagatagcaatgcttataatcattttttccaggttcttatgtagcagtaagttctactcgcgctggaatacctgcatatgcttgggtatt

SEQ ID NO: 43589 - DNA, 1017 bp, Setaria italica
  Peptide Sequence Number=SeqID_109563
ttaaaaaacaccatgtccaaacattaactgaggcctctaaacgagtaccaggtccaaacattaaagaaacatagtccaaaatgacacaaaagcaggtacatgactccagctgctgcattgtcgcctcctgctgtggtgatgataccataggaattgttcccagctcaatgaccacttctagtttctgatttcaatagagttcccatcattcaaatctcctgaagttttgcatttgtgaagctcatattgcagcgttacaagtgccataggccatctcacaagagctgcaagctcagacccctgtgctgtatatgatactcctaatttgtaagcatccattctatgagctactctgtttcgtaaataatctgtgaataacttcccctcactgtattccatggccttctgaccttggatatttttcttggcatattgtggcttcttggagttgtatattcccgccagcaaatcattcgtccggacaagtgttcgccaatcaattttatacttcatgcgccccatcacgcacatgatctgatacacttgaggtactgataggaccttcagatgctcatgcatcctcatgtacatgcctcccctatcggacaaagaccaaagagaagcatggacacggaaaagagatcgtttatcaaactcattctccatcaagtcaagtaggtgctcgatatcatccggaatgggtccagccttagaaaatgcatcatggatgattttcttcgcacacttgtaatttgccttaagctgtaaaaggtccagtttccggcgctccacgttgtataacacagacattttatctctgaaccggatgttttgttcactgaaagtgcccaagcattcattgttttgctcaagcacccagaggttctgaagaagtgactgggcaaataatttaccgtcttcggtagccacctgtcctgaaaatctccctctctcaccaggtatatgacaacatgttccactagaacgtagccttccattaccggcagctatactcat

SEQ ID NO: 43590 - DNA, 533 bp, Setaria italica
  Peptide Sequence Number=SeqID_109564
agtgagcaactctattagaacaacaccaaagctataaacgtcgctcttctcggtcagtctaccggtgtagtagtacataggatctaggtatcctagtgttccttggatagccgttgcaacaccagtttgatcaggtggaatgcaccttgaagctccaaagtccgacactttagctgttagagagtcatccaatagaatgttatgagactttacatccctatgaactatagggacagacacggccatgtgaaggtaggcaagggctctggcggtttctgtcgcaattctcagcctattctgccatggtaatgatgttggtccttggacgtgaagatggtcataaagcgtgccatttgaaatgaattcatacaccaaaagtggcacttcggtctcgaggcagcagccaaaaagtcttaccacattcctgtggttgatctgtgagagaatggctacctcatttatgaattcgtcaatctctctttggattgccaccttcgactttttgatcgcaacaacgtgcaggtctgataata

SEQ ID NO: 43591 - DNA, 675 bp, Setaria italica
  Peptide Sequence Number=SeqID_109565
aagtgtgatcatttaactgccgcaagatctgatttgatgccttggcgcatgatgatgcagtttcttacaatgcgatgattgaaggatatgcaaggcaaggtgatcttaaagaagcgcttcatatattccgtagaatgagatattgctccctaaggccaaacctattgacctttgtttcgctccttgggtgtcatcatttcagtcagctattgaattgagcaagcagattcatggtctcatcatcagatcaggaacttcagtagacctatacgtggggagtgctctaattgatgcctattcaaaatgttccctcgtggatgatgccaaggctgtgtttcttatgatgcaaaacagggacatggccatctggaatgctatgatatttggccacgcgcagaatgagcaaggtgaagaggcagtaaagctcttcagccagcttcgtgcctctggggtaacacctaatgagttcacatttgtagcactagtaactgtggcaagcaacttggcaagcatgttccatggtcagcagtttcatgctcagatcatcaaagcaggtgctgacattaatcctcatgtttcaaatgctcttatagacatgtatgcaaatgtggcttcagtaagaacaaactaaaagtaaaaactaaaaagtaaaaaggaaaaaacaaaaaagaaaaa

SEQ ID NO: 43592 - DNA, 391 bp, Setaria italica
  Peptide Sequence Number=SeqID_109566
gatgttttatagctctttttaacaagaactggtgtctgataaattgattactctgacccatttatttaccttgctttctttgctgtatctgcatattatagctgcaaccttatacctgcacctcgtagcagttactaaaagaaatagagtgccattaaaatgaggcttggacagtttgggaagaaatatgcaaattgtggactttggtccatggagttctaaaacatcaattttttaatacagcagatggtgtatgattaacattgcaaaagactgttgaggacaaatctagtgctgttgttttcatatgtattttgatagccttaaccttaactgtgattacattttacttcctccgtttcaaattgtaagtcgttttggcttttttaga

SEQ ID NO: 43593 - DNA, 421 bp, Setaria italica
  Peptide Sequence Number=SeqID_109567
ctaccagggtaattctgacttcataacattatttggaaagtggtccctcttccagtattttccaagtttatgtagagttggtattatttctttaactgtgtcacagaatttaccatgaaatcaattgagtaagataatttttttctagggagatttttaattgtgaaatttataacttttctctctgtgtgtatatagggatatataggaatatttagattttctattcttgagttagttttaataatttttttccctcaaattttattggcataaaaattatttctaacattttctagttgtcctttcaggatctatgcttatgtcccctcaattattctgatattggtgacttgcttcatgtctctttctttcctgataaatctggttgagtttcattaatgtcactgatttcaaaaca

SEQ ID NO: 43594 - DNA, 413 bp, Setaria italica
  misc_feature (350)..(350): n is a, c, g, or t
  Peptide Sequence Number=SeqID_109568
ttgggttgtcttgggttacttctgtgatgtagctgtggctgccaccgctggaggtgtctctcaaataagagcattatcaggatgcactgttggtggagaggatatccttcagaatacaatgcgccatgttcttcccaattttgacagtctatatgctggtcagacaatggatagaataaagtcgatgggtctagtgcgaatcgcaactcaggatgcaattcacaaactggctaaccaggagtctgtggagatcaatgttgatttagggaatggccagcaagtgtcaaaagtcctagaccattcagagttcgaacaagtcaatcgggcgatttttgagaagtgcgagaagntcatcaaccagtgcttggttgatgcgaagttagtaccagaggatatcaatgatgtcatattgg

SEQ ID NO: 43595 - DNA, 280 bp, Setaria italica
  Peptide Sequence Number=SeqID_109569
aacgttcaaatgatttgaaaagagatgaggataatggatgtttcttaatcaaatctccacgtgtctatgcagtaattggattcaacaaccgatgattccctatcttcgtagcagataaatccaacaaagaaagatgactctgtaagtagcaactgatagcatcagtttcttccactattagctacaaaaaaggccccagtcaacacattgcctttgtgggcatcgattcccagccagcaccacccaatgttgaaacaattctttttatcgtcgagcagtg

SEQ ID NO: 43596 - DNA, 397 bp, Setaria italica
  Peptide Sequence Number=SeqID_109570
tggacggcctcgcgtggggcggctgcagcgtggtacggcggcggccaccgacgaggaggcgggagcggcaccacggaggccgccggcagctcaactccatcaagcgtgcagcggtgcagcctccggggtggaccatggctcgcgtctcggaggccatgccggcctgcccctccgtggctctgtgtgtgcggctgtgcgtggaaacaaacgggtgagaaagagatagagtaaaaaggtcagttgggtgggtcccacggtcactttgagaggcgtgcgaagagctaacctgatggacgagctgtcttttatatcgacgtggcagagccacgtaactccatgagctagtaagccagctcaaccgttggacacggccttatggagctagggccgcgggcat

SEQ ID NO: 43597 - DNA, 347 bp, Setaria italica
  Peptide Sequence Number=SeqID_109571
acgggcgcgaggagggcgcgacggaggcggaggtggtggaggcggcggcccaggcgaacgcgcacaagttcatctcggcgctgccggaggggtaccggacgcaggtgggggaggcgcggggtgcagctctccggcgggcagcggcagcggatcgccatcgcgcgcgcgctcctgaagaaggcgcccatcatgctgctggacgaggccaccagcgcgctcgacgccgagtccgagcggtgcgtgcaggaggcgctcgaccgcgccggggcggggcgcaccaccatcgtcgtcgcgcaccggctggccaccgtgcgcggcgcacacagcatcgccgtcatcgacgacgg

SEQ ID NO: 43598 - DNA, 414 bp, Setaria italica
  misc_feature (412)..(412): n is a, c, g, or t
  Peptide Sequence Number=SeqID_109572
caccttcggcatcgcattggtcacggctttcttcagatactcgagacattcatcatcgtccttggattctctaggagcgtccatgtccataagccgtcttacaaggatcagcgattccaacgctaccttgaaccggtaggtatggtggagctgcaggaggtcggggtccagaggcgccgtgatcttggcgagcaggcccggggcgcttctgatggccccgaggttgccgctgttggcggcgaggttccggaggattcgcatgccctgcagcaccggtacctcctccctcctcagctggggcctggagggagaggcctcgtggtcgagcagggacgcgatgcatcgcatccctccgggaaactgatccaggtagatgtcgccggcgaggtgctccagtatcctcgcggcccgnag

SEQ ID NO: 43599 - DNA, 389 bp, Setaria italica
  misc_feature (368)..(368): n is a, c, g, or t
  Peptide Sequence Number=SeqID_109573
taatttaaatttttgtattcaattttgatctataatcactcccgctagctctttatataaccaattcaatctaagagcttcaatatccaagtgaaagatagatgatatacatgtatgttttatacgtgtcatttcagttatacacgtgtagcaaattgcagggttttcacatctcaagaaagtaaataaaatggcatatactacaaaaaccatgttcgaaatataatgatgaaaaaacatttcctctgtgatatagttgtttgattaggagatggtatggtgggcatgttgtgccagcttccgagctatcatttcgctatagatgatttgcacagactcgtgaagcggaagatgagctgtttttttcnccaatctaaatcaatcacatg

SEQ ID NO: 43600 - DNA, 613 bp, Setaria italica
  Peptide Sequence Number=SeqID_109574
agccggatggtgcgggtcacgttgatggagccgtagtggtacgagccctgcgggttcggcctcggcccgctcgccgtcatgttcgtcctgatggagcgagcctggttcagagaaaatcgacgtcgcttggtgcatcgggtaatgcctcgaaagctgggccacttgaaccagcgtagcggatgacggcggtagagcggagggtggtgttgatgaagcgggagtagatggagtgttggtagtccctgggcctggcggtcggcggtgaacagcacggagagcgactggccggcgtggacgtcgacggaggtgtacgagttctgaaccgtgtgagtgccctccacctcgaccagtgtcatattgtgcccttggatgaggaagttgagcgtgttctgcagaccgacgttggaaatgcgcaatctgtatgtctttccttgctcaactgtgaaatttgcaccgtctggactcctcttcccgttgatcaggatgccatcaggggaagcagttccttccactgtccagcaaatcttgtagcgccttgtggctagcggtgtaccagtcgccgatgagcacagtgtactcgtcgtccggcgaggggaacggacggggatcgaac

SEQ ID NO: 43601 - DNA, 284 bp, Setaria italica
  Peptide Sequence Number=SeqID_109575
tctcatcattcgagttagaaataatttgtttggtcttggctgatgtagtggacaaagggataagttcttttttgggaccatacatgactaagctgggctccagaaatcatttccggcaaaattatggaccttagcgaggtaccggaagctgcttggtttccaattatttttcttctttaataagttaaccatcttggaacatttttagtcataagaaaaataaatctctgataaactagtgcttgcaaaacgttggcacatgttttctttacactataagccag

SEQ ID NO: 43602 - DNA, 481 bp, Setaria italica
  misc_feature (459)..(459): n is a, c, g, or t
  Peptide Sequence Number=SeqID_109576
agaagcctcaagtccaacgcgctccacggccctgtccccgacctctccccgctcgccaacctcaaggcgctctacctcgcggggaaccgcttctcgggcccgttcccggcctcgctcgcgactcttcggcggctccgctccatcgatctctccgggaacaggctctccggcgagctcccgcccggcattgaggccgcgttcccgcacctcaccttcctccgcctcgacgccaaccacttcaacggctccctcccggcgtggaaccagtcctcgctcaaggtgctcaacgtctcctacaacaacttctcggggccggtgccggtcacgcccgtcttgacgcaggtgggcgccgccgcgttcgcgggcaaccccgagctctgcggcgaggtggtccgccgcgagtgccgcggctcgcacctcctcttcttccacggaggcggcaacaacggcaccgccgcnccccctgttcagagcgctgccg

SEQ ID NO: 43603 - DNA, 372 bp, Setaria italica
  Peptide Sequence Number=SeqID_109577
tggcggcggtgggagggtcatcgcctcggcggccggcgccgtggccgccgtcggggcggtgttcgcgtggaacgcgtggcggaggggcgccgaggcggagcggttcttccggcggttcccagatacggcgttcgacggccacggcgacatgcccgtcggcgagctcgtcaagatcaccgggcaagtcacctgcggccgccacccgctcgccgcctacttccacgacggcgccgccaggtgcgtgttcacgtccgttcagctgttcgagcgccgtggatgggcccggtgctgctgccgccgccggtggcagcagagacactccgaggcacgggtggcgaacttctacatttctgacaggaactccgggaagag

SEQ ID NO: 43604 - DNA, 661 bp, Setaria italica
  Peptide Sequence Number=SeqID_109578
tggcgtgcataaacctccctagtgggcagcgcataaacctccctagtaggcatagggtcccagccaaactcccttaccaagaggaccgggttatacaacgactcagtcccccttcttgtcctttcggtaagattactctagactaaagtctctaactaattagccaagatcagagccatttagttcttgtggttgtactgttttccccggtggttctccatgttccaattacacatgatgatcttgtattaatgaaaggtatagcataaataaatcaagattaataattgagttcattaataccaccatatccaagttgagcaactaagcatgaactacccaacattatgtacacctaggttgatcaaggtatagggaataaaactagtcaatccttaattagctcccatcatgtttatgacttaaagtgcatggcataaatgttattgaacatgaaagtaaaagttcttcggatcaaactgtggtcaaggacacgactttccttgtaggacttgctccagctgctcggactcttcaaagtcttgagcttcaaatccctcgagctgcggtccttcttcaagcaaggaggaagagaactgctcgacttcgggggcgacttcggcttcgtgggggcagggagctcagctatagcttcgtcttc

SEQ ID NO: 43605 - DNA, 356 bp, Setaria italica
  Peptide Sequence Number=SeqID_109579
ttttattttgttcgagaagctaagagaactgctacaagataagaggtacctcatcgttattgatgatatatggtctgcatcaacatgggacactattaaatatgcttttccagaaaataatctttctagcagaaccatagccactacaagaattgttgatgtagcaaaatcatgttgtccgcatggtaatgaccgcatctacgaaatggaagccctaagtgatcttcactccaaaaggttgtttttcaaaagatatttggttctgaggacagttgccctgatgtgctcaaacaagtttcagataaaatattagaagaaatgtggaggcctaccattggcaattatcagtatatcca

SEQ ID NO: 43606 - DNA, 406 bp, Setaria italica
  Peptide Sequence Number=SeqID_109580
tacaagaattgaccatgcgcgttgaagatggataagcctgtttgtgaactcttccatagttaccatgcaaggccttattgttcctgtccttcgggtacatcggaccagcctgcttgaagcctgccactcctccagtgtaaccaggacgtccaccaccatagttttcctgcaacctccccaattttgaagggtcctgattctcagccctgcgtctcggtgcttcttccactagagatttaccaccataagccatctcatttctctccacaatgacagaaaggttatctgccatctgagagagcaacctgtgcagcctgttttgctctgcattctgaaagacgatgctccgtgttggttggtcccaccttgcatgaagctcctcctgtatcatcatcttgctgacaat

SEQ ID NO: 43607 - DNA, 275 bp, Setaria italica
  Peptide Sequence Number=SeqID_109581
accgaatcatcacgagacgagaggcttcgacccaaactttctcgcgccaccaaaccaaccaggtgctacgtcgtcgcaggggcagcagagccaccgccagcacccggctcccgccatggcgaagcgcgccggggggttccacctcccgaacgccgagcaggagaactcgctcctcctccgcgcgctcatctccgttgtgtcaggggacaacgccgtgcccgcgctgctcccggaggaggcggaggcaccagtcgtcgaagctcccgcgccgtgca

SEQ ID NO: 43608 - DNA, 286 bp, Setaria italica
  Peptide Sequence Number=SeqID_109582
tgcccatcctcttctggatcgtcctcaatattactctcaaggtcttgaatgagggagtccagagatttgattttgcggtgaggccagcgaggtatcccatatttccggcattttctcttcagtatgcttactccaatcttgagagtctttgacgcttctctgattggaagatggaagtactgcgctatttcaaccaaagtaatgctatctatatgcttccggttggctctcggctgcttctgaactgatggtgcaagttctttatcagattgagtatccccattct

SEQ ID NO: 43609 - DNA, 306 bp, Setaria italica
  Peptide Sequence Number=SeqID_109583
gcggcttcgcccacgtgcgcttcgtcgcgctctcatcgtctcgacggaagatgctgatcacaaaagtttgttccagctgcctcggccgacctgcaccgcgcagagccgcccgtccggcgagacggagagacggcgagccggcggttgcagaggcagcggcagagctcgctgctccgtttgcggagggggaataaggtctcgaccgccgccgccagcgtgtagacgcggaggctgaacacagtggcccccgtgcagccagaacacggcgccgcgggcggggacgccggcgtccatcttggcatcttg

SEQ ID NO: 43610 - DNA, 962 bp, Setaria italica
  misc_feature (1)..(25): n is a, c, g, or t
  Peptide Sequence Number=SeqID_109584
nnnnnnnnnnnnnnnnnnnnnnnnntttttacaaagaagaacgtatagtatatcagttggtagctattgaaaccatgtatcatggatcgaccagcagttttgtccatcaaatgcgtcccttggaatgaatagtaaaagtgtcctttttcctatggtagttaagaaagtagtacacatatcaaacagctgaaggtgaatctaaatgagcttcttcttccggaagaacccttgaagatgccacagctgcagcacagagaccacaatgcagactccaagtgataagatgctgaaccaggcaactctagaatttgttttctcgctcactgtccgcatctccgcttcccttgctttgaggtacagcaaattatgatggatggactcgactgcagcctcaagtttcctaagctctagttctacaccctcaattttctccttcttagcaattgtatcccagtccttagctgcaatgcctatcttccaatcgagattcagagatgttcctgatcctttctccgcactgtctatccagaagcatgcaagatagtttccagcttctgacgtagtgaatgcaaactgacccgttgtggcattttcattgtgatgtacagtgttgccatatggtgaggtaaccttgacggcgacggtggggtgcgaggtggggtgggactcgtacatgatcgcgtagtcggcgagcacgacgacgttgggctggatctcctcggagacgcacttggtccccgacggcggcagctcgagccacactgcctccgccccgggcatcagcagcagcatggccgctaggagcagcgccggaaaggtcgacgccgccatccgccccggccgatctggtgggcgggcgcctccctctgcctcccccccgggtcgcggtggagtcgtgggagctttggacttgcgcgacgcgggcacgagcaatggcgtgcggtgcggggggtaggttcggg

SEQ ID NO: 43611 - DNA, 537 bp, Setaria italica
  Peptide Sequence Number=SeqID_109585
ctgggttttcctatttggtgggggtactcgtcgtaatggcagctgtatgtctcctcctgctccccatgaccctccctttcttgctctttctcaatgttctctctgcctttgttttgcagtggatatcatttgcaagacctgctatcgtcactttaaatctccggattgtttgacgagcgaaacacttgcatgtgggcacaagaatgcggaaagagtttgcgagatgtgcgattgccgctcctgcgtgcttcatccattcccggatcaggagaatgtgcgtatgcctatcgcggataccttcatcgcaactaatttgaggaccagtgtggatagaatgcatacctgattttttagggcagaaagcagacttaatttgatgctttagctagagtcatctgtcgtggctgcctatattatataggctatatatgtacatggaacatgacgattactttctaccagagtagtagaagttggaaattaccattaaaccatgcttctatatgtggaaaccggaagatccttcatgcaaatggg

SEQ ID NO: 43612 - DNA, 1415 bp, Setaria italica
  Peptide Sequence Number=SeqID_109586
gccgcgtgaactctgctgctccgagacagcgagcagagcacgtgaggcagcatggcttcctcctggtacacctctatcattgtccttgtgctgctttttgggggatccaaagccaaccctgctgcaacatcccacggccagctggatgtaaaccacaggaagccactacagacattcagacctcacaacattgcccacaggggctcaaatggcgaattgcccgaagagacagcagcggcctacctgagagctattgaagagggtgcagacttcatcgagaccgatatactcgcatcaaaggatggacatctgatctgttttcatgatgtaacgttggatgcaacaaccgatgttgcgaaccggagggagtttgccaacaggaagagaacctatgaagtcgaaggagcaaaaatgaccggatggtttgttgtggactttactcttaaagagcttaaatcactgagggtgaaacaacggtacagtttcagggaccaacggtacaatggaaaataccaaataattacatttgaggagtatatcttgattgcgctttacgccgacaggattgtcgggatatatcctgagatcaaaaatcctgttttcatcaaccaacatgtcaagtggtcaaacggaaagaattttgaggataagtttgtcgagatactactgaaatatggctataaaggtgaatatatgtctgaagattggttcaagcaaccgctgttcatacaatcctttgctccaacttcactcatttacatctcgaatatgacaaactctcctaaagtgttcctaattgatgacacgacagttcgaactcaagacaccaatcagtcatactatgagataacttcaaatgcctactttgcattcataagaaattatgttattggaattggtccatggaaggatacaattgttcctccaaagaataactatttaggacagccgaccgatctcgtcgcacgagcacatgctcttaatcttcaggtgcatccttacacattcagaaatgagaattcatacttgcacttcaacttcaatcaagacccttatgtcgaatatgagtattggctcaatgagatcggtgtcgatgggctattcactgattttactggtagtttgcacaagtaccaagaatggactacaccatacccaaagaaggagaagaatgcggaagcactgttgcatgagatcgccaacatgttgaaggctgatggatactgagcataggttcccttcccttttcagatttatatcattgcttgccaccaccagaaagcactgttttgcttttaccactatgtaactgttaccaacaacgcaacgaatgtgccaactgtatagcagaatagattcagattaacatgcaataattttgctttctgaaaacagggctttttacaaaaaaaaaa

SEQ ID NO: 43613 - DNA, 522 bp, Setaria italica
  Peptide Sequence Number=SeqID_109587
ccgctgctccagctggtggttctccaacggcaacgcccatgaaagagacagcgccaccgccagcacgagcagcagggcggcgaggaagtggtggtccgaccccgagcccagcaaacaggagtacggctactcttctctagaggatgaggaggaggacgattacgaggacgaggatgagccggggttccccggcttgggcggtgccggagagctgttcgacgagccatggttctccaaggtctttaaaacgtatgggttcctgctaccggtgatgctggtgtcaatgcttgctgcaacagggcccaaggccttccttatggccatggcgatcccacttggccagtcagccatatcgtttctcctcgacgccatatggggaaggagaagaagcaaccgcgatgacaggaggagaccattccaagaagaagatgaggaagaagatgattaccctgaggataccactggctttgcatcaggtggtcggggcaacagatacagcagcagcagcagctattatgaggg

SEQ ID NO: 43614 - DNA, 326 bp, Setaria italica
  Peptide Sequence Number=SeqID_109588
gggggggggcgcaatgagtcgattgatattttcgatgccgcaaaagaaaatcaaggaaacggcagagaaatcaagctggagagcccaagatatttctcaagattcagacggaaacgaaacagctctccgtgaaatctgatgcaaacagacgaaaaatctgagaaattgtatgcctcggagagagaaacgagagggagagagatcgagctctgcagaggctgcctcgaatttatagcctgcgcgccatgcggaaggaaaatcaaacgggacggaggagaaggcgaagatggagagggaatgcagatacatctcagctgggtacgggg

SEQ ID NO: 43615 - DNA, 410 bp, Setaria italica
  misc_feature (342)..(410): n is a, c, g, or t
  Peptide Sequence Number=SeqID_109589
ttcaccccacagcttgcaccgggacctgaagctggactaccccaggaagtttgttcaggtggaagacgagaagggagccagctccaaaaggctgcaggcgctggggtggaagttcaggacggccgagcagactctcagggacacgattgactcgtacaaggctgctggaatcctaaaataatgaggactgatgagtgattgagccatgaagattggactcaaattaaggtgtaacaaaatgaaagggaaagtggtaataatgagaagcaataaaactgcaggcgtcgaaattggcagtgcctttctatttttagaaaaaataataaataaaacacaaacttnnnnnnnnnnnnnnnnnnnnnnnnnnnnnnnnnnnnnnnnnnnnnnnnnnnnnnnnnnnnnnnnnnnnn

SEQ ID NO: 43616 - DNA, 261 bp, Setaria italica
  Peptide Sequence Number=SeqID_109590
acgttcctcttcctgttctttctcagttctcagccgtagccgtcgaggttgagccgtcgcgctcgtgtcgttcccggccgcggcgccgacgagcaggagcatgtggtccgatgggggaggggattggttgctgacgggagcgttagcacggtggagagagacgcacggcgacagggtcagggtccaggcctgcctgcgagttgtcacgcacctcgagcatccgtgacgagtgccccggcttggcggcttccggcgggcttc

SEQ ID NO: 43617 - DNA, 471 bp, Setaria italica
  Peptide Sequence Number=SeqID_109591
tggcaaagcctggaatggccgatcagctccgtgccgctggcatcctacaaatccaatacactcgggtgcagtgtgaatggcctggagtggatgtaaccttctctgtggacaccggttcgaacccgaactatcttgccgtgctcatcgagtatgaggacactgaaagtgacctatcgggcgtcgatatcatgcagagctcgacggggcagtgggtgccgatgcagcattcgtggggtgcagtgtggaggctcaactctggctccgccctccagggcccgttccatatccgactgactttcagctcaggcagggtgctcatcgccagcaacgccatacctgcagggtggaacgccggcgtgtcgtaccggtcaggaggcgtggcggtgacgagggccaggcccaggagtgctggatgccggggctacaaggcagcaggagcatttggcgatttggtgtatcaccttctcctgt

SEQ ID NO: 43618 - DNA, 337 bp, Setaria italica
  Peptide Sequence Number=SeqID_109592
ccgatatattatttgttcaggatgtaagtaagttaagtagtcgactacttgcagtgcagatccgatccagtgcctcccttgccacgatcatcagttgctgcttccgcctgctgatccatgagttctgatgtatccccatggcaggaactggttgaaggcatggatgagctcggggtggccgctgagaaggaccttcatccggtcgaccacctcttcagtttcgatgctcccggccctgaactggcgcatgacggcgaagacctcctcgtacctccccggctggccggcgagctcgcgcttcagtgccgtcacgaaccgggttcgtcgttggagcgtc

SEQ ID NO: 43619 - DNA, 1476 bp, Setaria italica
  Peptide Sequence Number=SeqID_109593
acatcaatagttttggtaaaactttcaccttcaccactacagggccttcattcaagttgttctattctaacttaaaactctaggatgttttcttgagcagtagtatacaggcttttctaatcttaacaactgcatcttaattccatctcttatttgtcccaaagaaattacatttgtctgtttaaatgaaggcgttgtcctcccgatccgattggaaaggcagctgacactccatcgcctgtcactctcgcggagccgccgtcccgccggcgttcgcttctccactctccggtgctctcggcacccgcgcatctccaactcctcttcctccccgactcaatcgcaattggatgggcttcctccggtgcgccgttggcttgtgcagcagtcaggttgtttagatcggtgtgcggcgcgaggtcaagcccaggcactgtatccatggagaaagcgaggctcacgccgttcccaagggagcaggccgcgaccaggatatgcatggtgtctagctttgctacagaattgctagagataaggtccaaggagccgtccctccatgtgctagttattcctggaaatccaggtattgctgcattttacaaggactttgtcgaagctctctatgaaaacctcgatgggcaagcatctattacggcggtagggcatatttcacatagccagaaggattctgagcatggacggttgttttcattgcatgaacaaattgaccataaggttgatttcattgaacaagagcttcaacattctgaacaatcaatagttttggttggccattcaattggtgcatacataggtctggaagtctttaaaagatttcagaacaagataaaaatgtttgtaggactctatccatttttaaagttaaacaagaattctgtaacgcaatcagcaattggatatattgcaaggtcatcattccttagtaaaggggttagtttatttgcatctttcatcggatcactccagccctcaattacaaggggcattgtgagaaggttccttggacattcatggtctgtaacagctgttgatgtcgcatgctgccatctcttaaagtaccatacgatgcgtaatgttcttttcatggcaatgacagagtttcaaaagcttactgaagaaccagactggacgttctttagagcaaaacaggacaaaattgcctttttgtttggtgtagacgatcactggggtccactatctcacttagaagagatatcaaagcgcgcgcccggggtcaccttgtcggttgaaacagaaggtcacacacatggctattgctgcagggagatcggatccttttgggttgcagactacatcgcaaatttgattaaaaagcaaagcctcattagaaacaactagggtgcatttgacaaatgtattatatgactcctttctccaaagggagggtgagtaaaaaaatcctgtgcatcgtgcacgttgtttggcggattctag

SEQ ID NO: 43620 - DNA, 504 bp, Setaria italica
  Peptide Sequence Number=SeqID_109594
ggggaggtgttggagaataatgaacctagaaaaatacaaaacgaacctacaatttgaaacggagggagtagtgaatgcatccgtacatcatcctagtttgcaccctactcacaaacacaagtcaccaagtactagcctacaacggcatcacgaaggaaccagcagtacgacatctctacaactacaaggccacaactcacaagcacttgatatcttttgaaagcgtgcaaatccagtaacggtggagctgcgcggcaacaagcatgtcgcacatcagatgcttcactctgtcacgtactgcaagaacgcctcgtcgcggaggaggcaagccatggtgtcaggcgcgaggcaaacctccacgtcgacgctgccatccccagcctggcccgggaacgccgacatcttgccgtcgaatttgttcgcgcggccgctccgcacagcgagggcgcggccccacccgaagtcgttcccgtcgtacatcgggaaccgtggcgagctccccat

SEQ ID NO: 43621 - DNA, 334 bp, Setaria italica
  Peptide Sequence Number=SeqID_109595
ctccagataagcgcggtccgaggatggctccaccgatacccgccgccgatgccgtggtggaggctgcctcggccgtcggcgcggccccggccatcgcgccgaacggaatggcccgcaaggacgtgccggcgccgccgccgatctccgtcgtctcgaagcagacggttcggccggccggcacatcggcggttggagacctcaggctctcggtctcggacatgcccatgctttcgtgccactacatccagaaggggctcttcttccggcctcccggcgtggtgatggcctcgctggtgccgtcgctcgtcgcggcgctctcacgcgcgctcggtgt

SEQ ID NO: 43622 - DNA, 648 bp, Setaria italica
  Peptide Sequence Number=SeqID_109596
gacgctagctcggccacggtcgccttcgtcgccacgctctggatggcgttgccgaagtagagcggggagatcgccgggcgcaggcggtgccggcagttcacggccatgcggaacgtcgtcgtcttgtcggccgccaacagccggcgcgcgcgtgtcaccgccctccatacgtgcgcgcacaacgactggaacgacgagatttcgcggcacccgcactgaaccttggagtcgtgcgtgaccttgccgttaacctcggagtcttgaccggttcttttccagcggttggctgtcgccttcagctcgcgaatcgcggcggcactgaagtggaggattcgctcgcggaggggcgcctcggcgtcgaacgtcacggccgggcccacgccgccggggaagcgcaggacggcggtggagtcgccaaagaagttgcggcggaagtctggctcccggaccggcgcgccgcggcacagccccgcccacgtgttgaagaagtgccaaaaggaggtgccgtcaacgacggcgtggttggcgacgaagccgacgaacacggcgccgtcgccgagcacggtgagctggaacgacgtgagagggcggccgtggccgccgtagctcaccgtccggtccatagggaacagggcccgtttcgtggag

SEQ ID NO: 43623 - DNA, 1984 bp, Setaria italica
  Peptide Sequence Number=SeqID_109597
ttgctccaaagttcaaactagcagcaaaactatccgacacacagactatactattaaccattggagagtaacggctaacaatttcagaaacttatttctgacaccatgttacacggctcatctccctgcccacactttcagaaactttgcatagcttgcagcctaagagctggtcattccaagcacgcactagtacagtagttgctacctaagacggagcacaccgatagtacgagcgagacggatacagtgtcttggctccagccagctgctgcatccgaaaggcatgggcggccgagcaatccaacagcgttgcaacggcatgtcacgaccgagcgatggccccactcgcgcacgcacggcaccgttacatcacatcgcaaacaagctcacaacaggtgcgacgggcacgacacgtactgcatgaactcggcgtcgcggagcagcgccgccatggtctccgggggcaggcacacctcgatgtccacgctgccatcgccggcgcgccccgggaacgccgacatcttgccgtcgaacttgttggcgcgcccgctccgcaccgccagggcgcggccccacccgaagtcgttcccgtcgtacatcgggaaccgtggcgagctccccatcgtgagcgccgcgccgtcggggttgcccagcgggaagcaccgtggcgctgcctcccactccgccgccgccagccggatcgcgccgtcctcgtgcgccgccacggtcgcgtgcagcttggccgccgcccagcccaggtcgttggacgccagctccgacaccgtcgccgtcgtcaccgcgctctggatggcgttgccgaagtaggtcggggagatggccggccgcagccggtgccggcagttcaccgccatccggaacgtcgtcgtggcgtcgggcgccaggcgcttccgggcccgcgtcaccgcgagccatatctgcgcgcacagcgactggaacgacgagatctcgcggcgcgcttcgggattcttcgggtcgtgcgccatcttgccgtagacctcggcgtcgtggccgccgctcgggcgacggttggctattgccttcatctcgcgaatcgcgtccgcgctgaagtggaagacgcgctcccggagaggcgcgtccacgtcgaaggtcaccgccgggccgacgcctccggggaagcggaggacggcagtggactcgccgaagaaatttctgcggaagtccagcagcctgggtgcctcaccgcggcagatagcggcccaggtgttgaagaagtgccaaaaggaggtgccgtccacgacggcgtggttggcgacgatgccgatgaagacggcgccgtcgccgagcacggtgacctggaacgacgtgagcgggcggcggtgcccctcatagctcacggtccggtccatggggaacaggtcctttgtcagcttggtcgggacgtccgcgtcagggacgagaaagtcgtcaagcgacaggccgggcgcgacggcgtggagaaagtcgacgcccgcatcgttgcagcggatgacgatgcggtcgtcgggcagcgtgacgaggcggccggcgagggccgggacggcggcgagcgcccgcgacagcgaggacacgagcagcgagacgagcgaggccatgggcaggtcgggggccgggaagaagagccccttctggatgtagtggcacgacagcataggcaggtcggagacggacagcgtgaggtcgccgatcgccgacgcggcgtccgggcggacgtgctgcctcgatacgacggtgatgcccgaggccggcgcgtccaggcaggctgcctgcggcagcttggacataatggcggacacggccggcgccgcgtccaccatgggcatggtggagatcatctgagccatgtgtggtcgattgctcggcgctcttgcaccaccggccgctcgcttccactgctgctgatgcagcagtagcggtggcagttgagcagataggcagtgtgcgtgtgggtgagcgttgctcg

SEQ ID NO: 43624 - DNA, 301 bp, Setaria italica
  Peptide Sequence Number=SeqID_109598
cggaaggccgagatggcgcgaaacgccgacgcattcatcgcgctccccggtgagtagccgattgatttggatctcttgtgcagttgcctgactgctaatgatccaacaggtgggtatggcaccctggaggagctccttgaggtcatcacctgggcccagcttggcatccacagcaagccggtgggcctcctcaacgtcgacggctactacgactcgctgctctccttcgtcgacagggccgtcgaggaaggcttcgtcacccccgccgcgcgccacatcgtcgtcgccgcccacacgcccc

SEQ ID NO: 43625 - DNA, 1078 bp, Setaria italica
  misc_feature (1054)..(1078): n is a, c, g, or t
  Peptide Sequence Number=SeqID_109599
gttggttcgttttctctgcgttcgttccagctgaatggatgaagggatgagcagcagagccaagaataaacacaggccaggccaggcaggcagcagctgggcgatcctgttccttcccagtaggcagtagctaggacagtacgcaccgcacgtgtctatatatataaccaagcaacatacatgaggaagggagggactagctagcaagctgcacttgcttgaattagatcatccatggaggtggtgccggcggcgaagaagagcaaggcatcatctcggttccggcgggtgtgcgtgttctgcggcagcagccccgggaagaaggcggcctaccagctcgccgccgtccagctcggccgccagctggtggagcgcggcatcgaccttgtgtacggcggcggcagcgttggtctgatgggtctcgtctcccgcgccgtccacaacgccggcgggcacgtgctggggatcgcgcccaaggcggtgctgccgcgggagctcatcggcgacacgccgggggagctcaaggacgtgcccgggatgcaccagcggaaggccgagatggcgcgaaacgccgacgcattcatcgcgctccccggtgggtatggcaccctggaggagctccttgaggtcatcacctgggcccagcttggcatccacagcaagccggtggggcctcctcaacgtcgacggctactacgactcgctgctctccttcgtcgacagggccgtcgaggaaggcttcgtcacccccgccgcgcgccacatcgtcgtcgccgcccacacgccccacgacctgctcgccatgctcgaggactacgtccccgtccacgacgccgacgagcccaagctcagctgggagatggccgagcacatcatcaagtcctcatcgtccgacgaccaccacacctcactactcttctcacgctagctacctacctaccatttactacttactactccatcgaccatatacatattcaatataatattcacaatgaccgacttattaactatatataaaaaaaaattcgtcctcaacatcatcatctatacnnnnnnnnnnnnnnnnnnnnnnnnn

SEQ ID NO: 43626 - DNA, 306 bp, Setaria italica
  Peptide Sequence Number=SeqID_109600
agtaccttaattacctacaaaaacgcaatggttccctttgtgtgcgtctctgttgctgccgacagcctgcaaggagttctatcaggtattgccagaggatgcgggtggcagcacttaggtgcctatgttaacctgggctcgttctatctcgttgggattccaacggcgctcttgctcggctttgttctgaagatggaagggaaagggctttggatgggcatttcctgcggctccatagtgcagttcttactcctcgccgtcattacattcttcagcaattggcagaacatgtctgataaagcgagg

SEQ ID NO: 43627 - DNA, 1842 bp, Setaria italica
  Peptide Sequence Number=SeqID_109601
caaaagtctcttgcggtgtcaactctaaacattcatccgctacagcattaacgacattacaaccatacaatgttacaaagtaggggtaactgcgacagtttcatagaattggatgagtagttacagagatcagtttacccgtggttctactctcttacatttccaggacatacaacttcatcaggaaaagtttcagcccataaaaataatcggtagagatataaggccgttatgcagaagtggccatcctgataactgataggaggtcaatttagtcagctacacaggcatatctatgtcattacctagccggaccatcaagccatggcgacgtctgtgcccatacaccttaccttgcgaccataacgatgcaaggtcatcaacattacctacggaagggcactaggaagctacatgcaagcactttttgatgtttcagcccagtctttgccaggatctcccttcgaagaggcatgcctcttgtgaccactccgagtcaatagcgcaatgctatttgatcttggtatctgcacagccccagcaacacaatctccagcatgagcacaactccaaactcgagaaggtccttcccctagggaacgtaatcttgggaatccattttttagcctgcaaatcgaccagtgctcggtatctttaccagccagcttgtcgcacacagggcaaggagggtcatgcttctgccccttcggagttgtccgctccaagcactcagcatggtagacatgggagcatgggagaacaccagcaactggcaaatctccagtgcgcacaattcgacgagaaccccaaggtgatctcttggtcaaaaacctctcacaaaggtcacaccttgttttctgcatcacattattagaacgctgtgctccagctcgttcagcttcaggttgttctgatagatcagtaagatccatgctacttgcagcactccagtttcctgactccccatgactgccactggcatagtccatgggacctggagaacgaagctctccttttcccttgaactcagagcgcagaggattgttagagcttgcactggcaatgggactctgagttccttgcgcttctagtgcatgttcaggaaatgagagaggatgaattggctttgacaggaatgatcgacggcttgggaagttgcggggcgttgatgagtatgatttaggtacaatatcatattcacttccatcagaacgagaggaggtggaaccaccactattctgctgtcctgatattccctctgacaacaataaagcaccaatcggctcagcaactgaaactctcatgtattcatcaacactagaatctcgcagcattggcagcatagcatggtggttctggaagctgacatctgggctgttgaaatacgaaatggcaccctcagatgtagagtaacggtgctcttgtggaagctcattcctctcccaactcctactagcctctttactatttgatgacagtgatgacccataattggcagcaaccccgctatcaccatgggatccataagacaatccttccgaattgatcctgtactcccaccccctagacagaggtggagagaagccagcattagtccgccagggcgggtcgctccggccaatagaagaccactccctgctcgctgtgctagtcccatgtggccgcgctgctacgcagcataacgaacccatcctaattagagtctaatacggcaccctaactagcatgtaaaactcattcccagattttcttgctgcaaatcgaccacggcatcgactaacagacagcaaacaaagaacaaataaagggttaaagaaaaccccctaaaggaactaagaacaa

SEQ ID NO: 43628 - DNA, 520 bp, Setaria italica
  Peptide Sequence Number=SeqID_109602
tcaggaatgcaggcggccaagcaatgtgaggagaaatggaatattttcacaactaacggaaaatttaagatttcggagtttgaatcttttgttggaacacagtttccagtagaaataagtatccatccacctgaagtgttgcgagcgaagggaaacgagaggagactcaagcgaggttcagagcagtcatcaactaaccaaagagagaaaagatcaagaagcaccaagaaggttggggagcattgatgtgaattatgttttgtatcttatgactatggagcaaggcacttttgcagtcactaatgtgctgctctgtaccgggaagttggaggacaatttggtgcatcaagtatcaacatggacaactagagaggatcctggatttggtgtattttgtaataataagttagcgacataaactttttcttaggagtagttgatggtccaacctaggcattgacatatgccgacatgttgcacctgtgttaacctcaaatgtaaatatattccattgaaaact

SEQ ID NO: 43629 - DNA, 485 bp, Setaria italica
  Peptide Sequence Number=SeqID_109603
tacccttagttattctagtttagttttttattcggtactaatgtgagcattagtatcgggtctaacggctagttccccagagcctcccgtgaccctctttagtatcggttggaagctccaaccggtactaaaggtcacccattagtaccggatggagcctccacccgatactaatgggcctgaggggctttagtactgggtggaggctccaaccgctactaactttcctcctataaatcaggtgttttcttcctcttgcccgagccatttcctccagcttgggcttcatccattcatagcgaaataggggaggtgttgccggatttttgaccatttcgtgcggatttcactcattcaagtgttctaaagcttagaaacttcatcctcccttgatacatggttagtatactaagttttatgctttagagctagagtaatttgtgattttagaataaggtacaatggagaaattttttatttatatg

SEQ ID NO: 43630 - DNA, 398 bp, Setaria italica
  Peptide Sequence Number=SeqID_109604
taccaacgactagccaaccggccggcgtggaggtcgccgtccggccagggtggttcgaggtggcacccggggaaacgcgggagctggtggtcgagctccgtgcgaccagggcgtctggggcgttcagcttcggtgagatcgttctcaccgggagcttggaccacttggtgaggctgccgctggccgtgcggcccctcgcgacgacatgacagaaatgcagccgttcaggtcggcagtggaagtgcaaatttaagttgggctttatttaaggaatcatgagctgaagaatatatgcaaaaaaaactagtcatacaaaattacatatgcgtgctatgtgttacatgaatcattgtaaccggaactggttgcggctttgatagtactgttcgtatgtcatt

SEQ ID NO: 43631 - DNA, 1381 bp, Setaria italica
  Peptide Sequence Number=SeqID_109605
agggcgagctcatcaagcgcctcgtcgaggagactaaggccagggtccgcatcctggagggccccgtcggcgccaccgagcgcattgttttggtttctgggaaagaagatccaggcttagagctgcctcctgctatggatgctctaataagagttttcaaacgtgtcattggaatagcagatggagctgctgagggcactcaggcatctgctgcacctggtgtatgtgctgctcgattgttggttcctggagctcaagctattaacctaattgggaagcaaggtgccacaatcaagtcaatccaggagagcactggtgctacaattcgtgttatatcagtagatgaacgagagcgaccattctatgtaactgacgatgaaaggatagttgagatacaaggtgaaacagagaaagttgtaaaagcacttcaagcagtttctaaccatcttcggaagtttttggttgaccatagtgtacttccattatttgaaaagactaatactacagtgagccaagatcgcagtggtgatggttggagcgatatgtcacatccttcaataggttctgcacaagtaaatcaaccacctccagtagttgatgagtatattcttccggtgaagagggattctttgtatcttgaacgagaacctctagtagatcataacattcatcgctcaggcgtgtcactttatgggcgtgatcctgccttgtcaacattacgaccctctgggatgcatggtgctggacctctacttacacagataactcaaaccatgcaaatcccacttacctacgcagaggacattataggagtaaaaggagcaaatatcgcgtacattcgagctaatagtggggccgttgttacaattcaggagagtttgggcagccctgatgatattaccgttgaaataaaggggacatcttcgcaagtacaagccgcccaacagctcatccaggactccttggctgcacaccgagaacctgtcagaagcagctatgtgggagcaggattagatccggtgtacaggtccagctactcacaatatggcagctccacctattcgtcatcatcgctcccatcttattctagcatcgatgacggtaggtacccgtcttcaggcctgggcgggtatgggtcaagctaccggtactagtaacagttcatcgctaggaatgtttggtgcaccgtgtatctgttcctgaatgatcagtacaggtcggcaagtttcctgctgacttcgtgtgcttccaggtgggaatctggtggatcgtattgtatctctttctgcattcagggtatgctgtactatgttagagtgacaaacagacagtttataggtcttctcttttatggaattgaaatctgtactggccttttccg

SEQ ID NO: 43632 - DNA, 443 bp, Setaria italica
  Peptide Sequence Number=SeqID_109606
tcggctcgtcgcaagaaacatggcctgcaagattgggatgagtgctgtttgtgttgccaggaatccgaaagctctgatcacttgctggctacatgcagttacacacagcaggtatggtacttagttgatcacctcacggggaacacctcgatcttgccagcagccgagtcctcattgctggactggtggctgctccggagacggcgttttcatggtgccaggaagcgagggttcgactccactctcatcttagtctcctggagtatttggaaagagcgcaacaacaggactttcacaggagaccctcaacgtacaccgcagcagttagcagccgcagtcgcggaggacgcggcgaactggttcctggccggggctcactgcctttttagcataggctggcgcttcgtgagtcggtgacgctagtgtctgtgtaggtctttttt

SEQ ID NO: 43633 - DNA, 541 bp, Setaria italica
  Peptide Sequence Number=SeqID_109607
ttggcatgtgacttagcactcataagagttggagaagctagggatgctggccagagagcacattccacatatgctagactgaaaactatggacctgctattcatctgcgaaagcaaggggttgtatacatctttgctattttgcaatgtattatatttatcgaagaataaccttatccttggaccagcagccagtgctacaatttgaagagtattttctggaatcacacccaacattgcaaccttcattccatgatcatatgatctcaatttgtcaacaagtccactggtaggtgctacataggtgccagcactgttcgaaaggtcagctgatcttacagttagttctttcagctgtttgtggtgcatgaactgtctgtatagcagatacgttgatgaagcacataaataatccaaatcaaggtttaatctcccaactgtgaatctacattgccgaaaaccacttatacctttgtaaggatcaatgagaaaatatttgaattcaaaaataacagaaggtttttcatgatgaatcacacccg

SEQ ID NO: 43634 - DNA, 361 bp, Setaria italica
  Peptide Sequence Number=SeqID_109608
ttttaatacaacaacaagaactaggttacaacaataagactaggttaggtagagatttgacttgtgggaatcagaaggcgatgtgcgtgtatgctctctatcaagccttgccttgagtctcaagactgaatcccccgagggctttgtggtaacacacatccacaagacatggttgaacggttactcttcaggtgttgagcaggcgtctaagctctagactgttttaccacctctccgggcgaggcgaatgggattttcttgaggatagaataatatacctatccgagaaaattcttcgtttcctgtttataatgttaacttcttcccaaaaccgtactggaggttgtccagggagaggatt

SEQ ID NO: 43635 - DNA, 737 bp, Setaria italica
  Peptide Sequence Number=SeqID_109609
atggacgtgtggcaccgctcggcgcctctctcaccaccctccatagctctccggctctcccaagtcccaaggttccaaccgcaacgcagaaaccgaacagaaagagaagaaagcgcaaggaaaaaaaagggacgcccctgaaacaagcgccaacggaactgggatcgcgacacatcacacaccggcactccgcatctccattccccgcgcccccgtccggatccacccggccttggatcgaccccttctctcgtcggttactaaaatggataaactcaatggttctgcacgtcttatgattgtttcagatcttgaccatacaatggttgatcaccatgatgaggagaacctatccttgcttaggtttggtgccctatgggagtctgtttactgtcaggattctctacttgtcttttcgactggccgatcgcctactctgtataaggaattgcggaaagagaagcctatgctgaccccagacatcactatcatgtctgtgggcactgagataacatatggtgaggcaatggttcctgatgatggctgggaagaatatctgaataataagtgggacagaaatattgttgtacaggaaactgcaagcttttctgaactgaagcttcaggcatgttctgctgcatgcattattgctgtctttatctctattcttttggttgtgaactaataatgcattattatacatttgcatggatacagccagagacagaacagcgtcc

SEQ ID NO: 43636 - DNA, 1792 bp, Setaria italica
  Peptide Sequence Number=SeqID_109610
gcaaacacccccggaaactgatcggaaagggatcgccggccggatcgcaacaattctccgccaccgccacagccacagccacagccacagccacacagccgcgccttcttctccgtccgggctcagccgctctctcttcctctcttcctccggttcatgctcatccagctttggtgggggtagtggcagacggccggcgacgaggttactaaaatggataagctcaatggttctgcacgtcttatgattgtttcagaccttgaccatacaatggttgatcaccatgatgaggaaaatttgtccttgcttaggtttggtgccctatgggagtccatttactgtcaggattctctacttgtcttttcgactggccgatcgcctactctgtataaggaattgcggaaagagaagcctatgctgaccccagacatcactatcatgtctgtgggcactgagataacatatggtgaggcaatggttcctgatgatggctgggaagaatatctgaataacaagtgggacagaaatattgtcgtacaggaaaccgcgagcttttctgagctgaagcttcagccagagacagaacagcgtccacacaaggtcagcttttttgttgacaagaagagtgcccaggaagtgataaaatctgttgccaaaaagttggataaacgtgggctagatgcgaaaataatatacagtggtggccaggaccttgatatattacctcaaggggctggaaagggccaggcacttgcatatttgcttaagaagctaagttcatgcggaaagccaccaaacaatactcttgtttgtggtgactctggtaatgatgcagaattattcagcatccctgatgtgcatggtgtcatggtcaacaatgcccaagaggaactacttcagtggtacacagaaaatgcgaaggataaccctaagataattcatgcaagtgagagatgtgcagctggtattatacaagctattgggcacttcaagcttggacctaacgtttctcctagagatgtggacttcccttatgcgaaggaggcctccttcaaacctacagatgctgtagtgaagttctatgttctgtatgagaaatggcgcagggctgaggttccaaagtctgactcagttatacagttcttcaaaaatatcacagatgcaaatggagtcatcatccatcctgctgggcttgagtgctctctccatgcatccgttgatgcattaggatcatgttatggtgacaaacaagggaaaaagtaccgaacatgggtggacagactttttatcacacagactggttcacatagctggttggtgagatttgacttgtgggaatcagaaggcgatgtgcgtgtatgctctctatcaagccttgccttgagtctcaagactgaatcccccgagggctttgtggtaacacacatccacaagacatggttgaacggttactcttcaggtgttgagcaggcgtctaagctctagactgttttaccacctctccgcccacgcgaatgggattttcttgaggatagaataatgcaccttcttatctgagaaaattcttcttttcctgttcataatgttcctcaaataaaatgttaacttctcccaaaaaccgcactggaggatgtccagggagaggatttggtgcctacttgtttggtaggtaagataaatgctccatctcatgactttcatgagaagccgaaatgattcatggcgcgcgcgcgcacacacaaatcttgatgaataatgcacttctcttgattgctaaaaaaaaaaaaaaaaa

SEQ ID NO: 43637 - DNA, 329 bp, Setaria italica
  Peptide Sequence Number=SeqID_109611
tggttaggacccgaggtcgcccaacgccttcgacaacgggtacttccgggacctggtcgcccgccgcgtgctgctgcgctccgaccaggctctctacgggagcggcggtggcaacggcaccacggacgcgctcgtgcgcgcgtacgccggcaacgggacggccttcgcggccgacttcgccgccgcgatggtgaggatgggcagccttgtggggagcggcggcgaggtccggcttaactgccggcgagtgaactgatgatttagctgcactgcacgcagcaccgttctgcattcctcaccatcgtcaatggattattactttagttcat

SEQ ID NO: 43638 - DNA, 281 bp, Setaria italica
  Peptide Sequence Number=SeqID_109612
cctcgtggtgtcaagaagacactagtactagtgttgatacgatgagggccatgaactcgatagccgtctgcatcattctcctggtcatgtcttgcgccctgacatgcacctatggcgccggtgaagaatcgccgatatgcatccgtacgactatattttgtggtgtcaagaagtgtatgaaatcatgccaatccatgtacggcgacaggttcatcagggccgagtgccaacgggttgtgacattttttcaggcttgctgctgccacttggacgcccccggc

SEQ ID NO: 43639 - DNA, 423 bp, Setaria italica
  Peptide Sequence Number=SeqID_109613
taagttgtaagtgtttaatggtttaatagtagataagtagtatattttagttttccctgttgtgatagaattgtatacgactaatgagtctaggctattatctggggacagcttcttgttcttaaacttttgccttggattttgactggtttgcacttataagtgagttcgtaacatcatatttaatagttttatcatggaatctttccggtgatgactggagatctttgaattagtttcagttgtcgtttggtttttcccttttttggacaaaggtggttttctcacccagcaattccaactaccgacatccgttggttgttttttgctgtctcgcaacgttactgctgggagcacctatgctagcattttgtcacattttttcaccagggaagctagaatttttgccatgtcttcaccgtt

SEQ ID NO: 43640 - DNA, 488 bp, Setaria italica
  Peptide Sequence Number=SeqID_109614
caaaggattggccaacacatcttggattgccttgtaagctcgtccatttcaaactcgcaactactagacttcagatcgtcgtcagatggacagcaacaggaaccgctcgcagcctcctccgggctacccgaggatggacgacgcggagcagcagggcggcggcaagaagaagaaggggtgctgcggcggatcgtcgcggcgccgcgcgacgtcgggaaagcgtggcgaggcgagcttcatcgagggatgcatcgccgcgctctgctgctgctggctctgcgagctctgctgcgattagcttgctgctccaagaaccaagctaaggtggcggacttgttgtgtgccaacgcggaggctggtgtaatacgtcgtaaaccttttattatttgcttgtgtgtgtaagtgtgtgttcctcagctggtgtcgtgatggaagtcaatcgtgggaattaaaaataaaaatctatgaatacagaagtaaaaaaaaaa

SEQ ID NO: 43641 - DNA, 1198 bp, Setaria italica
  misc_feature (1144)..(1198): n is a, c, g, or t
  Peptide Sequence Number=SeqID_109615
ctcgcccgaaggcgacgcggccgcctccctggccgctgccgcggccgccatcgatgacctcgaccgcctcgtcgcggagtcgtcgcacgcgctgcccccatacgagctgcgatccgccctcgccaccgccgccgacctccgcgcggcacacagggcggctgcctctgagatccgccccaagaagtcattctcgttcaggaacaagagcagggccccgaagaacccgcctcaagatcctgccaccgtaccacaaccacagccgccgcctccggagcagccgaagcccagtattgacgcgatcctaccagggaccgggtacaaggacaggaatggcgccaccttggtgaaggatctgcgagtctccaacgacaaggatggggatttcacgctcgcggatttggtttcctgcgaggtctatctcaagggcacatgccgggcgctttatgtccacaagctgagagattgccgtgtgttcgtcggtgctgttcttggctcggtgctcatagaggatgtcgaaggttgcacttttgtaatggcagcacaccagatcaggattcatgaggcgaaggcgacggatttctacctgcgggtgaggagcaggccgatcattgaggattgcagtggtgtgaggtttgcaccacatgctttggagtatgatgggattgatgaggatttgaaggagtccgggctcgaggaggagactggtaattgggctaatgtggatgacttcaagtggctcagggcagtgcagtcaccgaattggtgtttggttccagaggaagagcggctgcagattgtcgacatttcagaggttcacgaacaggaggatgatagctgagctacttgggagggtttgctgtcagtctaattttggtttatccttctgggttcttggttggttattgaatagtttatgcctatgccttatatgggagttaggttttgttttttgggacaatgtacaaacccttgctgaattgggaaagtgaagaatggaattgttagtgtatcaaaacaatattgtacactctgcatacccaatagtaataagggcacacattttggttgcagatctggtgttgtagcatcagcacttctttacagctatgtggagaaaagaattgtctatctgattctgtgaatnnnnnnnnnnnnnnnnnnnnnnnnnnnnnnnnnnnnnnnnnnnnnnnnnnnnnnn

SEQ ID NO: 43642 - DNA, 509 bp, Setaria italica
  Peptide Sequence Number=SeqID_109616
ggcaaaactggagaccgatagctgcgataaattctaagctatttatttcaaggataaaagattgctgcaagcttcaatttcagcaatgtgggagctcaagatagcctgacccgaagaatgtgctccaatgacggtcgttgcagctttgaaaactgctgagcggaagaaggtatcctccattttctttagggtatcctcaagaactccgatgcccaaacagcgtgacaagatcagacgtccaacaacttcaccaaaatgtgctggagcttttggaaggtcgatagcaagatcgtccagaagggaaccgtaaagcaagcatccagtttccaagtctaccgtcttgaaaatattcttgctgtgaaggtgttccagtagcttcacaagaggatcgatggaattggcacctttgtcaagagcaagattgatggcttctttaagaagccatcaatcttgctcttgacaaaggtgccaattccatcgatcctcctgtgaaggtgttccagtagctt

SEQ ID NO: 43643 - DNA, 2449 bp, Setaria italica
  Peptide Sequence Number=SeqID_109617
ttttttaatacgacaaatagggtcacgttaaaaccttgtttatctcaggcagtagtacagaaaatcaacctaacgctacattagagcaaaatttgtggctttccttctttcatttcctcactgtccaaacaataagcacccatggcttctcaaacaaatatacagctcacaaatggttgcttctcactacagcagctttataatttctcaactcaagggcaaaactggagaccgatagctgcgataaattctaagctatttatttcaaggataaaagattgctgcaagcttcaatttcagcaatgtgggagctcaagatagcctgacccgaagaatgtgctccaatgacggtcgttgcagctttgaaaactgctgagcggaagaaggtatcctccattttctttagggtatcctcaagaactccgatgcccaaacagcgtgacaagatcagacgtccaacaacttcaccaaaatgtgctggagcttttggaaggtcgatagcaagatcgtccagaagggaaccgtaaagcaagcatccagtttccaagtctaccgtcttgaaaatattcttgctgtgaaggtgttccagtagcttcacaatgaagcacaacagtgcattgaggatctcaagagcaagattgatggcttctttaacaacttctgggtagtaatcgggactcttgagctcctcaatgcactgttgtgcttcatctagaatacagacatggaaatactcctcaagaagagagacagccttcttttgaagacttggtaagtttggcttgggagcagcagctggcttctcaactacaggagcagcagctggagctggtgcaacagcaagtccaggagaaaaacttgaaggacgggatattggacccccactgcccaatagcgcacttgtcttgccacttactagtgctccgctgccttgaggaagtagtctagaattgacaaccgatggcttattcaccagctgggtatggctgcgcagtgggtcagctctggatttagaacgtggaacttcccagttatcattatctaacccaggcattccgggcatctttcttgttccaggcatgccaggcatcatgccaccagttccaggtccattcattggaaaagctccaggtgagagcgatcctccagtaccagtgcgtccgttccttatgtttgcggtcgacccgggtcgcaatccaagtttcatttctgcctctgtatgaatctcactgattttcttggccttaatctcctcacgtcgaggcacccagttgtttgaacggagatcaaggacatcacgcaccatgaacctcaatcgtactgccaactgagtattacttgtcagctccttcaggcgattgaagtagacatcattaaatctacgagactttgggttctcatccaactgtttaccaattgtattgaagaactggcagatggcctcaacattttcctcagcagggcatgagttgctatcagaacccagcagctcctgaacaatgtgatgtactatcttctctgtcaccattttttgcttcagtagctcaccaataaggcgaatatttccaagtgttcgaagcttcacaagcctttctttatcacgtctctccatctcttgttctggaccagtcaatttctctacctcgtcccgtagattgccagcaccttcaaatgcttcttgacaattgttcaacagtacacgtttgaatgtaatctccctatcaccaggctcctcaggagggaaggatgggaggctttcattgagttcagagcacagctgagcatacatctgacagaatgtgggctcaaatacagccttctcaaatataagagtaataacatccttcaaaatatcagctgtagtaattcctgcttctatcaattggcccttcaaaaggtcaaacttctctggcgtcaacttgttcagtattcctttcacggttttcagaactctctctttttcagagagatttcctctccggactgaccatgggacttcagccttaacaagagcaggggtgggacgagtctgagctttagcggcaaactgctcttgctttccacttgaaacacgagattctttagcttcacggattttatcccaagacttctcttcaccaacaaccggcaaagtttcagaacgtgaacgccagtcgcgagtgtctttctcagtatagcggttttgtgactgagtttgtacatttgagtcattgcgagcccaattttgatcctcacgttcctctccaaggagtaatacattaatatcttgctgaagtttcaagatttccttagctatatcaacaatctcacgcatttcaaggagttgatctcttgtgtagcgaacccgctcaagaggctcaaaacatgaatctccaagcttggcggcaaagccggtcgaggagccgccgtgcggccggaggaagtctccagctccggttggtcggtcgta

SEQ ID NO: 43644 - DNA, 476 bp, Setaria italica
  misc_feature (11)..(11): n is a, c, g, or t
  Peptide Sequence Number=SeqID_109618
taataaacatnaatttcaaccgtttcattgcttgttggcagcgcctggatagtacccatccaactgaggcacttcagagtgactagcacacctttgccgccactccatgcatagcaagctcgctgtacaacgtcatcatggacagtttcagaggaggggcggtggaggttgcttttgccaccaatgtcctcgccgtggcctgccggcttggctccctcttgctgcgccccacctagctgctactcgcgacagccaccgaggcctccaactctccgcttatctgccccagggcctcggccagctgtcaggttgtgttttcgaagttaccccagatttagtagatactagtggtttgcgtgcgtaggattcttgcgattctatctgaatcaaggaaaagaaatataagcaatgtaagattacccaagattgtgtgaaagaaaactatgcactacaacttctagtgccatacatccatt

SEQ ID NO: 43645 - DNA, 846 bp, Setaria italica
  Peptide Sequence Number=SeqID_109619
acacaatcattattgtcaggttcttcagagctcttagtaattatggcaaaaaaactacgcaaaaggccatccagtttttggtaaagctggagaagaaataggtggaacccctccagatcccttagagctgcacgaaatgatcctcggaattcatgaatcgcaacagcgttgtcttcatcagaaagggatacgcaagaatcagtgcaagtaaactcatcaggccctggatgcccaagcttaccaccagaaatctcatacaggatatttgcggaatagtctgagcaattcaaaatgagctccacaactttgggatacctctcgtgatctttcatacgtcgccctgcaggggggcgacggggcacaccagtgtcaatagctacaatgtgaaaagtgtcatttgtactttcagtattttctctttcattcttcaattcttctaatttttgtgacatgggattcaattccacagaatccaaccttccatttgtagagtgagaccgcttctctctaagcaaaatttctctaatcagtcgattggagctttctgtggtgctaatggaatcttgcaacctatccacattgggtgacgatgatttatctgaaatcatcagatttgcaggattaccgcgccaaccaagctgacgacatgggagtctgtcctcgttccggagtatcagatcaagcatcaaaacccttcccagggatgaagcagtaacacaagcagcttctcgcaaattgaatgcctttgaactctcaagtagcggggagccatgaatataactcatcagaataaggcagcggcttagctcaagggcttccatcaactctgagcaagtcatctcaccc

SEQ ID NO: 43646 - DNA, 1545 bp, Setaria italica
  Peptide Sequence Number=SeqID_109620
cttcatatacctgaacctgaacatacgtgtgctaatcatatatgcgtgtgaactaaacctacactctgacagaccctaaagttcagtctgcatggtgatgttacaagttacaacaatgtgaatcaagtacactccctcgggtacaatacaagggaacatatcagaagctcagctcattggcgaacgccttggtcagcttctgagacgggctcaggctcccgccgcggctgatccggagcgactcgatcgacttctggatctccatggtcatggcgctgtcgacactgcctgcggagagccgcttgtgcgccttctgcaggtgcagcttgagcgagctcgtgctcagcccgacgttcttgctgcagatcgggcacaccttcatttcaggcctcttgtgctgccagtccatagacaccttgccgtgaagcttcttgtctagggctaggagagccttggcgaaaccgtcgttcggttgcgctcggcgatgaaccttcttcagcaagttccaggctttagcgagagtgaagcccattctaagcatcaggaaggcaaggacaactgtggcgctccgacttttgccctcaaagcaatgaaccagaaccttacctccgatatgatttacatgatcaataaaatctgatgcctcctcaaaaagatcactgatgtttgcatcatcatcatccctaattgaaaagttcttgtattcaaaaagatcaggaaattgggaatcggattgaccaatctcattcgaacacaaacatagtacatgggtaatgcccaaatgctgaagggtgtatttagaccttgctgccagagccccacctatgaacaagttgttgacaacaagagaaggtcgctctgtattggcagcatcggagatcaaggctatcctttctatgatgtgttcaagacgcaccttcaattcataggcatcagctaccatgttgttttcagttccatcaaagaagccagaatgaaaattattctcctgacaaaatttgatcacatcagtcttcagtgcttcattccactgctcaatctctttgagcaattcaggatcaacctttgggttcttgtaaaaatcacgaagtttcattgtcatccttaaattccggggagcctctgcactccccttgaagaatttgttgctccaactatccctggataggggagaaactgaatctgagcttccacgggatcccgcagaagaggactttgttgtggatttcagcatttccgaatcactatgcagttcattgttcagttgcttacaaggagtactatagcttgctccaggtgaaggaaaatccgatagtacacaatcattattgtcaggttcttcagagctcttagtaattatggacaaaaaaactcgcaaaaggccatccagtttttggtaaagctggagaagaaataggtggaaagatagtgcacgtgatggaatcaagactttacttagtaagtaacgggtacttacttaaggttactttacccgtttaccgtttacggttttactttttagtttttaattttttaccgttttta

SEQ ID NO: 43647 - DNA, 369 bp, Setaria italica
  Peptide Sequence Number=SeqID_109621
acgacccgaagacgacgccgcaaacctccgcctcgccgaatcgaaagccaaagcgtcgacgaccgccgcgaagctggaggagctcctcgtggagaagacgtgggtggaggcgctggacggggagctgcgcaagccctacgcgctcgagctctgccgcttcgtcacccacgagcggctgcacggcccgctgcccgtctatccgccgccgcacctcgtctttcacgcgctcaacgccaccccgttcgaccgcgtcaaggctgttatcatcggccaggatccatatcatggccctggtcaggccatgggattatctttctcagtaccggaggggataaaaaaaaccttccagcttaggtaacatatttaaag

SEQ ID NO: 43648 - DNA, 1125 bp, Setaria italica
  misc_feature (1)..(24): n is a, c, g, or t
  Peptide Sequence Number=SeqID_109622
nnnnnnnnnnnnnnnnnnnnnnnngtttttttttttttgcagtatgaaattgaaatgccttcataacatatatctctgtggatcaagaaaaggcagaaaattatgcagaaccaaactgaaaacagagcattgctcccagtagcataagccttccgaataccttacaaattagacacccatgacctcttcaggcaggagtcaggatgtttgcttattttggatacctcatagacagagcaacatttacattacttttacttcatgtaaaaccagctgggcagccgtcgtcgccgtcccgccgagggttcaccgcgcgacgccggggatgttgacccagtgcaggtgcaggacgagctcgccggtctcggtgttcctgagtttgagcacgatgtcctgggagatcttgccgtccttccacgtgatgtggctctcggtggcgaagcaattggccttctccgggtggatcgtcttcatcaccgtgccgtcggggacgtcgctcaggtcccgcttggcgatctccacgaagtccaggatgcagaactcggcgtcgcccatgctgtcgtccttggtgaacgtgtcatggtcgaagagctcaatcttgaccgggtgcatcatgtttgtgatggatagggtgagctcctcgttccattctgggttgattgtgtgatactttatacttgacttcactttctgctggccgaggcggaggacgacgtaggggtcgctgctgtgggtgagggggtcgcagatggccaggttcacccctcgcaccaccttcactttgagcagccccagcaggcactccatctccctctccctcgctcttgtctccgacctcggcaacccagcacccagccagcaaaaggcagaagagatcaagacaagcccgaccaccaggagaggagaggacgatcgacgacaggcgcggcggcaacagcggagataaaattaaacccggagagacacagccaggctcggtttcgtcaacgggagcgaggagcctcctcctcctccttgggaagaggcagaggctggacgacaaggggcgggggacgccccaaccgtctctactccacctgcgttccgcttctacccggtccacccggtatcctccccaaaatcttc

SEQ ID NO: 43649 - DNA, 416 bp, Setaria italica
  Peptide Sequence Number=SeqID_109623
aactgttgtttgatacttactgtgcatatgccctccttaggagcttggaatcactgctctgcacattaagctccgtgctactggtggaaacaagacaaagactccgggccctggtgctcagtctgcgcttagggctcttgcacgttctggcatgaagattggacgcattgaggatgtgactccagtcccaactgacagcacgcgaaggaagggtggtaggaggggaaggaggctgtaatttcgtgcagaagcagacgcaacctggccgtgcaacctgttttgtgctttgtttgtgatgctagcaacagatttcatggatttataagttttgagctaccttgtatcggatggtcttaacttataaatccatgaaatctgttgctagcagacgcaacctggccgtgcaacctgttttg

SEQ ID NO: 43650 - DNA, 276 bp, Setaria italica
  Peptide Sequence Number=SeqID_109624
ttacgcagctatgcttgcagctcaggatgttgcacagagatgcaaggagcttggaatcactgctctgcacattaagctccgtgctactggtggaaacaagacaaagactccgggccctggtgctcagtctgcgcttagggctcttgcacgttctggcatgaagattggacgcattggtgagcatgctgttaatatttttaattaataagaaatcaatgaagctttttatctgcatttgatgttagtggttcttcccttcctgtttctgtgcaaaat

SEQ ID NO: 43651 - DNA, 553 bp, Setaria italica
  Peptide Sequence Number=SeqID_109625
cggttcggttcgggttcgtgaggtgttccggttcgggggtgagaggcagagatggcggcgtcggatgttgagtaccgctgcttcgtcggcggcctcgcctgggccaccgacgacaactcgctccacaacgccttcagccccttcggcgaggtcctggagtccaagatcatcctcgatcgcgacacccagaggtcccgcggcttcggcttcgtcacgttcgcgagcgagcaggcgatgcgcgacgccatcgaggggatgaacggcaaggagctcgacggccgcagcatcaccgtcaacgaggcccagtcccgcggcggccgccgccgcagcgagcacgcggtcgcagccatgtctgggaggaagaagactcgggagcccaaggaggagaacgtgacgctcggccccgccgtccgcgagggcgagtacgtcttcggtgtcgcgcacatcttcgcctccttcaatgacaccttcatccatatcacggatctgtccgggagggagacgatggtccgcatcactggtggcatgaaggtcaaagctgaccgtgacgagt

SEQ ID NO: 43652 - DNA, 848 bp, Setaria italica
  misc_feature (822)..(848): n is a, c, g, or t
  Peptide Sequence Number=SeqID_109626
gctagggtttttccgccgccgccacctcgccgccgtcctcccttgtgaaccctaaccgttcctcctcctcaccctccgccgccatgtccggaaggaagaagacgcgggagcccaaggaggagaacgtgacgctcggccccgccgtccgcgagggggagtatgtcttcggcgtcgcgcacatcttcgcctccttcaacgacaccttcatccatgtgacggatctgtccgggagggagacgctcgtccgcatcactggtggaatgaaggttaaagctgatcgtgatgagtcgtcaccttatgctgctatgcttgcctcacaggatgttgctcaaagatgcaaggagcttgggattactgccctgcacattaagctccgtgctactggtggaaacaagaccaaaactccaggtcctggtgctcagtctgctcttagagctcttgctcgatctggcatgaagattggtcgtattgaggatgtcaccccagtcccaactgacagcacacgcagaaagggtggcaggaggggaaggaggctgtaatttcaagtctatcagcgtgtgttggcagatgtagcagttctatactgttttcatctcatatactgagcaagttttgcaacatgtattgaagttttgaggtgtcaacttgtggacatgtttctgtttaatccttgttgatgaagtatgttcctttcactgagcaaaacacaaatacaggagctcccacatctgataatttgtttgcttgttggctcgataaatagttagcctgaaatgctatcgtgagtagccttttataacaaaaaaaaaaaaaaaaaaaaannnnnnnnnnnnnnnnnnnnnnnnnnn

SEQ ID NO: 43653 - DNA, 888 bp, Setaria italica
  Peptide Sequence Number=SeqID_109627
ccgagctgctagttcaatattgatttgtcaactgtgtttgatacttactgtgcctctccgaactctagcattcgttctctcctcccagccgccgcccccgcccccgcccccgccgccgccgccgcagcgagcacgcggtcgcagccatgtctgggaggaagaagactcgggagcccaaggaggagaacgtgacgctcggccccgccgtccgcgagggcgagtacgtcttcggtgtcgcgcacatcttcgcctccttcaatgacaccttcatccatatcacggatctgtccgggagggagacgatggtccgcatcactggtggcatgaaggtcaaagctgaccgtgacgagtcatccccttacgcagctatgcttgcagctcaggatgttgcacagagatgcaaggagcttggaatcactgctctgcacattaagctccgtgctactggtggaaacaagacaaagactccgggccctggtgctcagtctgcgcttagggctcttgcacgttctggcatgaagattggacgcattgaggatgtgactccagtcccaactgacagcacgcgaaggaagggtggtaggaggggaaggaggctgtaatttcgtgcagaagcagacgcaacctggccgtgcaacctgttttgtgctttgtttgtgatgctagcaacagatttcatggatttataagttttgagctaccttgtatcggatggtcttaacattttcctcgtgaacgagttgctggcctgcttttggctgcacattctccatgttataagttagctgttttgttagtaaaatgcgaagtgtaaaaatttgtttataacatggaagaaatagtgacaagaccaaaaagacaaggaccaagacaaactacgttacaaca

SEQ ID NO: 43654 - DNA, 620 bp, Setaria italica
  Peptide Sequence Number=SeqID_109628
tattattacctagctgcccccttactattcaagtgaactggttttgcttgcgaggtaattaagggttcccatgcgaccttttctagataaagatttgatctgcatcatgcatggctccggtttgatactaaacttaagcgatgcacgcgcccatttgcttgcatgtcatatttttttatgaaacatggattaaataaaggggggcccttgatgtagaatctatagtgacatgtctttggggggcaaattttgaatcttacgctgtttttattgtaggatggatactaggtctactcaataaaactagtgccaatgtaaacatttgcaaatgctttcaatgtcacgcaaattagcaaaatagacaattcgtgcaatggcttgtctatatactatttgatggatgcaagcctgtagttgtatcaactccaagtttcagcaattttaaaaatttactgggatttagattgcaaaggatatcatatttgtatatagcagataaaatatggttttcacaatctgtagacaacctaactcgtaagcaaagtattccatcatagttgaccttttcttctgaaactcataggcaaaagacccttccatttaggctaaataattgcacg

SEQ ID NO: 43655 - DNA, 576 bp, Setaria italica
  Peptide Sequence Number=SeqID_109629
ccaagaaatagtgttccttgatgagtgcctatcaaaaacagcacaagcaccagcaagatcgccagattttgaataggcatggatgagtgcattttcaattttgccatccatttctaaattgtggtgaaaaatgcaggcatggatctcccgtactttccaagctgcaactaagttcgcaaatgctggaatgatacttaggattgtaatgtaatctggcctcaccagaagtgcttgcatctgccgaaatattcttagggctctatccaaatgaccattatgcactgaacccgcaatgagtatgttccacgaagctgtatccctttttactccacagctttccatcatctggaatagttcaaagactctctcgtcatccccatttcgtatgtatcctgagatcattatattccaggtaatcacattgcgccgaacaccaaggctctccatcttacagaaaagctcatatgctttgccacaatagcctgcttgtgcataccctgcaaccattgaattccaggagaagatatccttttcaggtatctcattaaatattctcatagcagcaacaatttctcc

SEQ ID NO: 43656 - DNA, 405 bp, Setaria italica
  Peptide Sequence Number=SeqID_109630
aaagcttagctgaatgtcaaaattatcgtagatccattccactcaatagaaaaacccgtgcatgcttttctcccattcgttctatcgtatgaagccagtgcaacaatattgcgatttatgttagaagctcttttgctgaattttctccaaacaccttcaccatgcatgtcgccaaaagtttcttcaaaagtatttaccaaaatcatgccatctcctaacatggaggatggtaacttagggtaacccatggagtctagatctaacagttcctggttgacaaagctccatgtacttctggatggctgttatatttctcacatacgggtccaatcctgtaaacctgcatcaagaccagtcttcttttcctgggatgtccagtaatgctccagatgcttgagaattgtg

SEQ ID NO: 43657 - DNA, 594 bp, Setaria italica
  Peptide Sequence Number=SeqID_109631
taaaagaaatttcaagttgtaagcaataacattcctatgatttgtgacttacgatatggagatcattattcagtcatgatcgttgggagctgtttaaaggcttaatttctcaacacagggattttgtgggcgttgtacatgttgggttttgctcaattttggggaatttctatgaacaatgatgaggataaattgttgtggtaaattcagttttagaaaggtgcctcaaatggttataaaacgcacttcgtgtctttatcactttgcactgttttttatttggaacacattgtatagttatcatctcatccaggatgttagaaaaaactataaactgttaaaggtatggcacattgtactgatgtaagtttcagaggagaaaactattaccgttgtttctcgtttccgtaattttattaaataccgatttgttttaaccaatctcaagcagagttttgctttgagattctccggatgaggtatgacgcattgtactgaaggtttgtgcctatgaaaatctcatttatcattgcaagaatgtttctatagtgatgtctgtgtgtggtcgacaattttgagttgcaagctgctata

SEQ ID NO: 43658 - DNA, 529 bp, Setaria italica
  Peptide Sequence Number=SeqID_109632
ctgcgggtggtagtagagagcattcgccgcgggagcctgcggcgctgctggcatgtagaatggagacctgtacatcactgcagcaaggaaagacgcattgatccattcgacaactagtgagcaaacatgttgatcgttgccatgtaaaagaaatgacacggcgcgcagcacgaaatccgatcgctactgtaaaaatctcgagaagaaagaaggaattaattgctgccattttaaagcaatgcaggtatatcctatacgaaatcaatcggtaccacgagcttctgactggacgagtgaatggaaactagcctgcgtatttgcgaggcaattcatcaatgctgtacatggcgaagcgatgaacagactagacgcaaccaaacgcagtgacgcacagatacacaatcatttttttacggggaaacgtatgctggtcattacgggttgactggcaggcattgatgggatggggaaagggagcagctagggaatgatgtggaagcctgtgtctggccgtttcggtggccgctgc

SEQ ID NO: 43659 - DNA, 330 bp, Setaria italica
  Peptide Sequence Number=SeqID_109633
tacaactcgttgtcgtaccaggagacgagcttgacgaagttgtcgttcagagcgattccagccttggcgtcgaagatgctcgacctaagtggaaacaatgaaacaggaaaaaaatgaataacacagcacaggaacaaaacaacattcactagaattcatcgtagcactatagtggtgtgccctagaatatccgctggttcctagaacttggaggactcaaagcaaatttcgtgtacctgctgtcaccagtgaagtcagtgaaaaccaaatcctcgtccgtgtaacccatgatacccttgagtggcccctcagacgcagccctgtaaaaat

SEQ ID NO: 43660 - DNA, 516 bp, Setaria italica
  Peptide Sequence Number=SeqID_109634
aaccaaacaaaatagtacgacccttacctagttcacacctttgacaaatgctgggtattgggatggactttgcaaccacttcacaccccatgggaagagtagacatatctgtccaaggtcgcacaagataccagaactggcttgtgttgttactgaggcttaggcaagagcttggaccaacaatatcgtcttgatttgttgctacagaatcgactgagcaacctactagtacacaatcaaggaaacgatccaactgaacaggggccaagaacttggtgatcaaggattgtgtcatgcccagagcatgacagctgcatcccaggtgcgccgcaagatggagggtcggttgaaagcctaaatgggaaccggatctctggcccatggtgtttgctgcatcgatgtgatgaacaagttttgaggaagtattcttcttcccatgatttggcagcataggatgcatagtttagaagcgaaagcagcagcgctgcgagaagaattatgcaaatccatggaatg

SEQ ID NO: 43661 - DNA, 535 bp, Setaria italica
  Peptide Sequence Number=SeqID_109635
ttacgacaagaatacaacttcagagcgagcaactaagacaatatacaacctgtaattagctcatcgtgcagtgtaccataaggttgtaaggtggtggttcatgtaaatctgcgttttggagggatctcttctgaagttgcatcattgtaattctcttcttctggataaaaactgtgctatgcacgtcgtgcataaaaattcctcgcagcttaagagacaggcgaccggggtgaggtgaatcggaatctttaaaaaattcccataaaaaacaaggcacgtatattcaacttttttttgagcctacgtatattcaactttagaatgaagttgaccaggagcgggtggatgagttgtgcgtgctgttgttggctggtgtcgtttttccttttgttttcccccgtttaggtagccttccagggtctactttcttgacaggcactgtcggtgccggttcattaataagaaatttgttaaaaaaggaattttaaacaaaaaaaaaaaaaaaaaaaaaaaaactaaaaacgtaaagaacgta

SEQ ID NO: 43662 - DNA, 533 bp, Setaria italica
  Peptide Sequence Number=SeqID_109636
gttgtaaggtattttccctttttctttatccaagtgtttgggttgcttgtttgcgagctgaatataaatatattagagtgggtatttgtctatatatgattaaggatcttgattgaaatattcacattggtttctttggcttgtatgattaagatattcgtattagaatacgcagagtatgtataagtccttggttctttggccaaaaaccgtgtccttgacttggtgtccttatcttctgtttcagtcgtctttggtcgcgtttagtgtggtgacggtgttgtagtttccttttagtattgttatgcttctgttgttggtcgcaggtggtggttcatgtaaatctgcgttttggagggatctcttctgaagttgcatcattgtaattctcttcttctggataaaactgtgctatgcacgtcgtgcataaaattcctcgcagcttaagagacaggcgaccggggtgaggtgaatcggaatctttaaaaattccaataaaaacaaggacacgtatattctaactttttttgtag

SEQ ID NO: 43663 - DNA, 470 bp, Setaria italica
  Peptide Sequence Number=SeqID_109637
tcaatagttggactgatcgaccactgtctagagctggtaaagatgtcttattaaaagcagttgttcaagcgatttccaacatatgagttgctttcagatactgacagccatttgtgagaggacgaggaaacttattgcagaagcatggtgggggtgtgaaaaatcgaaagaaaaagatacattagcgttcataggaatggctttcttctccaaaatatcttggtggtcttggctttagggatctccaactctttaaccaagcgatgttaggtcatcaaggatggagacttaaccagaatactgcaactaggatcttgcaaattcctttgggcagaagtgagtttgaagattttgctacatggcttcatactaagagcggtacttattcagtatagtctgcctataatttggcacgttccttatccttctttgaatcaagaggtcgttctggaactggaatgatgttcgac

SEQ ID NO: 43664 - DNA, 911 bp, Setaria italica
  misc_feature (886)..(886): n is a, c, g, or t
  misc_feature (909)..(909): n is a, c, g, or t
  Peptide Sequence Number=SeqID_109638
acgcgggccagctccatccgccatagctcccgagctgcgccaagcaatggaaacttcacatgaaccggataacatctcctcaccagaagcaggctctccagatctgtcaccacgcgcttctactgtggaagtgacggatcagctgaaagatttgtctgtacagggtgaatctagtgtgggccaagagattgtgcaagcatttccggtgtctcacaattcatataagtttcctcaccgcccgggaaatggaagtattggcaccaggtgtttggtgaaggcaaattacttctttgctgaactgcctgacaaggatcttcatcagtatgatgtttcaatcaccccagatgttacatcacgaattcggagccgttctgtgatggaagagttggtaaagctgcataagatgtcatacttgggagggcggcttccggcctatgatggtagaaagagcctatacacggctggcccactgccattcacttcaaaagaatttcacattactctacttgaggaagatgatggttctggtgtggagaggcgtcagaaaacttacaaggtggtgattaaatttgctgcaagagctgatctccgccgtcttgagcaatttattgctggaaggcaggcagaggctcctcaagaggctttgcaagttcttgacattgtcctgcgggagctgccaacagcaagatatgcaccatttggtcgatcttttttctctcctgaccttgggaggaggcgatcccttggcgagggaatagaaagctggcgagggttctatcagagcattcgtcctactcagatgggcttgtcattgaacattgatatgtcagctactgctttctttgagccattaccctgtgatagattttgtgcacagcttttaaanctgatatccactcgaggcccctntc

SEQ ID NO: 43665 - DNA, 290 bp, Setaria italica
  misc_feature (277)..(277): n is a, c, g, or t
  Peptide Sequence Number=SeqID_109639
aaggaaaggaacgaagggggaatgccccccaggggtcgcgacttacaatgccattctcaggaagctctgtgaggatggcaacatgaaggaggtcaatcagttgcttaacgagatggatgagaggaagctgcaggctgatcatgtcacctgcaacacgctgatcaatgcgtactgcaagagaggggacatggcttcagcatgcaaggtcaagaggaagatgatggagtctgggctgcagctgaatcagttcactacaaggctctcatacatggattcngcaaggccaaagg

SEQ ID NO: 43666 - DNA, 303 bp, Setaria italica
  Peptide Sequence Number=SeqID_109640
tcgccatgcctcaccgcggagcctctctgatcagctgctaggaacctgttctttctttagtagcttcaagaatctgggcaagtaaaaagaaaaatctgtaaacactattttggagaatgttaaaatgaaccaagagcagaaagatgaataaatgctaaattgctggcaagaattcaagtcctaaagtttgcaaaacgctttcttgcaacctgaagatgatattcaataaagctaacatcaaaattagcatcttccaggatcggacacacaaatgagcctaataaaatcagcgaatctctatag

SEQ ID NO: 43667 - DNA, 337 bp, Setaria italica
  Peptide Sequence Number=SeqID_109641
cgtgaaaatgtcatgaacattgttgacaggcttgttcacaagactgatatatgtgttgcatgcggataatttttcccttattctatggagcaaaagattgaacagtcaactgatgtgctgaaggcaattcttagtcctgtgatgcatgaaggagatgtgaagtggccaccaagagatccagagacagtcaaattgatggagaaagaaatatcacgccgagaacaagaaggacagctcgatgagggatttctgtcggaagttagtgctcagttgaggcaatatatatttacctgctattaggctaaacaagatggagataagccaggccttcaagcta

SEQ ID NO: 43668 - DNA, 1245 bp, Setaria italica
  misc_feature (292)..(292): n is a, c, g, or t
  Peptide Sequence Number=SeqID_109642
taagtaagaagacttagaatacaaaattgtggttgaaaatgttctggcattcgacgctggtttctgggttcggctggcagctagaattgatctctgcaaatcggatgatgataaagcatggttttacatatggagacagttttgcttcctgtgcatgttattttcttctatcgcaattagtctaactttgcaattggcttctctttattgccttttcagaaagattatgaagagctggctgaaaatgtaatgaacattgttgaccggcttgttcacaagactgatcaaaagnttgaacagtcaactgatttgctgaaggcaattcttagtcctgtgatgcatgaaggagatgtgaagtggccaccaagagatccagagacagtcaaattgatggagaaagaaatatcacgccgagaacaagaaggacagctcgatgagggatttctgtcggaagttagtgctcagttgaggcaagctaaacaagatggagataagccaggccttcaagctatgctgcaaaaggtgttgcagttatatgcttccaaatctctccagaaacgtagttacgcgtacaaagggggccaagttgtagttcctgaaaagtttcttgaatccataatacaggcgcctgagaatgaatggaacaaggtgttgcttgacggacttacagtcggaaaaggagatgtttcaccggatgatttttatgccgttattaacaagagaattgagcgagtcttgattcgcacggaaggtggttcttaccagcaacgcatacttgttgagtatctaaaagagatacaggctagagcagaggaagttgtcaaagtgcttcaaggaccaacaatttaaaatctgctgatccactttacacatacatgttttttgtctgtttgatcatagtctgatgggccacgtggcttcaagggtgtttgatgtaggagcagtttcagatacgcctgatgctcggaacctcggaccagatcgcacaaggggagcgcaggaaatggagaggagatacagagccagaagaaatgcgcgattacagcaaactgcccgtgctcatctgagtgatggcccattttcagtatgaattcagctttcatctcgaaggcctgggtggtttctgtcggggcaatgggattttgtgggtcttgtctgacttaaaagcttaatatactacacaggtggggaatggaaatcttgatatcgaagtttcagtggaattggtgtacaaaaaaaaaaaac

SEQ ID NO: 43669 - DNA, 1728 bp, Setaria italica
  Peptide Sequence Number=SeqID_109643
cctgtggatgttattatcttctatatatattgatctaactttgtgatggtttctcgcttttgtcttttcaagggaatagactaagaagaagcttgggatgcaaatcctagagagcttgatcaaatagtggttgaaaatgttctggcattcgatgctggtttctgggttcggctggcagctagaattgacatctgcaaatcagatgatgataaaaaagattacgaagagctggctgaaaatgtcatgaacattgttgacaggcttgttcacaagactgatatatgtgttgcatgcggataattttttcccttattctatggagcaaaagattgaacagtcaactgatgtgctgaaggaaatcatcagtccggcaattcatgaaggagatgtgaagtggccaccaagagacccagacactctcaaattgatggagaaagtaaggccacaactcttcctatgtttctgcatcctttctgttggtgctgtcctttacatgcattctgtcatggtctctgtatttgcagtgtctgtaaagttgagctttgttacactttttttgaaagctagagctttgttacactcatatgcattaactgacaaaatgtgttgtgcaaatgtgatggtcagggccgcaaaggtccacatctcttatgagagaatgtggttcaggttatgctttactcatgcctgttgttactattgtctctgcttttcaaccaatatttctttcaggcttgagagatttgatgtcaaactgtattttgtttctgtcacattatctacattgaaatgccatcccaggaaatatcacgccgagaacaagagggcagcttgatgagggatttctgtcggaagtcagtgctcagttgaggcaagctaaacaagatggagataaaccagggcttcaagctatgttgcaaaaggtgttgcagttatacgcggccacatctctccaaaagcggagttaggcttacaaagcacatgagaatgagtggaacaaggtgctacttgatggacttacagttggaaaaggagatgtttcacccgacgaactttatgctgttatttgtaagagaactgagagggtcttaattcgaaccgaaggtggttcttatcagcaacacgttcttgtcgagtttctaaaagagatacaagctagagcaaaggaagttgttaaagtgcttcaaggaccaacgatttaaggcctgatggtcccatttacaggatacaggttttgctctctttgagcatagtctgatgggctgaagatcagaaatcgtttgacagaaaactagaagcagaatttcagatacatacacctgatgctggctcctgatcaagtgatcagtgatcgcaatggattgaaacgacagtccactctctcacgagaacgaacgatgtggagtcaggagcagtgcgtgattgcagtgtatcgcgtgcgcttatcctgagtggcacgcattctagtttccctgtcctttaacggctagctagatttgctgttggggtaatgaaattttgaaagtttctgtcagctgaaaaactgcgacactacacagaaattgcatgatcaaatatactcagtgatgcagaattggggatttatactctgttcttttctttcgcctttttgtggcaataaggtagagaagattcaatcctgatactgaagtttctgtggaactctcggtggctatctaacctgttctaaccaaaaaaaaaaaaaaa

SEQ ID NO: 43670 - DNA, 453 bp, Setaria italica
  Peptide Sequence Number=SeqID_109644
tagtaaccaataggacaagaatacagatcgttggcagtaggtttctgaatgatgagactgaagcagcaccactgatagatattatttgaccatgatcatggtgtcaagtgtcactaatgcagttttctataaaaggtgctgagctagtattatgtcgctgcaattttgccatgatcatggtgtcagtgtcactattgctgttttcataagtactgatcattatgttgctgcaatgttgtaaaaaatggacacacctgaaaatgtgcacctagctgcttataacaaggtaattcattctgctagagtgctagttgatctatttttttactagcttcctttctgtttttagtatattttgttcactacgtacaataggcagaatagacatggggttgtggtggtggagtgaagacttcccaggttcagctgcaaatgcaactttccccgtttact

SEQ ID NO: 43671 - DNA, 672 bp, Setaria italica
  Peptide Sequence Number=SeqID_109645
tatcccctgtgtgccttgcctatcccctgttacgtgtctcaggggagatcctggaggccgttgtcatcacagacaagaatactggcagatccaaaggctacggatttgttaccttccgggacccggatgcggcgatgagagcttgtgttgatcccgcgccagtgattgacgggaggagggctaactgtaatctggcttcccttggggttcaaagatctaggcctccaacgcctcagcatggagggactaggagctttagggtgatgaaatccttcagccagcaggcagggatccaaggtggactgggagcagcttttccttctcatgccaccttccctcattatgccatcccacaaggcctcccctaccatgtctatgggtactctccctatactccagattacagttatccaacaaacttctacaatatctatggaggagcccagtacccatttttatggaggagcagcagctggcatggtgactggaacaagtcccttttatccatatttccagtttgggcagtcaggaaacactacaaccaactatacatctggacaaggctacaacttgcaatacccacagatgttccacttctctactgtatcctccaaactgctgagcaaagcctgttacagctgcagctgtagaggatacagtagagaagtggaa

SEQ ID NO: 43672 - DNA, 510 bp, Setaria italica
  Peptide Sequence Number=SeqID_109646
gtctattgggtaaaccctagtaaggtagtacctattgtaggtaagttactttcgagcagtttggggagatcctggaggccgttgtcatcacagacaagaatactggcagatccaaaggctacggatttgttaccttccgggacccggatgcggcgatgagagcttgtgttgatcccgcgccagtgattgacgggaggagggctaactgtaatctggcttcccttggggttcaaagatctaggcctccaacgcctcagcatggagggactaggagctttagggtgatgaaatccttcagccagcaggcagggatccaaggtggactgggagcagcttttccttctcatgccaccttccctcattatgccatcccacaaggcctcccctaccatgtctatgggtactctccctatactccagattacagttatccaacaaacttctacaatatggataaaagggacttgttccagtcaccatgccagctgctgctcctccataaaatgggta

SEQ ID NO: 43673 - DNA, 428 bp, Setaria italica
  Peptide Sequence Number=SeqID_109647
ttttccttacttacttattttgttttatttaatttagtttctttacctaatagtctaccagcattgatttgtcaatctgtcaggttacagtacatgaatgtaaaccagtgtgcatgcatttaaaacagtagaaagtatgataataacttcatcagtatgcatgcattagtttgctaagaaactcactcaccatgttctcaagattacttgaacaatttctttctgttcagttgtactaatatcttgacagtgtgtgtccccattaaacaggcatgactatggcactcacagctccaacactgccaactccaactcaggctgctcatccttaccggctgattcccctcacactttgcggtgtccgctgctccagagcaacccttggcctaaccatggtctcccttcccactgttgctgtcttgttctcg

SEQ ID NO: 43674 - DNA, 552 bp, Setaria italica
  Peptide Sequence Number=SeqID_109648
ctactgattatacgtgggagtggcatgctagttcaatcagttgtttagctgtcattgttgtccaatttgactagcttaggcatggtgcttctgggtgaagcatgaaccatttagtgtctctaatctttagtcttggtgttacctagagcaaatgaatttgacatatgaccagctactacttcttgtgtaaccaaccgtccacttttctatgcaaatgattagatgcaccaactaacatttcatatgatctttcagttgatagcttgcatctaggtggtcaaggctctaaggagagcctgtgcccctaatcagagacaggttcagagtagtgctaatgtttgtttttagcacttggcactacctcccgtcattccaaacacagtattgggtactccaaagaaggctttggagtagtcaagcactgctgtgtgactcattaacacaatggcccatagataaatttttattgtcttgggtcacccactcatgtagatgtctactttctttggttgtttacttacctattggttttaggtttccttaggtttcttt

SEQ ID NO: 43675 - DNA, 2071 bp, Setaria italica
  Peptide Sequence Number=SeqID_109649
ctttagctttcctccctccttccctctcctctcccctctcctcttcccttcctctaacaagaactagcctagccattcagatcctaagttgctgaccttgctgcttctcgctggagatagatttgttggttctaagttggaagtatcatgagtccaccgagtgtgatggggcagtttggagacacaacctacaccaaggttttcgttggtggactcgcatgggaaacccagaaggagaccatgaggaagtacttcgagcagtttggggagatcctggaggccgttgtcatcacagacaagaatactggcagatccaaaggctacggatttgttaccttccgggacccggatgcggcgatgagagcttgtgttgatcccgcgccagtgattgacgggaggagggctaactgtaatctggcttcccttggggttcaaagatctaggcctccaacgcctcagcatggagggactaggagctttagggtgatgaaatccttcagccagcaggcagggatccaaggtggactgggagcagcttttccttctcatgccaccttccctcattatgccatcccacaaggcctcccctaccatgtctatgggtactctccctatactccagattacagttatccaacaaacttctacaatatctatggaggagcccagtacccattttatggaggagcagcagctggcatggtgactggaacaagtcccttttatccatatttccagtttgggcagtcaggaaacactacaaccaactatacatctggacaaggctacaacttgcaatacccacagatgttccacttctctactgtatcctctacagctgcagctgtaacaggctttgctcagcagtttggaggaccattgtcactagcagcgagccctcaagcccaagcagtgtgtgtccccattaaacaggcatgactatggcactcacagctccaacactgccaactccaactcaggctgctcatccttaccggctgattccctcacactttgcggtgtccgctgctccagagcaacccttggcctaaccatggtctcccttcccactgttgctgtcttgttctcgtttccaacatgttgagtccatgtgtccatctctaacaccaaaaggcactattgtagatcctgttcatcagtcaaagtgctcacctccgtatcccacatagttatgtggtgattggaaattagctttagccccaggatgggctcaaagcttcatgccccaaggatggggtgtactaacagacaagcataaaccccaaccattttaacaacagtccaaggaaggacttcatccgggaaaagttagtttcagccctagcaagacaaggctgtagctaaagaaactctaacagtcaagcatgacccagggagggttaattcatgatgatgctagtcaaattggacaacaatgacagctaaacaactgattgaactagcatgccactcccacgtataatcagtagaatcccaaccgtatctagcttaggcatggtgcttctgggtgaagcatgaaccatttagtgtctctaatctttagtcttggtgttacctagagcaaatgaatttgacatatgaccagctactacttcttgtgtaaccaaccgtccacttttctatgcaaatgattagatgcaccaactaacatttcatatgatctttcagttgatagcttgcatctaggtggtcaaggctctaaggagagcctgtgcccctaatcagagacaggttcagagtagtgctaatgtttgtttttagcacttggcactacctcccgtcattccaaacacagtattgggtactccaaagaaggctttggagtagtcaagcactgctgtgtgactcattaacacaatggcccatagataaatttttattgtcttgggtcacccactcatgtagatgtcacttcttggtgttactaccatggttaggtccaggtctcctcctgccccccccccccccccccccgccctcccctcccttccccttctctctgtctcttcgcagtgcagagacctttgctgtttaattcttacttatttct

SEQ ID NO: 43676 - DNA, 430 bp, Setaria italica
  Peptide Sequence Number=SeqID_109650
ttaaaaagatgttattatccccgtatgtatatatttccacatctatcgatctgtgtcaatgtgtagttcaccgacacattgccctaaaatattctattatcaccctccattctgtacacacacacgcgtgcagctccaagctacgccaaatcctcgagatgagtccaaagccgaggccgtcgtccataactaaaaaccgctaatgattattaacgtctttacacctagtcatcatcatgcttgattaagcggccgataaccgctcaattaacggttacctccgggaagcccagctgcgggtgcggcgagagcggcgacaggctgccgaacacgccctccagctgctcccaagtccagctcgacggcgtcatcgggaacgggaacatctcggtggctccagcctcggacgacggcgaggacgacgtcggtc

SEQ ID NO: 43677 - DNA, 598 bp, Setaria italica
  Peptide Sequence Number=SeqID_109651
acatccacatccaccaacctaatcctccgtcactcgctgccggcgacgatctccttgatccttagcatgaggtccttggcgtccgggaactccgggaacacgtagaacgcgtggatggcgtcggggtactcgagcacccgcacctccttcccctcgcggcgcaacgcgtcgcagtaccgccgctgccagtcctgcagcgggtcgtacccgccgacaacgaccgtgaccggcgggaacgccggggcggacttgatccccgccaccgcggcggtcggggagcacgcctcgtgggagcggtcggcgccggggggcaggaacgcgcgccacatccagtcggtgcgcgggacgttcacgatgggcgcgccgtcgagccggagctcggccggcgtccgctcctccccgccgaagaagggctggatggcgatgaggcccgcgaggcggacgcgggggaacgcggaggggtcgagggcgtagcggcgcgcgacgtggtgcgcgatgttgccgcccgcgctgtccccggcgaggaagcagcgcgaggcgtcgaccggcggttggtggtcgtggtggtggtggttgccgacgaagcggagcgcggcga

SEQ ID NO: 43678 - DNA, 264 bp, Setaria italica
  Peptide Sequence Number=SeqID_109652
caaaacacactcatcagccactttccggagcaactctgtaatgcttggtcttgtatgttcaaacacccaagagttcctatgcttccgaaaaatatgcatctgatctgcactcagtaaaagaactaaattacgtattgttgttacaacaaagcttttatattcgaagcaagtttgggtaggttagaaatgggagccaaaagagcatattatatatattttttacacagaactgttggaaagtcccacacagcatattttctataa

SEQ ID NO: 43679 - DNA, 504 bp, Setaria italica
  Peptide Sequence Number=SeqID_109653
aatcccatctgtgctatccaaccaagctcttgtagctcctttgttgcgtaccaacattctataggaagatctgacagagaaaatgccagtccgctcgtaatgtcatgcccataaatcatcccttccatctaactgactgttcatttctactttgaccttaaccgggaccgtgtctgaaacacgttccatatcctccgtcccttctgatgtatacagatcctttattgaattttttttgttcttccatattgtgctattcattattgtattttgtgtggacacttttatttaggtattttcctccaatttgtatccaaaccaaacttctattttttgtttttaattgtgaatttagctaagttattgattgtatttcagaatcactgcttttttcaatttaggccatgagatgattacaataacaaactgtataaacctttttttttcctgattaggttggtaatttctaaattttgagagtgaatatgggtggttttctttctt

SEQ ID NO: 43680 - DNA, 389 bp, Setaria italica
  Peptide Sequence Number=SeqID_109654
tttttttgtctagtctactaactaaataacattaacaggaaatagctggttcgctcaacatgtcaaggttagtacggagtatcatagataagtttataacaagataatgagcttcccctactgctcatactgaaccacacaactgcagcccggggtatgatccaccgatcggccgcatatttacatcacacggtgcagcatcactgccagtaagccatctactggacttctgatttctgaacattcaaatctgacctggcaccctgccaagtttacagggaagcctaattgtttcactaatagtccgatacaagatcacaagctctgccagattatctgacaaaccaaaaccctgaagaatgagcgctgcgctgttgtctgaaacttgt

SEQ ID NO: 43681 - DNA, 652 bp, Setaria italica
  Peptide Sequence Number=SeqID_109655
gaggccccgtagacgcggcgccgccccttacggcgcgcgggcggcggcatggccgacggcatcaccggcagggccttggggtcggcggcactccgcgtgcacgccaggagcagggagatcagcgacgtgccgtcgccgagggcgtggttgatgcggaacacggcggccgacgccgcttcggaggtcgggaagtccaggatgtggagctcccacagcggccgtgacttgtccatggggagcgtggacaggaaggacacgtagtcctccagtaccttgtcggggtcggcggcgatggcggcggggtcaaggtccgggacgatgatgtggtcgtcaaggttcaccggcgtccggacccatcgatgctctggcccgtctgtcacatcgatgctgcagaagcgagggtgccgcacgagggtgacctcgaggccggcgcgagccagttcaatgtcgatgggcgcagcgaggccgacgacggcgacgatacacaaatcgctgtaaaattgtgccgtggggctcaggggctcatcgtccgcttcgccggttgcccccaactccacgagtgtctattgaaagcatgggcaatggcggtggtgagacggggctggcactgtgaacacccattctttctagtgttacggtgtctcgtctaata

SEQ ID NO: 43682 - DNA, 547 bp, Setaria italica
  Peptide Sequence Number=SeqID_109656
gtcagatgtctgacctatagattacagcataggtcaaaataaacttaggtataaaagttgcagaccactagtgagtattagtgcatgaagccagaaggtattttacccatttattcttagcatttcaactttcaggaacacagtaattacaactttccacttcaggatttcccagctggggcctctttaagaaaattattccactaccttccttcgcagcataaaaagcaatatgctacccaaaggactttgtgtctcttcaattaaggttagctttccataagtaaatcatgcaagcaaagagaataaattcatgtgtttttagagaagacaacgaatcatttcattgttggtatgcttacttccacaaaggaaagaaccttcatgatgagattcaaggtttatgtttaccttattgacgacacaccattcacagacagatgcgtgcctccatacagcctgtgtagcttcagaagaaagtcataccatttgaaatcttgaagaataacaacctcaaggtcaccgctaacgggatcagctgttggtg

SEQ ID NO: 43683 - DNA, 472 bp, Setaria italica
  Peptide Sequence Number=SeqID_109657
ctcaaattcttgaactgtaatttgaatcatttcattattcttgatgttgcatcagggaaacacttcgaaagaaacagtgtagcattgatgctttaatctgcaacctttactaaatacatgatctggcctagtagttagcacattgttaactagctggtgtttattgtaatccttggaagcaacacatatgagtagtccacatgctggatctatataatagcttttgcatagatcccaagtacaagttacatggcagtgcaattctgccttatccaaggaacatctggttaacttgttggttttgtaataggcgatatatgtgctaatatgttcatctgtataggttttgttggttatctcgctggttatcttcagaagtgcaaagaaatgattcttaaatatgatattctaccaacgtgcaaacttcttgttctaatcattagcacctgataacatcatggaccttgtttac

SEQ ID NO: 43684 - DNA, 400 bp, Setaria italica
  Peptide Sequence Number=SeqID_109658
acgggcagtagtcgccgcggccgtcgccgaggtagatgacgcgcttcctccccccacccgccgccgcctcgcggaggatgcggtcgagcacctggcccttgcacatgttgggcgggcaggtgccgacgccgcagccgtgcggggcggcgtggtatggcccgatgcggaggcggccgtcggcgtcgacgcggctcgggttggtgttgacctcggtgaagcagccccggaggccgtggtggtcgaggactgtgtcgatgaagaaggcgttggcgtcgctgaggacgcgcaggtcgcacccgagcgcgcacgccgcacggatcgcggcggggacgcgcgggtcgatgggcaccgcgcgcagcgccgccgcgacgtcgtccagggtcctccccgcagcgtggat

SEQ ID NO: 43685 - DNA, 2061 bp, Setaria italica
  misc_feature (1)..(61): n is a, c, g, or t
  Peptide Sequence Number=SeqID_109659
nnnnnnnnnnnnnnnnnnnnnnnnnnnnnnnnnnnnnnnnnnnnnnnnnnnnnnnnnnnnnaaaaatttgttgagcatgcagattgcggaacttacacagaaacaccaaagatatccaattatgggaatcactccttatgttcactaaaaactctatgcatttaaattagaaagaaaacaaaatacaagaaatgaccgagcagtttgctctgatgaacgagcattcatcgtcctgctcaccattacaaagttgctgggcactaatgtccgtgaatcccacattcatgctgagtaccggcggtcttcttgtcatgattttttttctgtatttcatctcttcacatttgtacaacataatcatacatgaaacctttatgaattccaaatgcccccttattgtatcccaaaatggaaacttcctcaattaactcaatacaccagtagaagattcacaagccgatcttctaatcagatccagggtcaacatcaaccatgtccgggaaaaaaccaggatcaagattagcatcaccgatatccagcaatgggtcaagagagtcccattcagaatgacacacacttgctgcagtggaggttcctgaagcatgatttggcacattctgcctgctggaagcatcacctgacagaatgcacttcttggttgaagtttcatccccagggttataaaaatctggtggagtaaagctgaaagagtcaggaggaatggaattccccaatgtgccaaaatcagaaggattaccatataatccatctgtcattttaacagcttgtacttcctcggtaagacaatatgcagtgatttctggaggatgttctccagtgattatgtgtgtctgctgagcatcattttgcattgaaagttctccggaaaactcaaccggtgtacaattctctacagcattgtcttttgtcaaaggatctactggttctatagcaacagatactagacggtacatgcaatcatctcccaaatcatcggtggctcgatgcttgcgtacagaatgtgaaggttgtgatacaaatccaaggtcatcacgagccactatttttgaaatatactgtggatggagttgtcgagggtgtatacgagcatccaaagctagcaaagcatgtgaacaaaatttcgccagctcagtgccagtctccagcttccctctattaaagagttcaagaccttcttctaaataaagagggcgttcatgatgagtggaaagaaaggatgccaaaagtgctctaaatgcggctaactggaagtctgatatacttgggtcttcagtccagggtggactttgttcatacatccctgctttgtaacaggctttagtagcaacatcaataaggagcaggtccatttctgatctccaggagccattaaataaacccccctttgtttttggaattcaataactcgcaggactaagcacattctgttctcattgcatgagtggattccttaagaaaaccaagagaatgcaagctgtggacggtgtccatctgagagtggattctgttcacaagtcgtggtagaatgaaactttaacagtttatcttttcgttcaactgaaaaatgataaaaggaagactgtccaacaaattcagtattaattccagcgtctccagtgcagcaattttgacacatagtggaggcatcagttgtctattacatgtaggttcagaactcacagcaattgagctttgcagttgctgtgtctgcctcctgttgtctgaactttttgatgatgaccaaattgttgcttctattggatatgttcttaatgagtatgagctacttccagcatcatcatccagatcagcaaaaatattgctgacgaccacctgaaataattgcacagccatacctggtccaatacgagagaagaaactcagcagctttaacagcaaaagtttataatgaacaacaaatatcaaaaaatggcctaaggtactcatggaacgcaatgctatgggatctggttgtttgggagtctaccagtaccttgactttcattgtatccatttgcatctccaaaatatagaaagcgt

SEQ ID NO: 43686 - DNA, 567 bp, Setaria italica
  Peptide Sequence Number=SeqID_109660
aggtgctggtggggaccgacacgtccttgacggcctccttggactgcacgtacggcgtgtcggggtcccactgccggcccagcgtgtcgttcgcggggccgatggccgggccgccgacgttgagccggtacagcacctggtacgcgtcgtgcgagaggccgctggtctcgccgagcggcgcgatggcgagcgccgtgtcggtgatgatctcgtcgggggcgttgacgacctcaatggcgttgacgaaggcggcggagcccgtgagaggctggaacttgacggcgaggcggttctcggtggcgttgacgaggtactctttcaggacgggcttgttctccggggtgaagctgtggagcaggacgttgtcatcggtgacgacgctgaaggtggcggaggcgaggtcgacgtcgccgcccttgagcgggaagaggtagatgcggatgaagtgccagccggggacggcgagcgggaagctgtagacggcctcctccttgaacacacgcgccgtggagtacaccggcgagggcacgtcggccttgtcgtcggctaacgtcggtattgggtctt

SEQ ID NO: 43687 - DNA, 403 bp, Setaria italica
  Peptide Sequence Number=SeqID_109661
agaataagacaacaagaatatgatgggagaataaaatgctataggctcgacgctgatgattacccgcagattgctactgcttacaatatcgacaggattccaactgttttactcttcaaggatggagagaaaatacatagtattacagggacactgccaaaggctgtttatgtgaaagccattgagaaatctatttcagaacaatgatatatttgattaatattctttggtccagatttatgaatctgcatactttgtttggctactagatagtgcagagagaacttaaggtaaagttggagtttacaacatgagtatcttacctagaagtatgagactctgggtggtccttttgctatgcaatagcaagtgtaaatatagatgtatttcgaaaggagagtgc

SEQ ID NO: 43688 - DNA, 618 bp, Setaria italica
  Peptide Sequence Number=SeqID_109662
cccctcccctccccggcggcgacgaaagagcgcgcgccccttccttcccgtctcccggccctttcgccaccccccatcgagtgccgtccgcgcctagttccgccggcgcggaacgcgccgcctgctcgccccaccgcgaaggggttcgtctcgtcctactcctcggcgctcgtgaacgggcgcggggaggggatccgtccgggcttggatcggcttcttccccacctggatgagtgaagaggataagactgctgctgctgctgctgagcagccgaagcgagcccctaagctcaatgaaaggatcctctcttctctgtccaggagatcagtagctgctcatccatggcatgatcttgagatcggtcctggggctcctgctgtcttcaatgttgttgttgagattacaaagggaagcaaagttaaatatgagcttgacaagaaaactggactgattaaggttgatcgagtcctgtactcatcagttgtgtaccctcacaattatggtttcattccgaggactctttgtgaagacaacgacccaatggaatagtttttaggtacttaaatagacaaggaagacctagttaattaccttaggttacaattaccttaacctaa

SEQ ID NO: 43689 - DNA, 495 bp, Setaria italica
  Peptide Sequence Number=SeqID_109663
ctcctctccccggcggcgccgcggcggcgacgaaagagcgcgcgccccctcttccttcccgtctccccggccctttcgccgccccccatcgagcgccgtccgcggaccgagggtgcctccgcgcctagttcagccggcgcggaacgcgccgcctgctcgccccaccgcgaaggggttcgtctctcgcggcggccgccaccgccgtcgtcctactcctcggcgctcgtggacgggcgcggggaggggatccgtccgggcttggatcggcttcttccccacctgtcagttaaagcctagccaccttgcttggttgcttgggcggattgcgcgcgccctgttccgcgggatcttccctgtgctgcgcgacccgcgagggatcaatccgagagttttcctgctccagttcgcacaattcgttgcgaattccttttctgcgaggagggggtacgggtagaagctgtcaaagtttgcgaataagttgaattttgctttggg

SEQ ID NO: 43690 - DNA, 990 bp, Setaria italica
  misc_feature (953)..(990): n is a, c, g, or t
  Peptide Sequence Number=SeqID_109664
taagaacaaaatgcaaaatggtccttgcatccacacctgcgcctctccatccgccccgcccgccgctcgctcgtcgtctcggagcgaagatccggtactcaggatgagtgaagaggataagactgctgctgctgctgctgctgagcagccgaagcgagcccctaaactcaatgaaaggatcctctcttctctgtccaggagatcagtagctgctcatccatggcatgatcttgagatcggtcctggggctcctgctgtcttcaatgttgttgttgagattacaaagggaagcaaagttaaatatgagcttgacaagaaaactggactgattaaggttgatcgagtcctgtactcatcagttgtgtaccctcacaattatggtttcattccgaggactctttgtgaagacaacgacccaatggatgttttggtcttaatgcaggagcctgttattcctggttcattcctccgggcaagagccattggtcttatgcccatgattgaccagggtgaaaaggatgacaagataatagctgtctgtgctgatgatcctgaataccgtcactacaatgacatcagtgagctgtctcctcaccgcctgcaagagatcaagcgcttctttgaagactacaagaaaaatgagaacaaagaggttgctgttgacgaattcttgcctgcgaccactgctcgagatgccattcagtactccatggatctgtatgcgcagtatattttgcaaagcttgaggcagtagaatgccagcaaactatttattgtggcgtattggattgtgtgatttttaagttgaagcttgagattgtgtgcgaccattacaattgagaatgatgtcgctagctgtgaattgtgatttcccctggacatacatcgttaattaaattatgaataaacgaagttgataggtttactgtgtaacaaaaaaaaaaaaaaaaaannnnnnnnnnnnnnnnnnnnnnnnnnnnnnnnnnnnnn

SEQ ID NO: 43691 - DNA, 528 bp, Setaria italica
  Peptide Sequence Number=SeqID_109665
tttttacggttttacggttttaattttagttttactgaacaagcggcggatgtagacgacttgcaaagcgctagctgccatgaaagctaggtactccgccattgtgtagaacatgacacgctttctggtgctctcatttgtgtgtcggtgacgagcttcacgtgcttttaggtacttctgctcagcagtgacggactctaatgcttccttcagctccgcaattttaacattaatggggtccaagtgctcatcttttgccaaattgtgctcattgggtatgtgcccgacatgaatgtagaaagaaacagtttcaggtgctccatatgggttatggaagcaaaacttgtacatgccaccccttggagctttaaactcaaatttttcaccagatttccccttcaacgtatgtacagtattgccacctggtgaagttaccggcagagccaacagatacccagctgacaatggaacagcaaatgggacttttgcttgacgttttcaattgcacagaaatgaaattggcatacg

SEQ ID NO: 43692 - DNA, 243 bp, Setaria italica
  Peptide Sequence Number=SeqID_109666
tgcattcttggtgagatgcaagagcacgcagggtagattcgggtttgcttctccatgggcgatgtagatggtggcgcgttgagagctcccaagcatcaattctctcactgttggacatagagggatccccaggttgcagattgatttttttttccatttagtgaaatggagaaaggtttcttttatccaggagacattgagcgagggaagggagtggcagtagcaggagggatgaggaatgga

SEQ ID NO: 43693 - DNA, 347 bp, Setaria italica
  Peptide Sequence Number=SeqID_109667
accaataccaaggtaatgttcccagtgagtgagtttccagatagatatatgtaatctacccttcccatataagcaaaagaagctggtatttgcccacttagtctattgaagctcaggtccagatgcttaagagttgtccatgtgccaatgtaagacgggatgcttccaccgatggaacagttccttagtatcaatttcttcaaggatggcattcgacttaagtcagggaaagatgaaccactacctctcagatcactaatccttaggtcatgaaggtttgtcaatttagataggctggggggaataggcccatccaacaaagatccttctatttccaatatttggag

SEQ ID NO: 43694 - DNA, 477 bp, Setaria italica
  misc_feature (1)..(25): n is a, c, g, or t
  Peptide Sequence Number=SeqID_109668
nnnnnnnnnnnnnnnnnnnnnnnnnaaattttattacacgagcaagaacacagagctttgtgtttgtgttgttatcttacagcaggttttattgtctgtacaatgcaccgtttataaacagtagcaagccaacacaaagctcgtgctcatatctctagtgacccctcgcagatgttatagcaaccacatcgcatactgttactaacaatgttgctaccgacaccgttgcagctacagggcttcctatggaggcaagcggattggcattgcataatgcgagtcaccagtcacagttcaccacatggcgctgccgcagcggcgaaggccgcgaccgcccttcttggcgttgatgttctcccgtgcctgctccatcatcttctccaccagcatctttttcttcgacagcagaattgtcttctcctcggctttgaggcgtgcattctcctccttgagatggttcaagtcggcgtccttcgt

SEQ ID NO: 43695 - DNA, 346 bp, Setaria italica
  Peptide Sequence Number=SeqID_109669
tcgtagtctaactacctattattacatacgatgcagaagtaaaggtaatgcaatcttttatcagccgtactattgttttcttgtgccctgcattttcgtatttatgaacttgttgtctcacctagcacgatcagctggaatttacagtagttgagcaactttccaccacaactctttctttacaaatcaaatatctaactactctcaatccctaaaagtagctatccgcaagttttacccatttaaatcttattggaccttttggacagtgaaggtttccatgggattcacgtttcattaaaatggttgaggttactgctttttacaagcatctagtttttctgac

SEQ ID NO: 43696 - DNA, 439 bp, Setaria italica
  misc_feature (127)..(127): n is a, c, g, or t
  Peptide Sequence Number=SeqID_109670
ccagacaggtcagtcaaccttggattgctctgcactctaacctagcggcatctggcatcccgcatccagccagggtttgagtcctgcttctttctcaatgttctttctgtgagcacttgctgccacnccagcagcagtagcagtgatgccgttgagcgatctcgtgtacaagcttgtatctgctgttaacctatcagaagagtcgcttttcggccctgccgatagatggtgaaaagggggtgctctcatgtccagagcaacatcagacacagttgtactgttagcgcaagcataggcctgctgatgcagcgtgtacctttcagcctgcaatggctcagagcaagccggcttgccaggtgtctgataataaccatatgtttgtgggatttgttgttggggaggatatcctgagttcattgccaacctccgtgcatcatag

SEQ ID NO: 43697 - DNA, 463 bp, Setaria italica
  misc_feature (321)..(321): n is a, c, g, or t
  Peptide Sequence Number=SeqID_109671
ctgaatctgcccaccaggtggatcggtgatcgacggacagcagccatgagtaagttgcaaacggaggtcctcaaggatgccatctcccaggtcgtctcagaggccagggagaagaacaggaagttcacagagaccgtcgagctccagatcggcctcaagaactacgacccgcaaaaggcttttcggccctgccgatagatggtgaaaaggggtgctctcatgtccagagcaacatcagacacagttgtactgttagcgcaagcataggcctgctgatgcagcgtgtacctttcagcctgcaatggctcagagcaagccggnttgccaggtgtctgataataaccatatgtttgtgggatttgttgttgggaggatatcctgagttcattgccaacctccgtgcatcatagtgatccttggtgtttccatttcgtaaggcattactggaccaacaaccttcctg

SEQ ID NO: 43698 - DNA, 756 bp, Setaria italica
  Peptide Sequence Number=SeqID_109672
acagagaccgtcgagctccagatcggcctcaagaactacgacccgcaaaaggacaagcgtttcagtggctccgtgaagctgccccacatccctcgccccaagatgaaggtctgcatgcttggcgatgcgcagcacgtggaggaggctgagaagatcggtcttgattacatggatgttgaagctcttaaaaagatgaacaagaacaagaagcttgtcaagaagcttgccaagaagtaccatgctttcttagcctccgaggctattatcaagcagattcctcgtctccttggtcctggtctcaacaaggcaagttcccaactttggttactcaccaggagtctctggaatcaaaagtgaatgagacgaaagctacagtcaagttccagctgaagaaggttctttgcatgggtgtggctgtgggcaacctgtcgatggaggagaagcagatccagcaaaacatccagatgagcgtcaacttgactgtagctttcgtctcattcacttttgattccagagactcctggtgagtaaccaaagttgggaacttgcctgccttgttgagaccaggaccaaggagacgaggaatctgcttgataatagcctcggaggctaagaagcatggtacttcttggcaagcttcttgacaagcttcttgttcttgttcatctttttaagagcttcaacatccatgtaatcaagaccgatcttctcagcctcctccacgtgctgcgcaatcgccaagcatgcacgtacctt

SEQ ID NO: 43699 - DNA, 479 bp, Setaria italica
  Peptide Sequence Number=SeqID_109673
ttagattcccaggcgatgagaatgtagtgtctcatatcagaatcgcatttgacttgctggtgttgattatggttatcgatcgttttgttttcatgtcatcacaggcaagttcccaactttggttactcaccaggagtctctggaatcaaaagtgaatgagacgaaagctacagtcaagttccagctgaagaaggttctttgcatgggtgtggctgtgggcaacctgtcgatggaggagaagcagatccagcaaaacatccagatgagcgtcaacttcctggtttcgttgctgaagaagaattggcagaacgtgaggtgcctgtacatcaagagcaccatggggaagccaaacagagtgttctaagtcgctgtgtccattgcgtctaaaaccagtgccgtagacagtattgaagtttgttatggaaataataatagtttaatgcagtactctgtcgtactgttatgcaaattttgtgtac

SEQ ID NO: 43700 - DNA, 934 bp, Setaria italica
  Peptide Sequence Number=SeqID_109674
agtaaacgaaaccctaactaacttaactacgacgaccggacgaccgacaacttgccgtctctcctcgtctgatctgcccaccaggtggatcggtgatcgacggacagcagccatgagtaagttgcaaacggaggtcctcaaggatgccatctcccaggtcgtctcagaggccagggagaagaacaggaagttcacagagaccgtcgagctccagatcggcctcaagaactacgacccgcaaaaggacaagcgtttcagtggctccgtgaagctgccccacatccctcgccccaagatgaaggtctgcatgcttggcgatgcgcagcacgtggaggaggctgagaagatcggtcttgattacatggatgttgaagctcttaaaaagatgaacaagaacaagaagcttgtcaagaagcttgccaagaagtaccatgctttcttagcctccgaggctattatcaagcagattcctcgtctccttggtcctggtctcaacaaggcaggcaagttcccaactttggttactcaccaggagtctctggaatcaaaagtgaatgagacgaaagctacagtcaagttccagctgaagaaggttctttgcatgggtgtggctgtgggcaacctgtcgatggaggagaagcagatccagcaaaacatccagatgagcgtcaacttcctggtttcgttgctgaagaagaattggcagaacgtgaggtgcctgtacatcaagagcaccatggggaagccaaacagagtgttctaagtcgctgtgtccattgcgtctaaaaccagtgccgtagacagtattgaagtttgttatggaatatatgtttatgcagtactctgtcgtactgttatgcaaattttgtgtctgaagtgaacaagagtggttttgtgatgcactaatgtttttcaccttgcacttgaaaaaaaa

SEQ ID NO: 43701 - DNA, 2383 bp, Setaria italica
  Peptide Sequence Number=SeqID_109675
aataaatcaattaatcgatacttcagttgtgcacaaatgggcaccttttttcgcctggatagatggcgtacaaacatgtaaaagaggacaggagcccgaagactcttggggccacctcttatgaatttcttatatcatataccacttctttccaggctagtcctgaagaacctgtgacaatatatagctaagatttgcaaccgctgcagcgagctaatacatccttgacatggcggagggcacgacaccaacatttctgtgagtaccagtaccagtgccaactgatgctgctgcggcggcaacgattccgttaagagatctcgtgtatatgtcagttcctgatgctattctatctagcgggttattcttggggccagctggaacgtggaacgggggtgctctcatgtttacagcgacatcagccgtgcctttgctgtttgcacaagcattggcctgggaatgcattgtataaccacctatggcctgtgattgattggtactgtctaatcttgcaggcacctgatggtaaccgtatgcttgtgggatttgttggtggggatatcctgaattcatcactgagccgttaactcttcctggtcctgctgccaaataggaattaatctcagaacaagggccattatagttgaaatatgtggagtcatctgtagtaaatgaacacagaaatacctgcttgtgcttgcagcccctgtggaggcagagatgccctgggaacatttacaggacctctttctttctcccaaggattcttacatgaatcatcagagactggtctaaccctcgatgaggtagcaagaggttgctccttggcaggaattggattcgagtgaacaacagtagtcctgggaagggatgcatgttttctatccgttggaactgatgtgccattaccaccgctttcttcaagatgagaaaactgcttcttaaattgatcaacagcactggggtagagaaaggttgtcctctccgtgccatttatgtagctattcagcaattgtgggtgatattccagtatctcccggaatatcaactcccttatctcttcctttgacattcttttgtgctcaaagtcaaattccactttttttattggctgacaggatggttctctttcaaccctggcaagacctttgaagtatggatcacgcaatgcctcttctgcagttggacgatcctttgggtcaaatgctaatagcttttccaatagtttaagtgccaaaggatctgcattgggaaacttctgagaaaatggaaccgggtctttctttctcatgctgctcaagtaccttcttgctttctcattccgaacccgagaaattgtatccattgatggtgtgcctagaagatcagtcatcaagtctaactgatggacaacatttttaccaggaaataaaggcttccctgtcaacacctcagcgaagatgcatccaatgctccaaatgtcaatagctggtgtatacttggagaagaaggatccacagagctctggagctctgtaccatcttgttgcaacataatccgtccagaacactgttgttggggtatcgttgaatgcaactcgtgctagtccaaagtcacatattttcagtttgcagttagagttagctaaaatgttcttgggcttcaggtcacggtgataaacattagcagtatgaatgtatttgagggcccggagtagttgatagagaaagaattggtaatgctccttcgtcaagtcatcattggcctttataacttggtggagatcagacggtccataagttcgaaaacaacataaatatccttgaagtcctttcttgagggaggtagcataatgtgcttgatctcgacaatgtcaggatgccttaggagtctgagaagtttgatctcacgaaggatccttgcggcatcagagacgtgctcaaatatattgtgtatcttctttatggccactctctgtcgagtgtgcagatcaatggccgagcacacaaccccatagcttcccttaccaatgacttcttggatcttgtaccggtttgcatctccatattctgtgaagaaatcggcctctgcagaactcttcttgcgctgctcctgctgcatccccgctcaccagatctcccaccgaaccgccttccaaacgccgcacccctcccttccgcagcactcagcacccgtcctcgcaaccaccggaccctacgcggcggcacacggcattcgctgccccctgaacggcgaggggatcaggggcgccgcgccgccgaggcgggtgggggagtgaccgcgacagcacccggggggcgggttgcggccttgcgggctgcggccgccggttcctcctcccgatctcgcgtgcagcgctccgagaaacagaagcgagacgaag

SEQ ID NO: 43702 - DNA, 905 bp, Setaria italica
  Peptide Sequence Number=SeqID_109676
gtcaagcttaacatacccaagtataactcttagacaatgttatatctgtgctgcttaaagctaagaagaaagcccaactaagttttctgggcatggtttgtcctggttgatcctgggttaggacataacatgtttagacactgaagctgtacatgattaacattatcgacccttattgtttacatctctcatacaaagcttagttttcttgtgtcagtttgatgaatacttttgacatgcctctattcaaatacctgagtttccccatcacatagctgcatattttggtaacttggtcttaagatgattgatgctgctgattgatattcatcttttagctaaataacagatctgtgtatatatatcgcacggttaagttatttactgcatggttatcctattgctaaaacacataatcactttttttttgtctcctacaggcagagatagaaatggtggctgctggactcgaaaagaatttgcaagttgctgagagggttcaccttctaactttattccagagcgcttgtactactggtaacatcaaaacagctgcagaggctcttggcctggtaagtagtttctatgaccatgactttcttgggacgccaaaatgtgtgctacattgtaggtcacattgagtggaaactgtcacctaaacacttattttattggactgtttagagcacattggagcttgtaaatgatgtgtaactagtcaagtgataacatgtggctgaaccaagttttttgaatacttcttttgttgtggtgtgccttcatgattctttaggcatgcatactcaccaattatatgatgtaatcagccattttaggatgagatgagtttgaaaaattgattgtatcgaattacttagagcataaaaatgaattagcaactatga

SEQ ID NO: 43703 - DNA, 1622 bp, Setaria italica
  Peptide Sequence Number=SeqID_109677
taaagtcagatacctcacacctatggcctccgccgttgtcgccgtaccggcgatggccgcggccaccaccaccgccatcttctcaccgtctctaccatcccttcttcgctcccacctcacctgtggccatcgagctgccaccacgacgacggtaacattctcctcccgccgcttccgtgatgtaaaccctagccataaacgctcccgaggcaaggccaccctggcccccgcaaccgacgaaggctttggcgtcctcgaggcggagctctggcgcctccgccggcgtgtggagctgcggctccaccgtctggcattcgaggccgacgaggcctaccgcgaccttcgctacgcggtgcgcgacgtcggcggggaccgcgtggtcatcaccttccgccgttcgtcgttgcgcttcgccgccggtgcgctcctctgctcgctcgccttcgccgtcgcggctcgagcgctgctgtggatggtcttacgggcatggtggcgtcggggtttggggaggggatggtggggtggacggggtggcggcagggcggttgtgtggcggagggaccgcagccttggagggaaggaggtggtggttgctgtttcatcttcaagtgtggctccagctccgactagccatgtccaagagccagcaagggtggtcaggaggagggaaccgcaagcaaaggttccggattggtggccggaggtgggagtgacaattgtagaaccaaggctagagatggagaagaggctggccaacagattggtccgagcaataattgataatagaatcacggggagggattacagatatgatgatgcaattcaacttaggcaattatgcaagatatctggcataaaggtctcctttgacactgagaatgctcgtaattctttctacagagcagcagtaaactttgttctagatgattgcagcagagcggcacaggatgttggagcagtacaagttaatggtgagaatccaagggattttcttgctggtcttgctaccaatattggattggacaagtctcatgctgccactcttgtacgtgcttcagttgctgctcggacacgtacatgtttcttacaatgctgggcccttgagattcaaggaaaacgacaagaagcactggatgagcttttgaagatttgtggaattcataacatgtttcctcctgaggacaattctgcagagatagaaatggtggctgctggactcgaaaagaatttgcaagttgctgagagggttcaccttctaactttattccagagcgcttgtactactggtaacatcaaaacagctgcagaggctcttggcctgagtttgccagatgaatgagaatgcagcagaaggattagttttgtccaaaaatttctagttcgaactgccaactcccatatatcaatcacagatgaaggcttgaagcccccaagtccccaacacaacacaatttatggttgaggccctgtttgggaagggcgtgttaaaatttaacagggtgttaaactttaacaccctcaaataaaggtgttaaactttagtatcttgaggtgtttggatgatctgttaaaatttaacatcttaggttgtaatagacaactttaccccttcaaaaaaaaaa

SEQ ID NO: 43704 - DNA, 735 bp, Setaria italica
  Peptide Sequence Number=SeqID_109678
acttacctaggtaaattttcctgaaagcctcttccgggctgaatctagcttcccaggatccataagagtatacttttgctccctcattgtcctctgcagagagtatttatgaacatcacatgaaagtgtaggcactgctttgccaagtgtaacagagaagctaaagtttcttcatgattaacatctttttcactattttgcgtgatagtgacagtgagaagtctaaagatgataactccatgctgatagagtatggccttatttccttttcctttttactttttgagtaggattgaccttattttcaaggcactagaccgaccctctttagctcaattaattaaactagttttttcaaaatgtggcatattttggtaaactaagaaggttcggtggttggccttaggggcaccaattctcaatttaagaaacatagaggaacttatagtcaaagacatacagctagaactgatgatgaagtagtagaatagttgctattgttgttcggcttggtgttatgataagcaggtgcagggcttgttcttcgcttctccattgttgactccaccgaattttgatagatagacctctctgagctgaaaccattatgactctgtgggctaggggaatacttgaagtctgaagccttagtactttgatggttcttgggttggactttatcaggtgagtcaccatcacctgccaccatgaatcaaagacaaaattaccaccaaa

SEQ ID NO: 43705 - DNA, 440 bp, Setaria italica
  Peptide Sequence Number=SeqID_109679
ctatgactctgtgggctaggggaatacttgaaggctgaaaccatctatggtccaaaataaggtccatcagtacatgccttggtcatcgaaaaacacgagctctacttaaacctcttatgggctggatatgggaactcactatgactctgtgggctaggggaatacttgaagtctgaagccttagtactttgatggttcttgggttggactttatcaggtgagttaccatcacctgccaccatgaatcaaagacaaaattaccaccaaatgcaaatgaatccaaaaactttggagctatacacaatgcaattctatgaatggcacggtacttatgatcgagctaccgccatcaccggctgagttgtgcagcctcacccagtcatccactatctccttccatttccttcaagaccaagacaatttagtactccactcctact

SEQ ID NO: 43706 - DNA, 1534 bp, Setaria italica
  Peptide Sequence Number=SeqID_109680
ttttgaaataataacattttgatttccttcaccagttttaagagaagcacaagcgtagcctcacgtaccagaaaatatcacactggactggactggactgcaaggttacaaatcaaataggaaaaagaatcctttaaaatttcatttttgactagtacagaatacaaatttgcgagtcccctatcctatatgtaggaagacctttccgtgggcagatcaccggtgccttgccgggagtccgcctccaccactgctcttgcggatgaaggtgttcctgttctttggtttcggtatgtcgtggatatccatcacttgaatggtcctctgctttttcgcattttgcgcttcctggtaattttcctgaagcctcttccgggctgaatctagcttcccaggatccataagagtatacttttgctccctcattgtcctagctagaactgatgatgaagtagtagaatagttgctattgttgttcggcttggtgttatggtaagcaggtgcagggcttgttcttcgcttctccattgttgactccaccgaattttgatagatagacctctctgagctgaaaccattatgactctgtgggctaggggaatacttgaagtctgaagccttagtactttgatggttcttgggttggactttatcaggtgagtcaccatcacttatgatcgagctaccgccatcaccggctgagttgtgcagcctcacccagtcatccactatctccttccatttcctgacgagcagcttcaccagctgccgcacttcaccagatgggtgcttgcgtagcccattcacatgccggccgatgtccgtctcctggagagccttgtaggtgatgtccatgtctgccaggttctgcagcaggctcaccatctcgtcctccgactggtcggggtcctccaggaagtccctgatcgccaggatcttgctctccacgccggcgtcgtcgtcgtcctcgccgaggccgtccgcgtcaacctcctcgtccggcgagactggagacaccgcctctgcagcagcagcagcctcaggtgccttcctcggctgaggcggtgacggggcgccggcgtcgcagttgtggcagcgagccccggcatagagccgctcgacgatgccgtcgcggcgcgcgcgcagctcgtcggggttgtcccgcgccgccgcggtaagcgctgcgtctacgaggtcccacacgtcgccgccgcccccgaacgcggccagtgcacggcggaggcgcccgtcggagcccataccggcggcggtcatggggatcggatcctcgacggcccccacaagatccggtaacgcgaccggcggaatcctcagaaccaaacgctagactgccaaacccctcggcgccatcgccttcgggcgggggcgcagccatgccggaacggatcggtggggtaggcggcgatccggactgcaggaggagggcgaggccgcggatggggaatcggacgggagggccgggtggatccgataagcgagcttccggatccgttaatggcgcggtggtggtggt

SEQ ID NO: 43707 - DNA, 349 bp, Setaria italica
  Peptide Sequence Number=SeqID_109681
ggcccgccacgtgcgtgaccgtcgcccgttccagtacgtggtcgggaacgagcactggcgggacctggtggtggccgtgagggacggcgtgctcatcccgcgccccgagacagaggccgtggtggacatggtgaggaatgtggaggggttcgcggacgggtggtgggcggacctcggcaccgggagcggcgccatcgccgtggccgtggcgagggagctcggacccgaggggaaggtgttcgcagttgatgtcagcgaggtggccatcgaggtcgcgcggctcaacgttcctaggtacggaatgcaggataaagttgaaataaggcacggttcgtggtttgaacctctg

SEQ ID NO: 43708 - DNA, 501 bp, Setaria italica
  Peptide Sequence Number=SeqID_109682
cagccgcccatactttatcatgccagccaagccagtagcagcagccaggtggccaccttggctattgacaagaagattggggctgccagttcttctgtggctctagtgatagagggggctgggtcctcccaggcagcttgtcttggtgatcagctgggagatttcctttctgactgaaagatgaatatggatatgttctaggtgtcacatatagtctagcatacttagatgcatggcaacctagattgttgaaggaaatatatatgcaggttaagtctagtactcctagtaaccgagagtggataataattttatactccctccgtcccaaattataatatgttcatttttgcttttctagatacatatgttttactatgtacctagatatatactatatctagatacattagtttttaaactatgtacttagaaaagataaaatgaacagtaatttggaatagaggagtagcagttgaactttggcttgcatcgatgtgg

SEQ ID NO: 43709 - DNA, 493 bp, Setaria italica
  Peptide Sequence Number=SeqID_109683
tttttttttgagtcagacaattatttcattgaactttgattgtctacaaaaagacaggatgggatatacaaccgcataaatattacatggaccatggacaccgcagtgaccaaacttcagttacaaagtgcccaaaggccagatgaccatataaaggttgcacatgaccaaatggaaaattcgtacaagatgttggtatcacagatcacaaagcatcaaccatttggattcatggtcataggctcacaaccaatgcaaatgacatcaggagttctgactgaccattcgtctaaaattaaagaacactcatatttgaagagaccaagagacaggtaacagcaatcttctccactgagattacattatatttgagctaactctcagttgtaacatgcttgatgctccactctcaaaattgtcacatcaaggataattgaaccaaggaaagtgacatgcttgcagcaaatgcataagaaactaaagtgcaacaaat

SEQ ID NO: 43710 - DNA, 507 bp, Setaria italica
  Peptide Sequence Number=SeqID_109684
gagcttcaggaattttcccggcctatgttggcccatcttcatagccacccttccccagaccccagcggattttgtatggccttcattctatgttagaattcacattcctcactgcaggaagctcacggtgccaaaactgtaagacacccgttggcagatttaggagttgatgactcaggcaagatgttgcgtaatggtcaattttcagtttcagcagctctgatgttggaagttcatccaggagaacaacaaggattgcggattgccaaccgagttataagtcatgaactaaccattcccaggtgcccgtcatgttacaacagtagtgaaacaaggcaactggcaggctgtcaggctgaggcacaagatcagcaaaagcagcacctgccattcgtaatgcccaactcacaggtgctatgccctgccgctaacaaaggaacataccagaaagcatcagaactgcacatagattgcactagtaaagggtcttgttctatttgtttctta

SEQ ID NO: 43711 - DNA, 440 bp, Setaria italica
  Peptide Sequence Number=SeqID_109685
gccgccgtcatcgtgtccgaccctggcctccgcgcgcggctcacccacttcggcgcggtggaattggcggaccccgccgccgcccgggaggccggggaatccccctacgcggcgccggactcgggcgagccgtcgcgggaggcggacgtgtacgccttcggggtgctgctgctggagctgctctccggggaggagccggcgaggtaccgcttcgacaggggcaccaaggagttccagcgggtgtcggtcctcgagacggccgcggcggcggcggctggtggatccgtgaggaattgggtcgacaggaggctaggtgactcgttccccattgcggccgcggagaggctggtggaagtggcgctccggtgcgcggcggcggaggaccggccggacatgacgtgggtcgcggggaagatttccaaggtttacctcgaatcccg

SEQ ID NO: 43712 - DNA, 622 bp, Setaria italica
  Peptide Sequence Number=SeqID_109686
tcacattccaaagcttagccaaaagctgacactgaaggtattcaaatgatcgtatgctacatgaattaaacacgaaagttacgatcagagacgtcctaatgacgtacttgtcagattaggggaatttgaattgaaaggtgtgcacttcttctgcgaaagaaggctggagttaccatggaaagtgatgcatttacttcctgcaagtccttcggggaaaatcatatctcatgttgccttacaatgcaagttgcaacaatgctactatctagtcagataaacttcctagcctattttttaatatagatagtggaaacttggtgtgtaaactcatataggttgaatttcttctacaacaatgatagtataattataaaaatggaatcatcatgtattgcccttgtttttattccatgcacgaatgaataccatgccatctgcaagtgctaccagaccatcagtggaccccccacgaatatcaaatatatgcgaatcttcattttctgttctagctaatgaaaggcctgtattttaacaattgtggatgcaactttttagtatcagaattattttcatacttggtatttgaatattatgcatgcagttcattatgtaaaaaatgtag

SEQ ID NO: 43713 - DNA, 748 bp, Setaria italica
  Peptide Sequence Number=SeqID_109687
ttcactctgtcataatcagccttccatatttataacgcctccctaacttcatccagctgcgaatcaggtatggtggcgaactggtccaagttctccacccattccttccatggtggcatagatggatccaagaattttgctagctcaggcaggagagctgccttgtagaattcgtaacccccttcctgacttctgccgatttgttcattgactcgatcccagggcgaacaagtctcccttccttgttttttgtgcagaaactattatctctaaggatcagaacttctgaaggggctattggtagaacgattctagaaaactttgctagagacaattctatgatatctttgggtagtaatccacgcttcactgccactgcagttccaaccatcttccggatctgatgtagcatgaaagatactccgcatatggtcaattccacaaattgaattcctgatgaactctgcaattctccacatgaacatgtaataatatctctgaaatgtgaagcatttagtctatcactctcatcaggctcatatagccacctagcttgaatctgcacctggttcccaaaatgtttggcaacatcattcaaacaattgtcttcgacaccagaatcaatcattgatgaaatattcaagtcttcatcatggtctgaaggagtgttgtcttcagaagagtttttcttccatacccgtttcagaagacatggacttcaacggcaaacatgctccttaaccttcgg

SEQ ID NO: 43714 - DNA, 811 bp, Setaria italica
  Peptide Sequence Number=SeqID_109688
ccttttcatctactgcccaaagactgttcccccttcgacgaatgtcacatcatggcaggcagcaggccttgcaggcaatcaacttacttggtgctgggtgggggtacgaacattgctgatgcactaaagaaagctgtgaaggtgattgaggaccgcagctataagaattcagtatgcagtattattcttctgtcagatggccaagatacctacagcatttcctcgaatttccaaggaacatcagcaggtcgtaggtcacttgttccatcttctattctaaatgaacaccatttggtacccctgcatgcttttgggtttggagcagaccatgattcagatacattgcattcaattgctgaagcttctggtggcaccttttcttttattgaggatgaaggtgtgatgcaagatgcctttgctcaatgtattggcgggcttcttagtgtttctgctcaggagatgcatcttagcatggaatgtgttgatcctggtgttcaactccgttccatcaaatgcggtagctatccaagtaaggtggcaagagatgaacgaaacgggtctgtcgatatcggtcagttgtatgctgatgaggagagagacattttgctgtcagtgaccatcccaaaatctagtgaacagacttcactgttgagagttgcttgtgcttacaaagatcctgtaacaaacgagactatcaagattcaaggtgatgaggtaaagatcaagaggccaacatccaccgtatctgaacaaatgtctattgaagttgatcgagagaggaaccgtatacaagctgccagttctatcgagt

SEQ ID NO: 43715 - DNA, 573 bp, Setaria italica
  Peptide Sequence Number=SeqID_109689
caatgagtcctccccgggacagctgggaaggatggagatcggtccacttgggcaagtagtccagcctaccagcctggaactccacgagcacgaccatatgaagctcccactcctggatcagggtgggcaaatggttggggtgatgcttcaggaaacgctcaaagcacgtatgcaccttcaacacctgttgtgcaaccgatgaccccagttcctgctgcctcctatttgcctggtactccaggtggccagccgatgactccaggggatgctggaatggatctaatgtctcctgtaataggtggagaggctgagggcacctggcttctgccagatgttttggtgaacgtctcgaggggaggggatgaggtcacagacggtgtggtgaaggaagtgttcccggatgggtcatgtcgtgttgcccttgggtcgcagggcaacggagacgaactgattgcaagtgcaaacgagctggaggtggtcaggccgaagaaaaaccggaagctcaagataatgaacggctccatgcgtggagtcacgggaaactgattggagttgatgggtctgatggcatcg

SEQ ID NO: 43716 - DNA, 307 bp, Setaria italica
  Peptide Sequence Number=SeqID_109690
tcttgtctgctatccttgcagttgcggagagctcaggcctcgcgctcccatggctctcctccgactccaagaacagtgctcgctcctccgcatctccagctcccaccacccaaatcccttcaaacccccaagaaatcctcggaggacccaacttttaccgcccaatgcggccaagaatgccaccccctccgaaatcccggttcctcgcgcccccgccgcggcgcccaagaccgcaatcccggcgcggaaggcggctccttggcgggaagccctcgtccccgtcgccgccgcggtcgcgtcctggccg

SEQ ID NO: 43717 - DNA, 269 bp, Setaria italica
  Peptide Sequence Number=SeqID_109691
cggaagaggaaggggagaggcaggcaagcaacccatagccggccatcgcctagccgcccgcctcccggaagagaaatccccaaatcctctgccccaaaatcccctgcggatttcgccgatagccccccgcgccgcgccgtatttgcactcctcgcacgcggcgacgcgcattgtaattcctttccattattttcctctctttcttccctattagtatcacccgcgcgatcagcatgtctctgcccaatgccaccgcctcgccgccgccg

SEQ ID NO: 43718 - DNA, 685 bp, Setaria italica
  Peptide Sequence Number=SeqID_109692
ttacgttaacttaacctttagttaagttacggttcttagttcttaatttttctctgttccggtatcggttccagtgatgcagctggaatgtgaaattgctttctgggtttggttctatgcagggtgtgccctacacagccggcgagcccgtggcggcggcggaagggaagaacaagaggaagagctctggtgctccctccgtcggtagcgcttctggaagcagtgatgcagggagagaggagtcatcagataaacgagatgctagtgccgaccttaagctattaccttctgcaaagaggagaaagtccagcagtgcaaatgtacaaggcgaaccatctcaggctgcaacaacgcaagatgctgcagccgagacacaaagcgcatcaaagaggaggtctgcagcaaagctctcagtttcgacacctgagacggcagcaatttctgaaaccagaccgaacttgaacattggaatggatctttggagtaattctccagttaaagcagagacctctggacagggtgagataaatgctgcagcatcttcccagcatgacatcactttatcacagatgcaggatgagcgggaactgaagagggagagaagaaaacaatctaacagggagtcagcaaggagatcaagactacgcaagcagcaagaatgtgaggaactagcccagaaggtaac

SEQ ID NO: 43719 - DNA, 319 bp, Setaria italica
  Peptide Sequence Number=SeqID_109693
agcgctttaacatttatgccatcaaagagcctcgcggcagggacgccgaggagcccgcggctgcagcagcaggggagacgggtacaccagcagcagaggatcctgctcgcgtaagggaggagcataattcaaggttctttgaagccaaggcagaggaaggggaaggaaggcagggcaggccgtgaggttgattggtcggtcgatcgatcgatcgtcgatggcggtgacggccacgacggtcgcggcggcgacgacgatgctggcggccgtggcggcggtgttcctcaccttcgtgctctgcttctacatcttcctctgc

SEQ ID NO: 43720 - DNA, 253 bp, Setaria italica
  Peptide Sequence Number=SeqID_109694
aacgacctataatttgaaatggagggagggagtactaacaattttgattggaacatacagagtattcttaaattaacctagcttttgttactcaagcatgcgtagatttggacacagataaggatacccgtttcttcagagaagaagatccaatagatcatgttttacctcacagatgtttggctgattgctgccgacattactctcatcaaatggtccagcatgcgcagcccatatgagaagtacatggacg

SEQ ID NO: 43721 - DNA, 830 bp, Setaria italica
  Peptide Sequence Number=SeqID_109695
tttaagtatgatcctgcaatccgcagtcatgtgaacaatcagaaacacttgttcaataaatttctatccccacaagtacattccgaaaatgttgtggaggaattgacacgagacaactcgcagggtccatcggaggaacaatggctcgattaacagttcattacaaactccaggcatgacacatttcctctagttacagtggtgacaagctcaggatatcaacgtaaagcagctcttatgatctgttcattccgctacagatacaaacatgacctgaaaacgtttaacaccaaaactgttgcaaaccatgctcattactgccatacaccgaaactgcatctctcatctatccgctccgaaattccttcaaaactgtcccaccacgacaactgacaccaaatagctcgtgacaccaacagaattgtctcatcttgctgcttaatggtgccgtgacttctgatgtgcttttccatcttctacatctaatggactctgaaccaccgcggtcctatctatcctatctatcgttaatcatgcagaggtacccgcccccatcacggcgctccaagggatacctggtgacacctttcatgtactcaaggtgcttcacggcagcatctcgtagaccagatctgtttggtgcctttcctttctcgcgcttctttatcatggtgcaagtccccagagggccatcccttccagccccaggtctcctgcagcaaagaacaatggataacttccaatttatacaatcgacattcaagcataataaaaaaagtgtctaaaaaggttgaaaaataaccccaataacccaagtaaaattctggttg

SEQ ID NO: 43722 - DNA, 324 bp, Setaria italica
  Peptide Sequence Number=SeqID_109696
tcactgagactgttttcagatctgaaactagcagtgccttcttattcagagattgggctattgaggaatgcttctgaatttctgatggttcaaattagcagtgctttctcattcagagaccgatctgatggttaacattactctggtgacatatgaaattctgatgattaacgtttagccgtctgattcagagacaatccgataggtaacatagaagatcactacaagagcgattcagtagatccggactaccatgttgatttctgattcagtaaatatttcagtagtttcctacttttccatgtaagatataaaaacttcagt

SEQ ID NO: 43723 - DNA, 293 bp, Setaria italica
  Peptide Sequence Number=SeqID_109697
cagtctacagaagtggcctgttctttagagttactattgtgaacattttgttcagatgcatcattctgtacatcagaccctgccttaagaggttcttgaacctgcttcagcgacgattctggactagttgaagcagatttcataacattgcatgtgatttgatcattcatgaagggcagagaatctccagataaatatggaattgcatcggctggatcaactaaaagtccatcatccagtgttggagactcatgctgtggcattcctcctccctgataatccaagtggtccaa

SEQ ID NO: 43724 - DNA, 982 bp, Setaria italica
  Peptide Sequence Number=SeqID_109698
ttttcttcgttctctgttcccaagagggaggttcaactgaagtgttgaagttctctttgtccttaccatcaatggggctagacttcctaccattcatttgatcatcctctgacccactcttttcattgtgagaggtctcttgtaacttttccatgtcctcattttccatctgaagcgcaggagagtttggaagttcgtcatcatcagcactgctattgttaagctggcaatccttattactattttcagttaacaaagagtcaccatgatacgcatcagaatacataatttctggttgaaagtttgatgcatcattaccactgctttcaggaagctctggaggcagcactgcaccaatcacttctgtgttctgatgtacatcacagtctacagaagtggcctgttctttagagttactattgtgaacattttgttcagatgcatcattctgtacatcagaccctgccttaagaggttcttgaacctgcttcagcgacgattctggactagttgaagcagatttcataacattgcatgtgatttgatcattcatgaagggcagagaatctccaacactggatgatggactttagttgatccagccgatgcaattccatcggctggatcaactaaaagtccatcatccagtgttggagactcatgctgtggcattcctcctccctgataatccaagtggtccaacaggctaccatcttggtctccaaataacggcccaggatctccacaagtcccctccagatttctctcaggggatatgtactccatctcggacggccccggcgcgcgccgcctccacccatcgcgggtcctccgcctcccgcgatccctcgcgcgaggtttccttcgtcccccactctcctcttcggtaggggagagagagaagggaggaggggagagagagcgagacgggtagagatttttggggagccgtacgaaacggagggctcgtcccgtggtgtgg

SEQ ID NO: 43725 - DNA, 2212 bp, Setaria italica
  misc_feature (1)..(10): n is a, c, g, or t
  Peptide Sequence Number=SeqID_109699
nnnnnnnnnngtttggaatcccagataattggtgttaaatatggtctcaacaatgttgcgtaaacagatagatatatctggattcgagattacaggcagaacaaccatgtcagcagaaaacgaacaacgagtctaaatgctgcgaccatatttaacaccaattatctgggattccaaacacaaactatatggcatttgtcaaaccctcactcagaggatgcaaacatataaagcctatgtatcaattattgaactactaactcaatccttgagtagtaacagcctcacaagcttgaatctcctggtatcgatttgtgccatcagcgagcctgagacgaggacggaggtgaagcagggaactagctcacgaacaggcacagtatcacatttcagatgtagaggttggcaggttgcagacactaaaggtagtacccactaagtccctcttatcagcagcagggccctgaaacaagctaaggtttgacgttacatcttattcttttataactgtcagcaaggatgtgcattattactcttactcctagtacagcatcaaaagccaggttcggatgaacttgcgacatgtaccgagtatgtcataccgataataggttacgttttctgaacggtaaaatctgtgcaaagtgaagcaatgaggcccctcttcaacagcggtgtactgagctccaaggtggaggattcaccatgcaggcgcctttgacttctccacaagaatgatccttccattccactcagtctcgtcacatgcacggattgctgcatcagcatcctcatccttctccaaggataagaacccaaagccacgagaatctccagttcgtttatcgcgaacaacacgtgcacttgttacgcgtccaaatttgcaaaatttcttctccaaatctcgttcagtggtggcatagctaaatcctgcaatgaagagattctttccaggcttacccaatccagtcttcctgttggcgggtggtgaccaatgatgccttcttggtgaattatggcgatgacttgatgagggtgatcttcgccttggtgaatgccttcttggagatcgtctgtggtgatctcttcggtggggagaccttgaccgagatctatcatgttcccttctatgtctatcatgtcttcttgaaggtgaccttgatcttgacctatccctccttcttggggagtccctcctcctctttggtgaatccctcctccttggtgactctctcttccttggtgattccctcctcctaggtgagtgcctcctcctaggtgagtctcccctccttggcgactccctcctcttgtgtgaggatcttcgaggggatatagatcttcttcgagggggtgtagatcttcttcgtggagatgcagatcttcgtctaggtgacccatcaccatgtcgagactctctccgtcttttcctttctacaggagaatgattctgtgcatgtggagacatctcccttgaagaaggtcgtttgcggctgggatcatgcttttcagaagatccggaccgacgtcttgctggtgggctttcagaatgaccaacatctttggcatgacgttgtgactccatcttctcagaatgatgggtatgaggacttccgactggaggagataccctcccatctggagatggtgtgtccctttctagtcttgcaaacctatcaggggataccctcccatctggggatggtgtgtccctttccagtcttgcaaacctgtcaggaggagaatcaaatcgattgtctggagttgaactgccatttctagtgccaggattttcctgctctgtctgttcccaagagggaggttcaactgaagtgttgaagttctctttgtccttaccatcaatggggctagacttcctaccattcatttgatcatcctctgacccactcttttcattgtgagaggtctcttgtaacttttccatgtcctcattttccatctgaagcgcaggagagtttggaagttcgtcatcatcagcactgctattgttaagctggcaatccttattactattttcagttaacaaagagttctaactagaaagtagttagaaagttactactttagtaccttaaccaatacaaataggggactaagaacttacctaaccaattacaatttagaatacaatacctactagaacccaactacttttacaattagtagaagaaggtactacttagtaaactta

SEQ ID NO: 43726 - DNA, 1261 bp, Setaria italica
  Peptide Sequence Number=SeqID_109700
tttttgggacagcaagaaacgtaaaatctggcactgacacaaaacagtacagaactgaagacgcaaaatagtcactcgtataagttacatagatagtacaagcatcccaagcacgaacacggttcttgacatttggccacagctcaatagcaacaacacacaggcatgacaaccgtgggtacttgattacaagaacaatggcagtataaaatgtatcgtcccaccaccaaccacctcgttgctcttctgcgatggttggaggcagcgggcttgctctattgctcaattgctcagagaggaagcccgcagaagggactttggagaagctggtacaacggggcaagattctggtacaacaatggatgttgatgatggagcaggtttaggtgtagctggagtggatgcacgaccaacacttgatccagtacggggtaatacttgtgtagggtacacttcggtgacctcttcgatgccttcgtctacatatatgacatcctgcatagtcaattggtggtactcgactatttctcgcaggaatctgttttctcgagcatatacagagttctcatgtgctagccgtgccttctctgctaatagcgtctctaactggaggcggatcagatcatcatcttctggattatcacccttgtcataactttctcgcagcattttattctcttcttcaagctgagcacaacgttcttttgcaaatgccaaatctgccttcactgttttcagctcgcgcaatagcaactttgcttttgcagccatggcattcgcaacgtcgcgagatgccttcaactgagtttcatggtcaagcggattttgaggaagatatctttgagtaagtttgtgaccagcttctccttgtgtatttgaaacggttccttttcttcttacgttcagtttacgcgtctcctgaataatgtcggctgttttattctctacaatggtccgaccttcttcaagtgcgttttttattgtgcctccaatatagttaagggaggaagttatggcctcagatctcttctgagatggaggtgtctcagatttccatgtctctcctggcaattgctgtgaacgtggatgctggacaccgactgacgcaccatctctcagtgactgctgccccgctggcgattcgtgctgccccggggagccatcctcgtcaagaagcgactttgccttccgcgcaagggcaccccagaatccgtacttggcctcgttcaagctcttcatggacgtgtattcataggccgaa

SEQ ID NO: 43727 - DNA, 539 bp, Setaria italica
  Peptide Sequence Number=SeqID_109701
attgagcattatcacaatctgctccttttcacctctctgggtcaacatctgtttatcgccagtgaatgatgttgagaaaatgaactctctgttagcttctgatgctattttcgatgtctggacacctccaacacctttacctgcagaacacttctgaacttgatctatctctcgacggaaagcaactgtttttgagataggactgtattttgaagctctgaaaatttttgcaggttccttttttattgtctggtacttctgcctgttttcagccatcactctctccctcatctgaacaagaagatccaactgcatcgatggaggaagggaagccaacacggctggatcctaattgcccttggtcatagggatgatcatcccttcatcatcatcatcatcatcatcatcaatttcagctccttcttgcaatggaacacttgtaaagtgtttcccttcaccagtgaagcctgtctcttcctatttcatccattttctcctggttgattgatgcaatagttccctcactgttgttggtatca

SEQ ID NO: 43728 - DNA, 695 bp, Setaria italica
  misc_feature (657)..(695): n is a, c, g, or t
  Peptide Sequence Number=SeqID_109702
caagcacgaagccttcgcatccgcatccccatccccgaccggcggaagggagggagccgaacgagcaagccagcgaggaggcggcggaggttgctagggccggtgccggatggggttcatgctgcgggtgaggctggcctccttcttcgccggcgcggcggccgccgccgcgggcgggggctacttcctctacaaggactacaagctcgcccacgactccatggccctcaaggtaaaaggtctccaagactctactgacgctcgctacaaagcccttgaaaagcgacttgcggctttggaaggtcagcagagcactggggctgctccggattcatctgattagtctgttcaatatgaggcttgagcgtggatggtttacttctgttttctttaccccagtaatcttctcctttgaaagcaagagggcttgaccgacaacaaaataatctaggatgcttcttttgtatcgcaattgtctgaggctgagattctcccgtacattctgttcgtgtttcatgtcagagaagcacatgaacatcagaactctgattgctgaaatgctgaggcatactgaacgtgcatgggatggtcgtaaacccaacaccaatttgagaaatggattttgccgaaccgtctgaccgtgtctaatttaaaaannnnnnnnnnnnnnnnnnnnnnnnnnnnnnnnnnnnnnn

SEQ ID NO: 43729 - DNA, 1263 bp, Setaria italica
  misc_feature (1263)..(1263): n is a, c, g, or t
  Peptide Sequence Number=SeqID_109703
atagagaaaatggcaggcaaaggcctgaccaatataaagcagttcatactcagtggatgatgcctcagctaaaggaccatcatagtatgaatctcctggcactgatgaatgagaaggacagtgccatcagagaaagggaccatgctctcgctgagaagaaagctgctatagctgagcgagacatggcgtttgcccagagggatgctgcaatggctgaacggaatgctgcgattgtagagagggacaatgcccttgctgcacttgaacttgcccgtacaaatgggtttaatatgaataacgggaatggatttcaccaagtacctcctcttaatggtacgaagaacatccacaaccatgaccagctatctcatgtacaaacatccccattgcagctggccgattctccatatgaccataccagagaaatgcacatatcggaagcataccctatcgcaacagctccaagtagtattgggaaagggaagaagccaaggaagaatagttcccaggcttcgccattgaagaggccatcaggtgtgcttcggaaaactaagaaagtcgctggtgactggaagaatggggggaatgtcaggtgggggtgaagattcagctcgtgcttctgtgatgaagaacgagtggaaggaccaagatcttggactgaaccaggtcccattcgatgagtcaaccatgcccgcacctgcctgctcgtgcacgggtgagctccgtcagtgctacaagtggggaaatggcgggtggcagtcgtcctgctgcaccatgagcatgtccatgtacccacttcccgtgatgcccaacaggcgccacgctcgcatgggtggaaggaagatgagcggcagtgcgttcacgaagttgcttagccggctggcagctgaaggccacgatctctcgacgccggtggacctcaaggaccactgggccaagcatggcacaaaccggtacatcaccatccggtagcaccggtggccacgttgtatcttccattcaagctgaaaaggggagattgcgccaatgttgcttctcctgcatcccaagagcaggcttagtggagctttatttgtaatgtcattggtttctagcggatgtgggtagagttttgtgtccacagtgctgtaggttctccccttttgaactgttaattgtgctcgtggcgctgaaatgctgcagtccacgagaatgcaagtgtaattgtagctcccaggtattcatcgtgagatcgttgtatagctgtgatatctggattaaacn

SEQ ID NO: 43730 - DNA, 825 bp, Setaria italica
  Peptide Sequence Number=SeqID_109704
ggttagcaagcgatggtggaatgatccctgtgaagttgttatgtcccatgtatacagaggtgagttttgacaagcctccaagccaaaccgggagtactccactgagctggttaaaggcaaggttgatgcttgcaagactggtgcagttttgtagctcagctgtgatatcgccttgaagcgagttgttgtacaagttgagatagcgtaaccaccgcaagcgaccaagggatgaagggatgccaccatgcagtgcatttgagctgagatctagactcgccaagaacgtgaggttattgaaggatgggttgatggtgccaacaaggccagctgacgacaggttcagttccagtaccctttgcttatgtctgtggctgcaaatgacaccaggccactggcagaaatcatcagttgcattccatgaagccagcacacctgacctgtaactccctttgattgccagtaaacagtctcggtcagtcccttcatttgattttggtgccgatggctgagcagatgaacatgaagtccaaaagagaatcagcagaagtacgtgaggcatcggtgcagcactcttcattgaattgaaacattcatggcaggttcttggcactgatgcctacgcaaattgagaacaatgggaattcactgaggttgaaaggcaagcatgtgaatttgcaaaggtacagagcagaatgggatgctacaatgttcgtcgttgagttgcggatggtcgtgaaggaattgatgatgatttacagtagtctaactacaaggtgtccccataatagaagacaaaattaactaaaaattaccttagtaaagtta

SEQ ID NO: 43731 - DNA, 670 bp, Setaria italica
  Peptide Sequence Number=SeqID_109705
cttatctatcacttaacttcatgtctttttttttccaactactaatgctagtgcttagggagatgaagcccgagtgtgtaggtaccaaactagaatctgaaatagtcaaaacgtcaaagaagaaagctgttcgacttgctagtgcttactctatctttttgaaacgttattgtgaactttaacttttgagatggcacaagaccaatgtagttgggacactgaatatgcttgggttggccaagaggattggagcaaggtttctgcttactagcaccagtgaggtctatggtgatcccctccagcaccctcaggtggaaacttattggggcaatgtcaatcctattggtgtcaggagctgctacgatgagggtaagcgcactgctgaaacattaactatggactaccatcgcggtgccaaccttgaggtttttgtgcctttcaaatgcttgagatcaatagcattcagattaatttttgtgggatgtagtacattatgttagtttgtttttaatttaggtaaggattgcccggatctttaacacatacggtcctcgcatgtgcatcgatgatggccgtgttgtcagcaattttgttgctcaggtagccaccagctgcagccacctcttttggcaccttgatgcctatgcactttatttttttaactgaaatg

SEQ ID NO: 43732 - DNA, 360 bp, Setaria italica
  Peptide Sequence Number=SeqID_109706
accaggattgcccaggttgaacggaccaatgtgctccccttccatcagcttcatcagcccttccacctgggcaatcctggtgaattcacgatgctggagctggctaaggtggtccaggacaccatcgacaaagaagcacgcattgagttccgtccaaacactgcagatgatccacataagcgcaagcctgacatcagccgtgccaaagagcttcttggctgggagcccaaggttcccctacacgagggcctccccctcatggtcacagacttccgcaaacgtatctttggggaccagggagaattcactgaggcagctggtggcctttcttaatcgtcaccatgtcaaagtgatgatcat

SEQ ID NO: 43733 - DNA, 608 bp, Setaria italica
  misc_feature (27)..(27): n is a, c, g, or t
  Peptide Sequence Number=SeqID_109707
ttagttggagtttgcttatttctgacntaaagggtgcatttcaacaacacaaaagttgagaatggcttttgccctttccactttccaagcgactttgcttactgttcacttcacgaaacttccttgtgcttttacttgttttgcaattgattgaggagtaacaatgtcgtaaagtcaaaagggtgactgatccagtgttttgcctgtaattactttccggatatggtttgtgttagccttaacctttgtgatggcacaagaccaatgtggttggaacactcaacatgcttggattggcgaagaggatcaatgccaggttcctcctcaccagcaccagcgaggtctatggtgatcccctccagccacccccaggtggagacttactggggcaatgtcaatcccacaggtgtcaggagctgttacgacgagggtaagcgtactgctgaaacattgaccatggactaccaccgtggtgccaaccttgaggttaggattgcacgtatcttcaacacatatggccctcgcatgtgcattgatgatggccgtgttgtcagcaactttgttgctcaggtaatacaagaactattgttattatactagttacagga

SEQ ID NO: 43734 - DNA, 905 bp, Setaria italica
  Peptide Sequence Number=SeqID_109708
aagccgctcgcgtggctgccccgcgccgcgcgctacgccgccgccgagcaccgccccgtcttcgcgctcgccgggatgctcatcgccgccgccgtcatcaccatcgcgtccccgtccacctcctcatccaccggcgccgccgtcgcctcctactcctcctccaacagccaccacaacagcaacccgctcgcccgcttctccgtcgagccggcgcaccaccgcgacctggcgtccacgaggcacttcgtgggcggcaaggtcccgctgggcctcaagcgcaaggcgctgcgcgtgctcgtcaccggcggcgccggcttcgtcgggagccacctcgtggaccgcctcctcgagcgcggcgacagcgtcatcgtcgtcgacaacctcttcacgggccgcaaggacaacgtcgtgcaccacttcggcaaccccaacttcgagatgatccgacacgacgtcgtcgagcccatactgctcgaggtcgaccagatctaccaccttgcatgccctgcgagccccgttcactacaagtacaaccccatcaagaccatcatatccttgctcagttgcttcctttgaatctgaaggctaatccaaaattagtttccttttattgctataataatttcgatgattaatgctgtggttcaattgattgctaagatgcttggtctgcccttttctttccggtttaattttgttaattccggatagatgttaaggttttgatttttttggcaataagtgtttgattaatttttagacgtaaggcttggtaaaactatagtatttgaatggatttcaattgtagttttggaggaaatgttgattttttattgttgggaagtgtgtggtcggttgttttcttgctttcatactaaaaaatcgatgtttgctctctgattgta

SEQ ID NO: 43735 - DNA, 1754 bp, Setaria italica
  Peptide Sequence Number=SeqID_109709
ccctcgccggcatgctcttcgccgccgccctcttcaccttctcctcctccaccacctccacctcgtcccgtcgtaccccgcagcgtcggccggattcaaccacctcgccgtcgccgggcacccatccttccgcgagtccgtcggtggcaaggtgcccctgggcctgcggcggcgcgcgctgcgggtgctggtgacgggcggcgccgggttcgtggggagccacctggtggaccgcctggtggagcgcggcgacagcgtgatcgtggtggacaacttcttcacggggcgcaaggggaacgtcgcgcaccacctccagaaccccaggttcgaggtgatccgccacgacgtcgtcgagcccatactgctcgaggtcgaccagatctaccaccttgcatgccctgcgagccccgttcactacaagtacaaccccatcaagaccatcaagaccaatgtggttggaacactcaacatgcttggattggcgaagaggatcaatgccaggttcctcctcaccagcaccagcgaggtctatggtgatcccctccagcaccctcaggtggagacttactggggcaatgtcaatcccatcggtgtcaggagctgttacgacgagggtaagcgtactgctgaaacattgaccatggactaccaccgtggtgccaaccttgaggttaggattgcacgtatcttcaacacatatggccctcgcatgtgcattgatgatggccgtgttgtcagcaactttgttgctcaggccctgaggaaggagccattgacggtctatggtgatggtaagcaaaccaggagcttccaatacgtttctgatctggttgagggtctgatgaagctgatggaaggtgagcacattggcccattcaaccttggaaaccccggcgagttcaccatgcttgagcttgccaaggttgttcaggacactattgacccgaatgcacggattgagttccgtcaaaacacccaggacgacccacacaagcgcaagcctgacatcagccgcgccaaggagctcctcgggtgggagccgaagatccccctccgcgagggacttcccctcatggtcactgacttccggaagcgcatcttcggcgaccaagacagtgccgccaccaccggaaaccagcaaggttaggacgaaggagcatgagactcaggaaaattttggtggcctgcttctagctgcttggttactctccttactgacaaagctatggccgcgtagttcattgggaatgtgttactgaaataccttggttgctgctgtaatgctattcttttttcctgtaattgttttcagttctctcagtcatcagctatacaaaaaaatgtcagttgaattgttggagataaacctggatgatctaattctttgttgagagcatagcattataagatataaatcacatgtttttgcaaatgtatgccctgctttgatgtgtctagcttttgttgagatgttttcgccatgaattccttacgctccgttcctttcgttcatgatgattcattgatgcttggatcgcgatcgcgtcttttttttcttttcgtgccaaacaaaaggattttattgttcttggatttttgcgtggttgagatttgatttctagtatattgctttttgctgggggaatttgttcgttttacgcgggtttatcagttactcccgcaatgcatctggcgagcactgatttaataccttcctgagattccgtttccgtccctgaaataggaatatggga

SEQ ID NO: 43736 - DNA, 330 bp, Setaria italica
  Peptide Sequence Number=SeqID_109710
gtgacaagagcaaattttagctcaaggatccattcccactctaacttaactggagtctggaattctggatgtctctgtacaccaaaacaggacagaatcacagaaacaaacggcacagcacgatgttataccctatttttaggctatcagatccacaatataccctccaagtcacgcatccaaacccatcagttcctcgcagctcccacgcaaaaacacaggcatttcagacaccacaccggcacgctgtcagttcgcggcagatttagccagctgcaggaggccgttcacgatctccagcttgctgtcgagctgcaccttctgctccac

SEQ ID NO: 43737 - DNA, 321 bp, Setaria italica
  Peptide Sequence Number=SeqID_109711
actgaaatagtaacaggacctaaatcaactagattggaatggttgcatatttcacgcaaaaaactttttccttgagggaccgagtaatattggcacatgtgaagcacctatgctcattttacctatctcgctcctaatggattttaaccccttaataatttcattattgtgcccacatttcttggagaacccaatgccaggtcaagaactatcctccacaacggaaccccagatagctcagcttctctaacctgtgtatatagctcggaagcaacttccttgcagacatcatcatactgtaaattcttttcactttgcata

SEQ ID NO: 43738 - DNA, 392 bp, Setaria italica
  Peptide Sequence Number=SeqID_109712
tgggtctaagtaattcttgttaaatttacttagtctagtctttttgttaacctttatttccattcctcgactttcctttccaaatgatctgagtcgaacacatgcttcattgaagaatttagaaaggagatcatacaagaaaaacatcatctctggtttattacaacaagatactccagaaatgatgtaatatgagaatcccattgagcagcagagtaactatgctgcatcacctattttattgtataaaatcagagttcggtatctgtttgatcaggtggctcaatctactcttcccatcttcttcccttatgcaatgcatcgcaaacctttgcagcatctgcaccatatccagcattatgcacccttactatgttagctccattcaaaat

SEQ ID NO: 43739 - DNA, 1224 bp, Setaria italica
  Peptide Sequence Number=SeqID_109713
atactcgatgaggaaacctaatgcattgaaacttggcatgtcatacggcacttgcaatgcattaggtttcctcatcgagtataccaagatccaaaacaggcaagcaggtataactccaatctatcctataaatgagaactagaaaagttacaaaggaaatcaaacttgtcagcaacttgaactaccgaaatgtcaaaatccttattatgtaccagttttatttattggaaaaattgtccaagaaaattatttaagataggactgaggttaactatctgcaacttacaagcagctttcaaaacctcattccttagttattctttctgagtggtccgaatttaaccaatgcttgcttcattgaagattttagaaaggatgacataagaaaaagtcatctctcttctctggtttattactgcaatgatacttcaccgatggcacgggtaactatgctgcatcaccattttattgtataaaatcagagtttggtatctgtttgatcaggtggctcaatctactcttcccatcttcttcccttatgcaatgcatcacaaacttttgcagcatctgcaccatatccagcattatggacccttactatgttagctccattcaaaatcccagctgtcacagctgcaacagtagcaacatctctctcaactggattggcacgattgcatatttcacctaaaaatcttttccttgagggtcccagtaatattggcacatgtgaagcacctatactcattgaacccatctccttcctaatggattccaatcccataattacttcaaggttatgtttggatttcttggagaacccaatgcctggatctagaactatcctccacaatggaatcccagatagctcagcttctctaacctgtgtatatagctcggaagcaacttccttgcagacatcatcataatgtaaattctgttcactttgcatagttgatggatcacccctcatgtgcattgcaacatacggaactcccagttcagcagcaactttaagaattctcgggtcaagctgtccaccggatacatcattgatcatgtgaactcctcttttcacagcttcactagcaacttctgcatagaatgtatccaccgagagcaacttgccctccatctcgggaatttttgtgatctcatccagaacaggaatcaacctctcaagctcttcccttggagataatctctttgcaaaagggccttggt

SEQ ID NO: 43740 - DNA, 556 bp, Setaria italica
  Peptide Sequence Number=SeqID_109714
atgatccatgtggatctgtgcttcagtggatcgccggctaaaacgatgatccatatagatcgccagtggagcaaaatggtctatatggatcacgcccgcctaattggtgatattttgcacacatggcacgtcaaagccactttccatttttcccatttctgaatcatcacactactgccggtgatcgtgtaggaatcacggcaagaattcaggcgcagcccttggcgccgaatccgatcctcctgttgaccacgtcgtagaccacggcgaacgtcttctgctgcgtattcccgaggatgccgacgggcttgtcgtcgccggtggacgtgaaccccaggcaagccacgcccggctcgtccgaccccagcttcaccaggaccccgctgacgtcgaggttcaccgtggcgccgccggcgaacaccagggccaccgacggcacccgcagcgtgtcgtgccccgtgaagttgtagcacgtgtccaggaacgacagccccgggcgccctcctgtacctccccatcatcaggcgcgcgaacgccgaccagagcgcggcgaagg

SEQ ID NO: 43741 - DNA, 831 bp, Setaria italica
  misc_feature (740)..(740): n is a, c, g, or t
  Peptide Sequence Number=SeqID_109715
taagtcagttttgctttgtcaattactatgagcccaggcttcgtagagtcaaatttctcaagcaggacagtttcttgtactatttttgtttcttgttaagcttaattctgtgtgtccatatcaattacatgtaagcgtatgtgcacaagaggctggtgcaagagacatgtttaaatctctttacaattcttacttatataatgatgtcccaccatcttctttaccgcatatcataagggtctgcaatgtcacttactctcatcgcatgaccagttcaactttgggttcttgatatctaagaaggaacaggtcgttaatgttagtttgaagcacaatacctggacaaatgaggattttcctgcaggagttgatccgagacaaagaacattttccttcttctcaaagtataagaagcgtcgaagaatagttacaatgactgaggggatcattacatcaaaagtgactgaggcgatcgttccgtcaaaagcaactgaggtgatccttccatcaaaagcaattgagacgattgttccatcaaaagcagctgagacgatctggcatggatatctaattgggacttctgtgtcagacacatcagttgatcctgcctattcagtacatggcagccatctttcaccaccaagagtactccagttttggaaagacccaggagactatctgttgatcagttggaccccagaaatcagctactccttcaaaaacgtcaattcttccattcncacaaggacagcaaatggcattggaagaagttctctcagatcatgatagtgaagacgaagttgatgatgatgttgctgactttgaagatag

SEQ ID NO: 43742 - DNA, 722 bp, Setaria italica
  Peptide Sequence Number=SeqID_109716
gatctttaagtgtcgcaaacccaatttttcctacaatttaaggtctaacttagctgctggcctcatttggctacacctggattgccagctgcttttgctttgtttgatagcttttcatgcccaatattgtaagttaaacactctagaattgctctgtcttcaattttgcatcccttactgacagttgttatttgagatattttttgtttgttcttaaacctttcctcttacattacacagttataacatttttttatattcatttattgaacccatcttaccagttactgaagatttttgctgctcattttgcttggtaaagtgtggaagcttcacgggtctgcaatgtcacttactctcatcgcatgaccagttcaactttgggttcttggttcgtaaacctctagaagtaaccttcttcaaacacgctcaattctttggtaaatagtctttttacttgttcttacagatatctaagaaggaacaggtcgttaatgttagtttgaagcacaatacctggacaaatgaggtaagaagattcaaatgtatgttgctgtctagttattaagaaataaatgaaactgatgtacatagatatgcatgccacagtcagtggtttacaaaccttttaagtttaacgttcctcttattcttctgctagtttacctcccatagctctgttttgttcttgctttctttggatgtaaaagtcaagggtgcac

SEQ ID NO: 43743 - DNA, 679 bp, Setaria italica
  Peptide Sequence Number=SeqID_109717
agccacatgtgcttgctgctttcattggtcaggaagtgaagggccgttgctgcttccattggtcaggcagtgaagggcccttgctgatgcgtgctgggtctgggtgctgccactgcaggatctaattcccttgccatggcatgtactacagcagtagcaggcagcgagctgcaaatcctcagtgcccagctctaaatcggcttcatcctcaatggaacacgaatccattcagctcctctgcaggtgccataatgtacttgagcctgacggggagaggtgtgacaggacacagttggctcacagcggactttggcgtagccaagctggggcagccatggctggaagctagcttgggcgcagtggccgagccgagctgggggcgaagaagtgggttgatgcgcgggcagagtggcggcctgcggccaagccaaactgttgtgcagctatggggcaaggtggagctgatgtaaggtctggccatgggttgagtaggttggggcacggcggcctgcgggctgccgccaacaacctgggcgcagcgcttgcgccagagatggagaagatgaacaggaaataacggagatgacgtgggattgatgaaaaatgtcacggaatggtatatttcttaacggtggaatctttctggtattaaagcgtaccacatcagttcgctgttaaa

SEQ ID NO: 43744 - DNA, 850 bp, Setaria italica
  Peptide Sequence Number=SeqID_109718
aagcttaattctgtgtgtccatatcaattacatgtaagcgtatgtgcacaagaggctggtgcaagagacatgtttaaatctctttacaattcttacttatataatgatgtcccaccatcttctttaccgcatatcataaggtaacatgaactctgtcacggaatggtatatttcttaacggtggaatctttcaatggtattaaagagtaccacatcagttcgctgttactgaagatttttgctgctcattttgcttggtaaagtgtggaagcttcacggtaagggtctgcaatgtcacttactctcatcgcatgaccagttcaactttgggttcttgatatctaagaaggaacaggtcgttaatgttagtttgaagcacaatacctggacaaatgaggattttcctgcaggagttgatccgagacaaagaacattttccttcttctcaaagtataagaagcgtcgaagaatagttacaatgactgaggggatcattacatcaaaagtgactgaggcgatcgttccgtcaaaagcaactgagggacttctgtgtcagacacatcagttgatcctgcctattcagtacatggcagccatctttcaccaccaagagtactccagtttggaaagaccaggagactatctgttgatcagttggaccccagaaatcagctactccttcaaaaacgtcaattcttccattctcacaaaggacagcaaatggcattggaagaagttctctcagatcatgatagtgaagacgaagttgatgatgatgttgctgactttgaagatagaaggatgcttgatgatttcattaatatttcgaaagtatgagaagtctatcatg

SEQ ID NO: 43745 - DNA, 815 bp, Setaria italica
  Peptide Sequence Number=SeqID_109719
ccgtcaaaagcaactgagggctgagacgatctggcatggatatctaattgggacttctgtgtcagacacatcagttgatcctgcctattcagtacatggcagccatctttcaccaccaagagtactccagtttggaaagaccaggagactatctgttgatcagttggaccccagaaatcagctactccttcaaaaacgtcaattcttccattctcacaaaggacagcaaatggcattggaagaagttctctcagatcatgatagtgaagacgaagttgatgatgatgttgctgactttgaagatagaaggatgcttgatgatttcattaatatttcgaaagatgagaagtctatcatgcatatgtggaattcatttgtttccagacaaagggtgatagctgatagtcatatgccatgggcctgtaaagcattctcccagcttcatggacaattacttgcacgaaacccttctctactagggtgctggaggctttttatgatcaaactctggaaccacaatctgctagatgcgcgcaccatgaacacctgcaacatcattatcgaaggcttcaggaacaaaaggctccccaagtgaaatctgatgcattgaaaacatttcagtcatgaacaatgataaactagttacactcttttcattgacatcctataatcttcttgatgacatggactccagctccagatgaatattcttgatgccatgaattttacatgaagtgttggttattcagtgacttggagaactcatttcctctttatgcagtgttcattgttacttactacgttattttttctaa

SEQ ID NO: 43746 - DNA, 458 bp, Setaria italica
  Peptide Sequence Number=SeqID_109720
ttaagttttaagtaaagttaactaaattactaatagctctccatagtattgtgccctccagaagaacttacctggatgctgcggctcaataaagtagacaggaaggccttcaacagtcccagtccatattttgttggcaaacgtatttccctcaaagtaggactgtaccacaacatctagaaccttaagattattaatttggttatgctgcatgcagtcatattttggaagaataatctctactaggtgccctttttttttggagtgccttcccaagaccagagatcacatctgccaaaccaccaacctacagaatattgcatacaataaagctaaaggatgactaactggattggaaataatcagtgtatacaccaaataatagtataatactctaagataattagtgaaccatcacattgctagtttaatataaggaagcatcacattgctagttt

SEQ ID NO: 43747 - DNA, 421 bp, Setaria italica
  Peptide Sequence Number=SeqID_109721
gatctgattgtgcagtatgatccacctcaagatcccaacgttttcatacatagagctggccgaactgcacgttatgatcaagaaggagatgctattgtatttctcttaccaaaggaggatacttatgttgagttcttgaagcttcgaggtgttcctcttacagaaagggagtgtccctcaaacactgaagatgttgtgccacagggataaagttcgagaaaagcaacgcaagaaggcattgaaaaggaaagcagaagaggaagctcagaacccaaagccagagaagagaagagctcgggagaagcctgagaaaccaaagcgaaagaagacaggcaagcagcggcagtcagtccaaacaaaggaggacctggatgagctggcgcacgagtaccggctcttgaagaagctgaagcgcggcgga

SEQ ID NO: 43748 - DNA, 1907 bp, Setaria italica
  Peptide Sequence Number=SeqID_109722
ccaccggctccgggaagacccttgccttcatcgtccccgtcgtcgagatcctccgccgccgctcctccccgcccaagtcccacgaggttcttgctgtcatcgtctctcccacaagagaattatcatcgcagatatgcaatgtggcacagcccttcttcgcgacactgaagggcgtgtcgtccatgctcctggttggtgggctgaacatcaatgcagagctcaagagattggaggaagagggcgcgaacatattggtgggcactcctgggaagctgttcgatattatgcaacgcgaaggcactctagattataagaatgttgagattttgatcctggatgaggctgataggctcttggatatgggattccagaaacatattaatttcatactttcaaagttgccgaagcttaggaggactgggctgttctcagctacccagacaaaagctgttgcggatctttccaaagcagggttgaggaatcctatgagggttgaggttaagacagagacgaagctgacaagcgaagatgccggtcagcaagagcttggtccatccaaaacaccattggggcttcgattggagtatatgatgtgtgaagcatcaaagaagtcatctcagcttgtggatttccttgttcagaatagtggaaagaaaataatggtatattttgcaacatgtgcttgtgtagattactgggctgtggttcttccactgcttaactcactaaaaggttctccaataattccttaccatgggaagatgaaacagggacctcgagagaaagctttggcgtcattttctgctctttcaagtggtattctagtctgcactgatgttgcagcaaggggccttgacataccaagtgttgatctgattgtgcagtatgatccacctcaagatcccaacgttttcatacatagagctggccgaactgcacgttatgatcaagaaggagatgctattgtatttctcttaccaaaggaggatacttatgttgagttcttgaagcttcgaggtgttcctcttacagaaagggagtgtccctcaaacactgaagatgttgtgccacagattagaagtgctgcactcgaagatcgcaatgtcatggagaaaggacttagagcgttcgtttcattcattcgagcatacaaggagcaccactgctcttacattttcagatggaaagatcttgagattggaaagctagctatggagtatggtttactccagatcccatttatgccagaagtgaagcaccattctctttcactggaaggatttattcctgttgatgatgttgatgttacacaaatcaagtacaaggataaagttcgagaaaagcaacgcaagaaggcattgaaaaggaaagcagaagaggaagctcagaacccaaagccagagaagagaagagctcgggagaagcctgagaaaccaaagcgaaagaagacaggcaagcagcggcagtcagtccaaacaaaggaggacctggatgagctggcgcacgagtaccggctcttgaagaagctgaagcgcggagacattgatgaagacgagtatgagaagctcactggttttggagactctgatggcgaagcctctgacgggaaagcgagtgacttggacaaggggaaggagaggggtagcaaagtgaaactcaagcagaaagggaaggctagaggagggtctaggaagtttgaagggaagagtaaaatgaggagcaaaaggagataggaatacatagaatgatgttgggaagactaatttttggcaatcttgattcagtttttcaattttctgaggatttgtttgcacagagggtatgcgtgttccaggacgaacagatcgtgcaaactgacactgatgggtaggaatggttgatgggtttggaggggccctctgctgggg

SEQ ID NO: 43749 - DNA, 273 bp, Setaria italica
  Peptide Sequence Number=SeqID_109723
tgttgtgacctgcaaggaggcaagatttgggccaagtacgagcttcacgaagaacagaaggagcatcgacggatctgcgcagcacctgatctttcaggttgtgacggtgacaggcagagaggtccatttcgaggccagttgtgcttccagtgtggaattctgggtaaaagggatcaatctcattgtaaaagagtccatatggtcaacgccggataaagagacactggagtcttcatgaagcacggccctgggaatgataatatgagcgtgaat

SEQ ID NO: 43750 - DNA, 1148 bp, Setaria italica
  misc_feature (269)..(269): n is a, c, g, or t
  Peptide Sequence Number=SeqID_109724
tcttcagcaacagttggtgcagattctggatgaagtcattcaatttctgaatcatcttttcttgagataagattatcttatccttgacaagatgattcagaaattgaatgacttcatccagaatcttcagcaacagttggtgcaatgccgtgaaaatataagacaatccattcttctgggacttcttaacatcttatattagtgaaatccagaggcaccagatgatggatgattgataatgttgtgagctatgtggataaaaaaaaagntgggatattgacaaagtcatgctggcagcataagatgttaaggaagtcccagaagaatggattgtcttattattttcacggaatagtattagatcagttgcaaagcaaaaagaatgctgatcttgagaatctgtgtaattgtattttccttttgttatgattgacatctatatatttttatgacataaactttatattctatcctccataaattttatgtcataaaaatatatagatgtcaatcataacaaaagaatgctgatctaatactattctgtgaaggctaatactacattataactgcttttactgggagaaattcgctgcctagctatgactttgtcaatatcccatcttcttttttatccacatagctcacaacattatcaatcatccatcatctggtgcctctggatttcactaatataagatgttaaagaagtcccagaagaatggattgtcttattattttcacggcattgcaccaactgttgctgaagattctggatgaagtcattcaatttctgaatcatcttttcttgagataagattatcttatccttgacaagctcttctctacttgaaatatgttgatggttgcgagttgtagattccaactcattgacaagctgttgcttccattcaaactgggatgtaactatgagaatcaccaacagaaagacaagcactacaggccttgacaccattgtattgtacgagaggaaacagggcagcggctcatcggccgaggaagcagcgggcgacgcctcccccaacgaccgtagaactcgagggctagtacggcgagggcgcgccgagacggcggctgcggcggcccggccggagagaagcggttgcttgggacttgggaggaggaag

SEQ ID NO: 43751 - DNA, 561 bp, Setaria italica
  Peptide Sequence Number=SeqID_109725
tcgttgataggcgagattcagaggagcctccagtacggcggcaaataagaatctttcctctggccttggtcctatttaaagagctgtccagacaaaagctaacagcaaaggccacaaaaaaattcagtttgctcataatctaagtcaagattttcgttcaagattgttctttgctttacctgtattggtagggggtgaaatagcccgcattggcttctgaagccggaatagttctaacagaagttttcatgtggtacgtactcaagctctcaccctttgcatcaagacaacaatgttcagaaggtattcttaagattgcataagaaataaagattgaaggtggcatttaagaatgaaaattaccattatgaaggtgccattttccagtctgatatatgagacaaaggatctatcggttgttcctgcagctactgtgagcatccatggtgcaaggttagttgctgagccctgtctcccagcattccctgcagaagaaacaaccaagtaattaccaattagacttagttagacaataggaaatagaagaccgaataggaataa

SEQ ID NO: 43752 - DNA, 466 bp, Setaria italica
  Peptide Sequence Number=SeqID_109726
ctgctacccgtggtccatatctcaaccttatgatcgtctttgctggcaagatctttgtactggcatgcctcgtactcttgatgtaagaaagaattttgtcacccatttctttcccaacagcagttccaggaacagcaaagtgagtagcaacatgatcccccatctcatcaatgagaatcatcccagctgcaccagcttccttaacaatcatactcgttgataggcgagattcagaggagcctccagtacggcggcaaataagaatctttcctctggccttggtcctatttaaagagctgtccagacaaaagctggattggtagggggtgaaatagcccgcattggcttctgaagccggaatagttctaacagaaggtttcatgtggtacgtactcaagctctcacccattatgaagtgccatttccagtctgatatatgagacaaaggatctatcggttgttcctg

SEQ ID NO: 43753 - DNA, 243 bp, Setaria italica
  Peptide Sequence Number=SeqID_109727
gcttgaggaaatcaggtgccactttagacgaccttttctagcagaaagggagcacagaaattgtatgtgagatgatgtggacatgccatgcattgcctttcctggattggggcatgtggaagtttaaccatggatcgtttgttctctcgagcaattgaaccatggtgtgtcaaggacctaatgatcaatcaacaagcacctacctgtattttctgattccatatcttgccaatgtttcgaagg

SEQ ID NO: 43754 - DNA, 1609 bp, Setaria italica
  Peptide Sequence Number=SeqID_109728
tccttacttccccttgttgttgtcctttggtctagtcctttgttctagttcttttttttcgtttttttttttttttttttttttgtacgcaaaagaaaggcttttgcattcattgacttgtgagctgaatatacaggcttatacaaaagagactgtctctaacagcatggacctcaaaggcaaaaatatacaactgggcccagtgtcgggttacaatttgacaacaaaaggaatttgccctcacaagaaccacctccagcaatctagggtcaaactactttgaaggtagcagtgtggcaccaaaatggtacggaaaataattatctacctgacactgaggtggctacaattagctcaaagttggggaataaagagcgctatcatccgcacatcttccacagcacggacgcctgtacagtaactttacaaaggatgctctgcataaatatcagcccagcatagcccatcatcatcctggcccggaatttgaaggatgggcatatacactgccttgaacaacaggcctctgatgctgctgctgctgctgctgcaggtgctgagactgcagttgctgccgagactgctgttgctgcagctggccaccaatggcatgcccatgaataggcatgccaccagacatttgcctttgcagcatgctttggctagatgatggcaacagcttatcacttccaacaaaggtgtcttgaggtgagctagctagctgcggggtcgaggtaactgcacttggatcatgggatgactcttgtttccgctggctcatagatgagatgcctgggctacctgaatctgtacttctagcaagtgatgcagatgatatgacctggttatgttgtacttggtcaacaggtaattcagtcctgccatctgtgttcatatggcgattttgttgcatcatcaatctttggatattattctgtgatggattcatgtaccgtagctgctgctgctgctgtgtagccagctgtgatggtgaatgaagttgaccttgttgggaagttaacaaggtatggttggaagaacccttaactgcaccctgattactaacatctggagtctgcatcggtgacagaggcatctgagaagtatatatctttggttgactcccgggttgaggtattgatggaattgatcctttactgccaacaagatgccctggaccctgttgcatcacattcttatcaggaatttggtttttacagtttgcagaaatgccactggcttgactagcatccacaggattctggtgcatcatgttccctcggcctaagctcttcataagcttagcttgctgactaccttgatttcgttgctgttgattttgtctaggttgctgctggccctgttgcttcttctgtttatgtgatgtattggcagaaggctgatggggaagcattgggttacctaatggattttgtgcaggatgttgctgcttatgctgtggctgtgaagctgggattacaccagccgcacatccttgactctgctgttgcatttgtgagccattctgcacagttggcactgtactggttccaggtagtgggcgctgttgctggggcatcatttgttgaatatgtctctctttaaagcg

SEQ ID NO: 43755 - DNA, 495 bp, Setaria italica
  Peptide Sequence Number=SeqID_109729
ggggtgaatgttgtctctgactaaatatgtaatgaagtgcgatgatgatacttttgtgagacttgattcagtaatcactgaaataaagaaggtaccaagtggcagaagtctctacatggggagcattaatatccaacacaggccattacgccatgggaaatgggccgtgacttatgaggagtggccagaagaggtgtatccagcatatgcaaatggccctgggtatattttatcatccgatattgcagattttatcatgtcagaattcacaaagcaaggattgacgctatttaaaatggaagatgtgagcatgggtttgtgggttgagcagttcaacaggacaagacctgttgaatacattcacagttccaaattttgtccatatggatgcactgatgactactatactgcacattaccaatccaccaaagctgatcttatgcatgtggcaaaaggtttaaaaattggaaggaagaccaggatgcaatgtgagat

SEQ ID NO: 43756 - DNA, 1239 bp, Setaria italica
  Peptide Sequence Number=SeqID_109730
tttttttttttttttttttgggttttttggtgaatgttgcatttcataggtaccaagatatatctaccaagtacccagaatgtctgagtttatactatgtacaagatcaaccattaaaggagctgcagtactggtgccagctgatcacatacaaatgagatgtccatttttttttttctgtacaaggacattggtgcaaggtgtagactaacattttctatacaaggagatagtcaggcaactgctagcagcaaggaggttaacatcaacaacccacagagtatgatcatcttaggtggccgccatcaccacaccagatttcctagtctagctaggaagccaatgctctgcactgctctgcactgtaggcaggacatacttgttgtgggatcatagagtgtaaccttcctacttgtagtttgttaggccgcatcaaaaacacatcatccatcctcatgctcatgtaagagagcagtcagcagctaccgttgtgactcaacgtcattgcctactctgttatcatcctgagtccccccggagccagattctggaacaccttttgacacccctatctcagccttgcaaagagggcacaatgcgtttatctggagccatttatctatgcattccatgtggaagacatgagtgcagggaagttctcgtagatcttcattgttcgagaactttgacaagcagatgcagcagatagcatcttctgccgagatagttcgctccttgtcagttccagccgccaagaccccaccgcagtcttctcctacatccccatcgtgaactcttttcgatttgaacttgtacgccaccaaggcattgagttgtatccgtggtagcgcctctgttcagatccaaatcctcgtggacgcccagaatggagattatgcagggcaggcagcagcatatcattgtacagagaatgaaaggcaatgcgtagccaataaagccgaacgcaaggaatactatacagatcctgtacaagttaggagcatcatgggcagaagaacggctgccaaatatccacacattccccacaacaaaccatatggcaaagaaacaatccagagccaatttaaagcaagcgaccaatgcatagaaccttggacttgccattggtaagttacttcttgagactccagttccgttggcaccgtccacagtttctgatgcatgaggagatgaaacgaccacaaaagaattggtctcagatacgttcctttctgatgg

SEQ ID NO: 43757 - DNA, 413 bp, Setaria italica
  Peptide Sequence Number=SeqID_109731
tctacattgtcacccaaattgagagttcggttcaagccaaggctcttcccaagttagactcccaaatcagttctaccaccgcctaggttgcagatttgaccgaggaattttacacaagaacaagccttgaaacccaagtcaaagagcaaccttcctccaacgcctcctcggtgacaattcactcagggttccgaaattttacacaagaacactatcttgcaaccctagcccaagcaaattcaccgattgtttagggaaagagtgggtgttggtctaaatctgggtgggatgggtgggatttgagtggaaagggtgggttgggtaggatttgggtggaatgggtggctgggtgggattagcagacgatggctcttggataccaattgtcaggtctcagggaattcagagagaaa

SEQ ID NO: 43758 - DNA, 1167 bp, Setaria italica
  Peptide Sequence Number=SeqID_109732
tttgtttgtttgtttgtttgttttgtttgttttgttttgtttttggtttttggtttttttttttaattttaccaagttaccaactgataggtcattgatcatatgagcagtatgaagtgatacataaatcggcgcaatacaattatattagcagcataaaagcttcagccaagctttagttaaaaaaactaagtacaacattgcctgatggcataatactgagtactagtgcacccgccgacacaatttgagagaacatttaccatcgtagaaaacaaatataggatacacacaaagctgaaacttgtaggcacatctagagcagttgagctgtgataatccccgacacttcattcggataatcaagtttcttccttttcctccgccgcctctgccaaactcttcatcacgcactggagcttgctgccacattctgacattccactgaccagttccccatttcatcatgcgccttgtcctgcaggattcaagaaagaagccggccatgcaattgtgtaaggatagatcagtgccgcctcacaatccttactgggcaacatcttgaacttcatagtttcaagatcaatggagaatagatgattccactgccgcaagaacacaatgccagtagccactccgatgacatccagctcatgctggtacgaatccactgaaggattgatcatctctgtcagcaccttgtggaacctcaccgacttctccacccgcctccatgccatcccaccatcaccatctgcggtgccagtccacacctcaatgcggaagccactcatggtgagcaggtggagcacattggcatcctcctcttcacccctgtcgacggtgtcaaagctaagctcccgcaaagcaggcgggagatcgaggacggagaactccatggacaccgtgctgaacgccaccatgcgctccccaccgtggagcctccagtacagcgaccggttcgcctgcatcgcccgggagccggcggctaggtcggtctggcacgcgacgccggcgacgtcggcccaggagagctcgccggaggataggaacagcgcgcgcagctcccccgatgcagcgtcgcgcgagacgcagaccacccggaactccgaggagtcaccatagtcggcgaagaggccgtacctgacggcgcgcccggcagggggc

SEQ ID NO: 43759 - DNA, 756 bp, Setaria italica
  Peptide Sequence Number=SeqID_109733
taattacttactaaagggtttcttgttaattggagttgccaagtgaagtgactatgttaacaaagcttcagcacctaattatagatgttggacggtttggaagttcagcaagtaacaaaatatgtcgcttggaacatctgcagactctgaagaacatagaagccaatagctgtgtggttagaaatcttgggtgcttgactaggatgagaagccttggcattaggaaggtgctagaatcctacaacacagatctgtggacctcagtcagcaagatgacagctctgaccaacttgttggtgatcacagctgaccgtgacagagatgttcttgatctatcggacttgaaacctttaccatacctggagaagctcatgttaagtggcaagctggacaaaggagcaattcctcctgtattcgatcactttcccaagctgaaaagcttgcggctttgtttttccggattccatgaagatccacttgcttttctctctgtcatgtttcagaatctaggccaccttaatctgtaccggtgctacggtggcacaagactgacatttcgtgccggctggttccctatgctcaggcacctctacttgagctccatgggcgagctgaaggaggtcgagattgaggacggcaccatgagaagcttacatcggctagagctctgggcttgaaaagcttgatgtcggtgccagagggccttgtgcaccttaaatcactacagcagctgtgcattggctcgatgatgcctga

SEQ ID NO: 43760 - DNA, 540 bp, Setaria italica
  Peptide Sequence Number=SeqID_109734
cgccattcttgaatttggcgcagcgaagtcgtttctttcgagggttgaaatccttgcagctttgcgcggccaagccggggttgaagaatcgtagcagattggtagtagagagggacgccgcagccagtcgaaggtatgattcagctgctgttcctcgtgctgttcgcggagggcacggtggcgctgcttctcatggtgaaggtcgggccgctgcgggagctggcgatgcgcgtcgtggaccaggtgaagacgggcaagggcccggccaccgtgaagaccctagcgtgcacgctcaccgtgatcctcatgtccgacgttgccagcatcctcaagatccagaacagggggctcaagctcggctccgtcagccccatggaccaggtgctctggaggacgcacctcctcgaggcatccctcattggatacactctattccttgcatttgtaatcgaccggctgcaccactacctgcgaaagctcatgacgctgaggaaaacgtccagcacatcaagggaggaggtcgagaaacttcagatggag

SEQ ID NO: 43761 - DNA, 401 bp, Setaria italica
  Peptide Sequence Number=SeqID_109735
ggaaggaaggggagtggcagtagcacttcaaccagttcaagcaggaagttgcacaggaaataaaaagtcactcaaacacggagtctaactgggtgatatgccgagtgtttgattcaacctgtggatcgcaagtgaactaccacgaggagggcatggagctttcatgcttagatgaggtgttcctatcccttgacgactatgatgaagtcagtttgtcaaataattagaacccttatcagcagaactggtagtaggccgtgcacctatgataccatttgatgttgattctagcagggaaagttactccaaaaggtcaaatgatttcataggtgttgaacctaaacactgcatctagaccacacatgtaattattctcctcaaaaggacaaggagcatgtaac

SEQ ID NO: 43762 - DNA, 456 bp, Setaria italica
  misc_feature (451)..(451): n is a, c, g, or t
  Peptide Sequence Number=SeqID_109736
cgacgggccggcgtggcggaagaggcggcgcgggagccgggagggcgcggcctgcggcggcgccttctccagcggcggcaagaaggtgcccgggggcgggggagagatgacggaggacgagctcgcgcgggtctccgggaggatgttcggcaacggcgcgagcgcggtggcgtgcctccacacgcagcaggggcggaagggcacgaaccaggacgccatggtcgtgtgggagagttttagttcaagtgatagcatcttctgtggcgtgtttgatggccatggaccttacggtcattttgttgccaaaaagttagagattcacttcctgtcaagctgcgcacgcaatggcaaaccggcgctaatggtgcctctagtcctcatcaaaatggaagcatatctggaagtatcaattctgaagaaacaggttctgttgttgatgatgaagtgggtnaatcc

SEQ ID NO: 43763 - DNA, 465 bp, Setaria italica
  Peptide Sequence Number=SeqID_109737
gattggaccttgtaattggaaatcttggggactcaagagcaataatggggacaagagatgcctccaacaatctaacttctgtgcaactcactgttgatttgaagcctaaccttcccagtatgttcgtatgttcgttcattactttgatcatttcgttgggtataaatgcccatggctttcaaacttaagcccatcttaatatgcatatgggatctttcctttctttctgtccttaaggtgccttcgattgaactatgatgtaaatatttaatcttcatttcatgttctttaggggaagctgcaaggattcagcaatgtaaaggaagagtttttgctcttcaggatgagccagatgttgctagagtatggttgccaaataatgactctcctggattggcaatggcaagagcttttggagacttctgccttaaagattatggcttaatatctgttcctgaaatatca

SEQ ID NO: 43764 - DNA, 1723 bp, Setaria italica
  Peptide Sequence Number=SeqID_109738
taaaaaaggaaaaatttgaataggaccaataggaaccttgacggtaaaattaggtagccaaaaagttagagattcacttcctgtcaagctgcgcacgcaatggcaaaccggcgctaatggtgcctctagtcctcatcaaaatggaagcatatctggaagtatcaattctgaagaaacaggttctgttgttgatgatgaatggggtgaatccattaatggtgatgagagtgaaaagcttcctgagatgtttcttccccttaagcaatcttaccttaaagctttcaaattgatggacaaggaactcaagctgcatcccacggttgattgtttctgcagtggatctacagcagtaacattggtcaaacagggattggaccttgtaattggaaatcttggggactcaagagcaataatggggacaagagatgcctccaacaatctaacttctgtgcaactcactgttgatttgaagcctaaccttcccagggaagctgcaaggattcagcaatgtaaaggaagagtttttgctcttcaggatgagccagatgttgctagagtatggttgccaaataatgactctcctggattggcaatggcaagagcttttggagacttctgccttaaagattatggcttaatatctgttcctgaaatatcatatcgccgtctttctgagaaggatgaatttataatattggccactgatggggtttgggacgtcctctcaaacaaggaggctgttgatattgtagcatcagcaccatctcgtgcaacagcagccagggctctcgttgactgcgcagtcagatcttggagattgaagttcccgacatccaagagtgatgactgtgctgttgtctgcttattcttggatcatgagaagtcaactgactctgttcaggagagcgaatccaaggaggagaccccagaaacaactggggaagaggtttcaacaccagatgccagtgctgaggttgatgaagacattgcagatgtaaatgcgcatatatccagtgaagagcacatcgccacagccacattgcaacactccaacacattacgggaggttgatgagattgtacctgttgacgaacctcccgtcctgaaggagcccgaaaggtgtgggtcggctcgcagccttgcagattgcatatcaacaaacgaggaagaggaatggtccgcacttgaaggtgtgacccgggtgaattccctcctgaacctccctagaaaactgtcaggcgataagcgatcggccagctggaggaagcggcggtaaacagcaaaggaaactccctagaattcttaactgaattcaggttgttgtgattgcagagaagcacatttcgaaccagcgtgggcatttcaatcagaccgtgcaaaattcttcggtctctgggatttgttctagctgatttttaggcttccccagattgttttgatcggcaggcgtgtacattccatattactgctttgccaggaggtgttccatgcttgggcttatgtgcttcgtttgtgcataagaaagtttttgttctgtaagaagcttctttttgtaaatcatgcgatacctcctgacgtttggatggttgctcgcctgctgtccgtgactgtattcaaacaaagacggattcagacattcagtactatatgtactatattaggtcatgattttgttcaccttctttggcttggacttcacctgtgaattcaccgatcgaaatgg

SEQ ID NO: 43765 - DNA, 417 bp, Setaria italica
  Peptide Sequence Number=SeqID_109739
gagattgacttgtttgaagtcagatcaaaaccatagaagtcaccatgagttcttcggatacaattacaatactacaataatacctggaggacagttgcatctgaaaccctgtcctgaatctgaagctgtcatcttgaacccgtcgcttgaccgaaatatgccttcgttgtccagaactgcaatcttgctgctgttgaatctagtcctgccattttgcagtgcattgtagtccggacttggccagtatatgctcgtgatatccggtccattgtacgggagccgcaggacgttgtcattgtcaaaatgaggatatgataaccagatggagagaccaactttgtctctctcatcagattctgtgaaggagcaaggtgtcagtgggcgaatcgaagctctgccatactacctgatcggtgg

SEQ ID NO: 43766 - DNA, 263 bp, Setaria italica
  Peptide Sequence Number=SeqID_109740
tcttcatatatccaggctgtgaagcaaatacaacagtcagcattccgctaccgaccatagcaggtagaggcgattcatttgcaacaaggacaagcctggatatatgaagagaagctaagatattcatcctcagtttctcaatggagttgttctgttgtagcattgactgctggaattcgtatggttagctgatgattgatgccttctcacttctaattatatggtgcattacagctcaattaagcaatctagttgatacaaga

SEQ ID NO: 43767 - DNA, 740 bp, Setaria italica
  Peptide Sequence Number=SeqID_109741
gttctgattttaccctgagttggcccgtctccagttctgcacatgtcacaatatcatctggatttcttctgttggttgactggaatttctcacccttgaggcaacttccaagcttgtccttgttgcaaatgaatcgcctctacctgctatggtcggtagcggaatgctgactgttgtatttgcttcacagcctggatatatgaagagaagctaagatattcatcctcagtttctcaatggagttgttctgttgtagcattgactgctggaattcgtatggtaagactggaatgtctggaggctgaagatcttgaagtgactttcttaggatgtttgacgtatttgtgtctccgggaaaatatggataaacctggccattgtagagtcgatctttagtgtaacatagaccctcaccagctttgtatgtgaaagataaacaaaagcagctgtccaggcatatctgcatgcattcttcaaacgagattgacttgtttgaagtcagatcaaaaccatagaagtcaccatgaggtatcttgacgaatgtaaaatcttcttgttgttgtccacagttgacgctgaatgttggcctgcatcctttgttccagttcttcggatcattcatctcatatcctggaggacagttgcatctgaaaccctgtcctgaatctgaagctgtcatcttgaacccgtcgcttgaccgaaatatgccttcgttgtccagaactgcaatcttgctgctg

SEQ ID NO: 43768 - DNA, 1188 bp, Setaria italica
  Peptide Sequence Number=SeqID_109742
atatccaggctgtgaagcaaatacaacagtcagcattccgctacgaccatagcaggtagaggcgattcatttgcaacaaggacaagcttggaagttgcctcaagggtgagcaattccagtcaaccaacagaagaaatccagatgatattgtgacatgtgcagaactggagacgggccaactcagggtaaaatcagaactgtggcacctagagcattaaaatactctttgtacttttgtatctgcatcagataatctcatcaactggagaattgactagcatagaaattgttcctaatattgagcaaatgcagaatctcctgaagctgcaatgaagttctgtttctgcggtgagatttgatggcatccatacaccatccttaaagcaaaaacttaaactctgtcctgataggcaatcagtatttgcagttccagtctcatcattgttttccgaatggcatatgcactcccttgaaagatgatgaagatcactctgacaagcacaatgctctaagcaggtttctttattgtgcgttgtttcaaaattttcttcacagttcacctcatcttgagagctgtaacattttctaacagttgctaaaagattcatgcaccacgatgacagaatgtcatgcatatcatcaactgttaagcaatgcagattaggcattagagaatttgatagagtatcatgaaccatcttataaacagcacggaagcatgcagagcaacatttgtagagacataaagcttttggaactgaaagattattcatgtcatattgcagttgaccatcaatcaaatgacttgattccacatcattcagaggattgttcttcttcaactcattatcatcaccataagcttcagaagaaacaacgttccttggtatttctgtattgtcaatgcttgcagaggatccaacagaatttcctgccttttgcagatcattcaagcattcagcagattctgtgcggttttcagatctttgaatatctggtctgcagttcccttcatcataggttaaattggacactttcccatcgttgtttgctccactgtgttctccatcatttcttgctgtatctgcatgtgtaaggttacgcctatgcacctctgttgaagctgactggataagattgtgttccactgcatccttgctggatatagatgtgacatcatcatcatca

SEQ ID NO: 43769 - DNA, 1451 bp, Setaria italica
  misc_feature (10)..(10): n is a, c, g, or t
  Peptide Sequence Number=SeqID_109743
tttttttttnttttttttttttttttgttcagtacagtaccgcgtctctgtaatcaggcaaaaatatcaaaatcattacatctttaaccatactgtctgtgtccaaaaaaagtatttaaccacatgtatttctttaacaataaaaattgaatgtagctacaaaattataaatcgtagagaaccttgtattcaacagaggagaccagctcagtaagctttggacacgaactggtggtagaagcaattgacggttgtgtgtatgtccctcgcaggaggcccattgcaatggccttgtacgcagcttccgatggatggaagccatcccatgagccatacttgtctgggttatcacacaccttgtattccccatatccacaggctgcagctggagacacaccatgggttccttctccaccgcagcaagccactaaaggttcctcgataccaaatcgttcagggaaaaggaaaatttccattgcagctccataatagtcagcatagatgatagatacaccaggatgaagcttgcgcagtttctccagctcctccacgagaagcttgttgtggtacttggagaactcgttcatccacctgaggcaaccgctctctggctcataatcttctttgttatcgctcctaaaaatcgatagatatcttgggacacagccaattgggaggttcccccggaaccaccagagtcttggctcctagcccaattaattcggtgattgtagaagaaattttggcaacaacacttggtgtgaaggagcggatcttctcaatcggtaatctggatagaagaggtaagttgtaatcattgcccccaatttctccaaccaagaaaagggattgacccatcatgtccgagcaatcggagcggccgccggggcagagaagatcgagcaggtcgcggaaccacttcatctccgtgtcgaggtgcacccgtccgtcgccgatgttgaaacccctgtcgcggaagaagtccgggcctagcgccgtcgcgccgcccacggcgaagttggccccgcacgcgaagtcctccgcacgccgcccgctcaggtacggccgaacgaacgggagccccatcgtgtccgcgatgaagtcgaggacgagacggccgttggagaagcgcccggtgggccgacggaagaacgtctcgccgtagggtggccggagcgcgggctcgccggagctgttgccgtagtagaagcggaagttgcccgtgtcggccagcgagtccccgaagctgaacaagcgctggtagcacgccgccgccggctccgccccaaccagtaccattaccaccacagccgccgccgccgccgcaggtgagatcggccgtcttcctcctctccccggggcagaggaagccatggcctctttccccggggatccgcggccgcgctgctcgaggcggccgtagaagaaactgaattgaattttggagaagt

SEQ ID NO: 43770 - DNA, 798 bp, Setaria italica
  Peptide Sequence Number=SeqID_109744
ccggcccgcgccagcagagctccgccggcaacgacgtcgaaggcggcggcggcgccgcagcacgcgccaatgcggagaggagagggaggcgggaggaggccgccgcggtggcgaggcggcagagcaagagggccgccgccgcgtccctgctcgaggacacggccagctcgccggccttcttcggctactccaaggcgatgggctcggcagaggccaatggctatggcggcgccgacgccccgatgatggagatcgccaatgctgcagacttctcctacgccttctccaccacgacgggcttcaagtctcccttaaatggaactgctctgggcggctacatgcaaatgcagtactccccggctcctgtcaatccgatgcccacgagacaggtgagcagaggtgcgccggagaagaagaggtggtgaccgccgagtgctggttgatcgaggagctttcgccggtgccggctggagtgaaggaaaggatgttcatggctttgctccgccctgctgtgttcctgggagcacggggagatgggcaggcaggccggcaggctcgagtgcgtttgcaaatcttcttcagatctccaagagatcctcccattccatccagtaatccccatctgttttgccacctcgctctgtgccccctggtggtgtgttttcactgtgaactgtgtgccccccctgttcctcctcccacatctgcagagtttagtctctcccccactttttagctgtcattgcagtgggaaacaacaacctgaggcaaaacaaaacaaaacaaagcaagcgcgcc

SEQ ID NO: 43771 - DNA, 374 bp, Setaria italica
  Peptide Sequence Number=SeqID_109745
taaaaaaccggggaaagactagggggaataaaaagaaaccggacgacgaagtagaaaggtagaccaagccggatccggcggtgagcaattattccgtacccaggtatcatatatgtatagtcctatatatatggaactatttaattctgtgtccaagcgccgtcaccgaccgagacactccggctcgggcgctcggctcagcaaacccgtatcaaacttgcagaatccaggagcgggtcccatttctctctcctctccgcaccgcttccgtggacggcggcgcggcccggcgacctccgctgccccctccctccaccctgccggcagggcttcaacggagacccgatccgccaggagcccaggacgcacgaccc

SEQ ID NO: 43772 - DNA, 378 bp, Setaria italica
  Peptide Sequence Number=SeqID_109746
cccagttatgacaaagaacaagcacaatattatcgtatttgtgatctgccaaacttcccaagtaaactgaaaacaactcttaactacctcaaaactttttagtgttagagaaggggattagcacttcaatcaaagatctaaaacatatttctgaaaaatcgtagctaagtagattctttgaaaatgaccaaatcaatgtgtgaacttgaagtaagagtagcatcccgatgaattagcaattagcaagtaatcaaaaaattgaatgctaatggcattacacagtcaaatactttaaatgatctgaaggatattttgcaacgttaagttggaaacttgtagtaactagtatttggttgtattctatttcctaattaaatt

SEQ ID NO: 43773 - DNA, 580 bp, Setaria italica
  Peptide Sequence Number=SeqID_109747
cgttatttaaggatgctgaatgttgaaatcaaatcgaatagttgtaagaaccaaatctctctccgatcaaaattagtgctttctgcttctcaaaaacatcctgtacaaatagatgatgatcaaacactgaatgggcaatggtatagaagttccaagtaatgatttagtggcaccttctggcggatcctttgagctgcagcagtgtcccgcctatacattgtttcataggctactctaactacatggtccaaggggcaaggagtatcttcagttttcgatgccagaaatacacacacagctgcaactgttggagaatttgttattttcacaagatgatccgtcaaactttttaagttgtaacagtaagttgcaacccagttggctggtcggggttaagtaacttcaataggaaaattctgaatgcacttgcccagttatgacaaagaacaagcacaatattatcgtatttgtgatctgccaaacttcccaagtaaactgaaaacaactcttaactacctcaaaacgttttagatctttgattgaagtgcttaattcccctttcttcttaactacttaaaaa

SEQ ID NO: 43774 - DNA, 1489 bp, Setaria italica
  Peptide Sequence Number=SeqID_109748
aggaaggacggggggggggggactgttgctgtacgacgccggagccgggttttggtacggggaggaaggaggaaggggaattcttcaacaataaatcctttattctggcaacatcaacctttttaagttctgccctcaaaggatcagcctccaccacaactggcgatgcagatggtgcatggtcaatgggtactgaagcagcatcagccaatctctgatcagtgcgcaagatatctgcattgagactgtcagtacaacgattagagcttccaatcgatgggtccacacaccgagtgctttctttgtcagccttggcacccagtgctgtcaccacaggtaatgggtttgcactatcaccatgccaatttcctgatgcctggttcaagtttttgccattgactgtgcagtggcttacatcctgcttcatacattcagcactgtcgtcagtggctgcaactgcatataatgatgtctgattactacatgacatcatctcatcgtcatgtttggttattgaggcctgatccaagctctcttcatcatgtgctttactagaaacatttatataagcacttccattcaacaaactgctgtcagggcctgagacactaccatcacctgtatggctgcttatcaagtattgacaggaatccacctgcatgtggtcactgggctcaccaatatcaggacttgagctgcttattaacaagcttgattgattcaacacagagtccgggctgttagatacgtgcagtttagcttcacatggaacttccttctgcttaactggactgggacgagcaggcatcagttttttcacagcagcatgctccatcatttgctgaatgacagcttccagaggcttcggtgcaacatcaaattggtgccaccagacacgcgctccatgcaacggaagcttaatattgtgaagctttgcagccaggtaaagcgaaccagcagcaatatactgtggtttatactgtaggcacagtgttgttttaagccaatcattcacaaagttccatgctacttgtttcacttccttctgattgatgcctagatttgtcatagcatcaaaaagtggtctataaggatgctgaatgttgaaatcaaatcgaatagttgtaagaaccaatctctctccgatcaaaattagtgctttctgcttctcaaaaacatccttctggcggatcctttgagctgcagcagtgtcccgcctatacattgtttcataggctactctaactacatggtccaaggggcaaggagtatcttcagttttcgatgccagaaatacacacacagctgcaactgtctgccatccaaattttgcaagggactggtgtaaatagaagcgatgacaaaacattattgctgtcgctagagtcatctgaggtagtttcagcctgatgccaacatcccgaatgaatgaacaatataaattccttagttctgactccttgctttgagtaattccatctttccccat

SEQ ID NO: 43775 - DNA, 852 bp, Setaria italica
  Peptide Sequence Number=SeqID_109749
cttgtctttagcttctgcttcttgctggcaggcgctggctcaacaataattccagactcgagctctctctcgatccaatcatcttcactcaaaccatctaaagtgattgcctgcttgtttcttggtccaaccacaatccctgattcgagctccctctcgatccaggcttcatcactcaatccatctgaggcagcaggttcttgttttgtaataatcccagactcgagctctctctcaatccaggcttcttcactgaggtcgtctgaaccaacggcttgctcttggatctctttcttcctcttcctcttcaacaataaatcctttattctggcaacatcaacctttttaagttctgccctcaaaggatcagcctccaccacaactggcgatgcagatggtgcatggtcaatgggtactgaagcagcatcagccaatctctgatcagtgcgcaagatatctgcattgagactgtcagtacaacgattagagcttccaatcgatgggtccacacaccgagtgctttctttgtcagccttggcacccagtgctgtcaccacaggtaatgggtttgcactatcaccatgccaatttcctgatgcctggttcaagtttttgccattgactgtgcagtggcttacatcctgcttcatacattcagcactgtcgtcagtggctgcaactgcatataatgatgtctgattactacatgacatcatctcatcgtcatgtttggttattgaggcctgatccaagctctcttcatacaccaacaaggtaaatagggtttagacaactaatacaaccaatagaccaaatttacctagaatagacctaggttacaaagtttttaga

SEQ ID NO: 43776 - DNA, 696 bp, Setaria italica
  Peptide Sequence Number=SeqID_109750
tctagttcttcttttttcagctccctgacggaacatgatttttagaatatactcatcctcattcatcaatttataaacagtttacacctttcgagagctgttttccttttgttaacaacattatctacactgaagaaaaatttcatttgttacagtcacactgaagaatcaatttctagtagtgtttaacaatagatgattcctgctacagttacaactataatctaatctaataatgctgaattttggtcatgctggatttacacacaacaaaaagaaccaagacagaggttatgattccattctgaattcgagaaattgggaatatcccaccgtgcatatacctctcgagttgaaagcactcgaggtgtctcgttaaacaaataagaaagagaatgtgacatctatctgccgacttcaaaacctccatctgtcattattcacctgcttggaaagcatcctggctcaggaggagctagcagcagcttgtctttagcttctgcttcttgctggcaggcgctggctcaacaataattccagactcgagctctctctcgatccaatcatcttcactcaaaccatctaaagtgattgcctgcttgtttcttggtccaaccacaatccctgattcgagctcccataacctactacgaagttagaaaagacaactacgaaggtagtactacgttaaaacaa

SEQ ID NO: 43777 - DNA, 350 bp, Setaria italica
  Peptide Sequence Number=SeqID_109751
ttaagttattagttagattgctatccatggaagaggtaacgtaacacctaagattgcaggtaatccattgtattaatctaacaggtgtcaatttaatgcaggagcataagagggataagcacaacagtgaaatgaacagcaatgccctggggaatgagctcaggtaagaaactctctttgaggtaggccgcatatgactactgtgggagtcattatattcagatgattttttcccctgctgattgtgttgtgaaaactgaacgaactactgagtactgattgtcgctacaatcagccacgccttgtcagcaagcaacagacgaagctgccacgaagcaactgaagttgga

SEQ ID NO: 43778 - DNA, 311 bp, Setaria italica
  Peptide Sequence Number=SeqID_109752
gcgtcaaccggcgtccgcatcgacgcccccgaggacagccccaacaccgacggcatccacgtcgccgagtccaccgccgtcaccatccagaactgccgcatcggcaccggcgacgactgcatctccatcgtcaacgccagcttcaacatccgcatgaagaacatcgactgcggccccggtcacggcatcagcatcgggagcctggggaagggtggcacgttcgcggcagtggagaacgtggcgctggacacggcacggatcagccgggcgcagaacggcgtgcggatcaagacgtggcagggcggcgccgg

SEQ ID NO: 43779 - DNA, 557 bp, Setaria italica
  Peptide Sequence Number=SeqID_109753
ggctcagaaactctaaagggatcatgtgagttttcccgcatccaatatatgattacaagaggaaggcaaagttcaaactggattatatggagtaaatatttttcaaatgtcttggcagcatctcaatttaccctactctaagtgatagttttattaagtgcttcatggaagaaaagtttttgtcatggagattccaaagcatgcttaatgaactttttatcctggagtaaccagctttcattttgccttctgctctaaacagtttgctatatagggtatcatctcttgatgggaactgttggactgtaatgtaaataagttttgactcgcttcatccggctggcacatgttagatgtgcacagtaaaataggcacggttcagagctggacacagctatccttttttccctacagattgtgtccttggagagatggaacgaactcgaatagatagccttgttcagattgtacatagtttacgaataagagttctatattgtttttcctgtatatatcatcttttccaatttgaaatcgcatggttatttaaaaaaaaa

SEQ ID NO: 43780 - DNA, 1686 bp, Setaria italica
  Peptide Sequence Number=SeqID_109754
aaacgaccaatagttaggaagactagtaacaatgaagttgatcctaagcagaaaccaaccgaacatgaaatcagaacaaagcaacttgaagctggggtgacagcactgcaggaatgtggggacatttcagaggataggttgaatttcgttcctgagttgattgcctctcttaaaaaggctgcactggaagatgcgactgagacacagatggcccaatcagatgctaatgctgctgtttcacctgttcctgatgatgacgataatggaaagaagttggatgtggcaactgctggtaatacagacgcaattcaggactctgatttgcatggaagcagtgatcagcagaagagctccaagattgagtctacaactgctgaagctgaagctttgtctaaaggactgcagactataaacaatgatgatttggaggaaattagagagctgggttcaggtacttatggggcggtctatcatggtaaatggaggggatgtgatgttgccattaaaagaataaaagcaagttgctttgctggaagaccatctgagagagagcgtttgattgcggatttctggaaagaagctctgatcctaagctcagttcatcatccaaatgtggtttcgttttatggtgtagttcgtgatggtccggatggaagcttagcaacagttactgagtttatggtcaatggttctctcaaacagttcctgaggaaaaaagacaggacaattgatcgccggaagagagttatattagccatggatgctgcatttggcatggagtatttgcatgggaagaatatagtccattttgacctgaagtgtgagaatctgctcgtgaacatgagggatccacagcgtccgatctgcaagattggtgatctcggactatcaaaggttaaacaacatactttggtatctggtggtgttagaggaaccttaccatggatggcaccagagcttctgagtgggaaaagtaatatggtgtcagagaagattgatgtctattcatttggtattgtcatgtgggagctgcttactggggaagagccctactctgacatgcgtgctgctgaaattattgggggtattgtgaacgattcgttacgccctcaaatccccgcatggtgtgatcctgagtggaaggcgttgatggaaagctgttggtccagtgatccaactgagagaccatcattcactgatatatctcaacggttgaggaaaatggctgctgcaatgaatgtgaagtaaaggctcagaaactctaaagggatcatgtgagttttcccgcatccaatatatgattacaagaggaaggcaaagttcaaactggattatatggagtaaatatttttcaaatgtcttggcagcatctcaatttaccctactctaagtgatagttttattaagtgcttcatggaagaaaagtttttgtcatggagattccaaagcatgcttaatgaactttttatcctggagtaaccagctttcattttgccttctgctctaaacagtttgctgactaataataagtctaatacagggaactagttaggactgtaatgtaaataagttttgactcgcttcatccggctggcacatgttagatgtgcacagtaaaaataggcacggttcagagctggacacagctatccttttttcctacagattgtgtccttggagagatgg

SEQ ID NO: 43781 - DNA, 2028 bp, Setaria italica
  Peptide Sequence Number=SeqID_109755
attctggtatgctggtgttttcatcaggaatggacagagtgacggtggcaaggcttttactgcaattttttctgcaatcgtcggtggcatgagccttgggcaggctttctcaaaccttggagccttcagcaaagggaagattgctggttacaaattgctggagatcatccgccagaaaccctccatagtcaatgatcataaggatggaaagtggttggctgaggtccatggaaacatagaatttaaggaagttactttcagttatccgtcaaggcctgatgttatgatctttagggatttctctctcttcttccctgctggtaaaactgtcgcggtcgttggaggcagtggttctggaaagagcactgttgtggctttgatagaaaggttctatgatcctaatgaaggccaggttttgctcgacaatgttgacataaagacactccaactgaggtggttgagagaccagattggtttagtaaaccaagaacctgctctttttgcaaccactatccttgagaatatactgtatggaaagccagatgccactgttgcagaagttgaggctgcggcgactgcatccaatgctcatagttttatatctcttcttccaaatggctacaacacaatggttggtgagcgaggcacccagctgtctggtggtcagaagcaacgtatagcaatagctcgtgctatgctgaagaacccgaagattctactccttgatgaagctaccagcgctttagatgcagactcagaaagcatcgtgcaagaagctcttgaccgtttgatggttgggaggacgacggtagttgttgcccatcgtctgtccactataagaaacgtgaacatgattgctgtgattcaacaaggccaagttgttgagactgggacacacgatgaactcctagcaaaaggaagcactggagcatatgcctccctggttcgttttcaggaatcagcacggaatagggatcttggaggtgcatctacccgcagatcacggtcaatgcacttgacaagctcactttccaccaaatctctcagcctcaggtctggaagtctaaggaacttgagctaccagtacagtactggagcagatggacgcatagagatgatctcgaatgcagataatgaccgcaaatacccagcaccacgtggttacttcctgaagctcctgaaattgaatgcacctgaatggccttatgctgtattgggcgccattggttccgtcctctcgggatttattggtccaacatttgccattgttatgggtgaaatgctggatgtgttctactacagggaccccaatgaaatggagaagaaaacaaagctatatgtgttcatctacatcggcacaggcatatatgctgttgttgcttatcttgtgcagcattacttcttcagcatcatgggagaaaatcttacaaccagggttaggaggatgatgttatccgcaatacttaggaatgaagtgggttggtttgacgaagaagaaaacaactcaagtcttgtggctgctcgtctagcagtcgatgcagcagatgtgaagtcagctatagctgagagaatatcagtcatcctgcagaacatgacgtcccttatgacttcttttgttgttggttttatcattgaatggagagtggcactccttatcctggccactttccctcttcttgtgcttgccaactttgcccagcaaatttcaatgaagggctttgctggtgacacagcaaaggcacatgccaagagcagtatggttgctggtgaaggagtgagcaatattcgcaccgtggctgcattcaacgctcaaagcaagatcttgtcactcttcagccatgaactgcgcataccagagcagcaaatccttcgtcgtagccagacatcaggtcttctgtttggactttcacagctatgcctgtactcctcggaggcgctcattctctgctgagactgtgagcctagccccagagatcgtccgtggaggtgaatccatccgatccatctttggcatcctcaaccctcaac

SEQ ID NO: 43782 - DNA, 1492 bp, Setaria italica
  Peptide Sequence Number=SeqID_109756
ccggccagagcctcgggcaggccgcggcagccgtcgccgccgccaccatgacccccctctccgccgccgactccgtccccgccaatcacctactccgcctcgtcgccaaggtcctcccaaatctccccttcttcttgcctaggattttcttctgcaccggccaaaaccctcgccatcggttcgcagggcctcgcggcggagcgaggaggagccgcttctgcgttcgactccgccgggttcggcggggtggtgccgccgctcggttccggtgcggtggatttcagtgtgcaggacgtcaggggctcgtcgaagagcttccccaagcacgaggcgaagcacgtctctgaccataagaacattgctcggtgtgccagatttagtcctgatggcaagtatttcgcaactgggagtgctgacacatcgattaagttcttcgaggttgctaaaattaagcagacgatggtaggagactccaaagatggatctgcgcggcctgtgatacgaacattttatgatcacatgcagcccatcaatgatctggattttcatcctgagagtccaatactgatatcagcttcgaaagacaataccataaaattctttgacttctcaaaaaccaatgcaaggaaagcattcagagttattcaggatacccataatgttagatctgtatgttttcatccttgtggggattaccttttagcaggaactgatcacccagttgctcatctgtatgatgtaaacactttcacatgctatttatcagcaaatccacaggattctggttctcccattaaccaggttcgttactcttgtactgggagcttgtatgttactgcttctaaagatggctctctgcgcatctgggatggagtttctgctgaatgtgttcgtcctattattggagcacatggatctgcggaagctactagtgcagtttttaccaaagatgagaggtacctcctgtcttgtgggaaggattcttctgtcaagttgtgggaagttgggactggacgacttgtgaagcaatatgcaggagctgttcgcagacaattccgttgtcaggctgtctttaatgaaactgaggagttcgtgctatcagttgatgaacaaaacaatgaggttgtcgtctgggatgcacttactgctgaaaaagttgcaagattgccccctggcggcaccggtgctcctagatggcttgaccactccccagtagagccagcgtttgttacttgcggaaatgacagatccatcagattctggaaacaaactgtgtaggcatgtagattcaaccattcaaagtaagagtttgtttgtagcattactatttcagggtaattttgagcaactcgagcggttgtatatgggagaaatttgcacaagctatacatttatttactttgtaacaaactatggttagaatgtttttcactctgcatggaaaatggaccattaattatttattaaatatggttggcaaaagtaaaaaaaa

SEQ ID NO: 43783 - DNA, 351 bp, Setaria italica
  Peptide Sequence Number=SeqID_109757
atgctgcttttttaccctctttattcttgacacttgttgggtttgacctctagcctgcaccaatgtgcttcggattcaaaagttgagtagttattgttgacttcttgttgtatgctagtcttgcatacatgttgtaacttgtaaagtctgacaaacataatatctagactagcagcgcaatatggggaacagaatgttgatcattccatttgtgctacatcagcatcaatcttcctttgggcatgtgcaggaactcggcgtactcttgcgccccgtcctgcgtcttgtgcagctgcagcaccagtggcctccgcgtcacgatccctgaccctcgaggcaggaagtctcgtc

SEQ ID NO: 43784 - DNA, 694 bp, Setaria italica
  Peptide Sequence Number=SeqID_109758
cttggaatgcgtgctctgatcacagcctctaattgctgcgaaagaagtttagcaagatattctgaacccatcctgctggctagatgggagtagtcaggactggaagcaaaaaactcttgctcttttctcctagcaataatcatgtcaacattcttgttgatatctgcttgtgaacggtttacaattcccacccaaggatgctgcagtctgtaagctcttccttcaagaacatcaagtgcatttgttcccttgtccatcaaatcaagcttagtcaatacaccaaatgtcctttcaccagttggatcaacatcccgagcaagcttgatggcatccgatgttgctatatcttggttggcgggagatatagccaatataatacaattcggcttgtcaacatatgagcgcaccatattctcaatatcctggacgattgtttcaggctgcccctctacagcaacttttgttagacccggcaggtcaatcaatgttaagttgaccacatttggagaatatatgctgagatgaattggaactggagatatctgctttgtctttcctgtcaacctgtcagtttcatcttcgatttcctttcgcacaagagcgaaatcagtgaagcgacgtttgggcatgtgcaggaactcggcgtactcttgcgccccgtcctgcgtcttgtgcagctgcagctccagtgata

SEQ ID NO: 43785 - DNA, 477 bp, Setaria italica
  Peptide Sequence Number=SeqID_109759
ttttttagtacttagtactaaagttgcaattgttttcttttgcttaattttgggtgggactcaaagcccatggagggattgaaatggttccagaagttggtgtgcacactgttccagagtgtgaatagaaggcatgctggtgaaactgtcattgacatctcaaaccttcctccagcaatattggtgctgtttgctcttttcatgtcagtaagcccccaatcccttccttctgatggctcatctcttccaaacagtgtagatgaccagacccgagtataagaagacgaactgagcaatgctggtggcgccaggaggtgggccgctccagggaggaagggaacggtggtgaggtcgtcggagttggagaccgccctccgccccgcacatggaaggcctcgaggtcgggggacatcgcacccgcgcgccgcagcggcaccgaattgcgccgccgcatcgccgtcgcagtggcctcctctt

SEQ ID NO: 43786 - DNA, 508 bp, Setaria italica
  Peptide Sequence Number=SeqID_109760
aagccgaacacgcccgaaccaactgtccaactcccacattcatttcgctccccacgcgtacgaactcgcagatcggagagatagaccgaggcggccgcggagttgcctccccctcttccttccttccccccgttcgcgcgagaagcttctggagtgttccagtcgagcgggcctccgatggcgctgcagtggatgatcctggcgtgcgtggtggcggtggaggcggcggtggctgcgctggtcacgctcccggcgccccgcgccgtgaggggccagatcgtcgcgctgacgtccttactcctgcagcccatggccagcgtgatacccttcgctgccttccagctcctcgatatctactggaagaaggagcacaggctgatgtgcacctcggagatttgcaccgccgaggagcgcatccgtttcgagaaatccatgttcaaagcacagaggaatgtcatactatgtgtttcagcatgcctcctttattggtgcatttatcgtgttgtca

SEQ ID NO: 43787 - DNA, 761 bp, Setaria italica
  Peptide Sequence Number=SeqID_109761
cgaagggtatcacgctggccatgggctgcaggagtaaggacgtcagcgcatggccagcgtgatacccttcgctgccttccagctcctcgatatctactggaagaaggagcacaggctgatgtgcacctcggagatttgcaccgccgaggagcgcatccgtttcgagaaatccatgttcaaagcacagaggaatgtcatactatgtgtttcagcatgcctcctttattggtgcatttatcgtgttgtcaagtacaacaaggatattaaggcattggaagagactgagaagcgcctcaaggaagagtagatctattgtatttcaaggtggatcatgtggtgttcctagccttcagaagatgtgttaagatcatagttccataggatttctgttgtatagtgtcctcgttggagcaaagaagagaatttcatgctgtttcggcacaaatcttaagtatcagtgttatttggtcgtttaacttaagacgatggttactgtgggcatttttagcatccttgttcatcaacagttcaaacattttccagaagttgtcagaacatccgtatactgggccttttcttggtcttgcatgttgaactagtctggtattttgtttagaattgtatttaggcacgaagaccctgaaacttatcttgctgtcaaagtttccagcagttgaactaagacccggtcgcaaacctacgatgaatggtgtattattactgttgcaataagaaatggaatagatgcccgtgtccttaaa

SEQ ID NO: 43788 - DNA, 499 bp, Setaria italica
  Peptide Sequence Number=SeqID_109762
tgaaatgactggcctaaggttagggaaaaaataactgctggtttagaaacataacacaagtacatatttgattttgcgcaggaataaaaaaatacattgttgtcaattcaaagcgacatattggttaaaatacctaaggggcatattttaaatgcttgcaggttcttcccttcgacgaggaacaagcaggcatgggagcttcacaaagaagtccacaaacttatcctagaaattgtaaaggaaagtggagaagacaggaacttactaagtgcaattcttcacagtgcaagctacagcagggtgggtatcgccgaggcagagaactttatagtggataactgcaagagcatatattttgcaggatatgagagcacagctgtcacagctgcctggtgtctaatgctccttgggctgcacccagaatggcaggaccgggtacgagcagaggtgcatgaagtctgcagaggccggccattagactcccagtcacttcagaaaa

SEQ ID NO: 43789 - DNA, 406 bp, Setaria italica
  Peptide Sequence Number=SeqID_109763
ccggacaccatctgcatttcatgttgtagtgtccattcttcttccagctgacatttaattcttgaagtgcttttaggacctcaatcaggatttcacgtgggagggcccgagactgttggttaaatgatacattaatacaagtgctaggttgtacaaagcaaagcaaaatgaactgcatgcaagacctgaagtccaagtgcccattttctttcaactggataatgtgtccgcaggccgttgctatgaggatctgtgcttcctggaacataattcctcacaccagaactagttgattcggatgatgccagctgatttaaattcctatcctggagaagcaactgttccaagatagccactggttgctttaaaccgattgtccaatagtaaataatatgcaactgttgcc

SEQ ID NO: 43790 - DNA, 544 bp, Setaria italica
  Peptide Sequence Number=SeqID_109764
cgacattcaatagcgctaaaatcgtcaataaatcaaataaatccccgctatctatcttgtttaatgaccccagatgtaatcatgtaaatgtgtactgaccattgattcttgataatctgccccaagatagccactggttgctttaaaccgattgtccaatagtaaataatatgcaactgttgcctcattttgaagtctgctgcacagtgattcgcacacatggtccttgttaaatcccatattaacaacatctcgaagtgtatcctcatcaatcttcagaaaatgaccgttgtaggaaaatgttacagcattgtcaggagaagaatgatagggactagttacattttggcttgctgcgtcgtgtctggtggaggcactgccaagtaacgaggaaggcgattctggaaccattgatgctcccgaatttcacgaattgtgattctcttcataggctcaacaacgagcattcttgggatcaaaatccctagctaaagcagacaaatgacttggaagagtgtagatacctcccttaaatctttttgaa

SEQ ID NO: 43791 - DNA, 491 bp, Setaria italica
  Peptide Sequence Number=SeqID_109765
caaagacatgaaaaaggcgcaaaggttcctatttctatttacaagctgtagtttattcattactgcagtgaaaaaactcacacggcagagccctaagtttagttattcgccactctgaagagaaacagagcactatagaaccctaagcttggtaaggaaggccgcacaaaagtccaggaagaggagctgaggtccagtaactctctgcatatcgaggaggtatttctcatccctcgtcttgtaaagctgatgaagaagaaaacaatgtcagcaggcagcagatgcatcaccaaagagcgtattataataagagaacaaaatgtggcatttcaagtgaattaataggctgctggtccaagataggtgtaatatatgggcatatggtagactggtgcacaaaatgaaagtttgtttgatcagaatggcaccagggatacttgttagaaatagcagactcatgtgctgaacgtttacaggctggaaacacaaca

SEQ ID NO: 43792 - DNA, 699 bp, Setaria italica
  Peptide Sequence Number=SeqID_109766
taagtacttacaaaaaatagaaccaatacaatagacaatagaacaattgctcaagccaaagtccgcaagttttacattatactttgagtcaagtaacaagtttctggctttaggtcacgatggacaaccatgtttctatggcagtattccacaccagatatgatctgttaagtgcacatggaaaaaaaactaaataagaaaaaacttgaaaatacaaataaaaaagctagaatattctaaccggcatatcctcccacaggatgatgtaacgtttcagtcataattcaaaattatgatactaagataatcaagagttcaggaaaaggcgttaactgattgaatagagtacctcaccctaaagacaaagcaattacctcaccagtcttgcaagtcaacatggtaacaggtcagaagcttaaaaaaacaaggcactaatctaaataattatggtttattaaaacctttcttttttctctttggatcataaccaaatcaaaatgaggcccaattaaatgcaacagaaacaaatgaggaaatggatggagtgtccataaatattcaatttccactgatgcaaaataacaagggaaaacccttttaacgataaataccagctgtgggagtccaaactacgctgctcctgaggtaatatctggtaaattatatgctggacctgaggttgatgtatggagttgtgta

SEQ ID NO: 43793 - DNA, 1863 bp, Setaria italica
  Peptide Sequence Number=SeqID_109767
tctttttagcagatgtctctggctatcaagaaaacattagcaattgcaaaaaattcaagtacatcggaggatagctatgtagtaaggtgaacagaagctggatcttgcatttttcacaagagctttatactgcagcattgccatctgcgatgccacagcccacagcttgcttaaaaagcaatttctccccagacagttatactaaacctatgtatatctatatatctataacaagttaactgccaacctttgggcataacacaagaccagtcactcaaacaacacgttctgctgtccaaagacatgaaaaaggcgcaaaggttcctatttctatttacaagctgtagtttattcattactgcagtgaaaaaactcacacggcagagccctaagtttagttattcgccactctgaagagaaacagagcactatagaaccctaagcttggtaaggaaggccgcacaaaagtccaggaagaggagctgaggtccagtaactctctgcatatcgaggaggtatttctcatccctcgtcttgtaaagctggatttcaaatttgatcacagcaggtagccttccatttgcatcatcattatccatgatggtagagtcaccaagaaagctgttactggaatctaacatatcatgggcttctgaaaactccggacaccatctgcatttcatgttgtagtgtccattcttcttccagctgacatttaattcttgaagtgcttttaggacctcaatcattatttcacgtgggtgggcccgagactgaagtccaagtgcccattttctttcaactggataatgtgtccgcaggccgttgctatgaggatctgtgcttcctggaacataattcctcacaccagaactagttgattcggatgatgccagctgatttaaattcctatccattgattcttgataatctgccccaagatagccactggttgctttaaaccgattgtccaatagtaaataatatgcaactgttgcctcattttgaagtctgctgcacagtgattcgcacacatggtccttgttaaatcccatattaacaacatctcgaagtgtatcctcatcaatcattttggcttgctgcgtcgtgtctggtggaggcactgccaagtaacgaggaaggcgattctggaaccattgatgctcccgaatttcacgaattgtgattctcttcataggctcaacaacgagcattcttgggatcaaatccctagctaaagcagacaaatgacttggaagagtgtagatacctcccttaatctttttgaacaggttgggaatattctcatcatcaaatggaagagttccacaaagaagtgcataaaggatcactccacaactccatacatcaacctcaggtccagcatataatttaccagatattacctcaggagcagcgtagtttggactcccacagctagtcttcaaaaaatgaccatcatgcatgacattgctcaagccaaagtccgcaagttttacattatactttgagtcaagtaacaagttttctggctttaggtcacgatggacaaccatgtttctatggcagtattccacaccagatatgatctgctggaagatacgacgagcttcatcttcctgtaatctgcctttctcaacaatgtaatcaaacagctcaccatacttacaatattccatcacaacatatatatctgtaggtgtgtaaatgacctcataaagccggatgatatgggggtgaatgaacaacttcaatatcttgatttctctctttgctttctcctccatttccatatttttcatttggcggcagtttaattgtattcttttattagtctaacccttattgttccttgttaagtct

SEQ ID NO: 43794 - DNA, 578 bp, Setaria italica
  Peptide Sequence Number=SeqID_109768
aaagaatagcaggtgaacagctttgttgctgaatcgcttcttaagtcaaaatgctgtaccaagccatcctctccacaactgtaaaagatgtaagggcttcctggttcgatagccaccttatgcacccgggaatcgtgttccccaactagtttggttgtgacttcgccgccctccttcagtcgcccgactcttacctgggtggaggaagtggttcatttggttgcaatgaagataaaactcagcaaggtgttttagcatggagtacacgcagctggaagccagtaaaatcatttccaatataatacacaataagaggaaaaagagaagtacgcaaacacttagttcaaaataatatgtactgcaagaaaacgtgctagttaagcaacataaatgcttccggactaggtcataaagatgcatgcatatgcacttgtgggaatggagatgtgtagccctgtttgccgacaatttctacactaataataatttaattatgtatagccctaactcttgaaagcactattccagtgaagacaaaagatatttatcactaaaagcctgagataaaacagaagttt

SEQ ID NO: 43795 - DNA, 554 bp, Setaria italica
  Peptide Sequence Number=SeqID_109769
tcctggttcgatagccaccttatgcacccgggaatcgtgttccccaactagtttggttgtgacttcgccgccctccttcagtcgcccgactcttacctggccatcagcagcaacagttacaatggtgctatcatcagtaaacggcatcacacgagcatggaaaacattttcttggtgtccagacgggtaaacaagccttttagttttagcaaaccagtcccatagtatgatgttcgtgtcatctgaaccggacacaagaaggtcaccagcagggttaaagctcacggtattaacacagccatcatgaccacgcaattttccatactgagtcatccgcatcactatatactcggagccgctgattcggcgggaggaggcgcggggggaaggaggagccgatatcgcgccggccgacctcaaagaagcagctggccttccggcctccagcggcttcgacggcggcggccatggtgagcggttgaatgcgaaaagccgagaagcgagtgcggaagaagggggattttgcgtgggatatatgccacttcaactttgcg

SEQ ID NO: 43796 - DNA, 491 bp, Setaria italica
  Peptide Sequence Number=SeqID_109770
tctgcactcgtaactggttgtggtacattttcctttaccttagagtaagactggatgatgcaagttgcagaatccacattggaaacaaatctgtcattagtaccaattgtactgttgctgttgctgttcacatgcttcttgccaagattaaggtcatttttgcagttgctgaggaaattttgcattgttgaattgacttcgtaccaacgtggactgagatacttgagaagtccataccatgcatttctatagcttcaataagatggcatctttccttattagtccatatttcttgttctccttttctagttttcccattggagcagctgtcctcactcaaattcttcaactctgccacctcagttttgggaatggtcaaacgggcagcttcactagagttagtggtaggagagttcattccatgtagggatggagcattcatttcacctactaatacatttccagttacatgttcatattcttcaatagtt

SEQ ID NO: 43797 - DNA, 615 bp, Setaria italica
  Peptide Sequence Number=SeqID_109771
tgggccttccagtcttttcacaggagggagcagagtgcacgagttgccgcggcgccatggagaagggaagcggcggcacgctaggggtcgtagaggcggccgtcgcagcggcatttccaccccagcggcttgtagttggagtagcgcgagaaggcggccaccgtgtcgtcggtgacgcgggccgagacggaccgaagaaccaagccccggcacggtagtcacctggacgggcgtgcaggggttgcacgcgctgcaccggttgtggcagctcggcggcgtcgaccccagccgcgacttgtcctccgccaggttctgcgaagaggagaaggtcgccgtgcggatgcaggtcgcggcggcgaggaggaagccaaagaacacggccgcgaggagtgcccggcgaggtgagctcacggccatgagaccatctcgtacagccaggaagtaaaggtgtttgggcaccagatcgatcgagggcagcaaagggaagcagggaagcttcttggagcgagattatctgtgagctagctcctgtctcgcgcaggctcttccatcaatgaacgctcgcagtaaagctcgagggagatcctgccggaagctaggtgtggtttcctgagc

SEQ ID NO: 43798 - DNA, 382 bp, Setaria italica
  misc_feature (333)..(333): n is a, c, g, or t
  Peptide Sequence Number=SeqID_109772
tttttttcctaaattgaacaaacctttggctatacaatgatgctgcgtatttacatagggatacagaaaagaaaactaagaagaaaagtaataatacaaagccttgacattttcttcatcacatgcttgaagcaaccatcgacctgaaaagctggagagcctgagaaacctgtcagaatatttacctccacaacggtgacttgctttggctcaacaggactaaattatgggacagtatacacctgcagccccacagcttccctagaaggaaatgcatatgctgcaactgtgggtagatatggaaatgttatttgcagtgttctgttaaaaggntcacaaccaacagcaactaacattgggaatgcccttcaacattaccctc

SEQ ID NO: 43799 - DNA, 1092 bp, Setaria italica
  misc_feature (1)..(53): n is a, c, g, or t
  Peptide Sequence Number=SeqID_109773
nnnnnnnnnnnnnnnnnnnnnnnnnnnnnnnnnnnnnnnnnnnnnnnnnnnnnaaaaattttagtcaacttgataaataaaatccgtaacatgtctacaaggtcaacaagcaacatcaatcaccaaattacattcgcatccagctggactaaatgaacagatgctctttgcatgttttaagcatctacttaattaactacaatgctttcaactcaactgtggccgcataatctaattattgtataagagatttagctagtaaaataagccaaggactttccctccaacatgctttctcctattcatattcttccaccattcactgttcactgattctctcttggctgaaaccaacgctctacaacttgctcttgatccggcaccttcctcttctcctcagctaccagggatagcataaactgcttttagcaccttcctcttctccttggtgtcgttctcgtgcaggcaacagcaggacaaacaacaatcttgttagttaagcaattgggcatgccgtgactgacatgaacatccaaattaaaaggtggacacttgcagacatcatactaaaaaataataggtagagtagccacataattctaaaataaatccagtaagaagtttaagaagcagacaaggacatggttgcagacaaggacatggttcatacatattgcaagactatacaatttttgacaatagctttaaaaaatgaatagccgcatgcaacaagtaaacaataaaacaaaattaagatcaatgttgatcacacaatagcaacaacgctcactagtaagctctatttattcaagattattttattgccctcgttgcagcaagattagtccatttcctattaaatgaacaataataaacgacacaggtgaaaagggaaagtaacaaaagagcctagttgaaatctcttcgcacgatatgatgtgagaagaataatctgaaccgaaagaaagtcagtgacctcatctttgttcagccatggttgtcctttgctttgctccgttgtttatctataccagaccctcacttatttttttcaacccttttctctcaagcttaatttagcataacgaagaa

SEQ ID NO: 43800 - DNA, 333 bp, Setaria italica
  misc_feature (278)..(278): n is a, c, g, or t
  Peptide Sequence Number=SeqID_109774
agacttactctaatgtgcgttgttgatttgctcacctcctgcaggtgaggtgaggcccttcactgctggatctcctgctgatctcctgctgattctgcttcagcggcagttcgattgatttgtgtgtgagaatgacgacacggatgcatgcttcgcttgcgtccaggttgtttgcttctgcttcgatttactttgtttggttggttgttggtcgttcttcctcagcggatccaacccaaccacttttagtcgagatattcgtgatgttaatgatcttnagatgcattcttggatcctggctaggaccatcattataagtctccaactctgtca

SEQ ID NO: 43801 - DNA, 386 bp, Setaria italica
  Peptide Sequence Number=SeqID_109775
aaaaaaccccaaaaggaaagacaagtaataacggacatggcttttagcacagcgtcgcaacaagactcaccctaaaacgaaacatatcaaggaaacagagcaaagtagcaatctcaaagtttacatactggcacaataaatctagctaaaattcaagggagaacatgttgttttcgtctctttcttcttctttctcttccttctcttcttagccgcccatcaacttccttttcctactctacctcttccctaaggaattacagcaggtactctacagactaaaaggctaagaagaaggtaccacacagactacaatagctgctttctggaacagcaacatgagctgtgttcacagagtcaggccaggcccaagttggctaaaagtt

SEQ ID NO: 43802 - DNA, 546 bp, Setaria italica
  Peptide Sequence Number=SeqID_109776
tttttagtaatttagtactaaaacttacttcgttaggaaattaatacaatatttctgcaccaaaggatctagaaactctcggaacagcgtgtctttgctctcaggaaaacatgataccaggtcaatgacgccctttataacaggatgagtcaaattatggctgtgaagttcaacttaaaatctgtctagatttgatgggattattgagaaccacatatgcaaagaatgcatactgaaaaagtaaagcaggcaaatctgagactttgcccaattttctttcagcagctatagcatcttcataaactgaacaggcctttcatcatcaccctaccccctcccctctttctcaacataccaatctgcgttcaaaatttgcatgtgcttctatagcctcatgtgaggttggatctaatttctgagtaaatctcatgatattgttgacgtgctccaggaatgtcaccaatacactctttatacattgcgctaaaacggcatatctccaataatgcttccctcttcaccgatttcagagcacgagaaagtgcc

SEQ ID NO: 43803 - DNA, 296 bp, Setaria italica
  Peptide Sequence Number=SeqID_109777
ttttttttttaacccttttaagtaactaaactccattagacacatccaataaactgttatgtatacagttctgtattttgctgtctatatgcaatcatgatatcactgatgaatcatgatgaactacaatcccagacgccctaagtgtcctgattcaacaccatgcgtcagtccatctcgcggcccttggtctctacagggaagaggatgcaggcaactccggcgaggaacagcaccagctcgaacaccagatggctgccatctggtggcagctccgcagcatgccgacggcgacc

SEQ ID NO: 43804 - DNA, 808 bp, Setaria italica
  Peptide Sequence Number=SeqID_109778
tttttttttcgtgtgtgtcaccttcttattttaacaaagcactgtaaagtacatcactcaagcaatagaaacagatcgtgatacatagcataagcacctaatgaaagcagccgctgcaatcatgagcacccaaaataagtggactgattaaacgcaaattaaagttgtggtcacaatagttagtagagcaagaaaatataacaccaaggaaaaatgcagaggaataaagaaaatgaaggtcagaaaattgaagatttaccctcccagctggagtcagtagcatgatctgaaatatgaatcaacatgagaatgaaaaacttctgaatcaacatgagaatgaagaacaaatttgctcaacaaaaagaatgaagaactaagtaaaattacaatttgaccttgtactctgtatactaatactgttttttatttctaatctgaatccttaatcctgcgtgagtatttacgatcggttttgaatcgtgttcctgaattgtataaaagagtggcaggttagatgaaaccaagcattatattactgccaatatagctgaatgttgactgactcccactattggaaccctgatatacagacataaatgagaacatgaacaaagtattcaatatttgcttgattgctttatatttgcattgtatgccatatacagagtactgctacactgagaagttgcaaattacaccctacatttcagtacaggaatggatggaaattaggacataaccataatagaattgccattgttatctaattgttctttagttctaaatcttccggtttggtttcttcttc

SEQ ID NO: 43805 - DNA, 391 bp, Setaria italica
  Peptide Sequence Number=SeqID_109779
ggcgggttgcgtcgggagcgtgggcgcctttctgcgcgccagagccgcggcgcatttatggcgagctcgacaggggagcccacgagatccgcgctctcttccaatctgcgcccgaggcggatacttgtcatgtgggcccggatgagtccgacccccggcgccctaggtcgggcgaggcggagtcttgcagcgaggggtcgggcgcttccgatcttgggaccgtgggtcgggtgaggcggagtttggttatcaaggggtcggaatgtccgaccccggggcactgggtcgggcgaggcggagcggggctcgttcctccccatgttgggccgacggcagtcttcgttacctcaggtgggcctgggccctcatgattgttgttttaacgggcatt

SEQ ID NO: 43806 - DNA, 1642 bp, Setaria italica
  Peptide Sequence Number=SeqID_109780
tttttttttgtcacaacaaaaaaacaaattcaagccatgatattcatagaagttttggcttacatcaaacttctgtagaatacaaccaccatctcatactaaataagagagatgtgaaggaaaagggtacacagcctgacccccatcaggaccacccacagcttacataattccccccctaaaagttagtttgaccacagactatcaccaacccaaccgtactggactgctgctaattagactcaacgacgatgaaatcactctcaattgcctgcgaagaaatccttcttcctcgctggcctccgatgattagtgtgactatgacagaaagaagcaccaccgccatgatccgtatcatgtggttagatggagaacacccacggttcttcatccatgaggtaccgacagaagaaagacacaagttacagacaagactacctactaccaaatctcaggatgagatcagccaggattcttcacacaaggcctcctctgggatatggaaggccatgtgagcgccttaagcttcctatttacagaggatacttggaatggtaaagctccaaatcctccttagctctttgtttctctaccctacatccatcaaaatcagtcagttggaatgcaagaagctgagtatggacgggctaccaatcacttgcagtctagctgtagggctccactccacgcaacgttatcatccgccttctctagagctgcaaccttagcacgatggcatgggagaagaccgaccttgctcttctcaccttgcggaagctcaacagtctcactgacagatccagacttgatatcggtgggcgggatgaaacaatccatggagaggccagggacattgaacgcaacctcctcaatactccatgcctcctccatacgagtcttggtgtggctcatagccgcctccccaaaacggaacagggtcacggctgagcgcccagaatgtgcaatcataatgccctcaactggacggtagtcctcgatgaaggaattgatggtagtctcccagtaaactgcatctcctcctgttgttgactggattctggtgaggtgtgagtcctcaagatggacaagaagcccggtcttctggctgaagtacccaaaaaggacatgccggatgatctctgcaagcccctcgctgcgcgctctcagcatctcaggatcagcacacagcttcagaatgaagcaatcctccccattcaccttcctctcgccaatgcaccttgcaccagcaaacatgcttgctgcagtcaacggatccaagccctgaagagcacggcgcagtgggcgaacagggcccttggcggcatgcgcgccgagccatggtgtatggcgccacacaagcttgccgttgcagccggcgtgcaccttgctcccaccgacggccaactcaatgtaccacatctccggggccatctgccacagcacgaaccggccaggctcagcccgttgcgccgccatgcggttcctcacgacacgaccaccggtctcgaactcagtagccaccatccgcaccttgcccatggcgtaggcgttccggatagaggagagcagcctctgcccgccggaggcagctaggtactgctgcaggatgtactgcgccgacgaggtctcctgcgtagaacac

SEQ ID NO: 43807 - DNA, 304 bp, Setaria italica
  Peptide Sequence Number=SeqID_109781
tgggcttgttcgacgtggaaacaaaaaaccctaactcccctgctcctcctcccttcctagcggcgacgccagggcgagtggcgccgccctttgacagttcttcgtcggacgcttcgccggcgacgagcatccgacaaggactcgcagactaaatttcccgcgacgatgccgcgcaagcacgcgccagcgttcacgccggaggcggcctccgcctccgcgtccaccggggctggccagcctcataacctcccggtgcttcaggcgaagatgaagcgcgacccggagggctacgaggaggagctcc

SEQ ID NO: 43808 - DNA, 278 bp, Setaria italica
  misc_feature (2)..(2): n is a, c, g, or t
  misc_feature (4)..(4): n is a, c, g, or t
  misc_feature (6)..(6): n is a, c, g, or t
  misc_feature (9)..(9): n is a, c, g, or t
  misc_feature (13)..(13): n is a, c, g, or t
  misc_feature (22)..(22): n is a, c, g, or t
  misc_feature (43)..(43): n is a, c, g, or t
  Peptide Sequence Number=SeqID_109782
tntntnttntttnttttttttnttttttttttttttttttttnttttttttttttattcacacaaaaattcctccatggtattattaccatcgaagtgtgcaaggactattacaggcgatcggaaatctgtatttgtgctcagagcacttattacatatactcaactggttactacacattggacgtactttggtccctacaattcactcacatggtaataatatcatcgtgcaaggactattacaggcgatcggaaatctgtatttgtgctcagagc

SEQ ID NO: 43809 - DNA, 267 bp, Setaria italica
  Peptide Sequence Number=SeqID_109783
ttttgtttgcatgaggcttttcagttatttatttatcatagtatgcgcgtggtttgcgtgatttatgaaagaaaaatatagcacacaaggaaattaatagagactttcattgtgcccctaagtacatattctactacttacgggagtgcaatgatgcgagcagaggcacatcgacatatcatcgatcagaagcagggacggacggccgccggacagctcagtcgcccagccggccggggaagacggatggccggaggcacgtgcgta

SEQ ID NO: 43810 - DNA, 781 bp, Setaria italica
  Peptide Sequence Number=SeqID_109784
atattttaatagtgattttgataactttacactcattgctgtcgatcaatgtagatttgtgaaagcttaaaaggtttgatcgatccaattgctaaaacatcttacatctccgttcaggcagacttatatatatgatgatagccttaaatttgatatgactgaaatttattactccactataagccatttttgaacaattaactagatcaacgtcgaaacaaggttcttatgtattaccaatttaagctatggggttaagtgatcggaaattattgaacaatttgcaaaaccataaatataaactgtgtattggccactgtgattgatccaaaagaaacaacatcggtggagctgatatattcaagcaacgatcatctggacatgtgccggtcaggttagcataacaaaatttctcgattactagaacctcatatactggcaaacaaacagatacgaaccatacatgaagttcactcacagaagcagggacggacggccgccggacagctcagtcgcccagccggccggggaagacggatggccggaggcacgtgcgtaccttgagaattcacttcttctccttgtaaatgaagaaggtgacgaagcctccggcgatggtcgcgaaagccatcagccacacgaccaccgccaccggcggtggcatgacagccgcgactttgccggagaaggccaacgttagcagagttgtcaaaatccagaccgctatcttgagccagtccctcttggacgaacccgccggtgcgctctcgtacatcctcag

SEQ ID NO: 43811 - DNA, 710 bp, Setaria italica
  Peptide Sequence Number=SeqID_109785
aaaaaaaaactagactaaggtagtaggtgtcaacaaagggggaagcatcgatgctggtcttgctcgaggaagcttccgggaaggagagctttggcgttgttgctttccgatggccggtcgcgattggtaagcgacaactgcctgcagagattcaatgaatttagtgcagttggcttgaagaattatctcatccagcatgaaccggtatgttatggtgtcagtcttttcttcgaaatgagtcgctctttgaaaaatggcctgggcagtttctccatccaacggatgcactcggccgggtgcacgggagcaccccaaggccgggtgctccgaactattctcatgaagtgatcccataaaataatccaaataatattattggttgcgagtcgtttccatgatacaaatcaaacatacagtaaatctttcttgaatgataatctgtgtccaccatatgaggcactgtctgtttaaacaagaagactccaagatattatggatgtttcccaaataaattcaatcattagccattaggtcattcctccgtggatctgtatcggactcacgatgtacgcacggcggaaatcccaaggaaacggaggacaagaacccccgcttgtcggttccatgatgacaattggcaaccccatgagcacgccgcccggcgcctccctcgccggcgccgccggcggcgatggttccgggaaggtatg

SEQ ID NO: 43812 - DNA, 1765 bp, Setaria italica
  Peptide Sequence Number=SeqID_109786
gcgctgggagacaggatgatctatcacacaaaaattcctccatggtaataatatcatcgtgcaaggactattacaggcgatcggaaatctgtatttgtgctcagagcacttattacatatactcaactggttactacacatgggacgactttgcccacaattcactcacattatatttttagtaaaatacaaaaaacagaccacacaacggtatggtacatacttcattgcagcacacaaatctttttacatgatatatcatatatatatatatatacatgatatatcatatatttttagtcgatattatcatgcattttgtttgcatgaggcttttcagttatttatttatcatagtatgcgcgtggtttgcgtgatttatgaaagaaaaatatagcacacaaggaaattaatagagactttcattgtgcccctaagtacatattctactacttacgggagtgcaatgatgcgagcagaggcacatcgacatatcatcgatccttgagaattcacttcttctccttgtaaatgaagaaggtgacgaagcctccggcgatggtcgcgaaagccatcagccacacgaccaccgccaccggcggtggcatgacagccgcgactttgccggagaaggccaacgttagcagagttgtcaaaatccagaccgctatcttgagccagtccctcttggacgaacccgccggtgcgctctcgtacatcctcaggcaggcgaagagtgccaccagatcagcgtacgagaagccgacgaaggctatggccatcctgtccccttgcgcccggagtatcgccataactgagttgaaggtgaggaagccaaaccccaggagcgtcagccaggggaaggccccgtcgccattgttgccttggcggccgtcctgctggtagtcggcctgctgctccacggggacgaagatcaaacgctcggctgcaggatcctcctctcttggcctgggggtaacagcttgatgtgcagtcgccattctctctaaattttaatcggcgattttcccgcccaggatttcttcgtggcgaagaaacttacagctttgcatctagctgcaagcctgcaacggccgccgccgaccttatacgcgagagtactggaactggaaatttcgaggaaattctcaaagaagctgcaacgaagcaagtgggaaaaagaaaaggaaaggaaggaaaaaaaactgctaggtgtaaacaaagggggaagcatcgatgctggtcttgctcgaggaagcttccgggaaggagagctttggcgttgttgctttccgatggccggtcgcgattggtaagcgacaactgcctgtcgacacggtacacgatagtgagtgtggggtcagcacgcaccgatggaccgtctcaactatcgataggcccgcccgacgcagcgatgagtgcgccgttttaaacaagagcactcccctgttccccacgctgctctctgccggagacgtgaaaatggatatccgaatcattcgaatccgtacccgctaaaataataaatatggatatccactagagtactacaaagacagcggcgttcaaaacacgccagaagctaacacgcccctgaatacaagaccacaagaccagttccaagtcagcggtgcatatatatacaaaggccattcattggtcgtttctccacccacagacacgtttacagaccgaatccacgggaagagcatttctcaattgcgccttccattagattcaccacttccctatgttctcatacaag

SEQ ID NO: 43813 - DNA, 505 bp, Setaria italica
  Peptide Sequence Number=SeqID_109787
tattatacttagaaaagaacattacaaaataaagaaacaaccttctagactttataaagaacccacctatttacaaagataatatttagataacacataataccgcagtgctttataatctcatttatctcttcaaggataccttttctagaaagttaaggaaactaatctagttcatattttgttgacaagaatttttagaaaatgatcaatgcataggtatcttgttcaatttctaattcatcatattcagaaagatgatactatatggaaccagaactgcttttccaaaaataaatgctacagtaagcaagcaaaaggattcctccacaagtggaggtatagactatggagcatgacggcccacaagatctaacatagttaacattatgtcactaaaaatggaaacgccatatcatactaaatagaacacattttaaacatacctgcagagattcaatgaatttagtgcagttggcttgaagaattatctcatccagcattt

SEQ ID NO: 43814 - DNA, 430 bp, Setaria italica
  Peptide Sequence Number=SeqID_109788
ttttttttttgtcacatcaaccggcaagacagcaacaaccaacaggccaaacagtctagcacaccagaaatgcgctccacaggtgccctcttatttcacttatatcagtcggacgctctcaaaagcgacacgtaacacagattcaggagaaacagcgttcaccaacacatgttcagttcatcggcaggtgctacaagtgcgaacggcaaacacgctgatcatagatggatcgggtgctcttatttcacatgtccaaggatgttcagactggtgtggtggtgacaaggcaggaggcgacgctttcagcactcaagtccagcgaccactttcagcttcagccctggagtccaatgatccctactaggtctaattgtcggtcctaacctaagttacgtttttaccttaagtttagttactttacttttagtta

SEQ ID NO: 43815 - DNA, 733 bp, Setaria italica
  misc_feature (731)..(731): n is a, c, g, or t
  Peptide Sequence Number=SeqID_109789
aatatatgatcagcgtgtttgccgttcgcacttgtagcacctgccgatgatgttcagactggtgtggtggtgacaaggcaggaggcgacgctttcagcactcaagtccagcgaccactttcagcttcagccctggagtccaatgatcccacaggcaatgcggccaccagcgtttccagtgctcttgctcagctcgtgcccaccctttccaagatcatcaggatcagcgtgaacaacaacagctctgccaatgatcgagttcggcccagtcagtgggatctggctgtcggtaacatggatgttagcaacaccatctgctcccgctgtgcaatttccgagatctccagcatggcggttgtcatcttctggtgctccatgctccttgcccgcaggattgtaatgcggtccagttgacatgcagccatttgtggtgtcaccaagtgcatgcacatggaacccgtggaggccaggcttgaggccagagacacttccggtcacagtggtggggccatctccctcttgggtgaagtagatggtgcccttgacaccctcactgctaccaagcacaacaacagccttcaccattgttcatgtgatcaacgatctgagatccgaccgcgactgcttccacggaatcggagaccggagtagattacgcggagcaaacaagacaaacaagtaagaaaggaacgaaataacgaaaaacccccaaaaaaataataagggtttaanaa

SEQ ID NO: 43816 - DNA, 684 bp, Setaria italica
  Peptide Sequence Number=SeqID_109790
gatcgccgccggccatgctcgacgacgatgacagtgggagaaggatgccaacggcgcggtacgcaggtaaccatgcgcacgccggcaaacccggtgccaccactggcacggaccagcagaaatgcgctccacaggtgccctctatttcacttatatcagtcggacgctctcaaaagcgacacgtaacacagattcaggagaaacagcgttcaccaacacatgttcagttcatcggcaggtgctacaagtgcgaacggcaaacacgctgatcatagatggatcgggtgatcttatttcacatgtccaaggatgttcagactggtgtggtggtgacaaggcaggaggcgacgctttcagcactcaagtccagcgaccactttcagcttcagccctggagtccaatgatcccacaggcaatgcggccaccagcgtttccagtgctcttgctcagctcgtgcccaccctttccaagatcatcaggatcagcgtgaacaacaacagctctgccaatgatcgagttcggcccagtcagtgggatctggctgtcggtaacatggatgttagcaacaccatctgctcccgctgtgacatttccgagatctccagcatggcggttgtcatcttctggtgctccaatgactaccttagacccgacaaggaaattaagtaaaataagaaacgaaa

SEQ ID NO: 43817 - DNA, 1011 bp, Setaria italica
  misc_feature (1)..(75): n is a, c, g, or t
  Peptide Sequence Number=SeqID_109791
nnnnnnnnnnnnnnnnnnnnnnnnnnnnnnnnnnnnnnnnnnnnnnnnnnnnnnnnnnnnnnnnnnnnnnnnnnnccccgttggttggttccgtccctgtgtctcgggtggtgtagtctttttttttttttttttttttttttttttaccagtattgcgctccacaggtgccctcttatttcacttatatcagtcggacgctctcaaaagcgacacgtaacacagattcaggagaaacagcgttcaccaacacatgttcagttcatcggcaggtgctacaagtgcgaacggcaaacacgctgatcatagatggatcgggtgctcttatttcacatgtccaaggatgttcagactggtgtggtggtgacaaggcaggaggcgacgctttcagcactcaagtccagcgaccactttcagcttcagccctggagtccaatgatcccacaggcaatgcggccaccagcgtttccagtgctcttgctcagctcgtgcccaccctttccaagatcatcaggatcagcgtgaacaacaacagctctgccaatgatcgagttcggcccagtcagtgggatctggctgtcggtaacatggatgttagcaacaccatctgctcccgctgtgacatttccgagatctccagcatggcggttgtcatcttctggtgctccatgctccttgcccgcaggattgtaatgcggtccagttgacatgcagccatttgtggtgtcaccaagtgcatgcacatggaacccgtggaggccaggcttgaggccagagacacttccggtcacagtggtggggccatctccctcttgggtgaagtagatggtgcccttgacaccctcactgctaccaagcacaacaacagccttcaccattgttcatgtgatctcaggcgacccccgcggcgaggaaggaagggatgggaaggcgacggcttggagtcttgcgcttctggaaggttcccggggcgggggcggggttgctggaccggggggtagttggatgctg

SEQ ID NO: 43818 - DNA, 1238 bp, Setaria italica
  Peptide Sequence Number=SeqID_109792
taagaaaaaaataaataagttaaaatatgttggccgggcttctgtgccagtgaccaaagaggtccgcaccgatcatcggtcccatagacaaaatcatattggtgggatacagcctcagcatggaactgcaataaaacacccctccaagaatttcatgcaaaggccaagtagtgttcgcatggagacccacaatggacttccagcagaagattccaagttacaagcaagtcccaattattttataggtccaagagaaaaaacttatgaacaatcaactagcgattttgacaaagcacagcggctttatttgcacggaaaactatccgttgctcttcacagcagagaatcaatccattgtgagacgggatcggtttcctcttctgaaacgacaactccgaagtcatcaggtgaatcaacagatatttctgtagctctttccgtgcagaaaagaagactgcacgattcagttcaaattaatgatgccaatgaaactatttctggacaatcatcacctgggtctaagtccacgacaactgagttattggttggatgtggtacagttccatctgttcaagggaaccatggctgtcaacagttctgtaactctagaacacatctagttgaaatgctcagggttgtaaatgatgcctacaaagttcaggttgctgcagatgttcaccttgctgctggttatccaattactgatcttgaaacatttatatattctgcaactccagttattggtcatgcaccttgcttgagaggcagcaattgttcatgggaccaagcagttagcagctcagtttgtcagcatgacatttctaatgtttccttaaggaccatatgggagtggtatgaagagccagggtgctatggattggaagtaaaagctcttaatgatctcagctctaaaacatcctgcagcagcagttcagagttctttgcatactttgtaccttatctatctgctattcagttgtttgggtggtctaggaataacatggatcacagtttcggtgtacaagggagagagttactgaaagcatcaaatactgcaagctctttgagctctgatcctgtgcatgcaaaggtgcataaaccgtttgaggaaagtaacgcatactcatcagagtcatctttagttgtagaaggtcatggagaactcatgtttgagtactttgaaacagagcagccttcttttcggccccccgagactgccaaggcacacaggggatagg

SEQ ID NO: 43819 - DNA, 406 bp, Setaria italica
  Peptide Sequence Number=SeqID_109793
ccgggctccgccaaccgcctgctcgtcctcttcgccgcgacctgcctcatcctcgccgccgcctccttcgccttcgccgtctccgccagccgtggccgcccgcccccgccgcagccgcctcccgccgtcgccttccgctgcggccccgccgaggactcgctccgatccttcctagcgtcctcctcgtctggccgcaactactccgctggcgacagggagaaggtgctcgccgtcgtgggcgtccacaccgagcacggatccgccgcacgccgcgccgcgctgcgggccacctggttcccgcccaacccgaaggcatcgtaagtttggaacatggaacttggttttaacttttaggtttgtgactgggcggcccaaggacaaaacaaaaaatggaaagattcttacg

SEQ ID NO: 43820 - DNA, 396 bp, Setaria italica
  misc_feature (42)..(42): n is a, c, g, or t
  Peptide Sequence Number=SeqID_109794
ttgaacacgcgaactcctggatcaaacggcaattactacagnggtcccccgaagattcttgaggaggagaagccgccatcgccaacaccgcctgctaaaaagaatggcttcctggcaaaatgggcttcatgcctctgcggcggtggagcttcgtcgtagcaataataccaagagctgtggcagcggtggagcatcgtgcaagagtgagaactgagaagattcaagtaaagcggatggaggagcttcagtccgtacgactgtacctgaattgtttctagtgacatgtcatttatgtcctacgaaggaagctgctttttgtttttccttctgaacttgataactgatggcccttttattgctcattccagcaaatgcatatgcgatgaaactgccaag

SEQ ID NO: 43821 - DNA, 2041 bp, Setaria italica
  Peptide Sequence Number=SeqID_109795
ttttttttttttttaaaagttacaaaaaggaaacaacaatacacaattacacatcaagtacagtctacagtacggaactgctaaccatctctcttcagagttaagcctcgtgtcagggatagttttcttctcaacactgtcccctaaacagggaataataatataccgtggccatatactgcactgctgaaggatcagcgtaatacaattaatgattcaggggaagctattaacaattattcttgtacaaccaaacacatgctccaaaccttaccatgacctcaatatgttggtgcatgctctacgagcaaatcactgggatatatgttgagaacaaatactcttccaacagtacgggtgtgtgctgccgtggacattagcagcacctacgccgccaatcattgtacagaatatataatttttcttaatatagcgtctttcaataatatcacacaggtttgatcatatcacgttttctcctgaaaagattgcgagcgcgatagagccgctggatttgcctgcaggactttagcggagctggagatctgctcccggccttcaggtttggactggaatggtctgaacatgcctcgctcaccgggttcaatcccaagtgtggtccagattgaactctttgcagcttcatcagggtcgtcgatccgaagtgtcttcggaatccacaggcatctttctgccttctcatcaccttgaggtctggagtccctcgagtgtttcccaaggacaggagagctgctatctgaacatgtgctgctgcttgtgggagatgatgctggcacgctagagctaggtccgagccatggcgtgctccatgctccgttaggccaaggcgtaatgaatggccaaactgaagatggcattaccggaactggaaagggtggaccacagaatcctggtggcagtactggcaccattggtggcacattccattgagcattacaactactgttgccattttctgaagaatttgctgcttctgctggggctgggcataccggtgctgccaaggcgggaatgccattccatgctggactccatgggtacacaaagggaggaccagggaagaatggtatgggatgaatggaagtgaccccgttgccatgcccaacaactccattttgatgtgcactcactgctcctttatgagattcactacgaggaccgtctgatgctgtcgtagaagctgggcacgtctgggtttctccatttctgggctgagctgttgaggcagggttggcattcttactctgctcccctccaatcttcagcacagaggccatggagttgcagagaggggaatcaggcccaaagttaactgctgcttgatttccattgatagacaatggaaagagggcagcctctcccgcaggagtggctacactactgcctggaatcaatatgctgcggcaattagcactggagctcttgctcttgcgcctaccagcaccaacaggaatatttctcatgcttccacctgcagtccagtacctctgacagctcttgcaaaaatgccttggttgcttaatgttgtagttgttgtagtaacagaactttgtatccatgctgttgcaacggggacatggcaggattttatctggtttcttcaggaccttctctccattcgatacatcgccctcggtcttggctgtctccaaattggactctgatccagtcatttcgtcattgctggctgcctgattctcacactcactggaactgttaaggctagatctatttgtctgaccaaggtctacctcctgacgtgtgcatggcttttccacagccatactcatgtcccctgtatcttcgcatgcatccttctccggcggctgcggcggcgggcggggcggcgccacgtgggattccggcgaccgaggggacgcggctccggcgagctccataccatacgggcaagatccgacaagtggagttggcgacgccagaaaggggaaaaagatttgcccaatttgtgtcacacgttcgttgcaactaacgtcccccttgttacttatttcctttggtt

SEQ ID NO: 43822 - DNA, 292 bp, Setaria italica
  Peptide Sequence Number=SeqID_109796
agatggttggtactactttaagtctatggagaagctctttggcattcgacctgagagagaacaccacaactgcatggtcgatctccttggtcgagcagggaagcttgatgaggccgtggaattcatccatgagatgagccttgatgcagactcggtcatttggaggactctcctaggcgcttgcaggatgcataaaaatgccaatcttgcagcatatgcagccagagaaatacttaaactggagcctgatgaccaaggtgctcgtgtattgtgtcaaacacatatgcagatc

SEQ ID NO: 43823 - DNA, 235 bp, Setaria italica
  Peptide Sequence Number=SeqID_109797
ctggccattcttttgtgaaacagtaggatgatcaaagaaaggatgtttcgacattgagtttttactgcttatgttgactgaatccattcattaccctgatgaactgacctgatgtatcattcattcctccgatcctggatgtctggtgtttgagattgagccatttgtttctctgagtcatactcatataccattggctccttagtttattaagaatagactggagctaattgca

SEQ ID NO: 43824 - DNA, 256 bp, Setaria italica
  Peptide Sequence Number=SeqID_109798
tacctgaagaagcaacggaagcttttgcgatgtgcatcggttgattatgttaatgttggaaaagatatgtacctaattgaagtgcctgagagcctgggaggttctgttcctggaaactatgagttgcagtctacaaaaaagggtttctataggtactggacgccagaactgaaagacctaatatcagaactttcgaaggctgaggcagagagagaatcaatattgaaaggcattcttcagaatttgattcagctta

SEQ ID NO: 43825 - DNA, 1639 bp, Setaria italica
  Peptide Sequence Number=SeqID_109799
aagttgccttgagagccttggttttttattttgtttagttttagtttcttagttctacaaaaaagggtttctataggtactggacgccagaactgaaagacctaatatcagaactttcgaaggctgaggcagagagagaatcaatattgaaaggcattcttcagaatttgattcagctatttgttgagcatcacagcgagtggaggcaattggtttctgttgttgctgagcttgatgtcttaataagtctttctattgcaagtgattattttgagggcgcaagttgccgtccaactatcaaagaatcaaatggcccagatgatactcctactttccacgccagaaatcttggacaccccattctacgaagtgattccttaggcaagggttcttttgtaccgaatgatgttaagataggtgggccagggaatgccagctttattgttcttactggtccgaatatgggtggtaaatcaactcttttgcgccaagtttgtcttaccattatattggctcagattggagcagatgttcctgcagaaaaccttgaactttctcttgttgaccgtatctttgttcgaatgggagcaagggatcatattatgtccggccaaagtacattcttggtggagctcatggaaactgcctcggtgctttcatcagctaccaagaattctctcgtggttttagatgagcttgggcggggtacatcgacttctgatggacaagctattgcggcctctgttctggaatatctagttcatcaggtgcagtgtctaggcttgttttctacacattaccataggttagctgtggaacacaaggatgcgaaggtatctctatgtcatatggcatgcgaggtaggcaagggagaaggaggtctggaggaagtgactttcctttatagattaactcctggtgcatgccccaaaagctatggtgtaaatgttgctcgattggcaggaatacctgcttcagtgcttcagagggctaacgagaagtcaaatgactttgaggccaattacgggaagcgacaccgtatgatcaaagataagcatgccagtgcacagagtgaggataagttttctgccatcagggatttattccgcattgtgaatgcatggccttgtcctgatggtcaggcagcgagtataaacatgctccgtgaagtgcagaagcttgccaaggtgcaggctgtggaaggttaagcgattgttgcatgacctgtttgcttaatggagatcgctccgcttcattttgctactttggtggcttctcctttttttggattggtgtcatgctgagagtgccgtgttggataggtttggtaaagctcgcccattgcagaatcgtcaaggttcaagcccacgtaaagaattgggccatgtcaacgtccacggattgtggctctctgattatcctgcgagaaaaccctaggattgttcgagcttggtggtggtgtcatggtgtgtccagtgccgaccggttgtatgattagagaggatagatggctcaaaatttaatctgagctgcgtagaaactaaggagattgtatctatgagtagagatggttcctaaagatgtataggaaaacggaaatcatgaactactcttacaagccaattcaggcttagcttct

SEQ ID NO: 43826 - DNA, 478 bp, Setaria italica
  Peptide Sequence Number=SeqID_109800
taaattacctacctagactagaccagtctcccaagggcgcttcccgactacctatatatgggctgggacagttatctctgctatcttcttcttcaggtaagtttgccatcccctcagatgcataagctcttgcctgttgacattttgattctgtggtgctgttcatcttttcaaatagagatttctcactgacctggcatgtttggcctcaattacttccagagattcaaacttgaatttgtgtaaattggtaccatattcattgattgccactgatgggctgtcattcaagtgcattttccatatgttctttatttctaaatgttgaaaggtgccaaagctcaaatgctccccccagaggggagatgatatattaaagcacagcccctggtcttcgctttcctcatcactactttccttctctttacccttcataccgctatcatattttttgcctttgccatttgaatataccccc

SEQ ID NO: 43827 - DNA, 1033 bp, Setaria italica
  Peptide Sequence Number=SeqID_109801
gccttggcagttccccttttaagaatgtaacttgcacaagcttcaatatcttgcatccgtcgaaaatcaagtaacaagttatgtttcttgaataacattaagtatacatgatccatcagccagaaacaaggaaaattagtaacaactaattaacaaatacaacccctcctaacgacggaacggttgctgcgtgccaccagctgcaaagttcggggatccagcatatgatgctccaggtccaccgtatggcacgccgcctcgtcgcccaggcacatagtatggtggcgcgcctgctgggtttatgtatccagcatgagctgcgtagttgaaggaacgtgagactgggttctggaaggatgggccaaagcttgagcctgatccccttgcagccttggcaggagggaaggggtaaggtccagctgcaccccgggatcgcttgttttggaatctgcttgggccacctggcttcttcctctccaccttctctttctcaagctttgctagtttcttccttataccatcgatgctaaacactgactgtagatggcaggattcaacacatctgatgacagacctgtatgcattgccctccaggttgtttgcctcttcaagtgcagaactggaatgtcttccacttttcaacacagcctgagccttgtcaccggaatcccgcatataagctttgaggagaggcacaggtggaaatttctcgagcaaatcagcctcatgggcaacatatatagcatctacagcattccctgacttgatgagttcctcaacaatatctccgaggctgtcctcgaatccaagcacgcatgcaatcctggcaagctccctcttccgcccattcgcaacaaacagcctcctcaagaattccccatcaaacttatccttcaatccaaatgctgctaccatctgcaggaatatctgcgcctctggttgctccggtgcacctttatgaccatctcccttcttcccctccttcgtctcctctcccactcccttctcttcctccagtcctgttttctctgcc

SEQ ID NO: 43828 - DNA, 444 bp, Setaria italica
  Peptide Sequence Number=SeqID_109802
taattttaatttgttaattaattacacttaagatacacttctccattctgcacaccatgcacaccttcacaattatcacggacacacaacaacaacaacaacacacgaattgcttgcaagatccaaacaattaaccaatagagcctctggttcacacgatccgcacgcactggtgtgcatcttcttccatctaagcagttagggctcattcatcttcttccgtcttggtgctgtcataggtgtgcaggacgttgccggcgacgtcgtagaagacgaggtgcgcctccgtcttgttcatctacgacgggcaagggttcctgtcgatgcagctgagcaagacggaggcggcacctcgtcttctacgacgtcgccggcaacgtcctgcacacctatgacagcaccaagacggaagaagatgaatgagccctaactgcttagatggaa

SEQ ID NO: 43829 - DNA, 394 bp, Setaria italica
  Peptide Sequence Number=SeqID_109803
tctaacccgtttaattgtagtactaactacctttagtcgtaaggtcttacttgtcttccggtattcgttgtctacccacaccttccccctccttgccctttcggtaaagccactagctaactacatgcctaattattcgactaagatcagagccatatgatgttgtggttgtactgttttcttgtatggttctccatgttccgattaaaacaagtgttcttgtaattaaacatatatagcaacataaataaagcatgattaacatgtttcatgattagcacatgaccaacccaatttaagcgactagcaagtctacccaacatgattaaacaggttttcaaggaataaggattaaaactaggtaagtccttaataggcgttccgtcaaatttat

SEQ ID NO: 43830 - DNA, 608 bp, Setaria italica
  Peptide Sequence Number=SeqID_109804
aaaagtcaccagacacacatcgaagaagctcgtcggggcgtcggctccccgccgcgcccgccgccggtgaggagaaccgccgcaacgccagcgagatgtcggagtaccaaaatgtcgttgggggaaggctgaagctgaagggaaaaacgctggatatcaaggaaggcggagtcaagaaaaagaagaagcagcagcaccgtgaggagtcgtctcagatcgggcacgatggacttcatgaaggtggaatctctgaattaccaactgatcataacaatgagctaactgaaggcgaaaagacgggagaggaggaagggaacccactccctgactacgaccacctcacaccagccgagcggcgttacatggaacagaagcagaagattgacatgcagaagatggccaaagtcgccaacaagtcgcacatagaccgcatccaggacttcaaccagtacctggcaaacctcagcgagcactacgacatcccaaaagttggtcctggctaacatggccaaaccgcggtgcttcacagaaacgattgtatgattggcctactaagccttctgttacaatgttatgtgctagcagtatgctgtaaaagcaatcgattg

SEQ ID NO: 43831 - DNA, 784 bp, Setaria italica
  Peptide Sequence Number=SeqID_109805
tcttctaggttcttacgggaaaacgtagtttcaagcgcagcaaattacgcctccgcacgcgcaccccctctcgatactcgatagccacagccgcgccttcttctccgtccgagctcagccgctctcttttcctctcctccgattcgtgctcgtccagctctggtgggttggggtacacggccggcgacgagcgagatgtctgaataccagaacgttgttgggggaaggctgaagctgaaggggaaagcactggatgtgaaggaaggtggagtcaagaaaaagaagaagaagaagcagcaccgtgaggagtcatctcagatcggccacgatgagcttcatgaaggggggagctctgaattgccaacagatcctaacaatgagctgactgaagctgacaagttgggggaggaggaagggaacccacaccctgactacgaccacctcacaccagccgagcgacgttacatggaacagaagcagaagattgacatgcagaagttggccaaagtctccaacaagtcgcacagggaccgcatccaggacttcaaccagtacctggcaaacctcagcgagcactacgacatcccaaaagttggtcctggctaatatggacaaactgccttgcttcacagaaacgattgtatgcttggcctattaagccttatattgccttatatgcgcacactatgtgttatcagtatgttgtaaaacaaatcgattgacactgaagacagtattttatttcaaaaccatgttccgagcattggccattttgagtaaaaaa

SEQ ID NO: 43832 - DNA, 500 bp, Setaria italica
  Peptide Sequence Number=SeqID_109806
tagaccgaacaaggacgtggaggaagggcataactcattgtcgccaccgaatgacggcgtgatgcttcagtggtgccgttcttatcagagctgagcacgccccagctgattctcaacgactcgagtgccttgaactcgcccaatttcaggaactcatcctccagcggcatggccattttgccgatgacgatgccgagcttcctgagcttctctaattttgtgagttcattcagatggcagaaatctctgctgtttgagttagcaaccacaaaccccttgagaatctcgagccgagtgagctggccgagccctttgggcatgctgacgagcaggtggcactccgacaggtccaggtactcgagcttatcgagcttagcgatgccctgcccgagttcttccagattgtggcaggcccggaggtccagcacctggaggtcccgcagcttgccgatggagtccggcagcgactcgatccttgagatgccacggaagctgatgta

SEQ ID NO: 43833 - DNA, 606 bp, Setaria italica
  Peptide Sequence Number=SeqID_109807
acatcacgcacagtactacaaatgttttggagcaacaatgctgctgtattaactatctttacgggttgtctgatgttctttcaattacatgttttatgctatctagataaagaaccttcttgtttgatatacctaagccaaaaaagcttcatgttttttttcctttggccaacttgacttattctagatcatcaaaaccaactgtacactttagctcgcaagagggccacactttatatgagtcactggtacactggatcttgtcgaatgaaatgaatcttaccatagttgtcgttatgaaccaattttcaaacttggacctgtaacttgtgcaagtttctctttcgtataggttgttgcatgtgcatatctttactcacacttgtacgcctagccccttttcagcattgtggatggagttgcaccttcataggtttgacttactctctgctccaagccagtcaaactctagaaagacaaaaatgcacacacataaaaactgtagcagagcttatggcattctgaccgcttgaactagtgaaatacagctcatttagtttgggttctcatttgtctatgttgtttccttaccactactgtgtgtat

SEQ ID NO: 43834 - DNA, 272 bp, Setaria italica
  Peptide Sequence Number=SeqID_109808
gctggcgttccaggatttccccgagctgccttggctgaatgataagggctactacgtgatcgaggagtttgtggccaacaggttggagatcgcgctgcggatgtcgtgggcggcagcggggggaggtggaggtggaggcaggaaggcggtgagagttgggaagggtgtgaaggagaaggctgggctcgctgcaaacgccttctggagggagaagggatatgtggattggtggatgaggctggagcctcggatgagagcaaggatcatggggg

SEQ ID NO: 43835 - DNA, 562 bp, Setaria italica
  Peptide Sequence Number=SeqID_109809
taagttaacttttactagacctggtaactcttgcacctctgatagtaagcacaacagaaacaaccatttggtaattggtactagaaaaaaaaatctgtttatatccaggtggtgcattcacttgatattcacatcttctgttgcctccttgatgtatccttttgcagttcagttatatacgaaagatcagagcaaggactccatgatcaatctcgagtgactttatatctgtttcttcacaaatctaggtggcttaaaaaagataaggaaggtgtcaatggaaaaattagcattcctcttcttccaaattttccaagccaacaagcttcatggtaagtgtgacactatccagggtttcatatacctcctcatatcttggatgcgacttatcctcaaccaggaacttatgcatcctgccatcgaactcaatgtaactgtacccagctgatttcttgtgatctttttccctcagtaacttccagacccgggcaacaccatcccatttgccacatgccgcatatatgtttgaaaggatgactagatttgctgtgttttgcggctc

SEQ ID NO: 43836 - DNA, 612 bp, Setaria italica
  Peptide Sequence Number=SeqID_109810
taagaaaaccaaagaactaaccaaatagacaaacctactagaaatacgacggttaagctggctgttcatcgagtctggtgagctccactgcgctgtacttggggtgctgtctcccatatccaaattcaagcctttggcagttgagaacacaccattgggaagacttgcactcgatgatctcccatttgtcatctctgcagcatctttcgtgcggaattcacaatgtttcagaggggatgacttccagagcttcgatatggcggactctttcttcttgggctgtttcatgtccgtcaggtacatgttgctcaagtcatcacacagcctgttggtctgcccaccctcggaatcgtttccactcgtccatgaaattctgtcaaagatcttgttgactgaaggttcgcttccatacggtgagtggcttgagccctgcatctcttcatggctcatggtctcccagctgctgccatcttctgtctcgctctcatcagaatggcttccatctgggaacaatttggctcgattttccagaaatatatcagctgtcggggtagcttcttggattttctgattcacaaatagcaaagctttgctttgggcaaggttcagtct

SEQ ID NO: 43837 - DNA, 636 bp, Setaria italica
  Peptide Sequence Number=SeqID_109811
gacctgttcttctcgcagcttactgtgcgggagacgctctcgcttgctgctgaactccagcttactgacacgtgggctcctgagaggaaggagcgctatgtaaatgatcttttgtttcgtctgggattggtcaattgtgctgattctattgttggtgatgcgaaagttcgaggtataagtgggggtgagaagaagcgcctctcactagcatgtgaactgattgctagtccttcagtcatctttgcagatgagccaactaacaggtcttgatgcattccaagcagaaaaggtcatggagactcttagacagcttgctgaggatgggcacactgttatctgctctatacatcagccaagaggttcagtctacggcaaatttgatgacattgtgctactttcagagggagaaattgtatacatggggcctgcaaaagaagaacctctaacgtacttcgcatcattagggtatcagtgtccagatcatatgaaccctgctgaattcttggctgatctcatttccgttgattatggctcagctgaaagcgtacagtcatcgcagaaaaggattgagaacctcattgaggccttttctaataaagctctggccactgaaggtaacggttcaattgcaaaacc

SEQ ID NO: 43838 - DNA, 2324 bp, Setaria italica
  Peptide Sequence Number=SeqID_109812
actttacgctttcgtgaggcagaaagacctgttcttctcgcagcttactgtgcgggagacgctctcgcttgctgctgaactccagcttactgacacgtgggctcctgagaggaaggagcgctatgtaaatgatcttttgtttcgtctgggattggtcaattgtgctgattctattgttggtgatgcgaaagttcgaggtataagtgggggtgagaagaagcgcctctcactagcatgtgaactgattgctagtccttcagtcatctttgcagatgagccaacaacaggtcttgatgcattccaagcagaaaaggtcatggagactcttagacagcttgctgaggatgggcacactgttatctgctctatacatcagccaagaggttcagtctacggcaaatttgatgacattgtgctactttcagaagacattgtatatatagaaaagcctgcaaaggaatagtaatttgggacggagggcgtatatggtcactatgtcattttcaattaacaacttgaacacttcgcatcattagggtatcagtgtccagatcatatgaaccctgctgaattcttggctgatctcatttccgttgattatggctcagctgaaagcgtacagtcatcgcagaaaaggattgagaacctcattgaggccttttctaataaagctctggccactgaaggtaacggttcaattgcaaaaccagaggaatctgaattttctgccaaagctgttcagaagtctagtatgaagcaaaggcgtggttggtggagacaatttcgtttgctttttaagcgagcatggatgcaggcttttcgtgatggaccaacaaacaaagtgagagcacgaatgtctgctgcttcagcagttatatttggatcagtgttctggcgaatggggaaatctcaaacatccatacaagaccggatgggactacttcaggtggctgccataaacacagcaatggctgcactgacaaagactctgggagttttcccgaaagaacggactatagttgacagagaacgtgcaaaaggttcctatgcgcttggaccatatctttcatccaagttgttggccgagattcccattggagcagcatttccgttgatatttggatcgattctctatccaatggctaaactacatcctacattttctagatttgccaaattctgtggtattgtgactgtagagtcatttgctgcatcagcaatgggtctcactgttggagcaatggctcctacaaccgaagctgcaatggctcttgggccatcccttatgactgtgtttattgtatttggaggatactatgttaaccctgacaatactccagtcatatttcgttggatcccaagaatatcactcattagatgggccttccaagggctttgcatcaatgagttcaagggtctgcaatttgagcaacaacattcctatgatattcaaactggtgaacaggccctggagaggttttcattaggagggatccgaattgcagacacgctagttgcacagggcaggattctaatgttctggtactggtcaacctaccttcttctgaagaaaaacagaccaaagtatcagccactcctgcccccactggaagatgatcaaaataaacagcaggtggaataagcatttcatcagagacttgtcctccaacaaataaaataagaaggaagctgcaccgtcctggcttctgcgcagcatctggccgcgcgagtatcccagcattatggacgaagcaatatacaatccgccgcccagacgggttttctacgttaacagttgaagtcagctcaatgatggggtctggggaggcggcagcagaggcgttgtttctgttcatgattgtccgggccatgccgatgccgaatatactatgtccagatcaccgtccatagtactagcactggtagtggtactagtttcttatggtgtgatccctccacgcgtcagcctccggttggctggagcgggaactaatcacgcgtttgccctcttaaactaggcttcgtctacctcaggacgcgtgaggccccccggtgcctataaatgcacgcccatctgggctcagaaactctcatcatcttcgtgtgattcttctctcgacccatcagctttgattggctcttcttcccttggtccatttctgtagtgtgatttgtgaagtgctttctttcttgcctgagttacaaaagatcagttcttgagctgattcaccatggctgcttcacccatctcgcttccgacgacgccggcggggctccggcacggggcgtgccacggcccagcgctgccggcgaggcggagatcg

SEQ ID NO: 43839 - DNA, 277 bp, Setaria italica
  Peptide Sequence Number=SeqID_109813
aatctaggctcttacttttcacaacatccaaagcgtgcttggcaatgtcattatacctgacataagatggtccccatcacatatgggataacaggatgctcccttctgtttagtctctgaaatacgcttaatttgaggataataaaatgagaatccatacctgtaacaataagtgagttcattaaagacatgaataagtttccacataaacagattttgaaatcccaaagaccacatccagttttttttttttttttgggggggggggtaggatgtt

SEQ ID NO: 43840 - DNA, 651 bp, Setaria italica
  Peptide Sequence Number=SeqID_109814
cggcgttgcgacaagcacaagcagcgtcttctttgaatggccgcgttgtgataagcacaacgcagtgtcttctttccttgactgttcctgttggatctttcattcttctttctgcatcgctggaaatagttgcagttagacaagtaacctgcgtcgttagtcgcttcgcgacaaagaacacaggtactctttgcagtttcccttcgtgtgcaggtttcagttcatcaatcacttgttcagcctgagtgcctgcagcagtcaagacaaacaacgggtaaagtatggccataagtccataacttgtaagaggagagaagaagaaaattggaaggacgcatggagcaccaaatccagcaaagaaggcccaatttgactcaaagaactcaagcctcttattcagactcactgcaaagaggttagttccacttgtactcgaagcagtagtaggcatagatcaatgacaggagcaggaagttcattgccttgccaaagtaggtacataaccaatcactgaaacctcaacaaagaaaatggtacaaaaagaaggattgaatagacatgttccccaatacctagcgcaaccctgtcaaatccttcaggctggtcttctggttcagttacgttgcgatcatccagtgctcgagtcgaatc

SEQ ID NO: 43841 - DNA, 1990 bp, Setaria italica
  misc_feature (1)..(30): n is a, c, g, or t
  Peptide Sequence Number=SeqID_109815
nnnnnnnnnnnnnnnnnnnnnnnnnnnnnnttttttttgtatgtccactggggaactttatttttttcccctggaagcttccatttagcagaaatttatgctacaacagtagtgttacagggtatttacagtgtggcgaagatgtacagcccactcctaattatggagaggcgaacagcttatggacaaacggcgttgcgacaagcacaaagcagcgtcttctttgaaatggccgcgttgtgataagcacaacgcagtgtcttctttccttgactgttcctgtggatctttcattcttctttctgcatcgctggaaatagttgcagtacctgcgtcgttagtcgcttcgcgacaaagaacacaggtactctttgcagtttcccttcgtgtgcaggtttcagttcatcaatcacttgttcagcctgagtgcctgcagcagtcaagacaaactggaaaagcaatgttgtcaagttggattcacagaatttagtgcatacatgttggatcgtaaaatacaaataacaagcactcctactattccttaaagaactcttatccaaagcatatataatctatgaagcaagagcttcactctggaaggaggaaatttcaatatctcaaagctcctgctccagggccacatgtggaatacagatagaacatcaaaataaggaacatacaattgacaaggagtgtccatttatgttatctttcttcttcccatacacaatgatatgccatgaagttcaggactaatattctagtgcacgtatggtgtaattactattgatcatactacgcaaggtctcatccagtacaagtttccagctaaatgaattcttctttttaagggaaaaacagcagggaaggcacatgctgttgtgtatacatattatatataaaaaagaaaaatgtacagatgcccaacggcagggagcaaagaaagtagaattatagagcaaggagacagaaaaaaggctcactagatctactgtacaaggtgtcatgccaactcatagtattggatcttaagggccttctaaatctgtatgtttgcagaagtatttcatccttgaattctttttatattaaaaaatggtattgggaaacagtgtgtttttgtgaatgagaaaactgcaacagcttatgagcaaatgtaccacttcctttcctagtgaaaaagcaaatggacaactgatgcaactttgtgtacaatctattagctaactccaaccataaaccaccagggagattctgacaattttcacagcgatgttatatattacaaaaatcaactgtgcatgtttgacaaaagaggaaaccatttcaaaatataacctttgaagattgcagacccttaatgttatcaaatgtaatgtaccaaaagagaacatataaaatgtcaaaaataagaactacaactgaaaagtgcttagcagtaccaacgggtaaagtatggccataagtccataacttgtaagaggagagaagaagaaaattggaaggacgcatggagcaccaaatccagcaaagaaggcccaatttgactcaaagaactcaagcctcttattcagactcactgcaaagaagttccacttgtactcgaagcagtagtaggcatagatcaatgacaggagcaggaagttcattgccttgccaaagtaaggtacataaccaatcactgaaacctcaacaaagaaaatggtcaaaagaaggattgaatagacatgttccccaatacctagcgcaaccctgtcaaatccttcaggctggtcttctggttcagttacgttgcgatcatccagtgctcgagtcgaatctaggctcttacttttcacaacatccaaagcgtgcttggcaatgtcattataccaaagtgtacttaatatgaagctgaagacataaagtggataaacccaaatacataaaaaaatactctaacaaaggaccaagcgtaagaatgaatagatagctgtggctgccgtgtgat

SEQ ID NO: 43842 - DNA, 356 bp, Setaria italica
  Peptide Sequence Number=SeqID_109816
gaacatcgtattcttgcagattcattaaattcatgtaattcgtaattcatgtttacattgtagaaatttaccacataatatgtgaggtgggtagagatgaaataacataaacaatacaatgaagcacaaatctgcaatacaatcatcctgtttcaaaataataaatagaaagacaatcaagggacgtttaggtgccgttgatacctaatccattactttgtctagttcagcatgaaaatatgctggattcaattgggactccagattccagatggaagctttacccccagcacaaggaccccatctttgagatttttccttgagagtgatgataggagatgacagcccacatgagg

SEQ ID NO: 43843 - DNA, 381 bp, Setaria italica
  Peptide Sequence Number=SeqID_109817
ggctgcatgaatgtacttgagagcacgaaggagttggtacaagaaaaaacggtagatgctctggagtcaggttatcatttgcattgatcacttgatgcaggtcagactccatgagctcaaaaacaacatagatgtctctgaactccctccgggtaggggggcaacataatgtgtttgatctggactatgtttgggtggcgaagcagccgaagaagcttgatttcccgcaaaatgcgagcagcatctgagacattctcaaaaacatcctttatcttcttgatcgcaactcgctcaccagtgtgagtatcaattgcagcagcaactactccatagcttcccttgccaatgacctcttggatctgaaactggctcgcctcccca

SEQ ID NO: 43844 - DNA, 330 bp, Setaria italica
  Peptide Sequence Number=SeqID_109818
ctcatccgcaatccccaaaacccacgcacgccggcgtcggccggagaaccttcccggcgcccgccgccatgccgccccctctccaggcccaccgcctcctcatctcccaccgacgcctccccactcccgctcgccgccggttcaccgccgtctcttccgtccaatccgctcccgccacgaccttagccccggggcccgccacatcgtccatcctctccatccgcgagtcgctgctctccggcgagaggaccgcggtggacatcacctccgagtacctctcccgcctccgccgcaccgagccgagcgtgcgcagcttcatccacgtcgcgg

SEQ ID NO: 43845 - DNA, 467 bp, Setaria italica
  Peptide Sequence Number=SeqID_109819
ttaagttactttagttaacttttttttttttcctttggttcttatttttggtttaacttactactactttccttttgggtaattattgttgtacaacgccttagacttcacaataccaggctaaaggaacagcaacaacgtctcaccatatttataaaatctcatctcagagcaaacgtgtattggcaacttgggaaggtattctcatgctctctattagcccaacaagtcaaatatttgacagcacacctcgatctacaggggctcaccaagtcagcaatgtttctttctccaccctccaaagaaattgattcaaactgatcacgccaaagccaccaagtgatccacttatataccattctaacatactagtagcggtacaatacaaggttatgcaccatcagcaaactgacagatgcagcagcagcaatagcattagcagccatatcagccaacaaaatcatgca

SEQ ID NO: 43846 - DNA, 1542 bp, Setaria italica
  Peptide Sequence Number=SeqID_109820
caacctcttgttgcaatgaataggaagattagagaaaaatcatgtaccccaaaatttgggtttgttgctcgctcttccaatagagggcatattatcgaaatagtgaggaaaagatgcaacaagattctaacagagcttgaagaaggtaattacctgccaaagaatttagcaaaggcaatgtcagtagcgaacctatataagaagcaaaagttgagaagtgtggatatttcacaatcagagttcttcccctttacaaaagaaacgatatcgttgcagaatgatatcctgaatgctctttggtcacttccaaaactcagacatgacaagcgaaaattgttgcgccccatcctggatcaagattctaaagttgaaaggacacatttaaaagcagccttgaggaactacttgacagattgtttgtttgaatgtgatgaaggtagtttaccagatgaggccctccgagccatagcctttataaatcggacttgtggacaccagcaagttgtgttaacagaaaagaggaaggaggtcgaggtagatgctgtcttgaacttaagcagtcatctccaagctttagcacattgttgggtagaagaatgctcatgtggtgaagagttgattagcttagggaatgatagctgcaatgaggataatgatttcatactttctgggaccaattacttcaatttaagctccgtgcagcagccgatgcaagagccttgttgttccagtaatataggcactgatgttgtgagagagtgttgttggagcgaaactgtcggagatatgcaaaatgtctctggagctgaggattctggtcccaaatcagaagagatgcttaggaaatcatgtctaagaactgaagattctggaggcattgggcattatagcggcaatgaagctgctggcagtgggatggggccctatgcagagaagtctgttaatgctagccacttgaaagagtcaagatgttcaaagattaatgggatctgcgatgaaacatcaatagtggcccataagcttattgggcagattttagataaatggttgctcgtgaatgaagtggatgaaccctctagaagccatcttggaagtggattggtttctcaaagtccccaagatgatgataaagagcctgtgaattcaacagagaatctagaaggtgacaatttttactcatgctgtggaacgtgtgttgcctaatttgccaaaaagttgcatagacaaagtcaagaggctaatgagctgagctagcaagcaccgtgagaacgacctgcaatggcacaaatggcccccataatttttcaattttgtttagaaaacgtgagcaggcctgtaagttctgtgattaggcagtaggcacttgtttcatgtgcctagtagtactttccatttgtggcaagcttttgggcatccagaatgctaccaggaggatttccgttacctgtacaagttattcctgcaacggaaattttgtacccggtcatcggaaatatgaatgtgaggctaaagtttctaagtctaattggtctaaaaaaaaaa

SEQ ID NO: 43847 - DNA, 1012 bp, Setaria italica
  Peptide Sequence Number=SeqID_109821
tacatcatttagtcacatagctaagcctgacattatccatccctcatgccattgctgtcctactctgccttgttaggtatatcactgcatgcaaccaaaactcacttgggaacttatgcagtggtggcatcccttgtctgtagcttgcattgtaaggttgtaggatcattgacattctatatgattggctgatggcatgtgctcgtatatgaagcttgacttgcagcaatgtaatttacctgtttatctgaaagagtagctgcagaagacaagtagtttagtgttggcactgttctctgtgatgagcaacaaagctgacgagtccaatctaatccattccattaaaccatggggacagtcgaggtatttgtctgagagaactagtgtggtttagttagtcacactagttctcatttgtctgcttttggtgttctttagctggcatgatgatgtaagatgtatttcgaatctatgtgattggagatacctcctactcattaccaatgatgtaattcgtcttttttttaaggatgtagaacttgtttgatgattttggaagtgaagaaacaattggtccgtgtttctgacaatctgttgatgatagaaactccaatttacttctgatcctagtaataatagaaactcttgatgttggcatgactttgtgaatggcgcacccatctgattttttctttaagcaacttgtgtattgtgcgggtcggttgactacttgtattgttggtctgtgatattcagtggaagaagaagcggatgaggcggctcaagaggaagcgccgaaagatgaggcagagatccaagtagacagatttgcctcgtccgtgctcgggattctgcagttcggttgcactttactgatcaattctagttttccgtagtataaagggttgtctctgaaaccattggtgagcagtgcgtgtctgttttgtaatgaatacaatgttcatctgaaattctgaataataaggttaaaaccgaaaacaaaaaaaaaaaa

SEQ ID NO: 43848 - DNA, 427 bp, Setaria italica
  Peptide Sequence Number=SeqID_109822
tctaagttcttcttctttccttccgttccccgtctacccccttccgtagtagggttgtagtcgtcgtagtaggggttcgtcgtccggtcgtagcgagctccccgccgccgcgatgagggccaagtggaagaagaagcggatgaggcggctcaagaggaagcgccgaaagatgaggcagagatccaagtagacagatttgcctcgtccgtgctcgggattgtgcagttcggttgcactttactgatcaattctagtcttgtaatgaatacaatgttgtctctgaaaccattggtgaccagtgcgtgtctgttttgtaatgaataccatattcagaatttcagatgaacattgtattcattagagaatagacacgctacttgtctcaccaatggtttcagagacaaccctttatactacggaaaactag

SEQ ID NO: 43849 - DNA, 523 bp, Setaria italica
  misc_feature (486)..(486): n is a, c, g, or t
  Peptide Sequence Number=SeqID_109823
catttggcgctccctgtatagagccgcggcgacggctagagctcgcgccgccgcgtctaagttctcgcaagtctctcttcgtccggcccccactccccctccgagagggtgagcgcgagaggggtcgcgccggcgagcgagctcccccgccgccgcgatgagggccaagtggaagaagaagcggatgaggcggctcaagaggaagcgccgaaagatgaggcagagatccaagtagacagatttgcctcgtccgtgctcgggattctgcagttcggttgcactttactgatcaattctagttttccgtagtataaagggttgtctctgaaaccattggtgagcagtgcgtgtctgttttgtaatgaatacaatgttcatctgaaattctgaatatggttccgcaacatttttcagagaataatcttcccaggacgtgtttgttacttattggctaatggtaacccgtttcttgatttagaaaaaaanaaaaactaaaaaagagaactgccaaggcacacagggg

SEQ ID NO: 43850 - DNA, 804 bp, Setaria italica
  misc_feature (8)..(8): n is a, c, g, or t
  Peptide Sequence Number=SeqID_109824
ggcagtcnctttttagtctttttttttgaattggatcaacatgaactcaatagtctcattcattataagttgcaacaatatattaatacacaacatgaacaccaaagcatccaaccttttattttcccagtatcgtaagaagcccattaagcattcacattacaacacggacaacatgggcaaatacactcttattacatcctaggatggaaactgttgaaaatttcacaacttgtaaactttagcaggaaaagggactaaccaaacacaagaaagtccttcctgaaccatgccatgggaaaagattaatcaccgcttcttcatgaacccttctgcaagctttaagtagtcacccataccacccccactctccccctccccattctttttgttcatgaaaccctgtgccagcttcaggtaatccccaataccaccaccctctgactcatcatcaccatgtttcttcttcttcttgtcatcttcctcgccatacttccctccactatggccaccagtcttcttgtacccctcctcttcttcatatcttccccctgaatgcccactaggcttcttcttgtagtcatcttcttcgtaccttcctccatgacccccaccacttgaagccccatagccatatccaccaccactaggcttcttgtacccatcatcttcctcatacctccctccaccatgaccaccacttggcttcttgctgtactcatcttcataccttcctccacccccatatccaccagcactaggcttcttcctataatcatcttcctcctcataccttccaccccc

SEQ ID NO: 43851 - DNA, 1009 bp, Setaria italica
  misc_feature (1001)..(1009): n is a, c, g, or t
  Peptide Sequence Number=SeqID_109825
acagctgcagatgatggtgctgggagcacagatgaaactccatctatcattgtgacagccctgcagtcatacaaagaagcactgatcaatgacgatgaagcaaaagctgccgagatagaggcctttttgctttctatagaggatgagaaaaactcctttatgaacaaaatcactgttttagatgcagaactggcaactcaacgagaacgtatcttgaggattagtgctgatttcgataatttcaggaaaaggacagaaaatgagaagctcaacatgatgtcaaatgtgcaaggggagcttatagagaactttttgcctgttcttgacaactttgaaagagcaaaatcacagataaaggtggaaacagagggagaggagaaaataaataatagctaccagagcatttataagcaatttattgagattctgaactcattgggtgttgaagatgttgaaactgttggcaaaccatttgatcctatgcttcacgaggctatcatgagagaagaatcaacggagtatgaagaggggatcatcctccaggaattcaggaagggtttcaaactcggggaaagactacttcgcccggcaatggtcaaggtatctgcaggaccaggcccagaaaagtctggggatgatgaggaccccacagaggtcgaagatagtgtggcacctcttaaggttgaagatgctgaagatgatgacggcgatgcggagtagcggtgcttaatctgtggatcaacaagaacaggtccagaaattttgatgcgtttttggagtgtgccaagcaggtgataggatagtaccgatttgtccaagctagagttaggccctcaaatatgctcttccttcctgttactgacttggggtgttggtactgccacaaatttgtgtttccaccggccgtggtcgatgttttgttcttgcacagaggaattttcttgattcattgatgcaacagcattattataaggagtaaattagctcacatttgtgattgnnnnnnnnn

SEQ ID NO: 43852 - DNA, 370 bp, Setaria italica
  Peptide Sequence Number=SeqID_109826
ttttttgttttgactttgacgtatgcacattattgaagccttgaaggttgatgttctagtgcttaataactaactgtacacggagtggttcaaaaagtgacaaaaaaataagcaaattacatgcacgcataatctaacatgcttgtgaggattgatccggatcgcctatcactaccagaaaacggagatttcgtgaggggcatgctattttcgtgagagtaattaacaactctcatgaaaattgtcatttcgtgaaggaaacactctcacgatgatgcagtcatgtcatagtgtatcccgatgatattgatagaaacactagaaatctgtagcctaatgataccgatagaaacactagtattgaaacttt

SEQ ID NO: 43853 - DNA, 266 bp, Setaria italica
  Peptide Sequence Number=SeqID_109827
tcctaccacaactgaactctccctctccccggcagcggccacttgtccctgccaattcacacgccacgccacgacgaaataatctagcctattcttcctccttgagcaacaaattctaggaagctagcgagctttgctatggcgagatcgatggagagcgtcgacggcaatggcggcgggctggtggtgacggagctcagccacatcaaggagctcgtgcggcagctggaggtgcacctcggcggctcgcacgacctctgcaggca

SEQ ID NO: 43854 - DNA, 371 bp, Setaria italica
  Peptide Sequence Number=SeqID_109828
aggaaatgggaatgtcagctttcacccattaccactccctcctggtgctttaagcccaatgcaaacaggtttcagcaatcagcctgctccaaaagtcgaaatgccctcagtggctggtcagtggcaaaaaggaaggcttctaggtagtggcacatttggctgtgtgtatgaagctaccaataggcacactggagctctctgtgcaatgaaagaagtcaacataattcctgatgatgctaaatctgctgagtccttgaagcagttagagcaggaaataagttcttaagccaatttaagcatgaaaacatagtgcagtattatgggagtgacattattgaagtacgtttttacatttacctggaatacgttca

SEQ ID NO: 43855 - DNA, 310 bp, Setaria italica
  misc_feature (294)..(294): n is a, c, g, or t
  Peptide Sequence Number=SeqID_109829
tcgcttgagcgccgcaccgcaccgcaccaatggcctcccccaacgccgacccgcctcaacaccacgtctcgacgccgccactcctcctcgccgtacgccacatccccttccccggcgtccaccggccacgcgcgctccccgcccccgacgtcctcacccctatcgcccgccgcctcgaggagctcgcgtccgcggccgccgcgcacccgctcctgaagccgctcttcgccgtccactcccacctctcttccttctcccagagcaggaggctgctggtggcggcacggcgggacncgctgctgtccgggga

SEQ ID NO: 43856 - DNA, 413 bp, Setaria italica
  Peptide Sequence Number=SeqID_109830
aagacgcaggtgttcaccacgtaccaggacaggcagaccacggtgagcatcaaggtgttcgagggcgagcggagcatgaccaaggacaaccggctcctcgccaagttcgacctcgccgggatcccaccggcgcccaggggcacgccacagatcgaggtgaccttcgaggtagacgccaacggcatcctccacgtgcaggcggcggacaagggcactggcaagtcggagaagatcaccatcacgagcgacgaccgccggctgagccaggaggagatcgaccggatggtgcgcacatcggaggagttcgcggaggaggacaagaaggtgagggagcgggtcgacgcgcgcaacaagctggagacgtacatctaccaggtcaagagcgccgtggacgacaccaagatgaccgagaa

SEQ ID NO: 43857 - DNA, 692 bp, Setaria italica
  Peptide Sequence Number=SeqID_109831
cagttggggaattaggtgtgcaagtagcacgttcaaaggatgccaccacttccgatggcgcggcatgtggaatgcctgaaggtccagttcttaggctatttggcaagagggtcgtggtgaataatttgcatcagcagcaaaactccaatactggggacctacaacatgtagcagacatggagctggacacttcagctgagacaccaactagtggaactgggaagttctcttcccatggtgcagaagaagcaaagacatggagcccgtggctgaccggtacacagcagcttatgtactatcttcctcaaaggggaggttctctccgtgcattctgcttgccaatttctcagctacgggaatggaagcatatcttacagagtattgaacccacaaacagttacctcagataagcaacagcaccaaccatctgaagctgcagactgcaagttcactagggcagaaggatcgtggacggaatcgatcacaacctccaataatgtgcctgaaacagctcctcagaattcagattctatagaatctacacaagtaaacaacaatgaagatgaagtgatacctgttccaggttcaagaaaatattccactgttccagcctaccttcgaggttttgtgccatacaagaagtgcgcagctcaaagcgtctaagtattgctgcagttcatgggtgccaggcg

SEQ ID NO: 43858 - DNA, 578 bp, Setaria italica
  Peptide Sequence Number=SeqID_109832
tcccgttctaaaaaaatattcagtagtgaatcaagcatgaattgtgatggtatgtcacacaagaaaaaaaaatcaatttattcattacttcatcacaattcaccattgtcggtgacgagcatatcgaccttggcgtagcccttggcttggtacttggcgtagcccttggcttggtactggttgatgatgaccgcgtcgaactccgccagcgcctaaaggacagccctagttttcgcatggcaggcgcggtaaggctccgacattcccaagacctcgtcatcgtcattgtctcccaaaggctcaaagggatccttgaggattaggtcaatgagctcctgcttcaacttcttctttgttgagaaatcgggaccctaaatttgacaccgactttctaaacgtagcatcaaaataatatgctaccacttcttttgtagactcttacccacactacttcaagaagaccttcgtactgaaaccaatgcggaagaccaactctctacaagaaaactcaaacttttattcactactcaatttgatacaagactcacttgcaaactctttgtgtagctatcctacta

SEQ ID NO: 43859 - DNA, 520 bp, Setaria italica
  misc_feature (485)..(485): n is a, c, g, or t
  misc_feature (504)..(504): n is a, c, g, or t
  Peptide Sequence Number=SeqID_109833
aagagtgtgcagagagtattaaacagagctagtaaagaatcgcaagaattatatcaaacttgtttaacttctactttacgatgttcaagatatctcttaaagcaaggtctagcttttcgtgggcatgatgaatcttcttcctctttgaacaaaggcaatcttctagagttgatagattttctaaaagacaacaacgaagaagtcaggaatgcctatgatcgaggtggcttaaattctaagatgacttctcctgatatccaaaaggattttgaaaggtgttgtgcagaagaaataactgaagcaattatggaagagattggtaacaggccattctctgttctcattgatgaatcacgtgatatatcagtaaaagagaaaatggctgttattttaaggtatgaattttcagtttctcggatacgagggcaaggatctgatggggcttcgaatatgagaggtgaatttaatggactgacaaaaaaagnttctagatgaaaacccgtntgcattctatgtccac

SEQ ID NO: 43860 - DNA, 1488 bp, Setaria italica
  Peptide Sequence Number=SeqID_109834
ttaccgtaacttactaagttagttagtaagttagttttgctcttgtacatgtcaaggagactacagctgatgcattaaaggaagcattgcttgcggttcttgacaggaacaaattatcagtttctcggatacgagggcaaggatctgatggggcttcgaatatgagaggtgaatttaatggactgcaaaaaaaagattctagatgaaaacccgtatgcattctatgtccactgttttgcccatcagttacagctagttgttgtttctattgcgaattgttgctcttctgtcaatgatttctttgagtatatatctttgattgtgaccacaacaagtacatcttgcaagagaagggacacactaattgacaactagcgtcaaaatattctgaggtctattgaaaatggcgaggtacctacaagaagaggcttgaatcaggaaactgtccttgctaggcctggggatactagatggggttcactcatgttactttggttcgcttgtctcaaatgtgggactcagtgataaaggtccttcaaatagttaatgaagatgcacgagtgccaaatcaagcagctggtttgatacaaaaaatggaatgctttgaatttgtttttattatggtgcttatgttaaagttgcttggcatcacaaatgagctctcacacgccttgcaaacaaaaggtttcaatattgttaatgctcttgagcttatccatgacgtaaaagctcaatttaacaccatgagagaaagtgactgggataacttatttgatgaggcaggacaattttgtgatgtgaatggtattcctattccaaatatggccgaggaaataccagtgaggggtcgttcaaggagggatggatttaccattactaatcttcatcattatcgtgttgggattttctatgttgttcttaataaaatatgtgctgagatgaatcatcggtttagtgaagtcacgacggagctattgatgtgcttttcttgtcttgatccaaagaactctttctctagttttgatgtcaacaagctggctcggcttgctgaactttatgatgaggatttctcaaatcatgatcgtggagtcataaggggacaattggagacctatattcttcatctcattgaattggtattgttggtgccggtgtcaacaacaactgttgaaagggctttctcagctatgaagactatcaagtctaaatctcacaataagattgctgatgattggttcaacaacttgatggtgtgctatattgagcgagaactattcaattcacttgatgaagctactattcttcggcggtttcaaaacttgaagagtcgcaagatgcagctgccttgtaactgtgctcatgtgcagccgtagttaccaaatagctaccaaatagcatttaggtttatcttttgtgtttcattatctaagtcttgaaattgtgtataaaaaatcattttaatattttaatttgagtctatcatggttt

SEQ ID NO: 43861 - DNA, 567 bp, Setaria italica
  Peptide Sequence Number=SeqID_109835
ccgaacccggcgacagcgttgctggcctgctctcccggttcaaggcgaacctcgaggcgctcaccggcgacggcgacagctccggccggaacgtcgtcacggcgttcaagctcaccaaggccgtggtgcgcaccgtgtggtggcacgtcgcggtgaccgcgttctacgcgctggtctacaacgtcgccacctacgtcggcccgtacctcatagactccctggtgcagtacctcaacggcgacgagaggtacgcgagccaggggcagctcctcgtcctcgtcttcatcgtcgccaaggtgctcgagtgcctgtcgcagcggcactggttcttccgcttacagcaggccgggatgcgcgcgcggtcggcgctcgtcgccgtcgtgtaccagaagagcctcgcgctttccggccaatcgaggcggagccgcaccaacggggagatgatcaacatcgtcagcgtcgacgccgaccgcgtcgacgccttcgcgtggtacatgcacgagatctggctgctgccgctgcaagtaggcatggcgatgttcatcctctactccaccctcgggctcg

SEQ ID NO: 43862 - DNA, 338 bp, Setaria italica
  Peptide Sequence Number=SeqID_109836
ttttggtttgtttcgtactaactaacaggcttcccaatagtcagtgttcctgttttatcaaatacaatgcagtctaccttatgtgcactctcaagagcttgcccacccttgatcaaaacgccttttgaggcaccgactccagttgcaaccattaccgcagttggagttgccagccctaaggcacaaggacgaaagcgaatcaccataactgatattccaaaactgaaagggcaagttgaaagctatccatggaagaaggtatccatgagtaagggtaaccatggaactcccagctaagaaccacacgagccaagtaagcaaagagagaacaataacaa

SEQ ID NO: 43863 - DNA, 608 bp, Setaria italica
  Peptide Sequence Number=SeqID_109837
ttcttttattttatttacttaaaattactaattctaaagtaattaattaaggtatgatccatatactagcatgacgcagctgcaggcaagctgcaagcggcacaggcaatggctgcaccgctgcagtgcgtacagcaatataaagcgcgagtgaatttacagatgtcgcgtctttagtcgtggaggatgtatttgttgatctactgtcaagggaattcatagggcgctctaagcggggggccgcgtctccacactatagcatggttctcccatcgagtaccgaacaggttgcgatatactgctaaacgctccctttttttttttgtaacgaactgaaagaaagccccttgcaaacaaaaacccggacacccgcacactggcaggatgaccaatgccggaacggaacctaggtcactgcatagtaaattacgcctacaaataagatcaaccggacattcatttagtcaaaacctcaacaggtaccagggggcatgataagtgacagatgcaaagggaaattacgagacaagtctattacaatactagctagcaattacaaattatttgcccaaacctttagactcactaaatagaacagactcctacta

SEQ ID NO: 43864 - DNA, 343 bp, Setaria italica
  Peptide Sequence Number=SeqID_109838
tcaaggcataatcgatgcaatgtctgaaattgatgaaagtttattagtaacagagggctgccgtactgcattactggccctccgttattatgggaatcaccatagatgcttctggtaatttcttattgatgaagtattatataagattcttgctgggcactgcagctctgaacatcaaacccaccagatgcgccatggtgatctgttcaacaaagattacaaagacattatgaatatgcatccctatgtatgggatattcttggatatctggcagtacattgcaacaatgagtatctgtctgtaagaaaacggaaaacagtttcttgcaggcactgatatctt

SEQ ID NO: 43865 - DNA, 483 bp, Setaria italica
  Peptide Sequence Number=SeqID_109839
ctgatggcaagcacagctggaacacagggctcgtcttctctgtctgcatgccatacaactcgacttctgagattgtcaatgctgttaatgaggtctgcgcagaaaggagggagatgctgctgagagaacatgccggtgattctgatgatcaagctgcaaataacggtgtgaactcagagatttcagtggccgatttggatcggcacatgtatagtgctggttgcccagatcctgatatcgtgatccggacttcaggtgagactcgactgagcaatttcctcctgtggcagacgacgtttagtcatttgcagaacccagaccccctgtggcctgaattctcgttcaggcaccttgtttgggctatattgcagtaccagagagcttacccttatctggagcagaacagaaatctggcaaagaagcaactgtgatcttatgttgtctgcaagagattatagctataacacatctagcttatatgcc

SEQ ID NO: 43866 - DNA, 1471 bp, Setaria italica
  Peptide Sequence Number=SeqID_109840
gcgccctccgccgcctcctctccctctccgcctcgcctgccggccaccgcctactcctcgtcctcctcgcggcggctccggccccgccgcctcgccgtctccccgcgcgcggaggcggggacggggaccggcaccggggacgtggaggcgctcagggccggggtgtccgtgtacaagccgcgctcctacgacgtgctcgtctccgacgccgcgcgctccctcgcctgcgccatcgacgacggcaagacccgcctcgagatcgagttcccgcctctgccaagcagcatctcttcttacaagggctcctcggatgagttcattgatgctaatatccagcttgctcttgttgttgcaaggaagcttaaagagctcaaggggaccagatcctgtatagtgtttcctgatcaacctgaaaagcgcagggcctcacagttgttcaagacagctatagacacgattgagggtgtaactgtcagttccctggatgatgtgcccaccgaccctgtcaacagcttcttcaaatcaataagaaatacactggattttgacttttcagatgacaatgaagatcgatggaaatctgatgaaccaccatcattatatatattcatcaatagcagcacacgtgaccttgcttctatagagaagtatgtggagaagttcgctacatctgttcccgcccttctatttaatcttgaattagatactttgcgatctgacttggggcttctgggattccccccaaaagatttacattaccggtttctttctcagttcaccccagtattttatatcaggcagcgtgactactccaagacaattgcagttactccgtacatagtcaattacagtggcgctgtattccgccaatacccaggcccttggcaggttatgctgaagcaggctgatggttcttatgcatgtgttgcagagagtgcagctcggttcactttaggacaggccaaagaagaactgttgagagttatcggtttacaagaagaagaaggaagctcacttgaatttctcagaagaggatacaagaatgctacatggtgggaagagaacgttgatcaggagacgtcggccgcatggcgaacttgagttgctgcacctgctggctggatattgatctgatcaacaacaaatggaaatagcaaacgagttcatgacttggtgtaaacgaaattacagaaacaaggcatgtacagtgtggcattgcctgtgctgcaactacgtgtatgttttcccttttttgtgactttatggtggttgagttttggctatgtaaaacctgaaggtgcaactgcaaaaatgcagggaactccaaacttgatttaaaatctcgtgactcgtgttttgggtgccatgtatatttctacagtagaacgtgtgcttgcaacaagacattcatgtatgttgttgctatgatgaacaaaaattaataaagcgcacattgtcaattagtagaaac

SEQ ID NO: 43867 - DNA, 240 bp, Setaria italica
  Peptide Sequence Number=SeqID_109841
tgtaaagggaatgtaaacctgcatctctaaccacccacctgccatcttcatctcgttccccgtttatctccttgcatcttgctggtcaggcctgctgttctctatctctgtcgtgtgcccactgctcactggggaaacagagcttccaggatgctcacagaccaatagcctagccttccagtatgctgtggccacgaggaaatggagcttcgaggaggaggtcgacctcgagcagaagcg

SEQ ID NO: 43868 - DNA, 498 bp, Setaria italica
  Peptide Sequence Number=SeqID_109842
cagcgcgtcggcacaggcgctcccgtctatctcgccgccgtcctcgagtacctggccgctgaggttcttgagctcgccgggaacgctgccagggacaacaagaagacccgcatcatcccccgccacgtgctcctggcgatccgcaacgacgaggagctcgggaggctgctcgccggagtcaccatcgcccacggcggcgtcctccccaacatcaacccggtcctgctgcccaagaagacggcagagaaggcgtccagcggcgggagcaaggaggccaagtcgccgaagaaggctgccaagtcccccaagaaggcttagagggtggactcagatccgatgtctggcgccgtttcctgttacctgaggtgtttaggttgtagatgcggggaaagtggtgcttggagatgaaccagtcttgtaacttatgatctgtgtttttcaatggaagaaatgcctagtttaaagttaaaaaaaaaaaaaaaaaaagagaactgggac

SEQ ID NO: 43869 - DNA, 483 bp, Setaria italica
  Peptide Sequence Number=SeqID_109843
aggaacctgtgattgttggaaatgagactagagaaactaatcaaccggtacagcagtttgttgtgtatgttggatttgagcatgagtgtccctatgggcatcgtttcttactgtcagagaaacatatgaaggagattgattcttcctgtttgcagtatcaaagaccatatgtaaacaaagaagcagaaagcaagcatgcacaaaagctgctcctaaatgcttccagtttgacagcatctacagtggacataaacaatggacgaaaaaacagcaagccactagaattatcagggcgaaatagccagcagcaatcaatgcaaataagggttaatgcagagacctcacagcctttcttcctttggtcttttctagtattcttactagtaattgtactaaaaggggggtagtctatttatttttcgtaagtctatttgtctagttttgttatttgttatttggttttggttagttaagttccttttt

SEQ ID NO: 43870 - DNA, 492 bp, Setaria italica
  Peptide Sequence Number=SeqID_109844
ggaaggagagcgaggaggcgggcgtggagaacgtgacggtggccggggcgtccttcgtcggcacggagaacgggctgcggatcaagacgtgggggcgggcggcggtggagggcgcgtacgtgcgcggcgtcgtcttcgagcacgcgttcatgcacgacgtgcgcaaccccatcatcatagatcagaactactgccccaaccacatatgcccccatcagagctcggcggtgaagatcagcgacgtgaggtacacggacatccggggctcgtcggcgtcgcaggtggcggtgaagttcgactgcagcgcgaccaacccgtgcagcgggatcggcctccgggacatcaagctcaccttggacggcggcaagccggcagaggcgacttgccagcacgccgacggcaaggcttcaggctatgtcgagcctccaagttgcttgtgacgcgttacatacaaaatcgtgtgacgtgaagcacttcgcacatacagatcgt

SEQ ID NO: 43871 - DNA, 333 bp, Setaria italica
  Peptide Sequence Number=SeqID_109845
tttttttaatttaaataatttacgaaattaaaattaaatcgtaaaaatgcctcttttccaacacaatgtttcttgaagactacagttgtgttttctgtacaaatacaaatgatgaagacatagaatacctcttcctccatcgtcaattcgcctcggcatgttggaactttattggtttgaacaatatgatctttaaccctcaacttttttcggtggaggcagtaatagcagtctttatcaaagagtttctgttggttatccatagggcaaaaaagaatatctccctagaattcaggaacgattacaatatctgttataatgttctctttcttt

SEQ ID NO: 43872 - DNA, 639 bp, Setaria italica
  Peptide Sequence Number=SeqID_109846
cgacgatgagattgtagtgttccacccagactacgacgacgaggacgaggacgaggacgaggaggcctttgaggaggacgacgactacgaggaaggggacggggaggcgaaggagaagggcgtgcccgccgtgatgcgttgcttcgacacggccaagatattcgccaaagccggggacggcggcaacggcgtggtggctttccgccgcgagaagtacgtgccgtacgggggcccctcgggcggcgacggcggccgcgggggcgacgtgtacgtgcaggtggacggggagatgaactcgctgctgccgttccgcaagtccgtgcacttccgcgccggccgcggcgcgcacggcatgggccagcagcaggctggcgccaagggcgaggacgtcgtgatcaaggtcccgccggggacggtggtgcggtcgtcggacgatggcgtggagctgctcgagctgatgaagcctgggcagcgcgcgctgctgcttccaggtgggcgcggcggccgcggcaatacggcgttcaagtccggcacaaacaaggtgcccaggatcgcagagaagggggagaagggcccagaaatgtggctagctttggagctaaagttggttgctgatgtggggattgtaggtgctccaaa

SEQ ID NO: 43873 - DNA, 462 bp, Setaria italica
  Peptide Sequence Number=SeqID_109847
taagacgaaacgatataaacgagggtgattagcgatcgacgccgcagccagaagctgttttcggcagatccttctctcttgacgttcaacagcgagcaataatctagtcaaaaagcgaaatcaacgacgggcattccgaacgggctcatttggcttaattattgcccataaacacgtggtcaacacaaacttagcatagctcagctggtaagtttttcttgtggtgtaacctgccagcagcgtttgatgctcatatttttcactcgatgagtgctgatgtagcagcaagtgtgtcagagtggatgatcacatccgctttcgttccttccatatataggtatgcactaagtaaaatatctaagaacttttagaagttctaggataatataacgagacgaggttaccttttctactaatacctttcaactttataatcttctcatcgatgattcagctactacc

SEQ ID NO: 43874 - DNA, 665 bp, Setaria italica
  Peptide Sequence Number=SeqID_109848
cgattgcaggagagtgggctgctgcactcattggaagctggcgcattttcctgaaagttatatatattgctaggcttctgaagtgagacatgcggcttcgatccggccgtcacttagtctccccactgacggtgccacagggaggtcaccatcaccgccagcgcctgcgcggctcagatgacaggatcaacagcctccctaaggacctgctcctccaagtgctcgtccgtctcaagcatgccgaaagagctgcatgcattggagcggtctgtcgtagctggcatggcctctggactgagcttcttgagttaacttttgggtttgtcaagccccgcatgttggaagctgtgctttccaaggtcacccgtcccaggcttgacctcctcaacatcactgtggaaggttaaacggggtgcccaggtctcattgcttctccgtgctgccacacggctggtgccggagaaactcatgttccgtgtgtggaaccacctcactttggaagacgatcccattgagctgccttgcttcgaccgcacatcctcccttgctcttgaagtgatgggtttccatcttttgcctccactgtccagagagttcactgcactcaagagcctttccctgagcgattgccgtggcatcgacatcagagccctgctccccctctc

SEQ ID NO: 43875 - DNA, 257 bp, Setaria italica
  Peptide Sequence Number=SeqID_109849
gatgagtagctccgtccccaccaaggccgaggaggtcgtcgtgcacgccggcgggtgccactgccgccgcgtgcggtggcgcgtcgaggcccccgcgagcgtcgtggcgtgggtctgcaactgctccaactgctccatgcgcgggaacacccacaccgtcgtcccggcctccaagttcaatctacaggccggctccgatgagttcatcaccacctacaccttcggcacgcacacggccaagcacaccttctgcaggg

SEQ ID NO: 43876 - DNA, 444 bp, Setaria italica
  Peptide Sequence Number=SeqID_109850
cacagacaaacccctgagaaggaagactcctctccccccgcccccgctccgctactcctttcttcctctcctctccgttcctgtcccggggtccgtcgccggcgtcgagaggaagggccgtcgggcgagctagtggacgcggcggctcgtgctgatttgggggtactggaggcgctgcaggctgtcggacgggcgatggggtgggcttcctgctgcaagcggtcggacggggccgaaccgggtaggaagaagaagaagaaggacacagcatggcgggttttctcgctgaaggaactccagttggcgacgaacaattttaattacgataacaagcttggcgagggtgggttcggcagcgtctactggggccagctctgggacggatcacagattgcagtaaaaaggctcaagagttggagcaacaaggctgaaactgaatttgct

SEQ ID NO: 43877 - DNA, 571 bp, Setaria italica
  Peptide Sequence Number=SeqID_109851
cggagccgggggatccggcggcgcgagggagctccgggtccacgccgccgctgctgccgatgatgtcgcggatccggcggcggaccggagcgggaggaggaagacaggccgggctgcctccgccgccggccccgcccagtagggcctcgtcctccggtcccgccggcggaaggtcggggtggtggggcgcgcgaatgcggcggtcattggtaattgtttacaaagtggacagtgatcagtgactgggatatgaaaatcctcgacgagtgcaaagtttttgaagatgacagtgcagcaccatcaattccttgcacaacgagcagtgttcccatgtggtaaatgccttacacaatgggacaatgcttcgccaaatggaagttctgtcaagacggactcggtggacgtcgtattatatcctctccttctgcagtgctcggatcttcagcattatcattctgtccagcgggattgatgaacacctgggggaaagaactacttgttggttgtgtaggtttgtatttctagtgaacaatagtaactaatagtaatttactaggggtaaaaagacaaa

SEQ ID NO: 43878 - DNA, 687 bp, Setaria italica
  Peptide Sequence Number=SeqID_109852
gtttatcccatcagcgcggttacaacttacaacacactctatctgatgatctaatgactaggccataggaaataaagccctacgggagattaattcctgcccccaagttatcatccgatccgatctgatctatgcatggttcatcatattggtgtaaggtgaatggggcatccgttcctgagcctaggaaacattgcccacttctcaaggctcgtgtcatcgtctgccatctcccatctgcaacaatatccacatcggttagtctgcctgaatgcattacaatccctcctactatatacccatagaatcatgtcttcacggatcggttaacaaacagattccaaacatttaattgactgccatcagtaatccagtatgtactagtacatgttttgaacctgaaggttgtaacaagccggtgcaggaagatgagcatcatgatcttggcgaggttcattcccaagcaggttctcccgcctgctccgaacaccaggaagctgtacggctgcttcacatcctccccctgttcaattaatccaatgcaagcatgtattgatctgtcaaaactcaaaaccaaactggttccaattgccttccttttagacgtacgttgaatcttgaaggatcaaacgtggtcgggttgtcgtaaatcgtcggatcgtagtgcagggacctcgcatcaatgtt

SEQ ID NO: 43879 - DNA, 248 bp, Setaria italica
  misc_feature (246)..(248): n is a, c, g, or t
  Peptide Sequence Number=SeqID_109853
taacaagcttatgtagctatacttaattgtaactacagcatcagtggctgtgttattggtctgatacgtagaatacaaatgggggtgtttgcaagttctgcttgcgtctgctctcctaggacaataagaatcacaccgttgcagaagatactgctgtcaaaagacacgtccagggtgtggcaatcaaagtcctcttcagttgtaagttgtaaaactaaaaaaaaaaaaaaaaaaaaaaaaaaaaannn

SEQ ID NO: 43880 - DNA, 1544 bp, Setaria italica
  Peptide Sequence Number=SeqID_109854
tttcgcagcaagcgcaccaaagccaaagaggcggctttgccttgcccctgaggccctgaccccctgcccgttgccttggtgccgcgcgccatggccggcaccaagagcaagtcgtcctccaaggccggctcgcccctcctcggcaagtacgagctcggccgcctcctgggccgcggcaccttcgccaaggtctaccacgcgcgctgcctcgcggggggcgaccccgtggccgtcaaggtgctcgacaagcccgagctgtccgccacgggcatggcggtgcgcgtcctgcgcgaggtctccgccatgcgccgcctccgccaccccaacgtgctccgcctccacgaggtgctcgccacgcgctccaaggtgtacctcgtcatggagctcgcccccggcggggacctcctgtcccggctggcctccctgccgacgcgcaggctccccgagcaagcggcgcggcgggtgttcctgcagctggtgtcggcgctcatctacagccacgcgcgcggggtgttccaccgcgacgtcaagccgcagaacgtgctcatcgacgccgacggcaacctcaaggtctccgacttcgggctcgccgcgctcccggactcgctccgcgacgacggccacctgcacacggcctgcggcaccccggctttcacggcccccgaggtgctccgccgcaaggcctacgacggcgccaaggccgacgcctggtcctgcggcgtcatcctcttcgtcctcctcgccggccacctccccttcgacgacgccaacatcgccgacatgtgccgcaaggcgcaccgccgcgagtacgtcgtcccgcggtgggtgtcgcagccggcgcgccgcctcgtgtcccgcctgctcgacccgaacccggcgacgcgcctcgccgtggcggagctcgccagccacccctggttcaagcgctcgctcagcgtcgactcgcagctcggcggcctcctgggcggccaggcggagcgcgagctggcgttccaggccccgccggcgctcaacgccttcgacatcatctccatgtccccggggctcgacctgtccgggctgttcggcgacaaccggcggacccgggagaagcggttcatgacgacggcgtcgccggagcagacggtggagcggctcgggcaggcgggcgcgaagctcggctacttcatggtggggaagaagggggcggagcgcctgccgctgggcggcctgtcggggctggtggcgatgtcgatggagatgttggaggtgtcggcggagctgatgctcgtggagctgaggctggaggccggcgacggcgacgaggccgaggcgttcgggtgggaggacctcagggtggagctcggcgacgtggtcacggcgtggcacgtctgcgaagaaggttgattcgcaggcggaaatgggaagctgcatgatcagaattctttcctaggatcgacggaaagtgtttgtatagcaagtgtacaatgtgaaaattgattaggacgcactgtaatgctggaaattaactagattggtagttcaatctaaagtgtgatgcttgt

SEQ ID NO: 43881 - DNA, 1045 bp, Setaria italica
  Peptide Sequence Number=SeqID_109855
cgcgacgccggccaggtccagggcgtccggcctggaggtggtgcccgcggggccgcgcccccgccaccggcgcacgtggaggccagccaggtgaagaaggaggaggtggagaccaaggtctcggcgtggcagacggcggaggtggccaagatcaacaaccgcttcaagcgggaggaggtggtcatcaacggatgggagaccgagcaggtggagaaggcatccgcctggctcaagaagatcgaggtaatccaaatccaatcaacgacagacgaaactctcccctatccttttttcccctcttgattgaaggaaatttatctaaaaaattgttgtcttctagattagtttctcatgactgcttgcaacgtggtatgaactttgcatcctaattccaaaattgcgagaaccgagtctgactctgacatagtatatctgctgtagcctgtagagcttaacaaagttcttcacgagcagaggaaaatagttaaacatgatatactaaatcaatttgccgattttgttgtcttgtactataaatcaaatctgtatatattcaacctcattatcgatgcagtaggcatctgtgagatttctgacggatagactgaaagcagaggggtacagctatcttcttcatacaactctgaatattcagtcctacaaggggaaaatatggatcgattttgctctcggaacttaatatccatcaaggcaaaagatcaaccaacttcaatcgtgtgtttcgtacatgcttagtcttattgtccctgaagttcactttgatctccgagtgaaggtgaccggcgtctgctaacaaaaatggctcgctttcactcacacatggatctccctgtgttgcgcagaggaagcttgacgagcagcgcgccaaggcgttggagaagacgcagaacgacatcgccaaggcgcggcgcaaggcggaggagaagcgggcgtcggcggaggccaagcggggcctcaagctggccaaggtgctggagctcgccaacttcatgaaggccgtcgggagggtgcccaccaagcgctt

SEQ ID NO: 43882 - DNA, 1312 bp, Setaria italica
  Peptide Sequence Number=SeqID_109856
ctttagctccccgccgccggcgacgacgacctccaccacatgttgcatgagcagcaggcaccggcagtagcagccgcagccgcagcagcgccgccgccagtgccatcggcgccgagcagtagccacgacgaggacggcgatgggggcgagggcgccgcgacgacgttccgcgacatccacccgctgacccccgacccgccgacgccactaccccccgcgcgcacgggctccgccgcgtcctgggacaccgccagccaccgctcctactcctccgaggagcagtacatgacgatgagccgcgagttcaccgccatggtcgccgccggggcgaccatgcagaccggccccaacgccaacagcggcggcgggtacgacaacggcgccgccgaccagctcaccagcatcggcgaggacgagctggaggagaccaacccgctggccatcgtgccggacagccaccccatcgcgacgccggccaggtccagggcgtccggcctggaggtggtgcccgcggggccgccgcccccgccaccggcgcacgtggaggccagccaggtgaagaaggaggaggtggagaccaaggtctcggcgtggcagacggcggaggtggccaagatcaacaaccgcttcaagcgggaggaggtggtcatcaacggatgggagaccgagcaggtggagaaggcatccgcctggctcaagaagatcgagaggaagcttgacgagcagcgcgccaaggcgttggagaagacgcagaacgacatcgccaaggcgcggcgcaaggcggaggagaagcgggcgtcggcggaggccaagcggggcctcaagctggccaaggtgctggagctcgccaacttcatgaaggccgtcgggagggtgcccaccaagcgctccttcttctagccgccgacccggcactcgcctcgccgtcccttcagttctccatcactaccggtgtgctcaacccctgctgctttgctgctgctccatcgaggcatcgatcatcatagctactagctagtagcaagcttgtgtgacgatgtatgccgctgcatccgagaaccctaattgtaaaaaagatttgtatacgatgtactgtcgccgcccatgtgatgcctgtgatccatcatccatcgcagcgcagagcggccgttcttctcttttttgtttggcttgtatatcgatccatccgtatggtgtttgagtgatctgtttgcgtaaccgtgcaaacattcagaaacccaacactgcaagagcttattacttgtgcagagaataggaccacatcactgcaataaccaaataccaaaaaaaa

SEQ ID NO: 43883 - DNA, 813 bp, Setaria italica
  Peptide Sequence Number=SeqID_109857
gtaagagttagaattggaaataggattagtatattgcaccaaactactggcaaggctaatagctagcatcagaacaatttctttattaatatagcttcggtaccagcaaatgcaaagtccttccaccatgctgttgtaatcttaaccaaaatataaatcaacatagatgaatggaagaggggattagccacccttgaatttttatggattcattgcatgatttactgacagcaaaactcaaatgacaggttgatttgaggggccgaataccgtcaatctgaagcaacttccaccacaatggaggccagaatcacagctgaatccattagagggcccatcattgtcagaaccatcacacgatctgaaaagctgagaatggagctgaagagctcaagcaggcagggtcctgcagtggacatggagagtcttgaggtaggcgaaggacacaaagccactgccgaaccaaccattaggaaccttgtccacgacctttgagcttctccggttcctcttccatcaggaacctcatcctcccaaacctgtcgatgcaggtgccgagcacccccacaagccgctgctacaccgtatccttgctagcctacggtcgctaccctcctgcaagctgcggctgtatctaattgggagaatggttggaggacagcttaccgacgagctgaggttagaagcacaattcggtggagggcctgccgacggcgttggtgcgctaagaatcgggcggccgaggacaagtgggagttctgtgcaatgggtgcacaaaccctatcaaactccgcacgtgtccccacatttcct

SEQ ID NO: 43884 - DNA, 723 bp, Setaria italica
  Peptide Sequence Number=SeqID_109858
taatttacaagaccttacaaccaatcatctaacagctttttggatgtctttcacaatgcaatcaaaactcaagcttgtttgttttgagcaatctgttcgaattaccttggagccaatatgatcatacaacagtaggttcaatccatgtagattaataagtctttgccagttttctaggcttctgaacagaatggatcagaaattactaccttcttaggtacgagttgcaggctaccatggtggtcgcaggtgatggcagtaacgttgcaagggaagccaccatggcacccatgtgcaaacgtcaatctgaagcaacttccaccacaatggaggccagaatcacagctgaatccattagagggcccatcattgtcagaaccatcacacgatctgaaaagctgagaatggagctgaagagctcaagcaggcagggtcctgcagtggacatggagagtcttgaggtaggcgaaggacacaaagccactgccgaaccaaccattaggaaccttgtccacgacctttgagcttctccggttcctcttccatcaggaacctcatcctcccaaacctgtcgatgcaggtgccgagcacccccacaagccgctgctacaccgtatccttgctagcctacggtcgctaccctcctgcaagctgcggcagcgacgagctgaggttagaagcacaattcggtggagggcctcgccgacggcgttggtgcgctaa

SEQ ID NO: 43885 - DNA, 398 bp, Setaria italica
  Peptide Sequence Number=SeqID_109859
cttaaatgtattacaccactttattttgttctgtgaacttcaaaccatgtatggatctcggagctgtagctacaaactggcccaaaatggcacggcttgcttcaagaacctcattgaccagacggtcgagagcaaaatcatccgagatggcgccaccatgactcgtgttgtgaatcagcacggacctgaagtaaacctgctccggatcagccccgatcagcgtgtccaacgccaacaagctcgctatgttgctcgccccatcgccgtcgccgtaaagcacttcgtcaggcttcgcgccgaaatcgccgtcccagtacaccagcttctccgccgtcggcacgccgataccgttgatgcaggtctattcggtctaaccgtaccggtacgtacttaactta

SEQ ID NO: 43886 - DNA, 1985 bp, Setaria italica
  misc_feature (1977)..(1977): n is a, c, g, or t
  Peptide Sequence Number=SeqID_109860
gtcaagccgcggttgcgacgcggtgggcgagccgaaccaagcggcgattgaggcgaaggggtggcgagcgtggcggccggagatgtcgcagaagaggcagccggaggagagcgacggcccgcgccgcggcggcggcggcggagaggctggcgggagctcgtcctcctcctccctgccttaccgccccggcgagccgaagcgcccgagggtcgccctccgcgatgtgatcacggaggtgatgcggaacaccagcattgagaagttcttcatggcgatcgagcccctcatccggagagtggtaaaagaagaaatcgagtcagcatttgcgaatcatacctctatgatggcaagaagtgtcacggacactctcccatgtccatcaaagaatttgaagctgcagttcatgactaaactttctcttccaatatttactggctctaagattgaaggagagggctccttaagtataaccattgctctagtcgacactttgacgagacaagttgtagcatcaggcaaggagtccttgatgaaggttgagattgtagttctagagggggattttgaaagtggagaagatgatgattggacagctcaagaattcaacaataacattgttaaagaaagggaaggtaaaaggcccttgatttctggagatgtgtatgttggccttattgatggcattggaacagtaggggaactttcattcacagataactccagttggacacggagcagaaagttcaggctaggtgcaagaactgaggatggttgtttcaacggcattagagtacgggaagcaaaaactgaatcatttgtggttaaggatcatcgaggagaattgtacaagaagcaccacccaccatttcttgatgatgaagtatggcgcctggagaaaattggcaaggatggtgcttttcacaagcgtttgaatagggagagcatctgtactgttaaggattttctcactttactacatcttgatggtcctaggcttcggaagatattaggtggcggcatgtcaacaaagatgtgggaggccaccgtggagcatgcagaaacctgtgttttaactgacaaagtgcattactactatccagacagtctaaacaaagctggtgttgtattcaatgtagttggagaagtaagagggttaatatctgataaatttgtttctgttgatgatcttactgaaaaggagaaggctgaagcacgtgtggctgtgaagcaagcatatgaacactggaagaatgtctttacatgtgacaacggaacgcttgtgggaaatccttcgcagctgttcaatatgagatctctgtctttgcatgaaaatcaatataacccgtttcccacgcaagtttctactgatgactttggtttgagccattcgcctctaccatcacctgacattttctcgatggaaccatcgagttccttagacccttgtgtactggagactgaggtgggcaatgaaaatcgatttcagtcaggggtgctcccagttggtggccacgaagtgccacaagagtctcaaacactggataagttctccaactctttggtttacgaggacagcaatcatcccccgttcagcgatatgtattatggccctgtagatcccagcatatcctttgacacacaggatcttggagctgcactgaaaggcttcattgcaaccatatcgaagcctaaggcttacagagggtggaggacactgtcttatgtgctaggatggattttctataccaagagaattgtagcaaggagaaagaaatatgggaaataaatgtttgatcgaggctgtgtctttgcgtagttaaatggtgaaatacaagtggagaggagatgatgtacattagattcgttggttgtcttctcttgttttgggtgcagttggtaagctctgctggtttcttgtgctgtatatgagcattttatcagctagggttccgatatgaggctgtaaatatcagagtnagttagtt

SEQ ID NO: 43887 - DNA, 250 bp, Setaria italica
  Peptide Sequence Number=SeqID_109861
tccttcgtcttcacgacttcacctgcttctccactccccgccgcgcccccgcccgcccaactgctcgtcttgcttagatccggcgcagcggcgctcccccacctctgctcaaggtgggcgggcggcggcgccgtgcgcagatcatgcaacggtaggactaacttgcaagatctgcagccgggatggttagcctattaggtgtgttccacccctttttgtgcttcgctttctctttgtatgctgtgcgcta

SEQ ID NO: 43888 - DNA, 1671 bp, Setaria italica
  Peptide Sequence Number=SeqID_109862
ccctctccttcgtcttcacgacttcacctgcttctccactccccgccgcgcccccgcccgcccaactgctcgtcttgcttagatccggcgcagcggcgctcccccacctctgctcaaggtgggcgggcggcggcgccgtgcgcagatcatgcaacggtaggactaacttgcaagatctgcagccgggatggttagcctattagttctcttatgaagattagtaaggggagaaagaagatgaggaacaaacagagaaaatcatctgccctcagttttgatgcaggacgtggacctttattatcttgtattacatggagcttggtgggttttggtctctttgtctgcttcctttcctttaaaaatcaagcagacggtgggcagaggcagacccgtacttattttagcgatctacctgcgaccagagaattagaggacattgaggaggatcatttccacctgccacctcctcacaaggtgaatcctcgtgcagtgaaaaggcgggggcctcgtaagaaactaaaggttatagatgattatctggaggagtcttcagcagtacatgcattgttcttccctgatcaaagaactgctgtggacccaacaaaagggggaaatgataccatgtacttttatcctggtagagtgtggctggacaccgatggaaatgccattcaagcccatggtggtggggttatgtatgatgacaagaccgccaaattctattggtatggagaaaacaaagatggaccgacataccaagctcacccaaaaggagcacaacgggttgacatcattggagtaagctgctactcgtcaaaggacctatggtcatggactcatgaaggaattgtgcttcctggagagcctactaatgtcacccacgatcttcataaatcgaaggtgcttgagagacctaaggtgatatataatgatcacactgggaaatatatcatgtggatgcacatagatgacgctaactataccaaagcttctgttggtgtggctgtcagcaactctccgactggaccttttacttacctttacagctttcgcccacatggttttgagagtagagatatgacggtcttcaaagatgatgatggaacggcttacctcttctactcttctcgtggcaatactgagctccacattagtccattgacagaggactatcttcacatcacagcagcaatgaagagaatactaataaggcgatttcgggaagctccggctgtcttcaagcaccaagaaacctactacatgatcacctctggttgctcaggctgggctcccaacagggcgttggcacatgctgcagactcgatcatggggccatgggagacactgggaaacccttgtgttggaggcaacaggttttaccggctgacaacattcttatctcaaagcacatttgtgcttcccctccctggtttgcctggtacatttatcttcatggcggataggtggagtccatcgaacttgagagactcccggtatgtttggcttcctctgttcattggagggctggcagatgaacctctagactacagttttggtttcccgttgtggtcaagggtgtcaatttattggcacaagaaatggcgcctcccagaagcttggagggtggggccgagacacgcaacaggggataggcaaggcacacaggggata

SEQ ID NO: 43889 - DNA, 1120 bp, Setaria italica
  Peptide Sequence Number=SeqID_109863
ttagccatccatagttggataaggttgtccacatcaatttgataatcctttggatacagagcacaaaaagcaaagcatggcttcatgtcagttggcaactcatcgtagctaagcttaagtataggcaaaattccagtctcatcagtgcatatgctgctctgtagcacatcctcccattcttccgtagtggtcttcttacgcaatatagaccccagagctttggctgccaatggcgacccagcacatctctctgcaatcggaccaaccaggtttacaagctcatcatctcgcttatgcaaactgaatgctcttgtttcaataatttcctgtatgaattccttgcccaaagttccgacatcaaggtatttcctttcgtgtgagatcccaactgtacctattaattgagctatttctgtgttacgggtggttgtcagtacggcactaccgacaccaccttgttccagacaggccttgaacttttcccacttgtccaagaagctcttctcatcccatacgtcatccaatacaagaaagtacctctttcctttaagctgttcctgaagctccttcagtgccttttcaagggaactctccgaagcgttacaaattttgttggcaagattacgcagattgaaatcatctgacacacacacccactttagtagctgaaaatgatccttgacttgaggatcgttgtagatgagctgagcgagggtggtcttgcccaaacctcccattccaacgatgggaagaaccttgagatcaccattggtagcttgatcgttgaccaatatctcaacaattttcttcctttcctcatgcctagatcggctaacaatatttttaggatcaacgatattggaatccgtctcacgcccctccttcagtgctggtgcctgctggtgttgatggctgttgaaccccaactcgttcatgtgatgcacaaggtccttgatggcgtcaacaacgcgttgaagcttgctggccatcctgatacggaatataacacggttgtgagtaggaaagagctttactccagccttgccaagcttggtgatgtgcccattcttcttggcttgacgacggagcgcctcatactcgaactcatcaaagatgtcga

SEQ ID NO: 43890 - DNA, 562 bp, Setaria italica
  misc_feature (523)..(523): n is a, c, g, or t
  misc_feature (534)..(534): n is a, c, g, or t
  Peptide Sequence Number=SeqID_109864
caagacaaggtattccacactacttaaatcaaggtctcttttctttacagcatggtccaaacgaagcggggtggaaacaaggatatcacagtgcatatctttgaaattccctgatttggagagatctttggtcatcaatttaatatagtacttccttcctttagccatcttcttgcattctctcacagtttgtgcggccaattctctcgttgggcaaagaatcacagctttaacaccacctttagaccctggcttaattttcataagaagtggaaacaagaaagccagtgtcttgccagaaccagtaggtgcacaagcaaagcattccctccccgaaagaagaatgggaatggcctgcctttgtattggtgtaggttcttgaaacccaagttttgacaagttcccaaccagataggaatcacacccatatcttgaaatcagttcttcaaagctctcaagtggtgctggaacattttgtccagcaatgtgaatatcaaacctcttccgaagaactgcagccctntcgatttcccnctcaatctccttccgccgccctcacaga

SEQ ID NO: 43891 - DNA, 615 bp, Setaria italica
  misc_feature (546)..(615): n is a, c, g, or t
  Peptide Sequence Number=SeqID_109865
cacagcacccttctctctcctccaaacttcctcccccttcctcgccgcctttgccctcccatcccctctccggttccgccatggcccagcccgccttcctctcctcgctccgctcccgcctccgctctgcgccaccaccgacgccgcaccatcgcctccagcccagccgcggttaccacgtcgagctcggcgctcgcgagaaagcgcttttggaggaggatgttgctttgaagaggttcaaatcttacaagaacggtgtgaaacaggtctccaagattgggaatgttctcactcttgctgttgtacttgcctgcagctatgagatcgctgtggtggcaactagcacaaaatgagggaaacgacatcgtttggcggcacagatctctgagaaagtgattcgtaaccaaacttctgtgtttgagacttttttgttgatcgttgctaccatgtaaaataaaataaactaggttgacaattttatgaataacattcttatttcatggcctagcttacttgtaaacaaagtgaacactgcattgttgaggnnnnnnnnnnnnnnnnnnnnnnnnnnnnnnnnnnnnnnnnnnnnnnnnnnnnnnnnnnnnnnnnnnnnnn

SEQ ID NO: 43892 - DNA, 492 bp, Setaria italica
  Peptide Sequence Number=SeqID_109866
gacggccgtggccgcgaagccgaaggagatggcgctggcgttggtggacgcgtcggcgccgcccctcatggacgaggccgccgcggcgtcgtccctggcggcgacgctgtcaccggcgggctccgagggggtgccgacgccagccatccccacccacggcctcgacctctgccccgcgaagctgctcatggctgtctagctgctgctgctgccgccgccgcgcccggtccttgggctcctcccggttcctgcgatgcgccgcggaggagctcgtgatcagcgcggcccccgtggctgggcactttagcgatacaacttccctgcagcagcaaaccgaaccgcctgagcctgcagaggacgagcaaaatggcctggttcaggttctcttcttaaatggaaggagatctgcctggggccatggtgaaggtgtggaattcaggcattgtgcaggggtcaagaggaagaggacggggagctgcaaaagcgaaaggt

SEQ ID NO: 43893 - DNA, 626 bp, Setaria italica
  Peptide Sequence Number=SeqID_109867
aagtggcgctccgagggtctggacccgctgtacgcgcaggcggtgcaggtccggcagccggacccggccacggggaagatgaagatcgccaacaagcagagcagccgcctggtctgggagacgtgcctcagcgagctcaagtcgctgggcaaagtggccgtgcggctcatcttcctccacgccaccgcgagggtgatcaggtgcccgccgatgatggcgcggtggctgaccgcctcgtccggcggcatcgcccgcgcgcaaaggctggtgttcgtggtggcgaactcgaagctggagaggaaggatttgacgaacgacgacgaccgggacgcggagatgctcacggatggggacgacgacatgatgctggctgatccgacgaccaccgccactgtggatcctcatcggtgaagcaaacgtgttaattgtttcgtcctcattgtggtgttagcatctgtagaatttgattgtcctaggttagattcttttgatcttgtttcgtctcgtggccgccgtgcttggtgcttgctccctcctgttgttttggtggggtggggagcaggaggggcgcatgagacgatggagatggagattgcttttgattatcaagtgtggttaaccaatca

SEQ ID NO: 43894 - DNA, 843 bp, Setaria italica
  Peptide Sequence Number=SeqID_109868
tagacttagttttagttagttaaccaaagttaacagacaaaggagagaaaagggacgaaaaattcactaactactaggaatatttttcttatctatgcttactctcgctttgacgataagggtaactggaacctaatatgagttcagaaaacagaatctgttctccgccggaggtttatggggtatcctttgacagttcgggtggtggggaagaagacaatcctatcttcctcagcttcttcccagctgcagattcatgagcgcacaattcaatcaaagtggcgtccagtttggaagacacagacagattgatgtttcatcctatgattatcaacatcctatggctctaaaaacagtgtagaaacttggtagataaggatgccttacctaaagcgcgttacgagatgatggaggaaaacagagacaacaacccgggcaagctcatagcctgggcacagacgaggtccaccaccaaagggagtgaacaaactggcacctaccgcgttctgaagtttattcttactctgccacctccaagggtcaaaggtccgagcattctcatagtgttcagtattaaggtgcacagctcggaatgaagcaaatattttgcagcccttcggaatagtgtagtctttaaaatgaatatcagtgtttgcacgcctgaataccccactaattaagttagcaacacgcagtgtttcatttatcacctgcaaaaaatgttaagtaccactgtgctcaaatgttccttttaaatgatatagcttttggcatggtatagtcaagaaaatagggattccaaaattattaacacattgtgtaaatggcatcgacttgtaatcg

SEQ ID NO: 43895 - DNA, 890 bp, Setaria italica
  Peptide Sequence Number=SeqID_109869
tccatcatctcgtaacgcgctttagctgggaagaagctgaggaagataggattgtcttcttccccaccacccgggcaagctcatagcctgggcacagacgaggtccaccaccaaagggagtgaacaactggcacctaccgcgttctgaagttttattcttactctgccacctccaagggtcaaaggtccgagcattctcatagtgttcagtattaaggtgcacagctcggaatgaagcaaatattttgcagcccttcggaataatgtagtctttaaaatgaatatcagtgtttgcacgcctgaataccccactaattaagttagcaacacgcagtgtttcatttatcacacattgtgtaaatggcatcgacttgtaatcgctccattccagaggttgggttttgtgtatttatgtctctgatattgtcatgctcttctttcggctgtttggttggataaccttggcacacttccaagtacagatgagaaaatccgctaggccacccttgagctgcgctagcgcagtgggtgtctcggtgaggaacttgacagcaagcgtcatgagcacggacgtcgtctcgtagccagccacaagcagagacaggcagaaatccaccatttcctccacggagaagctcccatcctctgcttcaagaagctcctccaccatgtccttcttctcccgcttcccctcgtcttccgagtccatggcacgatcctccaacttgaaatatcacaccttcagggaacgcaatgtgcatcggataaaataaattgtgggaacgaaaggcaaacgggcgagcaccttgagggcctgtccgtaggtggtgaaagggaggaggtgggcgaaggggaacgggatggagaagaagccgtcgatgagcttgacg

SEQ ID NO: 43896 - DNA, 1325 bp, Setaria italica
  Peptide Sequence Number=SeqID_109870
tagaacgaacttagcaacatctttgctagatctggggatagccaaataatacacggcaaaatgtaatctgtaaccagtacgcattcatagcagtttgggtcattttacaagcaaaacgagtttgctggctgctgtttgtgtaccaagttacagacaaaggagagaaaagggacgaaaaaattcactaactactaggaatatttttcttatctatgcttactctcgctttgacgataagggtaactggaacctaatatgagttcagaaaacagaatctgttctccgccggaggtttatggggtatcctttgacagttcgggtggtggggaagaagacaatcctatcttcctcagcttcttcccagctaaagcgcgttacgagatgatggaggaaaacagagacaacaacccgggcaagctcatagcctgggcacagacgaggtccaccaccaaagggagtgaacaaactggcacctaccgcgttctgaagtttattcttactctgccacctccaagggtcaaaggtccgagcattctcatagtgttcagtattaaggtgcacagctcggaatgaagcaaatattttgcagcccttcggaataatgtagtctttaaaatgaatatcagtgtttgcacgcctgaataccccactaattaagttagcaacacgcagtgtttcatttatcacacattgtgtaaatggcatcgacttgtaatcgctccattccagaggttggtttttgccttttatgtctctgatattgtcatgctcttccttgagctgcgctagcgcagtgggtgtctcggtgaggaacttgacagcaagcgtcatgagcacggacgtcgtctcgtagccagccacaagcagagacaggcagaaatccaccatttcctccacggagaagctcccatcctctgcttcaagaagctcctccaccatgtccttcttctcccgcttcccatcgtcttccgagtccatggcacgatcctccaacttgtcgtccatcctcttccctatcacctcccgcagagccccggccaccttcttcctcgccttgagggcctgtccgtaggtggtgaaagggaggaggtgggcgaaggggaacgggatggagaagaagccgtcgatgagcttgacgtactcacggcggacgctctcggtccacggcccgggctcgatactgacgagctgcttgacggtgaggttgaaggtgatcttcttcgcctcgtcgaggaggcgcacggtggcggcgggctcccagtcccgcatggtggcgaggatgaggcggtcggttcgtgggcgaggagcggcggcgaggcggggcg

SEQ ID NO: 43897 - DNA, 472 bp, Setaria italica
  Peptide Sequence Number=SeqID_109871
caacaaataccgcacttggcgtagtaggcgcgcagctcgggtgtgcagtcgaggatgaccttgtagcagccggcgtccctggcgatccccacaaggcggtgcacgatgcggagcccgagccccctgccgcgcgcggcggcatcgaccaccacgtcctcgacgtgcccgaccttgccgccgcctcgcaggaacttgcgctccacgaagaggcaccccgtggcgagaatcctccgctccggggcggaggggtcctcggccaccaggatgacgtggtcgtcgccttgagctgcgagctcggcgaagcgcatggcgaattcggccggagtgaggtccgggcaggtggagagctgggaaaggagatccacgaagcccctctcttggtcggacagctctaggcgacggatttggatgggatcgttgacatccccggcggcggcgacggcggattccggtgaggtggatgccatttcgg

SEQ ID NO: 43898 - DNA, 516 bp, Setaria italica
  Peptide Sequence Number=SeqID_109872
gaagaccgccggcaccgcctcgtccccgccgcccatccccggccgcgtcgagctcgtccatcatcttcctcagctcgaccggctgcttcccggcgtcccccgcccccgcatcccgggtaacttaaccaaagctccaacgagcccccgaaagaaaatgccgtaccttgagcgccgtgtcgatgtcgagcacctgcccgccgcatggcagctcctggtactgcggcattgtggcggcgcggcgacgactcccccggccaagcgcaccaccaccaccagcaccacggcgacggacggcgaggccctttttagcagcgcacaggccccggaggcgacggaatgatggggagaatcatggggagacttatcgccatcatcatcaccccgctcctttcttccactctttcttgaccggctgcttttcttggattttcgggttgctccgcaacagcagctagctaggcgcgggggagtcaaaaggcgggcgagcgaacagggcggcggagctgagagctttta

SEQ ID NO: 43899 - DNA, 239 bp, Setaria italica
  misc_feature (228)..(228): n is a, c, g, or t
  Peptide Sequence Number=SeqID_109873
cccaccaccaccacaagaaccgcgtcaacaccacctgccattgccgcgccgagctgagcctctagccgcgccaggagggcgcccgcctctgcctgcctgcctgcctgcctgcctgccgacatcttcggtagttgatggagttgcacaagtactggggcgtcggtggcaggcggtgcggcagctgcgaggcggcgccggcggcggtgcactgccgctcgtgccccgggngcgcgtcgcaa

SEQ ID NO: 43900 - DNA, 279 bp, Setaria italica
  Peptide Sequence Number=SeqID_109874
ctccagcaaccttagcaataggtaagttactcaacaattctgttcaatgtaaagtcacattcgttgaccgttaactgctgatccttttgctcatcctgctgttgctttcagcatttgtattgagacacccacttgtggcatcagctgtttttggtgctacaaaattatggcagctttatgaggttcttcaggcagctaggatccatctccctgaggaaattcttgttgagatcaatgatgttcatgcaagataccctaacccttgcccataaaattcct

SEQ ID NO: 43901 - DNA, 1263 bp, Setaria italica
  Peptide Sequence Number=SeqID_109875
gcccggcccgcagccatggccggaggaggcgagcagcagcggcggcggcggcgacggcgaggaggggtccggggcgtggacccgcgagcaggagaaggcgttcgagaacgcggtcgccacgatggcggaggacggggacgacggggacgcgcggtgggagaagttagcggaggccgtcgaggggaagacggcggacgaggtcaggcggcactacgagtttctggtggaggacgtcgagggcatcgactcgggacgcgtgccgctcccgacctacgcggctgacggcggcgccgaggaagggggcaccggcggcggtggtggcggagggaagaaggggtccgggggaggagggggccacggggagaaggggtcggcgaagtcggtcgagcaggagcgcaggaaggggatcgcctggacagaagatgagcacagattgtttcttcttggacttgaaaagtatggcaaaggtgactggcggagcatctcacggaactttgtgatctcaaggacgcctactcaagtagctagtcatgcacagaagtattttatccgcctgaactcaataaacagagagaggcggcgatcaagtatacatgacatcaccagcgtgaataatggagatgcatcagctgttcagggtccaatcacgggtcaaacaaatgggcaggctgcaaatcctgggaagccctctaagcaatctccacagccggcaaatgcacctccaggtgttgatgcttatggaacaacaattggacaaccagttggtgggccccttgtctcagcggttgggactcctgttacgcttcctgttcctgctccacctcatatggcctacggcatgcacaccccagttccaggagctgtagtacctggagccccagtaaacattgctccaatgccatatccaatgccacccccatcgtctcatgggtgaggtacatttcagagtgctgcatggcttcacaatctccctatatatgttgcttttagtggcagcgctaccatgttgcaataaagcaatatcaataaactcaatgtacattacaaactgttgttacatgtagcattttgaggacattgcagattatgttcttgttgcatgcaaactttccatgtacacctgccccaagtgtttcaggttggtgctgtcactatgtgtcgcggattcgcgatctggcagccttcaggatagatgttgtggacttgtgcttcagtcagtatctgtgaatttgtagttgtgtatctgctgcaacaacaggcaag

SEQ ID NO: 43902 - DNA, 1923 bp, Setaria italica
  Peptide Sequence Number=SeqID_109876
ccttttttttccctatacttgaacaccttagatgaagctgcggaagtatactagtatgtacaggttccttgcaatgctgagtaacgggtcttggagatgtaaccagacttctggccagtaccgctccaccattcctagacagcaatgcacgatggagaaatacctagtttttctacaaggggaaatgtaggcccttcaactttctttatcatcactggagcctcctttcaatgacttgtacagatacttcttcctcagcttgatggccaagcgtacacatctttttacattgattttcagcatattgtcgttgaacatcttgatcgcatcatcaattgagcgagtccctctaattatcctgtggcgattgattatcaagattgctgctacacagaaaataggcagttcgtcatctccgctctttgccagtacatttgcactcagttgcagcatcagctgaggccttgcccatatagtagcacctgacaagccacagagatgatttcttgtactggatctcgttccagggtggcaagccccacagatttcaccattcctgcgatgggatttcctggtttttggattttcttcttgtggaactgttcatccgatgcacttctttaacttcacatgataaatcagtcctcagatctacaagtaatggtccaagacagttctcttctaaacgcctgattgcttcttcatcaaaatcagcagcccacatcatctcccacatgatcagtgattcctcaaaagatagctctcgacgaaaaagcactagcagcatccggaaagcgaaatgaaggctttcagcaccaattgctgacaaatgttcaaataattcaacatctgtcagttccaagatcttccacaatgcttgcaactgcttcataactcccgttggtccctccatctggaaattttcgcgcatccttcttagaagcatctcaaagcaccaaaaggcatccgcgtcatcctcatatataacaacaaaaggtgatagcagatcgctcataccttgacagtatccagtggagggatcaacccacgcataaactgcaagtatatcagacattctagccatatttcttgattctccatagaaatcaagatggctatctgttctcacaacatcaacaacaattcgatgcagtgtccaaagccattcggaaactctatctttgtcagcaacagaaccgtttgatttggttccatcaactaaatctgcttctggtgcatcagatatcctcaaggagtctataatttccttactatagccatcatctaaccatctatcctgcttgtatgcatccgagtgaaagatggctgagtcactgttgctaggtcgaaacagatcattggagaatgaatttgactctataatgagatctatgttattattgatttggaagctgtgcatgcgttcatcacggagccttaacctatcttcaggaaccgagaaactacaatgactttcctcaactccattgctatcctcgccgccatttgcaaacaagtttgtaccagatagggaaggaaaatcggtgaaggtctcactgtcataccttggttcaccaatgtcatcataatctccagaatctctcaagcaattattcaccgctgtggaaggtaccataaaattggaagaatcatatacagagctatcattatgtatgttaaaaccaactggttcagctgatttactacagccttttcttttctgagactgaggtgtgccaccagacccacaattcaaattggaattttccactacattgcaaggttcttgatgtgaagtttgttggcttgtgctgacttcttctccactatcagtttctttgggcaaagtcctgacatccatcagcttcgatccaacagcatacgcaagctcacctgtaccaatgcttgcatgcatgctctggc

SEQ ID NO: 43903 - DNA, 1498 bp, Setaria italica
  Peptide Sequence Number=SeqID_109877
ctgagcttggagcaaatgctatgctggctgtatcaattgcagcttgcaaagctggtgctgctgaaaaagaggttcccctctacaagcatatagcagatcttgttggcaaaagcgctacaactcttcctgtccctgcaattacagtcattaatggtggaaagcatgctggaaatggtcttcccattcaagaaattatgatccttcctgttggtgcaaagaactttgaagaagcaatgcagatgggttccgagacctatcaccatctcaaggatattatcttggagaaatatggtgcggagagttgcaacattggagatcatggtggatttgctccaaatatttccagcatatctgaaggcctggatcttgtcatagcagcaatagaaagggctggatataatggaagaattaagttggcaattgatgtcgctgctactgatttttgtgtaggtaagaaatatgatctggagttcaagtcaaaaaagaaatcagggcagaacttcaaaactgcagatgatatgattgaaatatatagccagctttgttcagaatacccacttgtctccattgagcagccctttgacaaagatgactgggagcactcaaaaaagttgaccacgctagagctatgccaggttgcaggggacgacttattgatgtctgatcccgaacgcattaagcgggcagttaatgagtacacttgcaacgctcttgttctgaaggtaaaccaagtgggcactgtcactgaggccatagaggtggtgaagcaggcaaaggatgcacattggggtgtgatggtgtcacataggtctggggacactgaagattctttcgtcgcagaccttgctgttggtgctgcagccggacagatcaaagccggtgccccctgccgtggagagtgtctcactaaatacaaccagctgcttagaatagaggaagaacttggtaatgaaggcgtctatgcaggggataattggagaactgccagcacgagctgacctgtggtgtcgatgagatgtggggaaaattggagatttctacctgccttcatgtgaaagtgaaaccacttagcctttcattgttttcttgtaattgtgtttattcttcctcggcaaaggtgtggaagcagggctgggaaaatacacgattttgtactacatgacgggacggcaaaagtggggagctgggaacgcactggtgctggtggggctttacatttttttgtgtccgttctactcggatttgtttcatttctgtatagtctggactataaacatgagtacagaaatcttgagaaataggaatgcgttgcactttagtataactggtccattcttgccttgtgtagttgaccatcctcaggattatgatgctattaggtagttctcacgtctgtggcgtgtcaatttacatttacactttgtctggcttttttatagttttcaaaaaagtttgtaaaatgatcgaaattggttgcatgagcaactttgaagccgtg

SEQ ID NO: 43904 - DNA, 415 bp, Setaria italica
  Peptide Sequence Number=SeqID_109878
tggggtaagatatttgttttctgtttccccttcctctcgggcgtgatgagctgtggcggcacggtagagacaaaactgggacatggagagggaatatctgcaagagagttttgggaagaacaagtttgcgggaagagatatagagaacaaaggaatcgacatggattgtgccatgactcctatttgcttctcataattgggggaagaactaaccgagtaacagctcatgcatgcacatggaatcttgggagataaactgattttgttgtttcttgacaaacatatggacatatgttcctttttaaaattctttataagaaaacagctggtagaagagtttgaatttttcagccggttagtctgattaaaacgtgagataatttgagaagaacacagaaaagcaaaaggaaaaaaa

SEQ ID NO: 43905 - DNA, 415 bp, Setaria italica
  Peptide Sequence Number=SeqID_109879
tcaaagcagttgacatggtcctcttcataaagaagacagcgctgcccctggcgatagactccttcatgtctttctcgcggtgcggctcagctctagagctgctcaaggtgtgcaccaatgtcctcgaggaggtggagaagtcctatgcatcgcggatgcaggactggaaccgtggatcgctgtgctggaggaagaagctgcagccaaaccatcgagttgacgagtttgtctggcaggaggtgacgctgctcaaggcgacactgctggagacgagggcaaagctgctgctccgcggggggctgttcgacactggtgaggagctgtgcaggacctgcatcagcatccggaccgtcatgctcggccatggccatgcccagacgctagctgcccaggagacgctggcgaagctggtcag

SEQ ID NO: 43906 - DNA, 424 bp, Setaria italica
  Peptide Sequence Number=SeqID_109880
acaatcagaaggtacctgttcctatgagcatcctttggcaggcacctcagtacttgctggtcggtgtgggggaggtgttcacatcaattggtcaagctgagtttttctacaatcagtcaccagacgccatgagaagcctatgctcagcttttgctcttgttaccgtgtcactcgggagttatctcagctcattcatcttgaccctggtgtcatatttcactactcgaaatggccaattggggtggattcctgataacttaaatgaaggacatcttgaccgttttttctggctgataaccggactcagctctctgaatctcctggttttcctatattatgcccaacaatacaagtgcaagagagcttctgttgcttagagtcctgggtttccttttcctctttgctatttatttgtacagaaaag

SEQ ID NO: 43907 - DNA, 1349 bp, Setaria italica
  Peptide Sequence Number=SeqID_109881
tggcaggaacttgttatctcacaccacttattggagcaaccttagcagattcgtactggggaaagtacagaactattgctgttttctccactatttactttcttgggatggcagcattgacactttcagcatcagttccttctttcatgccccctcaatgtgttggatctgtttgtccacaaccgaccttacctcagtatcttatatactttgttggactatacatgattgctttgggagctggaggtatcaagccatgtgtttcatcctttggtgctgaccaatttgatgatactgatccagttgagaaaacaaagaaaggcgctttcttcaattggttttatttctgcataaatattggatctttgatctctggcactgttcttatttgggtgcaagagaactatggatacggcattggatttgggatccctacttttttcattgccttagctattggaagcttttttttaggttcagagatatatagatttcagataccaggaggaagcccacttacaagagcatgtcaggtagttgtggcagccactcgcaagcgaaaaatggatttgcctgttgatggttctcttctctatgagctcgatggcaagagttcagctatcgaggggagtcgtaagctggagcatagtagtgaattcagtttccttgacaaagctgcggtcattttgtggaatgaacgtgatggttatcatgatccatggagactttgcacagtcacacaagttgaagagcttaaaatattactgaggatgtttccaatctggacaacaggcattgtgttcttcaccgtatgtgctcaaaactcatcaatgttcatagaacagggtatggccctcgataaccaaatcggttctttcaagattccaccagccactctgtcatccttagatgttatcagtgttgttgtttgggttccaatttatgagagattagttgtgcccatagccaggagattcactggaaaagagagaggtttctctgagcttcaacgaatgggaatcggcttatttgtgtctacaatcgcagtggcagttgcagcattagttgagatcaagcgtctgcaggtcgcaagggcagagggtatggtccatcagaaggtacctgttcctatgagcatcctttggcaggcacctcagtacttgctggtcggtgtgggggaggtgttcacatcaattggtcaagctgagtttttctacaatcagtcaccagacgccatgagaagcctatgctcagcttttgctcttgttaccgtgtcactcgggagttattcttctagtcttctatttcttattctttgttaaccctttaggtttaagttttaactttaa

SEQ ID NO: 43908 - DNA, 359 bp, Setaria italica
  misc_feature (239)..(239): n is a, c, g, or t
  misc_feature (334)..(334): n is a, c, g, or t
  Peptide Sequence Number=SeqID_109882
gccggcctgttcatcactgccactccgggtccggaggtgatcagctcacccgcgcagccgttgttggcggaggccgatcagaggccgcccgtccctccgtccgggccgtccgaccagttcaacggcgatgagaacggcgagaagccatcgttgggcggcaccggcggccgccgcctcgtcgagggcccgtgacgcggcctggggcgcgcggtgggttcttgtttgtcacggcaaaaagngcgtgccttgtggagggcagagatctatctcaaggctttagctagctatcgacttcgtctctctgcgagtagtgattccgtccacaaggcacgcnctttttgccgtgacaaacagaaccc

SEQ ID NO: 43909 - DNA, 444 bp, Setaria italica
  Peptide Sequence Number=SeqID_109883
gttgcccattgcttaccccaccagcatcttatagccaggtgataacaagagagcaagttggggctgcactacggaggcttgtacagaatgataatttcatcgatatggtctaccgggagatggttaagagaccgcacccttgaagagattgttgtgtctgcggcagccgtttaggtgcctcatgtgtagccttttgtcaaagcctttgttgactggtctgcgaaatgtagaggctgagttttaacagcactgtttgagttgtaggttgatatatgaaatgtagaggccgagggggttttaaacaccgtgcttttgtagtttgagctgtaacgtgagccgttctaacttctaaaggcatgccaatgttccataacatacaggtagcccaggccagttgctgcctaacatctgaagtgaacttttgatcgagtatcttgaataatt

SEQ ID NO: 43910 - DNA, 459 bp, Setaria italica
  Peptide Sequence Number=SeqID_109884
tagagagctatgttggtacatccagatttttggtaagatcaatttgcgagtaatgcaacccttatttagatgacataggcagtaacttgcccatggtttggaaaacatcaggaagtaacttatcatagaattacatgagacataacataacttgtccctgttttgaaacgcattggaagtagcttatcaattaattgtataagattgaaagtaaccttttgtccctcttctgaaacatggaggaggaagtaactttttactagttcacatgacataggaagaaacttatggtcactagtaggaagtactgacaggaagtagctcaggctcactagcttcaggaagtaacacaggctcattattgaggatgtaactcgagatcactagcttcaggaagtagctcgggctcattagcttcaggaggtaactcaggctcgactagcttctttcagcaactta

SEQ ID NO: 43911 - DNA, 258 bp, Setaria italica
  Peptide Sequence Number=SeqID_109885
cgccggcccgagcgcttgtttcctccaactcgccgccgacgacgacgtgacgttcgcggaggagcaagttcaggagcagccaccgttcgaagaggagtacctccagtttgccgaggaagaagcttgtgacgacatggagttcttcgacgacttcgaggagttttaggcaggcgttcaccagtcaagcctgtggagaagctgcgctatgtgtgtgtgttaagttatcggtgaacgattaaagccttcgtgtctatcaca

SEQ ID NO: 43912 - DNA, 511 bp, Setaria italica
  Peptide Sequence Number=SeqID_109886
tggcaacagctgatgcaatatcatgcaccacacccagttaactaaaactaaaagccagtccaaaatctaactgcaaaatagattgttcaattccttgcaggcttaagtctgccgcgctttcctctgcggcctccttgctgggccagcatcttcaactttgttaggcgagctgctcttcgcctcagttcgttgcatcttctgccccctcctcttccctggttttgcctctatcttatcatctgcttcttcgtcatcgtcctcatgaccagcttccttcaacgagcccttggcggtcttctctatctgcttccttcccctctttgctggttttgcatcttcctcagcctcttgatcctgatcagcagcttcatcgcccacaatactgccagcatttttagttgagacattagcttcccttgccgattgcttccttccgcgctttgctggtttccctcttcctcctcatcgccatcatcactagcattagcagctttgcctgacagtacctttt

SEQ ID NO: 43913 - DNA, 737 bp, Setaria italica
  Peptide Sequence Number=SeqID_109887
gaaggtgatgcaaacaccgcctttttccacccgcaggctcgattcagaaagaagaagaattttattgccaagttacaagttggcgactggctggctacttcccaggaagacaagcaagaagcagtcctggacttttatgataaattgcttggtacagcagaggatcggaatttttcaattgatcttgatgagattggcttacagcctagggatctctctcctcttgacgaccctttcactgaggatgaaatctgggcaaccattagggatttgccccttgataaagcgccgggaccagatggtttactggagtattatcaaaggggatttgctggccgcatttcatgctatccatcaaggtcatgtgttcagatttagactgcttaattctgcattcatcacacttctccccagaaagatggatgctctgcatgtaaaaggattatcggcctatcagcttgattcacagttttgccaaattagtaacaaaagttctagccaaccggcttgcccctctactgccttcaatggtttccaccaatcagagcgcctttgtcaggggaagaaatatccatgacaacttcctgtttgtccaacaaatggtgaaatccttgcacatgaagaaagaggctcatattctcctcaagctggatatttctaaagcattcaactcggtttcatgttcctttctcctggaggttatgaggcagttgggttttggacagagatggcgggac

SEQ ID NO: 43914 - DNA, 213 bp, Setaria italica
  Peptide Sequence Number=SeqID_109888
caacctatgggcttttatttcaaaatgcggtttacagtttacatgccacaaatgacattaactgttattcactggaacaattcacgcagcgccattgttgatccacccaatggagacatgacatcttatcaatctgtagtattcgtaaagtataaactggtagcttgttgatagcgttcaatttcttggaacgcatcgagcaacatctgccat

SEQ ID NO: 43915 - DNA, 736 bp, Setaria italica
  Peptide Sequence Number=SeqID_109889
ctgcgtgaattgttccagtgaataacagttaatgtcatttgtggcacattaactgttattcgcatttagaatgcttggtaacgccttgcttccatcaacctatggagacatgacatcttatcaatctgtagtattcgtaaagtataaactggtagcttgttgatagcgttcaatttcttggaacgcatcgagcaacatctgccatgagttaaagtactcaagagcatacacccttgcatggagtgtccttgcagcggcaaacgggcctccctgaaagttcccatccattaaacccacgttctaggaccatgatgttctttacccctgaatcttccttggcctctgatagatagtcatggaacatctgtgcacaggatgggccccgcaccttgctgagtgcgcagtggaagacaagggtctccttggccccggtcgcctgggcgaggtcgggcatccgctccgtgaaggtgtcgctggcgtagtggtgggagccggcgatgtggccgtcgtagctcctctcctcgtccctgacgtcgacgatggcgacgcggggatcgcgggccatggacaccagctgcgccgccgacacgtaggacacgcccctccgagccattgtccggccgccggaactggggaacccccggcgccggaggagattggggggcggcgtcgcggcgaagggaagggaaaggggagggggaggttcttttggttggcaaatttttttttacacatg

SEQ ID NO: 43916 - DNA, 586 bp, Setaria italica
  Peptide Sequence Number=SeqID_109890
tactacaacccctccaacttttggccgtgccatcccacgacctgcagactcgatcatcaccactactacacctaggacctgacgaaaacaaaggagagccattgcatgcgagcatgcagcaaatggcatgtacatggacgcgctcaacgtggctaatgatgagctcctttattctagctaagccatacagatcagccgagcctggattatccaataatttaaattacattcatgctcggattagttcaaccggacgatgccaattctgtcacgaagttcacagaacctcgctcgccccaatgacttcgtcagaacatcttcgagctgctcttgagtgctcacatagtccaggcaaatcctcccatcctccacgcatttacggatgtaatggaacttaacatcaatgtgcttacttctgtcgtgaagaacaggattcttgctaagggcaatagctaactgattatccatcctcagaacaggtagctggactttgacaccaccaatgtcgcccagcagcctggtaagccacaggtctgacacgcccccatgcaccggccatgtattcagcttcaacaatagtaagaaa

SEQ ID NO: 43917 - DNA, 468 bp, Setaria italica
  Peptide Sequence Number=SeqID_109891
ttaagactagaaaagaagattcaattcaggcattgtcattgctctaaactcgacggcgagcaggttatgtcaataataattagatgaatctgacaagcaactacaacggaggacaggtagaaccggatatgaagcacaagtacgggagtctctatctgttgcacaatgttcagctaactgactcaaatctaggttttagtcctagagcatttaaagggttagtagatatctcaggaccgttcctctttactatacatgcacgcacaaagatcggcggcattaacgggcgtctccacagcagcagcacttgaagcagctcctgcaggagcagcagctgccgcaggagaagcaggaagggcagcacctgaagaaacgggatgtgaagcagttcctcagcccacagcagccgcagctgaagttgcagctggggcaggttggtttgcggactcgaatgcggcagcagcagtt

SEQ ID NO: 43918 - DNA, 367 bp, Setaria italica
  Peptide Sequence Number=SeqID_109892
tgtgtcaagtttatgatggcaaaattccaaacgcgtaaaacttattatttaccacggaaaattgagttctggaaaaaaaaagttaatagattgacctgccttattgtcagatcgttcaagctgaagacggatatgtcctcgggcatgacatagagcggagaaaatttgatttaggtgttccttgtggtcaagtattggtccagttgccagatactgcagtggctcttcatttatggaaattcccgtcaccacgtcaccaacttggatgtttcctgaactttcaatcccactagtagatccagatttgttcagaagttttgcaacaactacttctgaatggaaaatgggggcagtaacactgtgttag

SEQ ID NO: 43919 - DNA, 412 bp, Setaria italica
  Peptide Sequence Number=SeqID_109893
tttactaaatttaagtaaacctaattacccctagaaaattgctctatactgctgctgcacacaagtgtagtgcaagagcaacatgagagtgcagcatcatgtagtcaagtctcaaggcatttggctttatacaagaactgaccggcaaaatttaacaaatcaaataagccactatatttattaagataatcagcagatttttttcaagtgtaataattggtggattacttcgtgtgtgaatccatcaaagttttgaaatcaacactggcgctggctgcttttgaggtggggaactgcgtctttcagtcacctttgtggcagaagccttggggagaaatcccttttcttgcagggatttcactgcttcatagaggtattcatgcacgggagtgaacctgatgcctaggtcctt

SEQ ID NO: 43920 - DNA, 393 bp, Setaria italica
  Peptide Sequence Number=SeqID_109894
taacaaaagaaacgacctagaccgccgccacggcgcgcgcatcgccggcgagaacgcctcgctcgccatgtcgcacaccagcagcttctcccgcatccggagcaacatcctcaccaccgagctcatgcggccatgccacttcacctaccagcgcatgggagcggacttcttctcgccggaccacttcccccagttcatggagttcgtgcgcagcgtcgtctgcggcgagtgggacgaggacgacgcgcccggcgacgaggaccgcgccatggccgcgtcgggcagtgcaaaggccaaggcagcttgactagctcatcgtcgatcaccttgctctgtctgtcacagtgtcattaacatgcaaatcttgtttcaaagtttgtaataatggtaaat

SEQ ID NO: 43921 - DNA, 455 bp, Setaria italica
  Peptide Sequence Number=SeqID_109895
gcgccgacatcctcgcttctaactccatcatatgtgttatgtaggtaacgtggttcgaaggttcgtgcgaggtttgaggtcgtgcgttcgaattccacggacagcgcacacgcatattacggggcctcctagctgttcgtgaattttttcattattttttgggtacaaatgttacatttaatctgggtattttggtcggtactaaatgacatgacatttgacatttagtaccgaagaagcgatactagtatggtagtatggcgctggtactaaaggggttccgaccgataatagctggaagtcgatcctccagtagtgttcaatgatttacacatggtagtatgggaagtagctagctactggccacagcttacgtgtctacatgagcagacgattaacgtacagaaaagctgctagaaatattgacacgtaaatattgatttatagctaatctg

SEQ ID NO: 43922 - DNA, 536 bp, Setaria italica
  Peptide Sequence Number=SeqID_109896
ctacctccctcgtgtcgtcgtcctatcccctcgttgcgtgtctcagcacttgatggttcaacacacaccacacacataaaacatagagacatgccttcctctacacgtcctcgcgcagccgccgccgtcgccggcgtgctagcggcggcggtggctgcactgtgcctccacggtgcggcggcgcagctgtgcgagacctactacgacgacacgtgccccgacgcctataacatcgtgaagcaggtgctcatcgacgcccacaagtccgacgtgcgcatctacgccagcctcatccgcctccatttccacgactgcttcgtccagggctgcgacgggtcgctgctgctggacggcgtgccgggggtgatcaactcggagaaaggcgcgccgcccaacaacaactctgcgcgggggttcccggtggtggacaaagccaaggcggcgctggagggcgcctgccccggcgtcgtctcctgcgccgacatcctcgcccttcgtccgtcggtagtattcttccgttcgtagtcttgttccgt

SEQ ID NO: 43923 - DNA, 545 bp, Setaria italica
  Peptide Sequence Number=SeqID_109897
gggaggggcacctcgacgacggtggcccccgcgcgcgcgacgtacgcgtggatggacttcttgacggcgccgtaggcgtagtggagcatgagcaccgcgtcgccgcgggcgaagtgcccctcggcgaagctccacgcggcgtgctggaggacgatggcggcggcggtggtggcgttgtcgacgagggagacctccgatacgtcgccggcgccgacggccccggcgacggcggcgcgcgagcggaccagcccctgctggaggccgtggaagtagaaggcgtcgggctgcgcgaggaagaggcgctgccagtgggcctgcgcggcgaggaccgaggccgggcagcagccgaagctgccgttgttgacgcgcgccacggcggcgtcgtggtgcgcgaactcggcgcggatctcggccgccgagatcaccgcccgggggcgcttcgccggggacggtccgttcccgttgccgtggccgttgtcgtggtcgtggccgttcgcggccgcagccgcagccgcatcggtcggggggcgggtccgacgccatcg

SEQ ID NO: 43924 - DNA, 375 bp, Setaria italica
  Peptide Sequence Number=SeqID_109898
ctcaccacgctccagagtaagttccaagccgtcggccttaacgacgtcgacctcgtcgccctctcaggtacgcgcgtgaacaatagttggcatatactctacgtcgaattttctaaatgtatagaaaattctatgtacatagtaaagtctatgtacctagaaaagctcaaacgacctacattttatactacattttgtaaaggagtatcacactattgctctgaccaacgttaacgccccatctgtttctcttgaatgcatgtgacccacacaggggctcacacgtttggcagggtacaatgtgcaaacgtcgccgaccaaccggccgaccggctctacaacttcagcggcaccaacacgccggacccgaccctg

SEQ ID NO: 43925 - DNA, 899 bp, Setaria italica
  Peptide Sequence Number=SeqID_109899
tcatgtgcgtgctgtgtttctccagggctgcgacgggtcgatcctgctggacaacagctcgagcatcgtgtcggagaagttcgcggcgcccaacaacaactcggcgcgcgggtaccccgtggtggacgccgtcaaggccgcgctggaggaagcatgccccggcgtcgtctcctgcgccgacatcctcgccatcgccgccaagatctccgtcgagctggtgaggtttttctccctctttttttttttctctagtagcagcctgcaaatgtacgcaacgatcgatcggtgcaccattagccctcactaatgtactaagcaccgcattaaactcgtttggagcttgaagctgttaaacgttattaatgaaccgatgattaacaaaccggcattgttcacgaagatttgacgcgagcacagcagcagactgtcgactggcactgcactaggccggaaggcaataattttgtagctccgagcctggacctggagcaataattccaaagccgtcggtgcaaaaataattgaactagctagtggagatctatgagaagaagctgacaaaaccgcgcaattttaaaggcatgcaaaacagtagtactacggcgtggatattcacacgtcacgtccatcggctctcagcacggtctctagttaggtcgcgccaatcctttccgtgccgctctttaatccagcacggccacatgacgcgtgggtcccatgtctgcatgcacgcacggacgcacgcatgcagtccggcgggccccggtggcgcgtgccgctcggccggcgcgacggcaccaccgccaacatcaccgccgccaacgacctcccgagccccttcgacaacctcaccgcgctccagcagaagtcggcgaccgtcggcctcgacgacaccgacc

SEQ ID NO: 43926 - DNA, 1229 bp, Setaria italica
  Peptide Sequence Number=SeqID_109900
tacttacacgacacacacaattaacacatagcagagacatggctacctctcctcgtgcagccgttgccggcgtggtagcggcggcggcggtggcgctgtgcctccacggcgcggcggcgcagctgtgcgaggactactacgacgacacgtgccctgacgcctacgacatcgtgaagcaggtgctcatcgacgcccacaggtcggacgtgcgcatctacgccagcctcatccgcctccacttccacgactgcttcgtcctgggctgcgacgggtcgatcctgctggacaacatgactgggatgcagacggagaaggaggcggtgcccaacatgggctcggcgcgcgggtacgatgtggtggacgcagccaaggcagcgctggaggacgcctgccccggcgtcgtctcgtgcgccgacatcctcgccctcgccgcagagatctccgtcgagctgtctggaggcccaaagtggggtgttctgctggggaggctggacggcaagacgtccagcatcagcggcgcaaacaacctgccggcgcccttcgagaccctcgacatgcttcggagaaagttcagggccgtcggccttaacagcgacgtcgacctcgtcgccctgtcaggggcccacacgtttggcagggtgcagtgcctaaacatcgccgactccccggccgaccggctctacaacttcagcgggacaaacaggcctgacccaacccttgacccggcttaccgagcattcctaatccggaggtgcccgacgaagaatggcaacagccgggttctaaacgacctcgatccaacaacaccagacctcttcgacaagaactactacaccaaccttgaagtgaaccgtgggatcctcacttccgaccaggagctcaagtcctcgccccaagcgcggggcaccacggcgccgatcgtcgaccagtttgcgaggagccaggacgccttcttcaagagctttgcgcagtccatgatcaacatggggaacattcagcccattactgacccctccatgggagaagtccgttgcgactgcaagaaggttaacgacagttaaaaaatgagtaatcacgtggatgtgctcctccgatccgttagtttcaattgtacagatccagtaccttggctcctctaatgtgcagatcattacttattgttcttctgttttataattgttcataaatgtgcaataaagaggaaacaattacttccttgtttagtcttt

SEQ ID NO: 43927 - DNA, 1025 bp, Setaria italica
  Peptide Sequence Number=SeqID_109901
tgctcatcgacgcccacaagtccgacgtgcgcatctacgccagcctcatccgcctccatttccacgactgcttcgtccagggctgcgacgggtcgctgctgctggacggcgtgccgggggtgatcaactcggagaaaggcgcgccgcccaacaacaactctgcgcgggggttcccggtggtggacaaagccaaggcggcgctggagggcgcctgccccggcgtcgtctcctgcgccgacatcctcgccctcgccgcggagatctccgtcgagctgtccggcggcccaaagtggggcgttctgctggggaggctggacggcacgacggccgacttcaacggcgcatccaacctgccggcgcccttcgaaaacctcaccgtgctccagggcaagttcaaggccgtcggccttaacgacgtcgacctcgtcgctctctcaggggcccacacatttggtagggtacaatgcgcaaacatagccgacgccccagctgaccgactctacaacttcagcgggacgaaccgacctgacccgaccctggactcggcttaccgagcatttctatcccagaggtgcccgagaaatggcaacagcatggttctcaacgatcttgatccaacaacaccagatatctttgacaagaactactacacgaatcttgaagtgaaccgggggttcctcacttccgaccaggagctcaagtcctcgccccaagcgcggggcacaacggcaccgatcgtcgaccagtttgcgaggagccaggatgctttcttcaagagttttgcacagtccatgatcaacatggggaacattaagcccgtgactgacccctccgttggagaagtccgttgcaactgcagaaaggttaacgacagttaaaaacgtggatgtgctccggtagtttcaatagtacagatcaagtaccttggctactgcaatgtgcagatcattacttattattcttcagttttataattgttcataaatgtgcaataaagaggaaacaataatttctcctgttaaaaa

SEQ ID NO: 43928 - DNA, 1284 bp, Setaria italica
  Peptide Sequence Number=SeqID_109902
cgacgctgtgattgtgaacgcaagatcaatggccccgtcgcgccgtggccgcatgtcgtgtagtcctcatcagctggtcgtcgtcctgctgtccgccgccgccgcgctggggttcggcgtccgggccggcgcggcgcagctgtgcggagagtactacgaccggacgtgccccgacgtgcaccggatcgtgcggcgggtgctgaagaaggcgcacgaggccgacgcgcgcatctacgccagcctcacccgcctccacttccacgactgcttcgtccagggctgcgacgggtcgatcctgctggacaacagctcgagcatcgtgtcggagaagttcgcggcgcccaacaacaactcggcgcgcgggtaccccgtggtggacgccgtcaaggccgcgctggaggaagcatgccccggcgtcgtctcctgcgccgacatcctcgccatcgccgccaagatctccgtcgagctgtccggcgggccccggtggcgcgtgccgctcggccggcgcgacggcaccaccgccaacatcaccgccgccaacgacctcccgagccccttcgacaacctcaccgcgctccagcagaagttcggcgccgtcggcctcgacgacaccgacctcgtcgccctctcaggggcgcacacgttcgggcgggtgcagtgccagttcgtgacgccgcggctgtacaacttcagcgggacgaaccggccggacccgacgctggacagggggtaccgggcgttcctctccctgcggtgccccaggggcggggacgggacggcgctcaacgacctcgacccgaccacgccggacgccttcgacaacagctactacaccaacatcgaggcgcgccgggggacgctgcagtccgaccaggagctgctgtcgacgcccggcgcgcccacggcggcgatcgtcggccggttcgccggcagtcagaaggcgttcttcaagagcttcgcgaggtccatgatcaacatggggaacatcgaggtgctgacggggagccagggtgaggtcaggaagaactgtagagtggtcaatggaagctaggcgcccgcggaggatgtatacgtactactagtagctgtgtaaatgtggtatgctcaagtcaaactgtgtgagcagttctgctgtaatgtatgatatgcctgcaaacatgtgtgtatagttgagattttgatgcaacgatcaatttgctttttttccatggagattcaataaagtgatatctgcattttgattaacaaaaaatctaaaaaaaaaaaaacaaaaaaacaaaaaaa

SEQ ID NO: 43929 - DNA, 1276 bp, Setaria italica
  Peptide Sequence Number=SeqID_109903
ctccatcggtggacattttggacgtagagagttttcctagagatggcttcttcttcctctgctcctcgtgcagccgccgtcgccggcgtgctggtggtgatggccgccctgtgcctccacggcgcaacggcgcagctgtgcgaggagtactacgacgacacgtgccccgacgcctacgacaccgtgaagcaggtgctcatcgacgcacacgactcggacacccgcatcttcgccagcctcatccgcctccacttccacgactgctttgtccagggctgcgacgggtcgctgctgctggacacagtccccgggatgcagtcggagaaggagtcgccgcccaacaacgcctcggcgcgcgggttcgaggtcgtggacgccgccaagtcggcgctggaggccgcctgccccggtgtcgtctcctgcgccgacatcctcgccatcgccgcagagatctccgtcgagctgtcaggaggacccagttggggtgtccttctgggaaggctggacggcaagacctccgacttcaacgggtccctggatcttccggcgcccaccgacaacctcaccgtacttcagcagaagttcagtaacctcagcctcaacgacgtcgaccttgtcgccctctcaggggggcacacgttcggccgggtacaatgccagttcgtcacggaccggctctacaacttcagcggcaccaacatgccggacccgaccctggactcggcttaccgagcgttcctgtcgcagaggtgcccgaggaatggcaacggttcggtcttgaacgacctcgacccgacgacaccggacaccttcgacaacaactactacaccaacatcgaggtgaaccggggtatcctcaactccgaccaggagctcaagtcgtcgccccaggcgcagggcaccacggcacccatcgtcgaccagtttgcgagcagccaggacgccttctttgcgagctttgcacagtccatgatcaacatggggaacattaggcccctgagggacccatccgtaggtgaggtccgtaccaactgcagaagagtcaatggaagataatcatggaggagaggagaaactatataatgtgttttatgagtatgtaactgaaaaataagggctttcggctccgatccctcaagtgtgcagtttatatgtgtatatttctgattttaccatctttatagtttgtcaaccaattgtaatgtgctccaaattcatccgtctccaaattaaagcaggtcatgcatgtgtcgttgaaataaaaaaaaaaaaaacc

SEQ ID NO: 43930 - DNA, 1525 bp, Setaria italica
  Peptide Sequence Number=SeqID_109904
gttttgttatttactactaagttgatattttgacattgcatgacataggtgcctagagatggcttcctcccattctcctcgttctgcctccggcgccaccgccgtcatggccgtgctgtttgtggcggccatgtgcctgcacggcgccatggcgcaaccgctgcgcgaggactactacgacggcacgtgccctgacgcctataacatcgtgaagcaggtgctcatcgacgcgcacgagtcggacgagcgcatctacgccagcctcatccgcctccacttccacgattgcttcgtccaaggctgcgacgggtcgattctgctggacaacatgacagggatgcagtccgagaaggagtcaccgcccaacaacggctcggcgcgcgggtacgaggtggtggacgccgtcaagtgcgcgctggaggacgcctgccccggcgtcgtctcctgcgccgacatcctcgctatcgccgcggagatctccgtcgagctgtcgggaggacccagctggggtgtactcctgggaagactggacggcagaacgtcagacttcaacggctcccaggacctgccggcgcccttcgaaaatctcaccacgctccagagtaagttccaagccgtcggccttaacgacgtcgacctcgtcgccctctcaggggctcacacgtttggcagggtacaatgtgcaaacgtcgccgaccaaccggccgaccggctctacaacttcagcggcaccaacatgccggacccgaccctggactcggcttaccgagcattcctatcgcagaggtgcccgaggaatggcgacagttcggtcttgaacgacctcgatccaacgacgccggacaccttcgacaaccactactacaccaacatcgaagtgaaccgggggttcctcacctccgatcaggagctcaagtccgcacccgaagcgcagggcaccacggcaccgattgtcgatcagttcgcgagcagccaggatgccttctttgctagttttgcacagtccatgatcaacatggggaacataaggccagtgacggatccatcccaaggggaagtcaggacaaactgcagaagggtcaactgaagttaatcaaggaggaaagaaactgtgcgttcggtttatttatatacttgattacaaataagagctcaaatttggctcctcaagtgtgatgatattagatatacttttcattttccaactttaattatttgtttctgggaggcaaggaggaactgcagatcaaggatttacgctcatgtcgtgtggatgaatcagtttgaacaatgttttgagagccggaagggggagctacgctatatagatatgtgtctgtgcccatcgtgctcccagacagtggtgtatccaagatgaatgtaactatgttttgttggatgtatccaagatgaatgtgactcccctcaggatgaacaatgctctcataaaaagatacaataaagtggaacttagttgcacttttaccttaaaaaaaaaaaaaaaaaaaaaaaaaaaacaaaaaaa

SEQ ID NO: 43931 - DNA, 872 bp, Setaria italica
  Peptide Sequence Number=SeqID_109905
gtctacttggtagcaccggaggttgattcgatggtggcagagttcgattcgatagcggtggaggtcgatttggcagcagtggagtttgattcgatggtggcagcgttcgatttgatggcggcggaggttgatttggcagcagaaggttgattcaatggtggtagagctcgattcgatggcagtgaagctcaattcgaagggaagctcgatttggtgccggtgaaccttgattcggcaacggtagagatcgttgtggaaacacgaggccgattagatggcagctcgggcagcccatgcgagtggcaagcgaatcttgcccacgctggagagtcgaatcagtaatgattttcttacccgaggtgggctttccatgtaaaagggtgaaacaaatagataccaaacaacttgtctctcccgacgaggcaaggtgagtgaccgtcaagtgatccaaacagattctaaacttgcaaagatggcatggggtaaaagcaatggagtggatctagtctatgatgtatctaggcgaatcaacacatcagctacttagaaccaccccgatttggtgtttaagatcatctatatgatatcaattacattgcacctaccttaaggtgatgttatgtctactggcaccactccacccaagattcaaagaacaaggttaagtttaagattgataaagattgccttcctctcactgagagtagtatcaagcaagctattaaggagaattacagtgcaaggagcaaatttgacccggagctcactgcaagacaagtccataggctacttgcgctgtttaagcctgccaatgcacctcagcctgcaccaaataatcaccgtgaaggaaggcgccaccgtgaagaaaggcg

SEQ ID NO: 43932 - DNA, 624 bp, Setaria italica
  misc_feature (42)..(42): n is a, c, g, or t
  Peptide Sequence Number=SeqID_109906
ttcattgcctattgaagaagtgtgtcagccaaggtttgatgngaaaggcgcctgcagtttatacgtgttcctcttgaggatccatatagggcaccacgctttgctccacttcctgtggagtctgagcttggccattctttggctaggggtgatcacaacagatattatcaaccagcacttgcacctgagcctcgacacattcctctaactctagagcatcaccatgtgccttctgtgccagagcttcgacatgtcccagctgcatattaccatactttggctccatccagtgattcatactatcgatctgcagagaatctggcacctgagcgatatgctgacagaactgtagctgaaataaccactagggatacaatcattcctagggattacacaagagtgccaggtgagatatcttcccgcacagatcgcttggaggatctctatcatactaggagcattgctgctcgtggtgcacatgtggaggagctgtaccctccaggggagtttgctgctcgtgctgaccgtgtggggatcaccactcgagctgatcatctggaggacctctaccgttctgaccgacttgctacccgggctgtggacccccttctccccgtttcttaa

SEQ ID NO: 43933 - DNA, 1851 bp, Setaria italica
  Peptide Sequence Number=SeqID_109907
tcgtcctcggtgggcgcaggcactgctggtggcgatgcatctgcatccgcggtcttaccgcagccatcccatgttgctgaggcatcacctggggcccaaatgccaaagtcagccactgttgctgaggcatcacctgtggcacagacgcctaagccagccagtgatgctgaaggatctgagcctgcaccagcgccagccactgctgaagcatcagcttcgggggcaaagctgaagccaaaaccagctgacgctgatgctgtggctgcgtctgccgcaagcaagggcaagggcgtgggtgctgataatagaggtggtgatggcaggatgaagagcagaagagagagggctaggaatggcaaggggaaggaggttgatgaagatggaggaagtaagggaaaggggaggaaggctgtgggcaagaaggaagaaaggggtgatatagcagggttcatattcatgtgcaatgcgaagactaagcaggagtgctacaagaacctcttgttcgggctacccagtgggaagattggaatggtcaagaaaatcaggccaggggcaaggctattcctgtatgattttgacttgaagcttctgtatggtgtgtacaaggcagcatcacatggtgggctgaaccttgttccagaagcctttgatgggaagttcccagcacaggttaagtttaagattgataaagattgccttcctctcactgagagtagtatcaagcaagctattaaggagaattacagtgcaaggagcaaatttgacccggagctcactgcaagacaagtccataggctacttgcgctgtttaagcctgccaatgcacctcagcctgcaccaaataatcaccgtgaaggaaggcgccaccgtgaagaaaggcgccaccgtgaagaacgaaggcaaccatatcattttgaagaaaggtggccttcattgcctattgaagaagtgtgtcagccaaggtttgatgaggaaaggcgccctgcagttatacgtgttcctcttgaggatccatatagggcaccacgctttgctccacttcctgtggagtctgagcttggccattctttggctaggggtgatcacaacagatattatcaaccagcacttgcagctgagcctcgacacattcctctaactctagagcatcaccatgtgccttctgtgccagagcttcgacatgtcccagctgcatattaccatactttggctccatccagtgattcatactatcgatctgcagagaatctggcacctgagcgatatgctgacagaactgtagctgtcttgttgtttcagtttacacattgcaccatactgactaacctatcatccatattatatgatttgagtactatggatgcaatcattcctagggattacacaagagtgccaggtgagatatcttcccgcacagatcgcttggaggatctctatcatactaggagcattgctgctcgtggtgcacatgtggaggagctgtaccctccaggggagtttgctgctcgtgctgaccgtgtggggatcaccactcgagctgatcatctggaggacctctaccgttctgaccgacttgctacccgggctgtggaccccctgccccgttcaacctattatacagctgcttacgagactcaccctgcttatgctgaaacaagcgcaaggcctgtctctgcaagggctaatggacccggtgtcccagtttcatcactctattcctttggtggtgggccagcgtaccgctgatgagtgatcaacactcatcgcttttgttgttagtctcacctttaccgtaagaagtcaggatgttcatcttacaacctcaactgttgtttaccttaggttatgttc

SEQ ID NO: 43934 - DNA, 455 bp, Setaria italica
  misc_feature (444)..(445): n is a, c, g, or t
  Peptide Sequence Number=SeqID_109908
caaaagccaggatcggtagaaaacatggccgggtcaaaagtgctcagaatgggccccgtccaataacatattagatctggggcaggctacccattttttgccactccagtctccagttcagaaatcaatctcgtaccacaatgatactgtccaggatgcagtagatggcaggagttacgagtcttatcatcccaacgctgatggccttttatgactggaattgtcatttcccttagaaccattactagatcccaaaacacacatgtacagtttccctcccttgaaccatggttacaactgattccaggcttgaactgagttgctgccactgattcaaggctctgacatgcagatcccttaggtttatgacatgtattgttcaagcatggaagcccatcagaggatagccttagcctccctttatctggtccagtccttacaatnntaatcctggg

SEQ ID NO: 43935 - DNA, 412 bp, Setaria italica
  Peptide Sequence Number=SeqID_109909
gcatccatcttggaattcatcagtaggaaaaatggtcatgcatctcacaaccaaagtctgaataatttgagtagcttttcgactatccacaaccaaataaatttctttagcagtagaggccacaaatactgaaaattcaacgagcaaactagtaatcataaactagcaaagcacaggctccatgagtagccttaaatgttatgaagaccactggtcaagcatctatctaatatgaaggatgtaagcaccaacttctgtaactaggtgaattaaaccattgagtgaacctacctccagatatctgtttgcaaatggtatgctaattaatagctgcctgggtgctgctgctacataaattgacttgaatagcactgtctcagtattggtacaccctttttcaacatgaaatttg

SEQ ID NO: 43936 - DNA, 387 bp, Setaria italica
  Peptide Sequence Number=SeqID_109910
actcttgaagaaatcaagcatttatggagaaacattgctgtgctacaaaatatggtagagatctgagtatgagagtcgacaattttgaacatccatcagagacaaatgttctatgcagtgactggaatagctggaaagaccctattatccggtttagtggcacgacagattcagtgggcacccagttttttctgaagaatgttcatcctgggatgaaggctgccgcatcagctctttttggatcgccagattcattacatgccaggcctaatacatttggggaacttttgcgagctatagtatctccctccaggacagtccaggaagcagttaactgggctttgaaaggccagtggaagcaagacaagctgcagcaagttgtataaa

SEQ ID NO: 43937 - DNA, 518 bp, Setaria italica
  Peptide Sequence Number=SeqID_109911
ggtacgaacactaaagccaaaggatacttactggtatatttcgtgtttcagtgttcagttgaatgttgatttatgttatgctaggtgggattgcttttctttctcatatccagcattttttttttcaaaatatgattatgaaatacaagcatgctgatatcatatgactctcacaatttaggtttagtggcacgacagattcagtgggcacccagttttttctgaagaatgttcatcctgggatgaaggctgccgcatcagctctttttggatcgccagattcattacatgccaggcctaatacatttggggaacttttgcgagctatagtatctccctccaggacagtccaggaagcagttaactgggctttgaaaggtgtcgatccagatattgctttgcacatgcgcatgatgtccagtaggtatagaacactttatagtatatgcttaaacaagttgaaggttactggtaaattgtccgtattcacttgacaagaagagcaatgcaataacatg

SEQ ID NO: 43938 - DNA, 633 bp, Setaria italica
  Peptide Sequence Number=SeqID_109912
aagcgcaggaagaaggcggtggctttcggagccctgagagcagagccagcatgaggagcagcggctccctgacctccccttcagcacctgtctgctcaagatcatggtctataagcgaggactcgctgcggcggtacgtgagctacgcgagcgagagctgcatccaggagctgctggcggcgtcggactccgggcggccgccgccggcgacggcgacgacgggtggaaggtgctggtgtaccagaacggcgtggagatatcgaagcggcgggcggggccggcacacgtgttccggagccggtggctgctgcaggacgtctcgccggagcagttcatggccgccgccaacgccgtcgacgccgcaaagcagtgggagtcggaccagctggttgaggcttcgtacatcagggagctgggcgaggacctcagcatcatccacctcaagttcggcgacacctcctccacgcggcggcccgcgcggcgccgggacctcgtcgtctacgagcgccggcaggccatggacgacggcacgctggtcgtcgccgtggcgtcgctgcccaaggagatcgccgcgggcctgctgcccccggcgaagggcggcggcagcaaccccgtcggccggggcctgctgct

SEQ ID NO: 43939 - DNA, 765 bp, Setaria italica
  misc_feature (755)..(755): n is a, c, g, or t
  Peptide Sequence Number=SeqID_109913
cgaggagaggttgtatggacgcggagagcaaggcggtgatgatggcgtgggagcggccgctgatggaggcgcacgcgcgggcggtgtgccaaggcggcggcaaggtgctcaacattgggttcgggatggggctcgtggacgaggcgatacagcggtacgagcccgaggagcacaccatcgtcgaggcccacccagaggtgtacgcgcggatgctcaagctcgggtggggcgagaagaagaacgtcaggatcgtgttcgggagatggcaggacgtgatgccgcagctcggatcttatgatggtatattttttgacacttatggggaatactacgaggacatgagggaattccaccaacaccttcctaagctactgaagcctggaggtatctactcatacttcaacggcctctgcggcgacaacgcgttcttccacgtggtgtattgccagctcgtcgcattggagctggcgaacctggggtattcgacgcagttcatccctctccccgtgaaagattgcctggccgatgaagtctggaagggcgtgaagcagaagtactggcagctggacacctaccacctccccgtttgccagtcggagtcagaggctgagtgaatttgacgaagtagccggggtatctctctaatttgcgtctcaagtttgggaactctttttcgctacatttgttcaagcatgctgtgctacaaaataacattctgtctcagttaaggagctagactttctttcggcgaaaanaaaaaaaaaa

SEQ ID NO: 43940 - DNA, 1192 bp, Setaria italica
  Peptide Sequence Number=SeqID_109914
agaaatttgaaaccctcgaccgggctccggcggccggcggccgacgaccatcccggctccgatccgctgcctcccaccagccaagagctcagaagactcggaagtaggagagcgacgatggaagaaggcgatgagagcgcgccaagagcgggggcggaggcggaggcggcgctggggctgagcccgcagctcttcgtcgacgaggttctcgacagaatcgccgacatcagcgccgaggccttcgagtactgcctccatgaagcggccgcaccaggggtcctcggcgccgccacagcggcccagaaagccgcggagctccagcggggattaaatggcattcgccatgttgtaaagaatgcactggataagagaatgaccaactgggagaaatactgcttcgaacattgcttcaatatacctgaaggttttatggtgcctgaagatgataattcatgtgcaaaagattcacacaaagatgggactaattcatatttggatgtcgaacttgactccataaggagaaagctcgaaagtgctaacaaggaatctgaaaatcttcaaagagagatgtcttcattagaaaatcaaactacgtacaaaagaaaacttgattctgctattgctgagatacaaaagttgtttgatgacaaatttgtgcaggaaaattttgaagatcttgcaaaggcgataccagtattgcagcagaaaataataggtatgaaaaagaaaagaaccgagactgggaacttgatagatcaacaggtttggaacacgaatggtctgagagacagtaagcgtcaagcattgggtaacggttttactgcatgcaccgaagacattcaagggattgtcaatatcttacagaacaagtagcttaaggtgttgtgcagcctatgccatatcaggatgtcaactattggttgcatttgcattacagtatcagctacgctttaactttgtctagccatcttcttgctagctgcctgtttgtgacactgaactgcgttatggtgatgggagacttcctgtataagctagggctgctatgttgtgtagatatggtgtattgggtattttaggtaatgcatcagtgagacttcttggatcattgtgtttttttgaagtaattcttggatcattgtgttgatacgtattctattgtaaagttttcttcttttttttgggttcttta

SEQ ID NO: 43941 - DNA, 665 bp, Setaria italica
  Peptide Sequence Number=SeqID_109915
ttacactagccatgtctggtgtttatgatgagaagccacctacagaggtttccactgatccgtcaagttcaaggaacagcattgatgaggatgatgactgggtgatagtcaagaaacagcggatcaccatattaattcctccaccaacaccagatgctgcaaaccctgaatcagataggcccacagtaagttctaaacattctaccttaacacagagcaagagagactggaatgctgccagaaagaagcaccctaagcagctgattgccaagacacccaaggatttccctcccgaagatggcattagtgagaaatttcaagtagagggttctgaaagtacagttcaaaaagatgttccaaggatcgtgggtgacataccgccacagtgtcctgctgcccctgttgtaaagtcagaatggactgaaggtggatgtcaggctgttgaaggactgtttcatcaaggcagtgggaaagtgacaaattcttctggaatcatggatgatccaaggatgccagttatttcttcacctgttgcgaataagataatgcgagcccggctccttgagagtcgtgttgctcgtttggaggactgaggaattggctttttatcgtggtcttggatggtttgttggcatattggacagtgaatagtatagactgagtcg

SEQ ID NO: 43942 - DNA, 335 bp, Setaria italica
  Peptide Sequence Number=SeqID_109916
gagccagtctcccttgaagaagggtttgtgcttcttgacccaggccgtgtagtcgacgtcgggattccagcccttttcgtcgcccaccgtgtagttggccttggacttcttggatgggggcgagggcgtgtcgtcggaggaatcgtcggatgaggaggaatcatcggatgagccgccggaggaggagctgggggaggagccggtggacctggcggtgacgtggaccttcatgccgttgtagcagtatccgtagctgcagatgaagtagtagtccttggcctccttgagctggaaggcgtaggtgtgtcctttgctgtagctgctcagcgcgttgg

SEQ ID NO: 43943 - DNA, 1131 bp, Setaria italica
  Peptide Sequence Number=SeqID_109917
ttttttttttttgataaataggtgtaaatgaatgaataaagctcttcacacttgacattacactaaccttgtttgaaaattgcatcgacaactcagttactactacagtagcagcattaccgaactccacttgaaaagaaagctagtaaaagttgagaggaaaaaagaaaaaggaaaatgggaccaagaaccaaccaataatcacgcaaccgaggaggaggaggagcagctagagatctgaaagggaagaagagagaggaaaaaaaggaagaagagaatcttatagcacaactgaaccgatctgatggatagatggacctctgatgtctgaatggatggatcagagtcatcactcatcacagcataatcctgttgaggagcagggcggcggcgcctgtggcggcaataatggacgcgtaggaggtggcgccggcgaggagggacggcgaggcggcactggacttggccttggacttcttggatgggggcgagggcgtgtcgtcggaggaatcgtcggatgaggaggaatcatcggatgagccgccggaggaggagctgggggaggagccggtggacctggcggtgacgtggaccttcatgccgttgtagcagtatccgtagctgcagatgaagtagtagtccttggcctccttgagctggaaggcgtaggtgtgtcctttgctgtagctgctcagcgcgttggccttgtcgcagttgtcgtacccgacctcgtccacctgcacaacgtccgaccgaccgttctggtactcgaagatgagccagtctcccttgaagaagggtttgtgcttcttgacccaggccgtgtagtcgacgtcgggattccagcccttttcgtcgcccaccgtgtagttggccgcctccgccgccgacggcagctgcgaggccgccacggcgagcacaagcagggccagcgccagccgcatctccatcgtgtctctcagagagttagttgggacggatgggatgggagatggaccgcgcgggtgagctggaggaggagaggagctgctgaatctatctatgagcagcggccagcgggtgggtgggagtgggacagtgaggcgaggagagtgacgacgagctgagttggtgccgcaaatgcaagaaccc

SEQ ID NO: 43944 - DNA, 382 bp, Setaria italica
  Peptide Sequence Number=SeqID_109918
gtgctccctccttggctcaaccccatggtcccgcatggacctgaaaatctccttcccttcatccacacgccctgtgtgggtgcaggcacacaaaacaacaacaaacgttgactcattcggcacaaaacccttctcaagcatccttctgaacaactcaattgcgtggttgccatggccatgcatcgcgagcccgccaatcattgcattccacaacactacatcgtggttccgaactccattaaagacccgccacgcctcctccatgcacccgcacttgcaatacatatccacaagcgctgtctcaagcatgacattccctgacctcctcccaaacccttctgcttccagatacctatcgaacccattcgcccctctcaacagc

SEQ ID NO: 43945 - DNA, 1667 bp, Setaria italica
  Peptide Sequence Number=SeqID_109919
agtaccggttatttgacccggtactaaaggactccctttagtaacgaagtagcaataccagttgtacaaccggtactaaagggaggttaggacccggtactgaaggcgctttccctagcagtgaattttccatgtaaattcgccccaatcggagttcgaatgaggaagatatggcttgtgcaagtttcaactccacctgcaggcctgcagttcaatgttcgtgtttaggccttctaatatctaaagtccgggcccaaatccaaattgtagaaaattccttcatttatgtcgtatttcctataagtttgcaatatgatccaaaacacaacacatatgtgaatatggggtatttcaggtgccaagtggcgggttagtataagaatatgtctgaaaatactagttaatagtgtgtcaataacgagcgttagcttgatggatacagtacatataccttgtaaataccgtagaagatctcaaaatataattgaggaagcaccgctatatgcatacatgcgtgccgacttttgtccagataaaaattaagaagacactgtaacaagacacggtttaccgtacctttttgttgagaaagatgccccggacctgaatcccctacatccacagctgcactttattcgacactatgtaacaatatatagctcacaactgttacatattctttcaaacaaaaaacttctatatattatatgttccgatgttctttattatttgggatggattattttctcacaaagctttcagggatagagctcgataatagaccgaacaccaagaactggtataattttgtagtccttgaatccagcctcaaagaaaatcttcctccactcctgctcatctcgttcaactccattgatattcatgattaggaggtcaaacaaaacttgtgtctctgcatgcttgatgtcatctgatggcccagatccgaccaccatatctataattattacctttcctcctgcatctcgtagagatatggcctgtttgcagttcttcaatatcttgacacactcttcatcgccccaatcatgcaaaatccacttgaggaacacagcgttcgtcggtggaatgctctcaaacatgtcaccagcaacgtattgcacgttggcaccagagggagctttggcgacaacctggggcagatccaggacggtgcacttcagatccgggaacgccgccgctattgtggcagcggccccgccaagcccgccggcgacatcgacgagggaggttaacccacggaagacctcgccgcactccctgaggacgatgggcatgaggaaggcggtgtccgaggccatggcgttgttgaacggaaacacggtggcgtggtgctccgctctttcccagattgtctggccgctgtacgccagggcaaacggggccagagttggacccgactgctgcttgtcctgccggaaccacgcgtgcatgcccttgctgaccggggagtctaggcaaggccagagcaagatcttcacgctcaggaaaggaggcagctggcccgccgccgtcgagctctcgtctccgacgacgaggaggcgggaggccgccgtcagcttgtagaccgcagagtcgtggctcctgcggtctgctggctgctcgaagctgaagatgccggagacggtgagcgcgcgcatgacgcg

SEQ ID NO: 43946 - DNA, 367 bp, Setaria italica
  Peptide Sequence Number=SeqID_109920
gctcctcgggctccgccgcgctccgcgtcggcaaggacatcgccgagaacaaccccggcgcgcgcgtgctcgtggcctgcgccgagctcagcctcaaattcctccgcgaggcgcgcgaggaccgccccgagacgctcatcatgcagtcgctgttcggcgacggcgcggcggccgtcatcctcggcgccggcggcgtcaccgatggcgacgacggcgctgcagggtccggcgtcgagcgcccgctcttcgagctggtgtccgcctcccagacatggatacctgacaccgaggacgccgccgcagggcagctcgccgaaggcggcctggtgttccggccctcccccaagatgccggcgctattgcggca

SEQ ID NO: 43947 - DNA, 906 bp, Setaria italica
  misc_feature (142)..(142): n is a, c, g, or t
  Peptide Sequence Number=SeqID_109921
ggttcttagttttcttttcttttaagttcaacctgaaaacaggccttatttatattattgtcaaaatatgtgatttaactgctgggaagaatgagaaagaacagaaaaatctgaactgatgagctgacttgagtggagtacngtttttctttcgagggaacaggagggcacaggccccttgagtgaaatattattggcaacagattgttggaaattagggaagaaaatgtacgtacagtatcaactggaatggaaaacccaacaccagatgatgctcctgaaggtgagtatatagcagtgtttacacctatcaaatttccagaactatcaaggagtggaccaccactgttaccagggttgatagcagcatcagtctgtatcacatcttgtataggtcgtcctgtggcagctgaactgatttctctacgcagtccactagaggaataagcacaaacagcaaaaacagagtctcagtgcattccgtatgaaccagccaaaagatgaatcagcttaaagaacaatgtccacctgataacacctgttgtcagagtgtggtcaaggccaaaatggttccaatggcatatactttctgaccaaccagtaggtctgctgacacaccgactggtataggtcttagtttatcctttggtgctttgatacgcaaaacagcaacatccttgtcctggtcaaacccaacaacttgtgcttcatacactgactgatcagcaagtgtgaccctgtataaaactatcagtggtaacttcactttgccactatacatctattgatcatcatctacaaactatttaaaaaaataggagccaacaggatgttttgttctattcgtgtatctaactatctaagtaagtcaagactatttgacattagcagggtgattgcacacaa

SEQ ID NO: 43948 - DNA, 1335 bp, Setaria italica
  misc_feature (1302)..(1302): n is a, c, g, or t
  Peptide Sequence Number=SeqID_109922
tttttttttttttttttaagtaactgtaggatgtatacatgctccacaacattttttttgtagtatgatgtatggcacatctgtattgaagaggccgaagaaaaagcaagcatgatacacgatagcatcaaggcaacttggataaccttttccaccagaccagagatagttagatttacaagcatgaattatgtacaatggatcccgtgggtcgtggtaggcgaaatgctaacgccttgtatatttgtgtctctgcacctaagtgaggaaatgagtacgaagaacctggtttctcctatgattcatcaggctttggttcaaggatcacagggatcttctccttatggtcaccacgcaagacttccaccgtcaccgtttccccaactttacactgatccaatatccggtacaagtcgcttccatttgttaccttcgtaccattcacagaagtaattatatcccccaggataagacgaccgtaggcatctcgcttggttgattgcagacctgctttgccagctggtccatttgaaggagcatccaagacaagcactccacttaatccaagctgctccacagattgatcaggggcaaattttattcccaaaataggtctggtcaccttaccaaactttataagttgatccacaatgcccccaacagtatcaactggaatggaaaacccaacaccagatgatgctcctgaaggtgagtatatagcagtgtttacacctatcaaatttccagaactatcaaggagtggaccaccactgttaccagggttgatagcagcatcagtctgtatcacatcttgtataggtcgtcctgtggcagctgaactgatttctctacgcagtccactgataacacctgttgtcagagtgtggtcaaggccaaatgggtttccaatggcatatactttctgaccaaccagtaggtctgctgacacaccgactggtataggtcttagtttatcctttggtgctttgatacgcaaaacagcaacatccttgtcctggtcaaacccaacaacttgtgcttcatacactgactgatcagcaagtgtgaccctgaggtccgaggcgccacggatgacatggaaattggtgacaatgtgtccgctcttatcccagacaaaccccgacccagacccctgcggcacctcgagcacgtcgagcgtgaaggcgtcctgcctcacggcgaggttggtgatgtagacgacggagggcgtttggtaagtaggtcgtcgttctcctggaagaggcgcacggtggcgagctcgtccgcctgcagcttccgcgncgtggcgaccacgaacgcggaggccgcgccggc

SEQ ID NO: 43949 - DNA, 380 bp, Setaria italica
  Peptide Sequence Number=SeqID_109923
cgcgggagcccgacaccgggttgagcgtgaagaagcggcggaggcgggagtggctctggaagcagcgggcggccatgccggcggccttggcgagcgccgctcggtgtcgccatgacgcgcgcggcggggcgctcgtacaggtctgcccgcgccgcctgccgcaggagctcggcgagcttcttggcgcgcgcccggagctccgtgcagtccgtccggaggcactggtaccccgcctgctgcgccacctggtccgcgagctggatcggcttcgccagcatcgccttcgccccctcccccatccttccgcaccacgcggtgagagagatcaaaaggcggcgagatttcggaggagcgggcggcgaagcaatcggaaggccacg

SEQ ID NO: 43950 - DNA, 733 bp, Setaria italica
  Peptide Sequence Number=SeqID_109924
caatatactttgacattgccaatctccatatacacgaacctcgtccttgggaggcagaagagtacccatttgagcgaggtttggacaaaagtatgcggcaaagcaattggcagaaatgtaggtgtggggaattttggctgcttctattgccctccgtagctccatcttctcgtcgaatatagcccttcctggttgaagagcatgccccatcctggatgggtccatgccgaattccgacggtatgaaacgcttgatgttcccggcctccttgatcgcctcgacgagcttgtgctgcagcaggatggtctggctgcggtgtgtcccggacaaggccgacacgaccacgtccacctgcctcacggcggcgacgagccccgcgcggtcgtcgagcgacgcctccacgaggcgcgcgccctgggccttgaaggacagcagggcctggagcttgtcgacgtcgaggcctatctccggccgcatcaggacgaacgtcgggtagccctgcgccaggctcgccgcgacgatccgcctgcccacgaagcccgtgctgccgcccacgactagaaccttgctcttctccatcgccggaaggagccttcgttcctggttccgcgatcgtttgctttggcttcggttttctgcggattgcagctagcgcagcaggcttaaacgttcctttttttaaacttttggcactttggcaggcctgacgttggtactagtctaaagtaaagtt

SEQ ID NO: 43951 - DNA, 1808 bp, Setaria italica
  Peptide Sequence Number=SeqID_109925
agctatgtgtgcaatcaagttatctgatcaaacatgatgccatcattcacatcttattgcaagtctaataatagaccattatgcagtattatcagttagaggaaacaacaattgtactatagcatattgcgattggtcggccgtcgtcctgagctatgaaatctgccctaaggccctagttcgactgcatgcccatattgcaattccatcagcaacttcattgttacaacttgtagtggtatgtgtcagggcatgatgcaggaccaatatccataagcaaggtacatatttggacttctacgttcaaaatgtaggttaagttttggaattgcaggacaagaactaccaccatattgattgtaagtgtctatatcccattatggagagcttgattacatattggagtattatgccatagtgcaggatgtaacactaacaccatatatttccagccatggtgcccatggtttttgaatttcttatatgatcagataggtcatagaaaactttacaaattacagatatcttttcatatattcatccatgcgggtgtactcaacctccgggtacagaagagtagcttctgctccgtcctccccaatgtcaaagtttgtcaggcaaccttcatagaaaatatgataaaagtgtcccactgcgatttggccgccaatatccatatctttcattgaagccaagaactcgtcaaccggaatgtaaattttctcgatgacatttccagagagcttttcccatttcgcgatcagctcattttgagtgaggatgttttctggtggtcttaggtaaactgtcttgttcaaggtgcgagggtcatcaagggatttgattgtataagatgccacatcatcttcatccacaaatattactttgacattgccatctccatatacacgaacctcgtccttgggaggcagaagagtacccatttgagcgaggtttggacaaaagtatgcggcaaagcaattggcagaaatgtaggtgtggggaattttggctgcttctattgccctccgtagctccatcttctcgtcgaatatagcccttcctggttgaagagcatgccccatcctggatgggtccatgccgaattccgacggtatgaaacgcttgatgttcccggcctccttgatcgcctcgacgagcttgtgctgcagcaggatggtctggctgcggtgtgtcccggacaaggccgacacgaccacgtccacctgcctcacggcggcgacgagccccgcgcgacgtacggttacgttacgtaaaaaataattaactttagaacaattagaccaatactaccaataataacaacgaaacctacgtaccttagggaaagaagagaagaggtataaaatgagattttcaaatgaggattatgtgacaaatacaaaggccaacacactcaaacttttatagtggcggtgctacatcatagctataagcttatatccagcttagccttgtaaagtgatatctggtactacccatcttaaagaaaaggaaccacactaggttagtatgtttttggagggttattatgcgtttagacgactctattttgcaactggaatataatacccttataccttaatttctctcactcagtaatccttaatttgatcatttgatgtgatccttgtaccattttttttatgttactgcaaattagatgcttcatccttgataatgactcgaaacacacatttgtttcttacctttcattgaagccaagaactcgtcaaccggaatgttaaattttctcgatgacatttccagagagcttttcccatttc

SEQ ID NO: 43952 - DNA, 475 bp, Setaria italica
  Peptide Sequence Number=SeqID_109926
tgtcatgtaaactgtactcccttttctttgtcaaaggattgcgtatctctgcttgccagcgacctgagtcccgcaggcgcacaccacggtacctgctcgatggtaccttcctctctggaccattcagatcctttattccacatggcatgatgggtcttagaggctgtgaggttttatatttctttacaggaactagcacctctcttataattttcttttctttctttgggttctcatcattttcatcaccggaggagtcggttgcatcaggatcagagcagaaaatgcgaaccttccgcatagggggcatcttcctggaccgcaacatcttcccaagcaacagcaatcaagcaagacgtatctacagctgcagcaccgaatctaccaaatcagaaagaggattctctctttaacttcttaacagaattggaggaagggagattagttttcttcactgcagatgtttcaggagatg

SEQ ID NO: 43953 - DNA, 406 bp, Setaria italica
  Peptide Sequence Number=SeqID_109927
tgtactattctagtagtagtctactaagtacctaaaaaagggggtttccttagtccaaaattacccaaaagatccaatccaaaagtcttcatctccgaactcttggatcatgtttttctctagaagccttccttcaatgcataaactctgcttcggaaaggtggtggcaatctgttgattgctacatcaatgtcctctgcagtataccgatttgaaaagtgatttagtaaaaatagctttgttttcaagcttgtcagacagactcgctatctcagacaagtgagtgtgccccttttctcttgcatcctcaattgatttggagtcatcaatataagtactctcaaccactagattttcgccttcaacacatctgcattatcaggatcaaggatgaaatccgacagtt

SEQ ID NO: 43954 - DNA, 357 bp, Setaria italica
  Peptide Sequence Number=SeqID_109928
gttggtgagcgtggcgaatccgtcgccgtcgccggtgcagttgagctcggtccggcgcctgcagccgccggagccgtcccggagcgcccactcggcggggaagcgcgggtcgaaccccggcgcgcagccgcagatcggggagcgctcgacgctgcagacgccgtagggcccgcaggcgcggtagccgtcacactcatcgagcgggtaggaccagaagaggctccaggactgcgtcatgtcgatccacatgagccgctggatctggccagaggagttgacgacgaagcgcgtgagcacggtggcgttgtcgaggacgtcgtagctgtagaggcctcctcggccgggcgcggagaacgg

SEQ ID NO: 43955 - DNA, 314 bp, Setaria italica
  misc_feature (282)..(282): n is a, c, g, or t
  misc_feature (288)..(314): n is a, c, g, or t
  Peptide Sequence Number=SeqID_109929
tttcactgtgcaacgttagttatgtgatgaagttcagctagttatgtgaagtcttccaactcatagttcataatacacaatggctgcgaggctctgcaagacgattgtttaacttgaggctgcactatgtccgtgtgaaagggcgggatcgccgatggaggagccgcgcggccacaccatgatgcttctcagaagatgtatgatacagagctgtgaccaaaaaaatcctttctttgttcagacttgagacacacgttgtgagcgtcactaatcactacatanacactnnnnnnnnnnnnnnnnnnnnnnnnnnn

SEQ ID NO: 43956 - DNA, 624 bp, Setaria italica
  Peptide Sequence Number=SeqID_109930
ttcaaccctgttgatgatagatacttcattagtggttcactggatgaaaaagtccgcatatggagcactcaaaaccgtgagattgttgattggcgtgatttgcatgaaatggtcactgctgcttgctataccccagatgggcaggttttaatcatctatacttcattccttgatctaaatatcttcgtgttaaggtctaacatgtttccttcttacctgaagagtgcattaattggttcccataaaggcagttgccatatttatgatacatctgataataggcttcttcagaagaaacaaattgatctgcagaataagaaaaagaagtccagtcagaagaaaatcactgggtttcagtttctcccaggaaatacttcaagggtccttattacatctgcagattcaagaatcagggttgctgatggcctaaatctagttcacaagtacaaaggttttcgaaatactagcagccaaatcgcagcctgtttagctgctaatgggaggtatgtgatctctgcaagtgaggattcccatgtgtacatatggagaaatgacgataaccttgaacaaggcagaagtaaggggaatgttactgtcaccaattcctacgaatatttccactgc

SEQ ID NO: 43957 - DNA, 2044 bp, Setaria italica
  misc_feature (504)..(504): n is a, c, g, or t
  Peptide Sequence Number=SeqID_109931
ttacaaccttcccgcgaccgccgcagcagcgacgagaaggacacgtgctcggagaaaggcgggcgccggtccagctcagccacagatgacagccaggacagtgccagagccgtgcaccatggcccggtgcgcgttaaggtgcggcagtatggaaagtcgtacaaggagctcagtggtctgttcatgaaccaggagatacaggctcacaatgggtccatctggagcatcaggtttagtccagatggccggtacctcgcgagtgctggggaggactgcgtgatccatgtctgggaagtgtctgagtttgagaggaaacgcgaggaaaatggggtgtgcaatccttttgttgcaatggtgtgcaacggttcgccagagccaacattagcgctggccagtctggatgggagcaattctgagaagaagcgtcgggcaaggttcttggagagtcggaggtcagtgagttcagaccagctcatggtgccagaacatgtgtttgcattgtcngaaaagccgatccgaaccttcgtggggcaattcagaagatgtgcttgatctctgttggtccaaatctcagtacttactttcatcttcaatggataaaacagtgaagttgtggcatatctcaagcacttcatgtctgaaaacattctcacatagtgactacgtgacgtgcatccagttcaaccctgttgatgatagatacttcattagtggttcactggatgaaaaagtccgcatatggagcactcaaaaccgtgagattgttgattggcgtgatttgcatgaaatggtcactgctgcttgctataccccagatgggcagagtgcattaattggttcccataaaggcagttgccatatttatgatacatctgataataggcttcttcagaagaaacaaattgatctgcagaataagaaaaagaagtccagtcagaagaaaatcactgggtttcagtttctcccaggaaatacttcaagggtccttattacatctgcagattcaagaatcagggttgctgatggcctaaatctagttcacaagtacaaaggttttcgaaatactagcagccaaatcgcagcctgtttagctgctaatgggaggtatgtgatctctgcaagtgaggattcccatgtgtacatatggagaaatgacgataaccttgaacaaggcagaagtaaggggaatgttactgtcaccaattcctacgaatatttccactgccaggatgtgacagccgctgttgctttgccatctgctggctcggcaatggtatccagaacaaactccaggaaacatgatgaacaggactgtgtatctgagcatcctctgttgcatgctgtccctgaattgcaagattcctgtgatttccaaggccaaagtggcaatatcctaagcaccagttcaaaccacagtggtgatagagcaacttggcctgaagagctcatgacggcaacaaagcagagccctcggtccagtgccagtcttcccagtggtgctggtcaagctccgagtcggtctgcctggggaatggtaattgtcacagcaggccgtggaggtcagatcagaacatttcagaattttgggtttcctgctcgagtatagtagctatgaggctgctgcctggacttgacatctgctctgcagcaagccgggtgatttttgtgtatagataggtgaaaaattgggtgatttgcacagcagtctgggattgtattttgttgctcctaggtgcagctgcttgtggacttcgactaacatacgacctggcactcgaggcacggcgaattcgtttgcccggaattgtacatgagaatgggcccgggaaggacgacgggcgtcagccagttggagcgagatctttgggatcttttgccaccatcttttcatctgttttctccattgagtccagtttagcttttctcttgatgtttacccctttattatatattcttgtaagaagaaatctcagttctacagaaatagaaaagcaaaaaagagttgcatagagtgataaaattcgttgtactggtatagcaggct

SEQ ID NO: 43958 - DNA, 364 bp, Setaria italica
  Peptide Sequence Number=SeqID_109932
ttgttccttctattcggccggtgagcccagttagaagggacgaatctgggaggggccgccgctcatcatggccgacggccagccgacggtgtggtcccagatgccgccgccggcggcctcgtcgaacacctcggggggcacctcctggaatcccccgaggccgaagtcctcggccttgggcagccgcgtcacgtagtcctcgaagtcgtccgcctctgcttgctggtgctgctccgcggccgccagctcgtccgccatcatcatctgctgcatcgccgtcggggtcgcgccgccgaggagctggagttggagtagttggagttgggggagcgccgtcggcggagcagcaggaggggagggcacc

SEQ ID NO: 43959 - DNA, 346 bp, Setaria italica
  misc_feature (335)..(346): n is a, c, g, or t
  Peptide Sequence Number=SeqID_109933
ggtgcagactggatatttggttctgcgagttttctgcagcaacctaggatgctgtcaatttggatttggtgggtttgacagctttatatgatggccaatgttcggattgtttgtttctactggtcctggatttgtgtgtcagactgttaataggatctatacgacatggagtgtgcgtagtatatagaaatggttacgtggctatgtttgccattgaatacagaggaaaggctggcgatgtgtatgtatgtgtgatacttttgacattgagaaaactagcctaaatttttctctgtgacaaaaaatgtatatatttgaaatttttaaaaaaaaannnnnnnnnnnn

SEQ ID NO: 43960 - DNA, 555 bp, Setaria italica
  Peptide Sequence Number=SeqID_109934
ttccttactgccatattcactagaatacaatccctgatctacagctacaatccacagccagtgatgcttctaccaaaaagaaggaaagactaaggaaacaaggggtgtggaaaggttattttatttcagcatcttgttcttgtaatggggatggaaccatttgatcccatctatctactagcaaaagaagcacatgtgctattagtttcatgcatgatcaagtgaccatatatccttagtggcattatgtcctaatctcaatatggagccggatgatgaattggcaccgaattatcaacataccttacaatctgctgacaagcttaggaattcatctctgacttatatactcgacattgattttggatctatataaaacataatctctcccatctattttgtcttaaatgactgagtaatgttgaaaaggatggctttttatagttaccttctccacttgagaaattttctattgtattgtggatacttctgaagaaaccgcacacattgaagaaattctttgttcgacacagtcgtagagaaatttggaactgg

SEQ ID NO: 43961 - DNA, 267 bp, Setaria italica
  Peptide Sequence Number=SeqID_109935
tcgtccttaacttctaactctaggctaatccttaagaaaatgcgctaataggcctaaactagcactaatcaagatctaagtcttatgctaattgctttaatcttctcttgagcactgtgttggatactgcacttgtgtatagcttctcaagctctaaaacttttcaaatgcccaggtaatggggtatttatagccccaagtcctagaactagctattgcttcaacggtcataaaaactgcgatcacctactgatttggtgctcctaa

SEQ ID NO: 43962 - DNA, 603 bp, Setaria italica
  Peptide Sequence Number=SeqID_109936
aaatgcaattacatggatctcaactgtatcagttgagacattgactatgcaattcacgactaatctactgctgctgctccccatcagaatcatctcccaaaacaacaaaaaaagataattttatcatctgactgtaactcctggagaaaactctttcttaagggtccatcatatgagatcggtaaatcattaatagtttacccatcactgaacaagatttgttaggttcaacataatctcgactatgttgggacaggtttgtgaggagaggcagccttacatgcacagtgcatcatcactctcacagccaatctccattgtcaggccaaagggttctcggtactaccctaagattgataacacctgaaaataattcgatgtgtttacagaggatccctaaagcataaaactatttctctttagggcatacaactacagctactcaaatagaagcagcagaagtcaaacatttatttcttttcttaaaacagcacgccaacccctgatttcatttataaaattaattacaaagaatgtcagtattgtaagattattttagcagtcatgttctgttgttttttgaaacattcttaacaaaggata

SEQ ID NO: 43963 - DNA, 822 bp, Setaria italica
  misc_feature (1)..(47): n is a, c, g, or t
  misc_feature (52)..(52): n is a, c, g, or t
  Peptide Sequence Number=SeqID_109937
nnnnnnnnnnnnnnnnnnnnnnnnnnnnnnnnnnnnnnnnnnnnnnnggtcncaaaactttttatttggctagaatggtaactccagtgattggatgacaaaagttacagatgatggtaattaagcacttaaattatcagaataaaaagaatgtaatgcaattacatggatctcaactgtatcagttgagacattgactatgcaattcacgactaatctactgctgctgcctcccccatcagaatcagtatcactacaaaaccaaacaaaaaaagataattttatcatctgactgtaactcctggagaaaactctttcttaagggtccatcatatgagatcggtaaatcattaatagtttacccatcactgaacaagatttgttaggttcaacataatctcgactatgttgggacaggtttgtgaggagaggcagccttacatgcacagtgcatcatcactctcacagccaatctccattgtcaggccaaagggttctcggtactaccctaagattgataacaccaggggacgaggaggcattggtcgacctccctatacaacacgcgtagaggatgatggccgtgccggcgagccccaccacggcgttcatcgcctcgtgtgtcgtctccacacatccccgcagcatcgcccagccatggctgaccacaacaagatgtccaacgctagggttagggattttgccgctacaatgacgagaagtccgtggggagtagattgggactagcgcctggacttggggtacatagaggcttccctgcagcgacatcgtcggggagaacaccgccaaaggtgccattgg

SEQ ID NO: 43964 - DNA, 2039 bp, Setaria italica
  Peptide Sequence Number=SeqID_109938
ttcttcgggacgcagaccggcaccgccgagggcttcgccaaggctctcgcggaggaggccaaggcgaggtacgacagggccgtcttcaaggtggtcgatctggatgattacgccgctgaggatgaggagtacggagagaagctcaagaaggagagcattgcattgttcttcctggcaacctatggtgacggcgagccaactgacaatgcagcaaggttttataaatggttctcggaggggaatgagagaggtgagtggttgagcaatcttcagtttggggtgtttggccttggaaatagacagtacgagcactttaacaagattggaaagatggttgatcagctccttgcagaacaaggtggcaaacgtattgttcctgttggtcttggagatgacgaccaatgcattgaggatgactttaatgcgtggaaggaacttctatggccagaattggataaattgctccgccaggaagacaactcttcagcagcagcaactccttacacagctgctattccagaatatagagttctgtttgttaaacaagaagataccacaaacattaacaagtcatttagtcttagtaacggtcatgctgtctatgacattcaacatccttgcagggcaaatgtggctgtgcggcgagagcttcacacaccagcttctgacagatcctgcattcatttggaatttgatattgctggaactggactcaaatatgagactggagatcatgttggtgtctatgctgaaaactgcattgaaattgtcgaagaggcagaaaagcttctaggttattcaccagatactttattctcaatttatgctgaccaagaggatggtaccccgctttgtgggggttctttgccacctcctttcccatccccctgcacagtcaggactgcacttaccagatatgcagatctattgaattcgcccaagaagagtgctttgctcgctttggctgctcatgcatctgatcccaaagaagctgagcggcttagacaccttgcatctcctgctggaaagaaggagtattcacaatggatagtcacgagccaaagaagtctcttagaagttatgtcggagttcccgtcagcaaagcctccacttggtgtcttctttgcagctatttctcctcgcctgcagccgagatattactctatttcttcctcaccgagaatggcaccaacaaggattcatgtgacatgtgcactagtatatgggccaacccctactggaagaatccacaaaggagtttgttctacttggatgaagcattcaactaccttggaagagagccaagaatgtagttgggcaccaatttttgttaggcagtcaaacttcaaactgcctgctgatcctactgtgcccattgtaatggttggccctgggactggtctggcacctttcagaggcttcttacaggaacgattagctttaaaagaggcaggggtggaactaggccctgctatccttttctttgggtgcagaaatcggaagatggacttcatatatgaggatgagcttagtaactttgttgatactggtgccctttctgagttgattgtagccttttctcgtgagggtcctacaaaagagtatgttcagcacaaaatggcacaaaaggctggcgtgctttggagcatcatttctcagggcggttatatttatgtctgtggtgatgcaaagggcatggctagagatgtgcaccgcacactacataccatcatccaggagcaggggtcactggataactcaaagacagaaagctacgtgaagagcctacagacggaagggagatacttgagagatgtttggtgacgtaccgcccacagagaagcgcgcccgtcgttgtggagtttccccacaaatacaaaagaatgtgtttgtataggaagctaatggccccaactgtggacctgtttctgtaggaggtatacaaggatctgaaatatacagagtaatatgaagcatagcagggttgtttatgtataggactgcagcgagctattatttttcacaacaatgatttcttg

SEQ ID NO: 43965 - DNA, 492 bp, Setaria italica
  Peptide Sequence Number=SeqID_109939
agttaagtttagtactttgcataaagtagtgtaattactggaagatagatcaagctttgatatctaagttgcagcttcgactgttacatgcttattggtactgttgtgagaatagcagcatgttctacatattcgagaacaagtaactgcatctacatttcccacgtgtcgcttgaaaataacgtgatttgcagctaggatgcataatcacctccactatcaggcagccatagattgcagccattttcaagcaagattgttagtgttaagtttttgggggagagagaccttggcaggaacataagaattttcataaggacgaaaatatgctcagagttgatacttagttttatgtttcatacattctgtggttgcttgaaacttactgttcattacacaaatttatctaacttatatatataataaacgaaaattgaataagagacaccctgaccattgtagtcaaatcaagcactttaacatgcatagcca

SEQ ID NO: 43966 - DNA, 555 bp, Setaria italica
  Peptide Sequence Number=SeqID_109940
cctgtcagatactacagccagctgacagagacagataaaagaaagcacaaaaaaacaaacagaacaatggaagcaggatgagaaaaatcggaagaccgattgggctcaccattagtagaatagagcggtgctcagtgtacaggggagccttccaaaagcaggatagatgccaatataaccaagttggtgagacgccgtccccaccacaaagtggacagcaacacaggttgcaggttggtggcctccacagcaaagcttcttccacagggaaatggtagttaacttcatgctgagctagggaacctttcaagatcaaaacaactaattccatggcaatggagaagttaggtcttaaggataaagaactcctcaggggccctactgtctagaaacctgtcatttcacatctttcttctccatgcatacataaatgatgtacaaaagagagtaatgagtgatagaatgatggcccaggagcttaaaaagatctatctatcattcatctcactcacttatcaatcaaccaagatgccagaaatgtaacaaagatggcat

SEQ ID NO: 43967 - DNA, 1366 bp, Setaria italica
  Peptide Sequence Number=SeqID_109941
gccagggcttccgcgacgcgatcggccatggcggcgtctctccgggcatcgtcctccctccgctcgcgcctcctctcgtcctcctccgggtattatccgtggcgcctcctcctctcctcacccgtccactcggacgccccccaccagaccgaaaccctcgccttcgacgagatccagctgtcgcccgagaagccgcccaccgccaccgccttcgtcctacacggcctcctcggctccggccgcaactggcgctccttctcgcgcatcctcgcctccgaactccatagccgctccccttcagacgagtggaggatggttctcgtggatttgaggaaccatggcaggtcggccgggattaaggggttcgacccgccccacaacatgtcgactgccgcgaaggatctcgctgatttggtgaaggcccgtggttggccatggccggatgttgttgtgggtcactctatgggtgggaaggttgcgctagatttcgcagagagctgctcacgtggtgtgtatggagagtcggctgttcttcccaaacagctctgggtcctagattctgtccctggacaagtattaacagataacagtgatggtgaagttgaacgggttttgcaaacactagcgagtcttccttcttcacttccatcacgcaagtgggttgtcgaccacatgctcagccttggattttcaaaatctctttcagaatggattggcagcaacttaaagaaggacaatgatcatgtgacctgggctttcgatcttcaggctgccatagacatgtttaattcttacagggaaaggagctactgggaactgctggagcacccacccaaggatttggagattgcaatcgtgcaagcagagcgcagtgaccgatgggaccctgatgatgttcaaaggctaaaggcattggcaaagagggagtcgaagcctgatgcagggaaggtgtcacttcacgttttacccaactcaggccattgggttcatgtggataaccccaagggtctacttgagatcatggcgcctaacttcctgtcagctggtaaaaattgagcaatattttcaactggaaccttcacttagtgtgacatctcagtttgatgaccggagggataccattatcttctctcgttttgttgtcggatgagagctctttgccttcgtttcttttttatgacaacacgcttataccttctgtcaataatagaggaaaagattatctagagtcccttgctttctttctgcaaggtcattgtgttaaattgcattgtttgaaagtcgattccattaataaaggagaaagtgttatctattcaaacattaagaaaaaaaaaaaaaaaaaactagaaagaactagaccaaa

SEQ ID NO: 43968 - DNA, 636 bp, Setaria italica
  Peptide Sequence Number=SeqID_109942
aaatttattcatattaaccatagcaattcacaagctaaggctttgttcaatcatcattcttaggtctaagtaaatcactgatcccatgggctatattaagttatcaactcgtctcagtattttctaaagcattccctaccttctaatgtaaaaggagctaaatatgaatcgttcgtacatcaggttaaagtctctaagtatctgctgaattaatcaaacaatatcctccgtttcaatttgaatttacaaaactaagctaccagaacaagatcatatcattcctagaacagaacagccaataaaaagaaagaataaaacgttatactaaatgccccactttatttaaatgatgtttctttctttttgactggcaaatgatgtatgaaactatggggaaggaccttatacatgataagaacgaaaacagaggggcactttgttagcagttgaaacttgaaaggctagtcgatttgataacaaaaatgaaaacagtcagagtataagagaatttttataataaaagacaaaggagatgctaaaggccggagtaatgtgtgaaaaggtagtttccatttaattatccaggaatgcttaagtcagcagaaaattgcaccataaagtaatcaatagccaaat

SEQ ID NO: 43969 - DNA, 1518 bp, Setaria italica
  Peptide Sequence Number=SeqID_109943
ccgggaagattccgagctctgggcccgtctcatggcgtccatggcgcaggtcgaggaaagggatggattagactcatctgggttgtcaattgacaaaaggttgccgttggatgctgtcaaatctcctctgaaggatgatgcagtgcaacccaaggaggggatggatgggtaccctgtcaaggttaggaagccttacacgatcacaaagcagcgggagaagtggacggaggaagagcatgagaagttcctggaggcactgaagctttatggtcggtcttggcgccagatacaagaacacattggcacaaagactgctgtccagattcggagccatgctcagaagtttttctccaaggtggtgcgcgaacctggggcaagtaatgcaattgagatcccaccccctaggccaaagagaaaaccactgcatccatatcctcgcaagtgtgccgattccagcaccttggcaaatcctgcagtgggccaaccaaagcttgcccctatatcatcgtcgtctggttacaacgtagagaatggttcacctgtgtctgtgctatctgcaatgcagtcggatacttttgggtcatcagtatcaaatccatcaacagggtgtacgtcccctgcatcatcagatgatgggaataatgcccctgtgttggtgagtgaagaggaaaatttacttactcaacaagttgaggatgatcagtcccgtcaggaaatgaagctggacaacagtgatggcgacttatctgaagaggattcatcgggaggagtgcaagaaacaagtttgaagctatttgggaagacggttatcatcccagacccaaagaaagtttgctcctcggatgggggctgcggagatggtgagaaaagctcccaaccttctaagcaagaagtgttacaagcatcctcgattggaggggtggcagcgtaccctacccataatggatggcttcttccataccattctttccagtttcatatgggtgattcagggaatgctaggatttcccctcttcatgtatggtggccttactatggtttcccggccggccatccaagaggatttagtatggggctgcctactgaaggtacctgtgagagtgataccggcaagagcctttcagctgaatctagttcagactgcctaggcaatgttcagacaacggcccctaccaactgcaaagttgtcaaggagccacttggggcaattcaggtgccagagtcagctctaagttttgagctgaaaccgagcacgaattcggcctttgcaagagtgaagccgggaagcagcagagatcattctctaaggggatttatgccatataaaaggtgtaaggtcgaataacccagccagacatttctctgcagcaatttttaaactgagattaattgtgaacagtagagagcagttgcgcacgccccttgttccagcgtgcgcgccattttttacttgcagaggcagagattggccgtgtatttgcatcaattgtttcctgtttgcagcttgatgtaagatga

SEQ ID NO: 43970 - DNA, 427 bp, Setaria italica
  Peptide Sequence Number=SeqID_109944
ttttttttgtcatacaatgccaggaactgttatagcacaccatcaaggtgcaaatgaagctatcccatcagtcacatttatgcccacggccagtgcattttgagggaggaaacactctcagtctcactcctcaaattatcaggtacgcttacaaaatattgaagccctctgcaccgactgattatagaactaacttcgtatatattatcagctgactcagggcacaggacgatacgctacacccagagtgcccccgcattgcgcagaagagggacgaggttgccgcttaggtggagcgacatgaccttgtctgtggagccgacgagcctgccgccgatgaacactgctggcacaccggtgctgcggcccagcagcctcgccagcgccttctccatctcgtttccccgcgggtcctcgtccaactcca

SEQ ID NO: 43971 - DNA, 732 bp, Setaria italica
  misc_feature (1)..(7): n is a, c, g, or t
  Peptide Sequence Number=SeqID_109945
nnnnnnnttttttttttttttttggtccgcatcaaacttgctgactctgattaaacatttgatacgtacgggagacaaaagaaaaagaggtagtacatgtgtatatgcatcatcattactgcacgtacgaaagaccctgatccaacactcacccctctatagattattattacagtgcagaaaaaaggcctgcttagttaatcactttcctccatctcctgataataagcacacacgttaattattctccagcgtacgtatgagcgaggtgattcagagcagccggcgctactctgctacacccagagcgcgccggcattccgcagcagcgggacgaggttgccgctaaggtggagcgacatgaccttgtcggtggagccagcgagcctgccgccgatgaacaccgccggcacagcggggctgcggcccagcagcctcgccaacgccttctccatctccttcccccgcgggtcctcgtccagctccaccaccgtcgggttcaccccgagctcgcggaacaggcgtgtcaccgtgtggcacatgcagcaggagctcatgctgaagatcaccaccgcacgctgagaagccagcttcgtcacccggtccattattgatcaagaaggtgatcgaacttcttagcgaaaaggaacttgcaagaattgaagagaaaaaatgtaggcgagctagaagagcttcttaattgtttgtgagatgctttgagtagtagtttgt

SEQ ID NO: 43972 - DNA, 451 bp, Setaria italica
  Peptide Sequence Number=SeqID_109946
ggtttaagacctcacctgaagacttagcttagccactttctcgtccgaggagaaaaatcagccgtttgatgtatggtacaatctgatatgcaggaaaatatgtcaatggggctacaattgttgttgatggaggcctttggttgagtcgacctcgccatattcccaaggaggaagtgaaggcgctctctaaggttgtcgagaggaaggtcaggacctctggtgttggcgtgccatccagcaaattatgatggcatctttgtttatgtagctctttggtgtgttctgtgtagaatatgtccatattgttgtcaccactcaccagtattgttctcagtttgattatgtcagctgaccacagtctgttcagctgagcaaagttcaaacatttactgttgatgtattccaaatcgcattagaaattgatgagatttgttatggcctcccaaaaaaa

SEQ ID NO: 43973 - DNA, 463 bp, Setaria italica
  Peptide Sequence Number=SeqID_109947
gcaggctgttggtttcgatggagatgtccgcaagcaggaagatgctgccagagtgcttgcggcaacagttgagcacttcggcaagctggacattcttgtcaacggtgcagcgggcaacttccttgcttccccggaggatttgaagcccaagggattccgaaccggtacttcatcataacgcgccctgatttgatgatgctctttgttccaaatttgcgtacattgccatcaataagctggatcttactagtttgcctaattgtgctagcctgttaccccaaaaacttatgtgttattaagatgtttattactgtacttcatgctcattattctactgtctcagagaagttagtattgacaacattttcttgctgcagttcttgacattgacactgtgggtacatacacaatgtgttatgaagccatgaagtatctcaaaaagggcggaccagggagagggcca

SEQ ID NO: 43974 - DNA, 632 bp, Setaria italica
  Peptide Sequence Number=SeqID_109948
ttccagagccaacgatctggtgatactatccacactgcactacactgcagcttggtaccaaattcatgtctctgctgctaaggcaggtgtggatagtatcaccagatcgttggctctggaatggggaacagattatgacattagagtcaatggaattgcaccagggccaattcaagacactccgggactgagaaagcttgcacctgaggaaatgagcaagggacttcgagaaatgatgccactgttcaagtttggggagaagcaggacatagcaatggctgcgctctaccttgcttctgatgcaggcaaatatgtaaatgggactaccctggtggttgatggaggcctttggttaagtcaccctcgccatattcccaaggaggaagtgaaggacctctccaagcttgtcgaaaagaaggttcggacctccggtgttggcgtgccatccagcaaattgtgattgcatctttggttgtaccatccttctatgtgatctgcagcttgtatggatattgtagtcaccaaactctattgtctatgtggctctgtatactgtgtttaattgaggatgttcaaatatttaccgtattgatcctcttccaagttgcataagaaatacttgtatttttttt

SEQ ID NO: 43975 - DNA, 216 bp, Setaria italica
  misc_feature (3)..(3): n is a, c, g, or t
  misc_feature (12)..(12): n is a, c, g, or t
  misc_feature (18)..(18): n is a, c, g, or t
  Peptide Sequence Number=SeqID_109949
tcnggtggttangtggantcgccaaaggaggaggatgcggccaaagtgcttgcggcgacagttgagcattttggcaagcttgacattcttgtcaatggtgcagccggcaacttccttgcttccccggaggatttgacacccaagggattccgaaccgttcttgacattgtatatgtacccacagtgtcaatgtcaagaacggttcggaatcccttg

SEQ ID NO: 43976 - DNA, 265 bp, Setaria italica
  Peptide Sequence Number=SeqID_109950
cgcggtgccgtggtgcggctgtgtggactgtggtggagtactacgaactataaacaaaacggacagaggccggccgcagccgaactccttcggtccccttccccaatcgcgccccagacgcctccggaaccgcgaggccggcgcgcgcaagatctgagccgaggggatggagtcaccattccgggcagacgtgctcaaggggaaggcggcgctagtcaccggcggtggatccggcatctgcttcgagattgccgcccagctcgcg

SEQ ID NO: 43977 - DNA, 1347 bp, Setaria italica
  Peptide Sequence Number=SeqID_109951
cgcggtgccgtggtgcggctgtgtggactgtggtggagtactacgaactataaacaaaacggtaagaaaggaaaaataagaagacaaaagggggaacgttcggtagaacaaccaattaatttaaagacttagggggcagaggccggccgcagccgaactccttcggtccccttccccaatcgcgccccagacgcctccggaaccgcgaggccggcgcgcgcaagatctgagccgaggggatggagtcaccattccgggcagacgtgctcaaggggaaggcggcgctagtcaccggcggtggatccggcatctgcttcgagattgccgcccagctcgcgcgccatggcgcgcaggtcgccatcatgggccgccgccgcgaggtcctcgacaaggccgtcgccgctctccggtcccagggcctccgggctgttggttttgatggagatgtccgcaagcaggaggatgcggccagagtgcttgcggcgacagttgagcattttggcaagcttgacattcttgtcaatggtgcagccggcaacttccttgcttccccggaggatttgacacccaagggattccgaaccgttcttgacattgacactgtgggtacatatacaatgtgctatgaagccatcaagtatctgaaaaggggtggaccaggaaaaggcccatccaatggtggcctaatcattaacataagtgcaacactgcattacactgcgacttggtaccaaattcatgtctctgctgctaaggcaggtgttgatagcatcacaagatcattggctctggaatggggaacagattatgacattagagtcaacgggattgcacctggaccaattcaaggcaccccgggactgagaaagcttgcacctgaggaaatgagcaaggggcttcgagaaatgacaccattattcaagcttggggagaaatgggacatagcgatggccgcactctatctgggttctgatgcaggaaaatatgtcaatggggctacaattgttgttgatggaggcctttggttgagtcgacctcgccatattcccaaggaggaagtgaaggcgctctctaaggttgtcgagaggaaggtcaggacctctggtgttggcgtgccatccagcaaattatgatggcatctttgtttatgtagctctttggtgtgttctgtgtagaatatgtccatattgttgtcaccactcaccagtattgttctcagtttgattatgtcagctgaccacagtctgttcagctgagcaaagttcaaacatttactgttgatgtattccaaatcgcattagaaattgatgagattgttatggcctcccaaaaacgaagtgtttataa

SEQ ID NO: 43978 - DNA, 468 bp, Setaria italica
  Peptide Sequence Number=SeqID_109952
gctacatatcccatagttccagaaagctttatattccctttgctgtgattcccactagtcactgcaaggccgaaatccgaaatcttagcattgaagtctggatctaaaagtatgttagatgatttcagatccctatggataattggtgggttgcagtgttcatgcaggtactctaatccccttgccgtgtcaagagcaatcttcatccgaatgtgccagcttagagctgaaccatgtgacggacctatacaaaaccacagggattacatcgaagcttctctaatctctaatttattaaagattacaggacgacaataaacaaaagcgaacaagaaaatacagttaaaaaagtccttaaagaaaaagattaccatgaagttgtgagtccaatgacacattctccatcagctcataaacaatgaaacggttctcctcatgaatacagaagcccacaagggacactatgtt

SEQ ID NO: 43979 - DNA, 1414 bp, Setaria italica
  Peptide Sequence Number=SeqID_109953
ctttttactctttatacagccagggcaataacgtgaacctgctccacaaacccaaaaaaaatctgccaatttagcacctcagattggcactcagacaaacatcatggaaggcgatgcaagcaaggaaccataacccctgctcaacatcataagttatctggagtcctgaaccacttggatgagccctactgcatcaccaattccagtcatgtccatgtttcttttatcttaacaaaggagaatgcctttgagtagcatagggcgactctgggttgatcctcagagttcctccaagctccatgggcaccaggggtaccagagagtggagtacatcagtgatcaggggcctgtaacttggctctggttgcacacagagcacagccactgcagcaacttggtacaagtgcttcagatccattgtgttcttgatcatggggtcaattatgttagggagtttggatctatcagttagctgaggcatggcccatgtaacaattgattggcactgagattgtgccgtcttctcaacaggcttccttcctagcagaagttctagaagtactactccaaacgcatatacatcgctcttctcagtcaacttcccatctaataagtactcaggggctacatatcccatagttccagaaagctttatattccctttgctgtgattcccactagtcactgcaaggccgaaatccgaaatcttagcattgaagtctggatctaaaagtatgttagatgatttcagatccctatggataattggtgggttgcagtgttcatgcaggtactctaatccccttgccgtgtcaagagcaatcttcatccgaatgtgccagcttagagctgaaccatgtgacggaccatgaagttgtgagtccaatgacccattctccatcagctcataaacaatgaaacggttctcctcatgaatacagaagcccacaagggacactatgttcggatgccgaatcctcccaagcaaatctagttcattctcgaattccttctcgcaattctgtgctccaccacccaatctcttcaccgcagcagcaaaccctccatcaaaattggctctgtacacacacccaaacccaccaactccaagcacactgctctcactgaattttcctgttgccgcctccaaagatgtgtaatccatcatcgcagcagtactcttcttgctagtcttgtatgagttgaagctgttcaacattggcacaaatgcgatcctcgcggtatctatgctctgggtgtccttggagtccaccaggcctctccgtgatcgccaccacagcacgaacgcataaagtgcggcaaggacgatcatgaccccggcgacggaggagaggacaatggccgcgatgagctccctgcggaggtggtggtgcccctccaccacaatgaccac

SEQ ID NO: 43980 - DNA, 840 bp, Setaria italica
  Peptide Sequence Number=SeqID_109954
ccggatcatctgcattggccttactaacagttcatctattgtaattgttgtctattatgtgcatctattccatccttcttcatcttttttctcccatcttcaatagttccattctcttttctttttcttcctttcttatgcattaaatctttagggggatccataggtatgccatactttttggcgagattctcatgtataacccatggggtagtctgtgttgttgaatctctaataaaaatcttcagtgtgttcctgctaacaggcgccctccggtagaagagatctgcagctttgacaactgatgtgttgatcaaagtcttgtcccgacgaatccaacccacttcacacatctttgtgccatcagaataaaaaatcttcataatcttgcaaggtaccgcagaaccatcctttttagcatgcaactctattccttcaaatacttcttcaagcaaacaagcatatatcttattgataagatcatgtaagccaagagtgctgtattgagtcatccgaagaacataagccatcaacccagttggtaaattttgagccttctccattgagttatgttcagacaccaaagcttcttcaaagttaaattagattttccagacatcttacatgtccaaactctttggcgatagaggtttagcctcttcagatattcttgataatctcggaatatctcctttgtgaagcgaatttggaacaccttctccttcgaatccaagtccttcgggggctccagtaaggagaaaggtttcttattgaagagaggcatttggcctatgatctaaccgacacgcacctcgattcgacgcggcacggaggaggcct

SEQ ID NO: 43981 - DNA, 408 bp, Setaria italica
  Peptide Sequence Number=SeqID_109955
ggcggcctctgccaccgccgccgtcgccgcggccaccgcgatggcgcgcttgctctgctcgtcgtccgcctcatccgttgccgcagcgtacccccggcgaggcgtcgccgagggctgcaccggaggcgtcggaggccgcgccgccaccggcgccggcgccttttccctgaaggacttcccgaacccccagcgcctcttttccttcacgggcttcgtctcggcggccttcctgccgccgccgagcagcccgcgcagccacctgggcgcccagcccatgtccgccgatctaccgctccccggcaggcgtcggccgcatgaggcttccccgttccagcacttggccggagtagtgggggaaaagaaagagcgggagatgaaacaaaacagtgaaaacgcgcacacgcttac

SEQ ID NO: 43982 - DNA, 1220 bp, Setaria italica
  Peptide Sequence Number=SeqID_109956
aagaggaagacggggtagacgacgacgacgtgggagggggggaggaatagaatgttctcttccaagaaggccactagcgccgctgccgctgccgctgccgtgagctcaaatgatagacagatgtgtgttcagggagactcgggcctcgtcctcaccaccgaccccaagccccgcctccggtggacggtcgagctccatgagcgcttcgtcgacgccgtcacgcagctcggcggcccggacaaggcgactccaaagactatcatgagggtcatgggagtgaaggggcttactctctaccacctcaagagccacctccagaaattcaggttagggaagcagccacacaaggagttcaacgatcactcagttaaggatgctgcagcaatggagatgcaacggaacgcggcatcttcttcaggcatgatgggaagaagcatgaatgaccgcagcgtgcacatgaatgaggctatcaggatgcaaatggaagtccagagaaggctacatgagcaactagaggtgcaaaagcacctccagatgaggattgaagcccaggggaagtacatgcagtccatcctggagaaagcctaccagaccatcgcctccggcgacgtcgcagcgtgcccggccggcgggtacaagtccctaggcaacccggcgatcgtcgacgtctgctccttcaaggacattggcccttccatgggcttcgcctccttgcaagacctgcacatgtacggcggcggccacctggacctgcagcaccagatggagcggccaatggaggccttcttcgccaactgcgacatgggctcgctggggaagaagaggctcagcccttacgccgccggcaagagccccatgatgtggggcgacgatgagcagggcaagggaggcatcgaccacctccagatggcgccgccaatgatggacgccggcggcatcgacgtcatggactccatcgccgacgtgtacggcgacgtgaagcccatgatgtccagcgactccacggggagcaagggctgcttcgagggcaagctcgagaggccatcgccgcggcggccgcacatgggcaacgagaggatgggcagcccgtcggtgatcggaggccagacgaggaacctgtcctaacgggtaaaaaactagctcactgattaaccagtgcttaacttgcggtgaaattaaattaaagcaggcgattattactattaaccaccggtgcatgg

SEQ ID NO: 43983 - DNA, 360 bp, Setaria italica
  Peptide Sequence Number=SeqID_109957
aacttgtaacctatcaagcacgatgcgcgggactgggaatcctgcgccctcgtcctgtgggcgctccatctgccgcgcaacgccggtgcatgcgacatcgcggacctcctcactcgagagctcgagctgagcagcgaggagaggtctccgtcaagctccaccagctgaagccctacctgatccgcttcgagcacgctgcccatgcggcggaggctcgccgccaaggacacttcacaggaggaggcatcgacatctacctccgcacctggagtagcctgacgcacgccctcggcttccacatcttctacagggtgcacctctgcctagatgatatcccgtcccatgcctggacatcggaga

SEQ ID NO: 43984 - DNA, 447 bp, Setaria italica
  Peptide Sequence Number=SeqID_109958
tttgtttctttggtagtttcccgtaccttcgtcttgtccgtattgccaaggtccttctccagcttgtacctcttcatcgtcatctcaaccatcataggtgtgatgactagaaggtttgacaggttacagccaagggccaaaagaaggaatccaagctggtagcgctcgacggttgatgctgtcttccaggggtgcaggtatgcgaatgctgccacagatatggctgaacatgctgatatcaacatgaagtacgccgggaacattttcccctgcagactcccaaactggtgcctcggtaagtacttgaacatgatggtgccgccgatgaaggcgacccagaggccggcgccccaggcagtggcgaaggcgaggaggtggaccagcctcgccgccgccgctgcgccggagccggagccggagccgccgaggcgcagcgcgtcgggcgcg

SEQ ID NO: 43985 - DNA, 771 bp, Setaria italica
  Peptide Sequence Number=SeqID_109959
ctgccagggtggggctcctcttcgccatctccttgttcttggagttcccgacctcgctgccgatgccaaggtccttctccagcttgtacctcttcatcgtcatctcaaccatcataggtgtgatgactagaaggtttgacaggttacagccaagggccaaaagaaggaatccaagctggtagcgctcgacggttgatgctgtctttccaggggtgcaggtatgcgaatgctgccacagatatggctgaacatgctgatatcaacatgaagtacgccgggaacattttcccctgcagactcccaaactggtgcctcggtaagtaccttcagaataaaaaatattttattaaaacattgtcaaagtttagaatatgttctgaatgggaatggtcgaccagcacagtggcacatggtggtatattgctattgtaacaacaatatatggtaggctttagttttcaggtggacttctctgttctcactataaataggtaatatgtataatgcctaaaaaaagtagaaggtataattgaacacctgagcaatatacattaccttctagactctaagactgcacaaacatattactcccaatacgtaaccaacaaacagaggaacaaccccacttgattgcaaaactgcagcagtggctaccagaacattcagaatgtattatgacaaaacggtgacataattcatcacagtatccacaagcttacatttcatccaatgtttcatgggaaatctagcacctaagagctctctccatac

SEQ ID NO: 43986 - DNA, 423 bp, Setaria italica
  Peptide Sequence Number=SeqID_109960
tcttttttaacttcgtagtaaccggagtgggacgaggggttcacctgtgcttccggcaagaggttgcgcagcccgaacaggcaagaaggaggcggaggtggaggggacagcggcggccatggcgatggcggcgcgccggcgcgggaacagaagcggtggtggttggtgatttttgcaggttttcctttttcttttttggttctcttactggataatgataacagagtttggatagacttgttcgcaggctttgggccgtttggggggcttccttcatgctgtctcgacttacatgggccttgcaaagaattttgggccaacttcgtcggcttggctgaccggtgatgaaattagttttccttgatagcatgactgagaaagcaacgaatattgcaagtcaattgattattgattaacggacaa

SEQ ID NO: 43987 - DNA, 375 bp, Setaria italica
  Peptide Sequence Number=SeqID_109961
gggacagtgttctgcgtcgaattcttttgagatgcctttgtcgagttgcttctggatctaaggaatgttggactctcgccggagatcggcctggggatcctcccgagagaccgcagcgagcgcagatcccgcacgcaccggcgcagcatggtggtgggatatcagcggaaccaccaccccccttgttatcgccgctggggtgaggatgtggaggtggagggggtgagggtcggtcgagcgatgcggctccgatccctctgcacggtcaccgccccgagccgcgcagcggcggcggcgacggcggcggcaagggagaggcggcggcgggtggggaggcgaaggcgcagagcggcgcgtcgccgggcggcttcccgg

SEQ ID NO: 43988 - DNA, 2214 bp, Setaria italica
  Peptide Sequence Number=SeqID_109962
tttttttttaacatcaaaagaatcattagattcaccattagactagaccgcttgtaaacggttacatgactaacagcaatttttcatttggcatagatagcctaaccaaaaaggttgatatcactatagccgacgaagattacattcggcaattatatccaaaaggtcagaacaggaagtagctacagggcaaaacttattagctctgtttacagcaggaaagctaagcagggcccgcttgagaccgagtggccccctttgcagcatggtctgggaaaaatgtggttcttgctcagagtactgaagccagcaatatcccgttaaacaaaaggaaggaaaaacgagggtcaaaatcatgagaatgtggtcgaagaagcacaagcatgaaggagagcaagtgtctgctcggcgattgcgcgtttcctcgcttgctttacccactcggtagctatttccgctgcttcacttccttgtaaccctccttccaaggcatcagctgctgtacttaagtctccgtccacaatcaacctttccactctgcttataagggactcaatgccatctccagaactatcctctttaatcttgatggaagaggcaacacgagcaagagcatgtgtcaggattccaccaccaccttctggtataaggctgaaatgcctgatagtttccttcaaggagttaaacttttgtttcaactccatccgggtatctgatccgtaatctaaaacatcttccggaagcgacgaaagagccaattctaacagtgaatctttgtcaataccttcaacagatttatgcaatagttccacttctgatcggattggtgatccactggataaagcgtgttccaaggcaagagtacctaaggcaagcttatgaactgaatgactctgtctagcttcttcagatcgtgcataaaatgccatgcatagcgcatcaatattgaggtttgcttcagcaatctgttcaatctgggttgctttctcttttgcaacagctgcagccatttcagcttttgccaactcttgagccttttcaatttgttgccttgtttcttcttccttcctctgcagctcatcccgcaatttttgtttcagctttctcttgaagttcccttattgcagcagcattcttcagtttctctttctttaactccttatccagaattgctgcctcttctgcatacattagttccctggccctggtgtctttcagctccttttcatatttctccttcaactttcttttctcttctgaatacatgtaagcatctgcatctgcctgcttcttttcagcagcgtgaatagcttctatgatatcaagtaccactttaccatcgtcagaaggttttttgggaagagcttcatccctactagtttccttagcagttgcatcttttgaaacatcaggctcatcttgcagcaaatatgtctccgcaagagatttctgttcagccacatcagctcctgagagatcctttggtgcatgtacatccgtgggggggtcattgtaaggactgactgttgtcgggcttgactgtactggagtaactgtgctggctgtctgatcagttttctgttcatgaggaacttcacctgtttccttatcatcaacaacaactggatttatctcaacagccggagaatcttgagatggcaattcagtgtgagatccgtgctcatctggaactggatgtgtctcttggcgtagggtttctgatttcttttcttcttcaggaacaagctgatccctatcaattggaatctctggtgcacccgcctcttcatttgcaaggtcctttggagtatgagcctctttatcgctagcttgaaaaacctcagtgtttggttctgacatgatctgtgtctggtcaaccttttgttcagaaggaaccttaagatcttcatacacctttgcgacatctggattcttgaagctgaatggtaatttcttgtccttaagttggaaatctatataaccaagttgatgtgcgcccacagctgcagcaccaatcacaatcgttccaagcacaagctttgaaacattgcttcctgactgagaagactcttcttgagaacctgggacagtgttctgcgtcgaattcttttgagatgcctttgtcgagttgcttctggatctaaggaatgttggactctcgccggagatcggcctggggatttccggtaagtcgtacgtaagtagtcctaattt

SEQ ID NO: 43989 - DNA, 376 bp, Setaria italica
  Peptide Sequence Number=SeqID_109963
agttagactaacgaaccttaagggagcatctttgatatgatccccctttaaataccacatggattcagccggattttgaatttctcccaaatcgtgttcttcgcgtagggtttcggtttttctccaaatccacgatgaatacttaagctttttgagatctttctcatggatctattagcccttgggcctgcacatctgtggctcaagtttcgtctcgatttatggagtattgagggcagatttttgaataaagttcgagccaagttctcggtgccttctgttttctttctgttcttcagttcgagcagcaggcgagaggctcgtggcggcgcacgtctgcaccagagcagcaggccagcgagttgcgcagcaggcc

SEQ ID NO: 43990 - DNA, 455 bp, Setaria italica
  Peptide Sequence Number=SeqID_109964
tactcgcaggtgttcaagaccgcgtgcccgcgctcctacagctacgccttcgacgaccccacctccacattcacctgcggcggccgccccgactacaccgtcaccttctgccccggtttgtgtccgtgacgccacgtgaagccagaagtcgacgaccatgccgggcgccacgccgacgacggtaccggggacgaccaccaccacgacggtgccgggcgccacgccgacggctgtacccgggacgtcgtcggtgccgggcgcgacgccggccatgccgacggggaccatgatgcccggcacgacgttcacggacgccaccccggacagcgcgatgccgatgggcggcggcggcggtctcggcatcgagggcggggagcaaggcagcgtgctcctcggcggcagcagcagcgagggcggcgtctcgtggctcgccaacatggccaccggagacgccg

SEQ ID NO: 43991 - DNA, 384 bp, Setaria italica
  Peptide Sequence Number=SeqID_109965
agaattagaaccaaaccaagggtgttcaggttttcccagagataatggttcctcttgttgggacacctcaggaactggggaatcaagtggcccttatccgtgaaactgctaacaaagttttcgctgctctgggtaaaaaccattgactacaaaattggaactatgattgaaattccgagggcagctctagtagctgatgagatagcagagcaggctgaattcttctctttttggaacgaacgacctcacacagatgacatttggctacagcagggatgatgtggggaagtttcttcccatttatctgtctcagggtatcctccaacatgataccctttgaggtgctggatcagaggggagtgggcgagctggttaagttgctac

SEQ ID NO: 43992 - DNA, 607 bp, Setaria italica
  Peptide Sequence Number=SeqID_109966
gtcctcagccatctcacttatgtccggaaccacttcaaatccttctgtattaccaggccaatgcattcctgtattgctctttgtctttgaggatgataccgttgatgtttcaagtgctgccacaagtttagatgatatcggtgacgcattttcatcaaatcagggttctacctctgatggatcatcaaaacaaagctcagcttcaaaaggttctggttcagtggttatgcttgcccgggcagcaaacaaatctgagagtagttcaggcaaaaagttgcattcctcattagagggacagattcgtgtcttgctcaagaagtgtagggtgcttgctggcatggagccaggtcatattggtccgaggggtgtaaataacatgagtcatcatgtacccttgttctcacttgatacctcgagggttgttgcactgttggaacggtctatcaataagaaacaagagccactagacatcattgcaggattgtttgaagattctttcagctccaaatcaccactggatattctttcactggaaaacaactaccacccaacaaaccatgatgactctcagttaatcaaggactttatattccggcagtctgatgca

SEQ ID NO: 43993 - DNA, 573 bp, Setaria italica
  Peptide Sequence Number=SeqID_109967
tcttttcgttttttgtagggtcacactagcagctagccctcattttatagccttgtgcttgtgcaggaaaaggtggaggcggacaaataagttagtaaacttcagggttatgatcagatagtccattcacaatatgactccccaaacaaccattctgttagattctctgctgcttgtgaaccgatctaattcagtatcgttctgaagttccaaaattacaactggagatgcctgattgttcagagttacttaaactactgtattttcagctggtaatttcccttttcatgttatttactcggtgccaaattgcctgctaagctgataaggagtgctagagcctagactgataaaattgttcattatctgtttcttaaggtaactcttttgccaagaattactgcaaaggatttttctgctcaaatataaagatgtagcattatccctcaaagctcttttttctgatagaatgcaaagcaaacagtgcatgtctccaaacaacttctggaacttgtgtacttgactttgttgtattgtcttacttgttaaaagagcagcaaaggcgtaactagc

SEQ ID NO: 43994 - DNA, 395 bp, Setaria italica
  Peptide Sequence Number=SeqID_109968
aacgggtaaaattcgggtaattcaaatagaaggactgttacccaccggtgcgggtaattcaaatagtttgaagggagcgagagaaataaaggaatattgaaaaaacaatggaacggatataattccaataggtcattctctcatctattggagatttgcacacaagccctcattaggtttgtggaaaccaaaaggaacatcaaaggatggtttaattttctattggaatgtttcaactttcaccgtttgatccaactcttttccattcctcagtgagggttcacttctggacttttcaccagaaagcatgcatagagtccgatataaatgaagcagataatcattggttactctctctaagaacaaaccgtctccctttcttgttcgaatttctc

SEQ ID NO: 43995 - DNA, 297 bp, Setaria italica
  Peptide Sequence Number=SeqID_109969
aaagtaaagagtgtaaagaagaaagtaatctaaggtagactacaaggtttagacaatactaaaccaaccgtgcgataatcgcctacaatacccacgccaatcaaacgctgcgtacaaagaatatcacgcacgccgccggccgcaccaccaacgcgagccgtgcgtcacacatccacacagctcagacgttgtcgggcaggtcgaagtgctggacgccgagcacctgcagcgcggcgttctggacgaagaggacaacgccgcacttggcggcgcggaagccgtcccagagcgggaact

SEQ ID NO: 43996 - DNA, 796 bp, Setaria italica
  Peptide Sequence Number=SeqID_109970
tagtaacctaattttttttccacctaatcgcaatatagtacgtagtagcagtagagtaaaagaatactgtgctcaggtttgcatctaaccaccgtgcgataatcgcctacaatacccacgccaatcaaacgctgcgtacaaagaatatcacgcacgccgccggccgcaccaccaacgcgagccgtgcgtcacacatccacacagctcagacgttgtcgggcaggtcgaagtgctggacgccgagcacctgcagcgcggcgttctggacgaagaggacaacgccgcacttggcggcgcggaagccgtcccagagcgggaactggacggtcccggacacggacttcttcgcggaggcgccctcccgcaccgccgccaccttctccaggcggcgcaccacgtggtcgttcagcagagacttgcccttgttctcgccgcgcccgcagtccgtcaccagcccgctctcgtacagcgccaccagcacgctcgcgccgccggcgccctccacgcggctgcgcagggtgcccgtgaacgacgcctgcagcgtcgtcgggttcggccgctggaacgtcgccttcatggcgggcgccgggtatcgcggcgcgtcgcggacggcctgcgcgagcgcgtcctgctcggtgccgacgcagtgcgcacggccctgcacgacgacctgcggcgtgaagagcgtgtcgaggcggagcgcctccacgtaggccttctggcgcacggtccaggcgctggacgcgaaggggtccttccacccgctgtggtcccagtagtccacgtggaacgccag

SEQ ID NO: 43997 - DNA, 447 bp, Setaria italica
  Peptide Sequence Number=SeqID_109971
gtgctaaaattaataaggaagagaaccaaaccaggtccaacaattgccgtgaccaacctgcaagatgccacttaggcacagcggcggcagggagaaagagaatagaaggaacacctggcctgagagctttccatctacaaggggagaatcctcctcttcctgaagtaccagaggaaggagccgaacacgacggcgccgcagacccctgttatgacgagggtccactcgaacgcgtggggcaccttgaacagggcgacctcaaagttcatgccgaaaactcccgagaccacgccgaagatggccaccacgaatgtggcggtggtcaggagcagctcgaactggatcagctggttccggacgttatccagctgtatgctgataaaatccgcaaccagcttgctctttaggcgccggacacgttccaagttgagggtgctgtattttttc

SEQ ID NO: 43998 - DNA, 813 bp, Setaria italica
  Peptide Sequence Number=SeqID_109972
tgctcacatcaggcatggactccaggggagagaaaatctcaccaggacttgataccttattcaccagcacaaatatgtagctgcaatattctgaaactattcactaacctgagtacctcaccatcatatttatcgttgaaacggaagttcctcccaatctaaagcccgcatatgcccccaaattgaagtcaaaacaaataacagaatcaatatgtccccaaagattgaactccaactctaataagcctctctgctttcaaggtggactattgtggaggccagatctcactaacctgcattcccataagacagaacggtttttgtgccatttctgacaaatagaatattcaatattgtagacatatggtctttataaataccaataaagaatacctgaagatgcggaagacatgttggtgctagtaacttcgaatttcatgcattaccatcaaagcaaaggacaaacagtgttgtacctttaacagattcaacacttccacttctaagaaaactgaatgtagaacttatatgttctttgcctgatggaacttatagagtcccaacatggattgaaccatgaacagcagtcttcaataatttaatgccttcgcggacggccgatcggctggtcgaatcggcgcctccctccccggcggggacgggaggggggagggggggggggggcggctccccgcaccgcctccctggccttcttctcgcgagcacgcaaccgcccctgtttgcctctccagagagcggaggaattgttgctgtggcttcttccaggcagtagggtattctaaagtcttagtt

SEQ ID NO: 43999 - DNA, 388 bp, Setaria italica
  Peptide Sequence Number=SeqID_109973
taaggtaagaacaataaggtagactaactaggaagacttaccttccagcatgaggatagccagcataggatgcaagcatggttccaggggctttcaatcggctgggtatgaggttgcccaatgtgacttgaggatggaagctcatttgatcttattgtttgcaccccccataacttgatgcatttgctgcatcacttctagggtgcataaatagctttggaccaaaaggcggtggttcattctgaaaccggttcacctgatccatcctgggcatatgtgtgttgttatgatgatgtcccgccatagcacatgaacagcaggattaggtttccattgggcttttgtacatctaaaatagtgtgactaatatcacatcttgcggttctaa

SEQ ID NO: 44000 - DNA, 4456 bp, Setaria italica
  Peptide Sequence Number=SeqID_109974
ttttttttttttagtaattaaaactaaacttaagtactttagtaagttatttctctgaacaatgcaacgcagccatggataaacaactagcttgaggattaagatttacatctgggcacaatgtcgagttcaaatccggctcacaaataattccgtttagggaccatttatttacacagacaaagtggatcagtgaatagatacagttgggcctgagctaggataaatggcgcaaaagggacgtttcattcagtccctccgctgtcatcagccgcagaagctttgcagattgggcagatgttcttcacctgcagccacttcttgatgcagtcggcgtgatagtcatgaccgcatttcagcttccccatatagtccttgaattcgtattcctccaggcaaattacgcatctttcgttctccttagcatcctgggcaagagcagagctgcagcaggataactccatcacacagcttgaaattttttcgtcagccaaaccagtgttgacattgcctattcgttcttccagagccagcagttcctcgtaactcatgtcatcaatgtccaatctcatgtcccagtgaggatcagaatcttctcttgattcatggataactaactggtccagcatcataaaccgctcggctgctgatcctctcaaattattttcctcgatgatcaacggatggaaagcatggtaggaatccctcagccttctacttctagcactaccactggggcctagagccacatgccccagatgtctcgaagatgcagcaacttcagcatgaaatggaggggcacttgatgttgctgctgaggtagcaggtgggtagctagtgacagcaggtgggtagctagggatagcaggctcatgagagaccgcagcagagttggaggaagacccaaatgctggggcgggataagagcggatggtgttacgaggaactgccctgggggcatatcccccatgcaaaaagggtatgctatcagaagaaccaggaagtgtcggaacaggggggacatttacgttggtcctctgtggagcaggatagtatggcctctctctgaatgccatgctagagttaccatcagtccctgggggaacaactcttggaggtacagaaaaaggagctctatcatgaggcgctgctgtacttagagaaggaccaattgcattagcatggcgtggtggtccatgagtgctgcttgatgagcaagctgcagcaggactgtatcccaaatgaatagaattgtgatcatgtcgccctcttacattcctctgagatcctccatgattaccaaagcaatgatcactccaatagcttgaacccatatttgggggtattcgaggagggcagggttcaggaacaggaataggatttggaggcatgtagcgagggaactgaggattggatgaactagcagcataacagctcccaacactggctccatccattggatgaataattgggtttctccgcttctgtgcaacccttctgtcatccatatgggaacttggaatgaagcaatcctcagacctatgtggatagctcaaagcaggcgggtgatgagtattatgtggtgcataggtgctactggagcttccagcatgaggatagccagcataggatgcaagcatggttccaggggcttcaatcggctgggtatgaggttgcccaatgtgacttgaggatggaagctcatttgatcttattgttgcacccccataacttgatgcatttgctgcatcacttctagggtgcataaatagctttggaccaaaaggcggtggttcattctgaaaccggttcacctgatccatcctgggcatatgtgtgttgttatgatgatgtcccgccatagcacatgaacagcaggattagatttcctttaacctggaaaattacatagatacagtattagtgttccagtgaaataaattgcaggggcatatgatgatgtagctgctaataaaaaagaaaataaattatacatataattacaaatgcttaagctcatggaatagattaaggataattcaaaccttagaaccgcaagatgtgatattagtcacacattttagatgtcaaaagcccaatggaaacccgacattagccctcaatacaagtagcagaaatgttttcctagagctttaggaatggcaatatctgagcctggtaggtaatgataggccatatgaatagttgaaatttctaccttttaatacaacaaaataatctattaacttttagattaccaagttctgcaactgatttgttggatacttatgttatgctaataatgtatatgtaagttgaagagaaactctgtgtatcatctgaagtctacctaaatattatacttcagctaaagccacacttaaatttcatcttttgtaaaagtttatttgcattcaaataatggaagaaaaagaaactaaaaggccaatcagaaatgtagcaacataaattgagtgaaataattgactagtaactgttgctattatggttgttcatgattattttataaacaaaagtatggttgtttgaagataacaaagagatgaattgatacctcactatttacaaagttagacaggttttagacaaaatagttataaggagcatatcaagactgcaaccattttatctccgaacgatagaacaaacactagataagcagctatatgatttattgatattagggtcaaattacagatgatattgcaatggttcagtatgaactacgaaaatcctaatacctaacctataaagatactagccttgcaacatttttaagcaaagcagtacaaacatacatcaggactctgaccaagtgaaaggaccaatcttaaatggcaaaaccctactgaaagcatctgtaccagtggtaatacagctaggcaaagaagtaaaaaaaaatgtacaactaaattatatggcagcacttctcaaacaatacagttcatattacattctatcaaggataaaaatccagtcagatcttcgatctttacatgccatgaaaaaggcccatcagaatgagctaagtcacagggagagaaattaataaattatacaactctaaaatgagaaggaaaatggatatgtaaggcagaaagttatagtgctagctatcagctccagaagccccagtattcatgaagacaggtagacattgcattagcatgtcaggtgcacaaatgccatgtaaataaatgccagatgcacaagattgctaaggttccgccttgatattgtggtgcctttttgttctgcttagaataaatgcaccttgtttccaacaccatcaattgacctatttcaactagcctccttttcctttcaatgacattgaatggctatctgcaaatggtgttctcccagtgatcaaaataaactggtacttcatgggcccagctaccattgcaccagcccgttctacgtgataagctgttttttttacttggaaaggatcttcagatcaactaatttgatatgaaacacaaccgtttaaggttcttttccaaaatttacaccaatctatccgtaagtcaatcacccaaatcaggactagtcggtgatcatgctgctctggccaatacttccacggatcacgatatccctctccagctctcgcataagttaacagtgtgccatgcgactacgcttctcgtctttatacttgagcaatgtatttcaccatacaaaccaccaatgggctaaagaggcggtaggtgctaagagtggcactggtccaccttttccagtcctcagaatgatgtttagttagcagcaatgggtcttcaaaaaatcacattagagggcctctcttctgcagttaaaaagctgttacaatctcgtaagagaagtcaccatctctcaccctaagggtaacacaagtccaacagcgatgttgaacatatgctcttactgcggacaaaacattggtcctcagaaggcctagaccaactggatctcatttgccgcatcagtatccatcacttaacactgcaacacactaatcaagcagcccaaaattttgcccatttgtttgacatttaatgagagcttgaaatcaagatgtcaaacaagaaaagaaactccatttttagtgcagcgttcaactagtacctgcaatgtcattagtagcacaattcaaattatcgaagtaataatacactacaaatacctgaactgatagctagatgattctccaaaagaagcacactttccttgtttcaagttttttttggaataaccttggttcaagatttatttggaccatggaagagaaacaaactggaggagctagagagaaggaaatgctcacatcaggcatggactccaggggagagaaaatctcaccccgacttgataccttattcaccagcacaaacttagggcttttgtacatctaaaatagtgtgactaatatcacatcttgcggttctaa

SEQ ID NO: 44001 - DNA, 397 bp, Setaria italica
  Peptide Sequence Number=SeqID_109975
atctcatcgaagctgcacagctccacgacggccgcgacgtcgccggcggcctcctcggcggcggtgaacggccggcccatgaactcggccagccgccgcacgttcgcggcggtgtcccgcagcaggtcctcgtacttgaggaagagcaccctgtccggacgcgccacgctcgggcgccagtaggagaggacgtggtcccagaccgggccggcggccaccgtgccgtcgcagacggactcgaacgtctcgacgaacgagaggtccggcttggcgcgccggaggaagtgccacagcgagacgaccatgtccttggggtccctgcagacgtacacgacgcggcacccgcctgcgttggtgacacggtccgggagcagcgtgtagggcaggtgcgtgttca

SEQ ID NO: 44002 - DNA, 892 bp, Setaria italica
  Peptide Sequence Number=SeqID_109976
catatgcaagtggagacacatgctagtaatgcaatttatgatcatatgtgcatacaatggatgcacagtgaggccgcatttggaacgcgggaaccatgataattatttcacagttccagcagaagtggaaatctcgtgaagttacagagctccaaacagggcctgaaccgaattgtattccgaacaccttgctgcccatcacaatatcaattgttcatgtcatttgtcagttgtcaccttaatgtcaattgaaatctgggtccgcctcatcctgagcctaaccatggcagatctcatgcatatggcgagtgaactatctaaggaagattccagcatctgcccagtacaggcaattgtccttgggaaatttcatttttgcatggcacattttcatttctctctgtttgcaaagttttcgtcagaatgccattggatgcattccagagtaaatctaagatggctcccggttccttttaaaatacctggctaaaagccttcaagtccagcttagctttaacagaagcactgcaccggtatggtatgggagctaccgagaggaccatcagcactttacattatcacatatgagttgaaggccttgtatctctttattctgtataaaaactttggcatcattctttgtaagatcttggtggccatattttcatatgcttcccgccacatttactgtatggccggttgtcctttttggcaaagattggagcctcttgtctattttgtattttattacctttgcttaaggagtggagcgctgcttggaaatgtccgatagcaagcatatcaaagaatgccataggccactggcttggctcagaggaacactggagctccttagtaagtccatgaagccatcaattgcagatttgcaagt

SEQ ID NO: 44003 - DNA, 377 bp, Setaria italica
  Peptide Sequence Number=SeqID_109977
ctcgcaagtactgctgcccaaagatctcaattacagctttcacaaacttcttcaaactcagaatggtggtactctctgcaatgtgaagccaatcatcaagactatcagcagggacaccataagcgagcatgtgcagtgctgccgtaatcttcttcagagcactatgtccaaggtccccagcagcattccttttctgcttgaagtatggacagtgagcttccacagctgctgcaattcacaaaaacagctctttggacattctgaaccgtcgtctgaaagtgaccggaccgaacaccgggtcatctgcaaagtaatcatcaaagagcttttcatggccttgctgcttgttccaacgaaccaccacacgccctggcacg

SEQ ID NO: 44004 - DNA, 642 bp, Setaria italica
  misc_feature (58)..(58): n is a, c, g, or t
  Peptide Sequence Number=SeqID_109978
ggtctttcaatatgtaagtaaaagaagattttattctattatatgttttcagctactnaccgcgtatctcatttaaaaaactcttattttcacatttattattgtcataagaatatggattgattaatgaacacgatgaaaacatcctattttgttttctctcgctttaaggacaccaatgaaccttttgttcacttcatgtctatgggctaattttattttttaaaaataatacaaatattttctttacgaaataattctgttagtggttttctttgactaattcaagttctgtatttcttcagaaactagaaccataacctgtaccattaacaaatgttagcatcctgaatctgtggttgattctggttgtttgttattgggaagtacgttactgctaactgaacacctaacagttaaggagcaggctactggtgggtgtgtgggcaaggggttttcaggaatttggatattgctatttgaagtctttgacttcatcatcaaaagattgattcttactcattctcctgtcttcgtccatttagcggttctttttttgggcatattatcatcaagcaattgatccttactctccagtattcttccattttagcggttcttttttggtgtataatgtagctt

SEQ ID NO: 44005 - DNA, 324 bp, Setaria italica
  Peptide Sequence Number=SeqID_109979
gatccctccatggtttttttgtaccagatctatttactcctactcacaggccagtcagcttgttcctcttctgtctcgttcttggtttcctctttggttttcaggggcaggcactgttaagctcgagagcgattcacaagcagcacagtgtggagcagatgagatgatgagctgagcaagacagaacaggagacgctagcgactggcgagaggacgggcaagaaaaatgcatggaatttcgggggtggaggaagggcacagtacgttgtcgcggttggcagatctgtcgctgccgtttccacatcttatcatcccgatcggtca

SEQ ID NO: 44006 - DNA, 805 bp, Setaria italica
  Peptide Sequence Number=SeqID_109980
tttacttacccgttagaactaagaaaggtttacttaattaagacttagaattacgacgctagcttcttattcttcttctcaaaattttctagcagtgtcttcaattctctgataccagatctgagatctttcaccgaaatgccatccttcagaagatgctcctccccattaacggttcgaccaattacagctggaagattcttcacgccgagacttttgagcagcggatgagaaactagcgtcgaatcaagcaaaccagaaaccttctagtcaacgggaagaaaacaatgttcctctcctcacagcttctaactttgaggaaatctgtggagagaagacttcagtatgcatcatcggtgtttttggatcaaccaaagccaaggaacagcttgaagcagtcctgtctgagatatctaagaagactctgataagggggcagaactacatttccggaagtgcactctcatatgctttgtggacaggaacaaacagtccgtgttcctgtcatcgtttgacaagtctggattcaagtcatctgacaagcttctcatcgcctacaagcctcgccgggggaggttcgccgtgtacaaagatgaggtgacactggaagaagctgaggggttcgtgggctctgttttgaatggagacgtccagctttcgccgactcaacaaaagccagtccttaggtagactaccattgcaattcgaagagttttagatctaacggtgtacgtgttattttgaaggcctgtacatagctgaatgaagagagtgaaatgtatagcgttttgtcggacaaaaaaaa

SEQ ID NO: 44007 - DNA, 290 bp, Setaria italica
  Peptide Sequence Number=SeqID_109981
catctcatatggtagtccaacaaaactgttttgctagtgtttaactgcaatacatgttaagtgcttttgtttttaattgttttcaaaattatgttaggtcccataaattcaatttctgatgattatcagaaactatcaaatgttttagagctttctaccgctcctatttgtttaatgtcttctgaacatattatcttttcctggcacggcaaatataatctggtaaggtcatcctgcttagctctgtgtacagtgacttgtaagttgtaactaacatgcaactagcatgt

SEQ ID NO: 44008 - DNA, 606 bp, Setaria italica
  Peptide Sequence Number=SeqID_109982
tggctatcaagttgtcgatcatagctgcagaaaaaagagcagtttatgatcactctacaaagcaagtaagcagatctatataggaaaagtcgagtaggttgagttaggagtacacagcagagttacaccaacaactttgtatctagaactgctagatttaatcccactggtagtgccatgatgcagcatgttcaactgaagttaacagtaatagcagctggggaaacgaagactcacttggaatcttttgcacaagtatccttgccttttctgcacgcttgagattcaggtgggcacccctgccagcgctatacctgttatcatcctgcagaaggacacaagtaaacattgaagacatcattaacaaaataaagtatactgagattaaattatattttgttaagccaatctgaaagtccagtactaacatgtcaagaaaggaaaggctgaaaccatatccaatggacgcaccctaatcttttaatgaagaaaagaatcttacttggttatattcctcaagccaagtctcttcatcacaagctgatagccatttatctactctctccatgatatctttccttgttaaggactcttcatttgcttttg

SEQ ID NO: 44009 - DNA, 2456 bp, Setaria italica
  Peptide Sequence Number=SeqID_109983
agtttgtaaggctgaaatgcaacatccttttcgccaaaatcaagcctttcttcacttgcaaaacatgcctgacctgtagtacagaactccaagaagggggaggggaagagagcacacacagcacgaaacaattacattgcacagcttatcccattcacatatttcctaaccaaacgacttaaatttagaaatagagcagaaccatgaatgttagaaattatatctacaagcaatttcacctaaattttgtcacaatctgtcgtcactcatcagcaatgttaacagctaccacacactggtccaatcttgaggctattcatactcctcaccaagaaatctcttccctgaccaacacttagtgcaaatacaatggtgaatcaggttccgagccgctaatggaggcgaaggatgacatgctatcatccttggaaaccgctgagaagttcagtggtgtggctgtcagacgcctgttgtccttgaagtagttgttgtaccggccagaatatgagcgtggggttagaagctccggggtggcactgccagctgaaactcggcggggcactggggtcatgaatccagtgccatttccatttgaatggtggctgctcgtcctcctattgaagctgtttgtctttttgggactaggtttggacccgaaaatcaactccttctccttaagcaataaactctgcagcttcttctggtcccggcagcgtctcttgtcttcctccctttgtgcccttctgagtttttgctcttccaaaatggcgaccaaacgaactccgtcatataaaaatggcacatttctttcatcctcccatgcgaaagttttggctatcaagttgtcgatcatagttggaatcttttgcacaagtatccttgccttttctgcacgcttgagattcaggtgggcacccctgccagcgctatacctgttatcatcttggttatattcctcaagccaagtctcttcatcacaagctgatagccatttatctactctctccatgatatctttccttgttaaggactcttcatttgcttttgctatttgtacttcaatgctggaaaggagttcgcaaggatccactaaaccagaatcaatcaatgcaatgatcttctctggtgctgtattcatatcaggctccatatgtgcatttctgcagacgtcttctagttctaacctcttcttgagaacaagctccttcattctactagctttttgtttagttagcctttcaacttcctcttctgtctcctgaattgtctccaatgacaggatgccaggagaagtgatctcttcctcagaagatccaagaacagcagctactttggcaaattgtctcctgtcttgttcagctgactccatcagattccacaatttgtgaagtttttctacaatctcttgcaacttcaaaactcttgtcttcttttcagctttgagcttcaggatagtctgagtaagaccttcaagagtactatcactgatattcgttgaattttcagagttggttccatgcaaacttggatgcacctcttttacagtatttgcaaaatccatcccaagcaccgcacataggcagtgcacttcatccacataaatgaagaccttctgaagacgatcagacttttctttctgtagattccgcaattgcatttgaagatccgaaattcttctggttgacaagtcatgatcatcattaagatgtttgacagaaccatcattgttctgataactgtgatcagaaatttgtgcttttatcttctcaatctgagattgcacatttgagatctgtttgattctttcttctttctttgccctaagctcttccaagagaggtgtcactgcagcaagttgatctttcaatgatgtgtgcttttcatccaccttaaactgcgtggtgttttcccctatagaagcaactagagctttaagctctgcttctttggccatcaatgactgacggagctgagctctctcagcactggcactatctacctttcgacggtacacacgcatgcactctgtttcaagttcaaggaacatgcgatctttatcttgttcacgctccccaatctctgtccatatttgctcgagctcgcgcagaagcgcgccgcacggcgtgtcgaagctgacgctggcccgcactgccttgtccaggccatacccggccatgaccatctcgcccatctcctcacccgcttccctctcccccgcgcaaggagagagaagaagcaacttgaagcaaagcaggcaccttgcccctcactctctccctgcccttccctccttgtccttgcttcttgctcttgtaccaatggcaaggactcccaactcgaatgccgcttgacaaccaccctggttccagagagagaacggaagagagaggcggagagatgggcagcggtggttgcctggttatatatggatactacaactacgaagttaaagttta

SEQ ID NO: 44010 - DNA, 663 bp, Setaria italica
  Peptide Sequence Number=SeqID_109984
ccaccaagtgatttccacatacaaatttccataactatactagttgggcggcttgaagaacttgagcttcataccgttgctgacgatgccccagacgccacccagcgagaaggccaggctgaaggcggtgccgagtagggcgagcccccagttgaggtaccagctgaagctgagccgctcgggcttcttgacgcggatccacatgaagcacgggtacgcgaaggtcaccggcagcgtcagcccgccgagcaggccggcgaggctggacaggaacggcagcgccacgctgatgaacagcgagaggaagccgtagaacaccctgaaccccgaccgcacccacggcgagcacggccggttggtgcgccccgtgtagtaggcctcgaagctgtcgaacaccggcatggagtagatctggaagctgctgaggcagttgagcacgacgaggaggcacgtcgtcgccaggagcccctgcggcgtgtcgtggctgtggaaagcgtagagcgccgccagcatccctcccggcggcatcatgtttccgtaggcccagtagcctccgacggcgacagggaagaggcacattgcgatcaggaggtacgcgactttggccccacgccaaaatggcacatgtgctggatgcttgaaagtcgatggcattgtcgcctg

SEQ ID NO: 44011 - DNA, 469 bp, Setaria italica
  Peptide Sequence Number=SeqID_109985
gttgcatcctagtagatccgttttgccaatgggaagagatggcgcttccagcctcgtgattgtgctgttggtaggtttggctactctgattaatgtatgaatgaacagctgcttttgcagagtcaatatggatggtgattggtgacgttgcccaatataacgatcgatatcaattatcatgctcatgcatgatcatgttgaaatgatatgagacagcatgacaaggtctcgagcaaattgtgatgcgtccgtaaatcagcacgaggtcaggtgggcaagagctgcccatccataatttacattacgtgaaagcgcccgcgagtgagatctacctgtagcttcaaatggtagagacacctcgtggtttgtgcacccgatgagccgccatgttcggaggggaccaaaatagatcttaccagatcgtttcccatgcccatgccagatcactcccccagacgaagcatcctcg

SEQ ID NO: 44012 - DNA, 466 bp, Setaria italica
  Peptide Sequence Number=SeqID_109986
catttgaccaacctacattttcatagcgtcttcccttatcttattaattgctgccaacaatagttcaaatgctaatgacaaagttaagcaaatcatgactgtgatctcatcataggtatttttattctctgttgtcgcttcaggactctcaggcctctttgggaacaaagagtcagcccaaacgtcatctacagtgcacatcacttgccaggtgacacgacagcactggcagttggtggcatcgacggtgtgcttcgcttgatatcgcaaagaaccggtgaaatcattcgaagcattgtcgtggacacagaccgcccagcagaacccacatccagatccaggcatcaaattgagaagaagcgtgttcgcgaggttgcccctgatgcccgagtggataacatctccacacgtttgcgccctcagattaccagcctatcggttggcattaagaaaatcgtgaccaccc

SEQ ID NO: 44013 - DNA, 1162 bp, Setaria italica
  misc_feature (54)..(54): n is a, c, g, or t
  Peptide Sequence Number=SeqID_109987
gaggacgggggaggagaagcagcagccgccggccaacatggaggcgggcagcanccggggccgggagcgggagcgcggctctcaagcgccgcagaggctccggcgccggctccggctccggctcgacggcgcagtcgctgaacgacgacatcctccgctccgtcttctcccgcctggacgaccacttcgacctcgcccgatgctccgccgtctgcagctcctggaataggataattgtaaccgctcatctcatgagggatctgtattacaagaggaatccaccagcaagaggttcaaactctaacatttcagtaaaaagttactttgaagctcttgcaatggatgagcatgcatcctctttgtctaatggaccagctgatgcctatcagtgggttggtcacccaatgagggctactttgtgccgtatgaagggtggttccattttaactggagttggagataagattctccgactttggtctgctgaaacctgcaaattcatgaatgagtacaatgtgccaaatgctaaaacgttggtcgattttgaatttgatgaaaataagattgtaggtttgactagctcccaaatttgcatatggagacggagtgaaccaagaagcatatttcaatctagtggagcctcattcaatcatgggttatgcatgagttatgcggatccagaggttgtaattggctgtgaggatggtcgagcctttgtatatgatatgtacagcagaagttgttcaagtatttatcggcttcactcttctcctgtgacatgcttgacaataacagatgaccagctgattcttggtggttctacatttggaaatatagctattgcagatcaaacctcagggcagaaaataggtgttctgaaatcagcttatgcaccattagcaattagatccttatctttcagcacaaattcacacatgatattcgctggctcgtctgctggttatgcacattgctgggacttaaggactctcaggcctctttgggaacaaagagtcagcccaaacgtcatctacagtgcacatcacttgccaggtgacacgacagcactggcagttggtggcatcgacggtgtgcttcgcttgatatcgcaaagaaccggtgaaatcattcgaagcattgtcgtggacacagaccgcccagc

SEQ ID NO: 44014 - DNA, 1150 bp, Setaria italica
  Peptide Sequence Number=SeqID_109988
gtggtgtgtgcttatataaatgttcctttttatctgatgttttatataaggttaacaagttcttctattactcataacttttaaatgttaattgcctgtaaaaaattggataatatgtccttggttgatagataacctgtattaggcatatacttattggatatttcatggtaagtgtcgttaatcaaaactcatttgaaacattctgttgtgagctcagtaacttaattgaattctgtcttctttttcaccatttcagcaagtgttctgaaatcagcttatgcaccattagcaattagatccttatctttcagcacaaattcacacatgatattcgctggctcgtctgctggttatgcacattgctgggacttaaggactctcaggcctctttgggaacaaagagtcagcccaaacgtcatctacagtgcacatcacttgccaggtgacacgacagcactggcagttggtggcatcgacggtgtgcttcgcttgatatcgcaaagaaccggtgaaatcattcgaagcattgtcgtggacacagaccgcccagcagaacccacatccagatccaggcatcaaattgagaagaagcgtgttcgcgaggttgcccctgatgcccgagtggataacatctccacacgtttgcgccctcagattaccagcctatcggttggcattaagaaaatcgtgaccacccatggcgaaaactacatcagggtcttgaagttttgcccaaaaaactcataaaactgtcagtcttaatgtgacctagttatccggatagcacactgtttgtgacctgtacgctgcctgaataatgaccccgttcggcagcgctagttgtggctgccgctgctggcttctgctgccagtggctgcagcgcagctgctagctgctgcttgtggcttcagccggaagaagctcagcgcagcagcagaagcccagcgaacgggctgaatatggtgtgatatgtagtcttatgtaactgtaagaatagcttgaaaggctgaaacattggtcgatgtactgtagctcttaagatgtctatgggtctgttggtaatatatggttgcagaaaaaaatgtttgtaatctgtttatgatgaactgttgaaaaaatgtttattggatgaattgaaaaggaaaa

SEQ ID NO: 44015 - DNA, 297 bp, Setaria italica
  misc_feature (295)..(295): n is a, c, g, or t
  Peptide Sequence Number=SeqID_109989
gggagggggtggcggcggcggaggaggaggacaggtgggcgcggctgctgccggagctggtggcggaggtggtgcggcgcgtggaggcgtccggtggggagcggtggccggcgcggaaggacgtggtgtcctgcgcctccgtctgcaggcggtggcgcgacgtcgccgtgacggtcctgcggccgctgcccgagtccgggaagatcacgttcccggcctcgctcaagcagccagggccaaaagcttcccgatccagtgcttcatcaatcgaaacaagaagaactctacgttttanct

SEQ ID NO: 44016 - DNA, 495 bp, Setaria italica
  misc_feature (1)..(3): n is a, c, g, or t
  Peptide Sequence Number=SeqID_109990
nnntttttagtatataacttgcaagattaatttattctttacaaaaaaaatctttgtttatagtacgtacacaatattctcgtatgtaccactgactgttcttctgatcaggcagaagcagagtatacagaaaaaaggaagtgtgttgtgggctagagaaaattaacatattggttactactacgtacaatccctaatcttccaatgttttctctttcttcctcttgtgtgtaaaacgtaggggaatggatatggatcgataattcagggaggcagaggtgaaggccaaaaaaagagaggatcagaagtattccaggttgaagtcgaaatgcgccaggctctgctcctggccgcagggcagcgcgaacttgtgctccagcgcgtcgtcgtcgtccgccgcctgcccgccgccgccgtagcccccgctgtgctgccgctccaggtccgtgtacggctcctgcttacgacggtaggacggacggacgaccggaatta

SEQ ID NO: 44017 - DNA, 663 bp, Setaria italica
  misc_feature (47)..(47): n is a, c, g, or t
  Peptide Sequence Number=SeqID_109991
ctaattagataaccaacttgtctcatcgatgctgaccagaagggttnttccctgcttattggtaatagccatggtttcccttttgttgcaggtgaactggggccgatgcttagtttgaggtcaagatcactctccacagaggcactacaatttccatcttcgactgctttatggctgcctactgggttttctgtgcgatttccttctttggttgctgagttttcttcactgaagaggcttaagcatgttcttggtttgcattcttgaagacccaaatgttcaggtacttgcgggtagcagagtgttgtgcattaccaaggcaagcagattgattagtctcagaggtggaaggacttctgttatggtttgatcttgatctctgcactatttgttgactttcttctgttctagattggaaatgcttcccacaaccaacttcagtcatcagtgatttctgtacatgatatagccgatgcagttcgtgcacctgatgcaaaaagacagtataaaatgcaaaggttctgtgttgctggaattacaatataacttagatcctattaacagtttgacttgtcaacttatctctggaaagatgaaagtttatgcataataagcagtagtatgcactacattataacaagaacctataacgatctgttaact

SEQ ID NO: 44018 - DNA, 1028 bp, Setaria italica
  Peptide Sequence Number=SeqID_109992
ccaaaatgttttggtggtgatgagaccagtgatgttcctaattgctttgctacctggattatgtgctaaagcagctgtttccatcaagaaaagcattgatgcttggaggaaaaaagaagataagctaaaaaacgttcagccatatgatgtattcctctcggattcacatgtttcgtttactggtatcgttggtgcagtagcaagtggatacttgggggattgttcaagaagagtgtctatacgagatgaaacacaaaggagtaatgcttttaggatgtttaacgagaggaataaatttgctgcctttgcagacctctttgcttctgttacttttactgctcaatatgggaattttcagaggctttttcttggacttgacaaaggcaagtgcccgatttgatattgcctcgggctcgttgttcttatgtggtgcttctcgccttgcacaagatttcttcttctccagacgacctgatatagagacattctgtgatgtttgtccagatgtgactgtttctcttcaacagcagatagttgggcctttcagttttcgtgttgaatcctctgttgccattgaccccagaagccaggaccattttgttcgagtggatgattcaatctttgcaatcgattgggctctgaaggtcctaggttccgcaaaggctacagcatggtattcccccaagcatcaggaggccatggtggagctccgtttcttcgaagcctgaagactttatcttgtcacaaatgccatatgaaataattccaggataggtcacactgaatgtctgaatcactgatcactgatgccactaggatcagatcatataaacggttgatcctgcgatcatcaagccaatcaacctccttgtaaaatctatttaagatgccctctgcatttactagctgagtcattagttttgtgcatcaagctacgtagcttgtgctgttctcggcgtcaagagagttattttttcgagtttagagtagtgcagcttgttaggtgcactactataaactcgtatttc

SEQ ID NO: 44019 - DNA, 398 bp, Setaria italica
  Peptide Sequence Number=SeqID_109993
cctgcacctcggcaacctccttggcctcgtcgcgctctcctggttccgccggtgcggccacaccgccgtcgccctggtcggcggcgccacgggccgcgttggggacccgtccggaaagagcgccgagcgccccgagctcgatgtcgccgccgttgaagccaactccgacgccatcaagtccctcgtcgcccagatcctcggccgcgtccccgagcctgcccaccattcccaaccctgtaaaaacgagcagcctttggtcaattcagctgcggattcgtctgcaaagatgggttccttcgtcatcctggataactacgactggtggaaggacatcacgctcctggatttcttgaaagaggtgggccgcttcgcgcgcgtgggcacaatgatcgccaagg

SEQ ID NO: 44020 - DNA, 382 bp, Setaria italica
  Peptide Sequence Number=SeqID_109994
cctcgcgcactccggaacgcaccacgcgctgctctgccccagcagatcgcaccacctcacctaccccgcctgctcccctcgtccacccccgagccactagccgtgtcccgtggacatgtcccgccgcgtgacggccgcccgcgaccggtgcttggagctggagcgcgtcatcgccggccgcgcccgctcgggaagcctcggcctcgacgacgccctcaagcttttcgacgaattgctcccgatcgccaggcccgcctcggttcacgccttcaaccagctcctcaccgtcgtctctcgcgccaagggcaggggctccttaacctctgcgctcgtcgtctccctcttcaaccggatggcccgtgccctcccccaccaaggtacg

SEQ ID NO: 44021 - DNA, 254 bp, Setaria italica
  Peptide Sequence Number=SeqID_109995
atggtagaccaatcactgaagtaggagtcaaagctgaagatgttggagagcggctccgcctcgtaataccggagcatggctagataccggcgtagccacggcggaaatcggataacaaattgatagagggctagcctgacctccatgctgcttgagtttgggttgcaaagggcgcgcagggcgtagaacatcggctccatacctaccgccacgccgcgcatggcttgaaatacccaccctggaaacccagccaa

SEQ ID NO: 44022 - DNA, 495 bp, Setaria italica
  Peptide Sequence Number=SeqID_109996
ttaaggttaagttaaaatttaacttagttagttaggtaattttctttcctaaaaaaagttttgatcgtgtctatgagcctcagatgccagagagcaaccacagagcctctgatggcattgagccagtaaatgatcatgaagattctatgccaggtgccaaaccgatgggccttggtcgagcaggcactacaatcgacagagatgagcacaaacgctttgtgagggaggttcatgaggaagtaagcgaggcaaggcagaaggcttcaacagtgagatctcgacgacaagagcaggatgctgctcgtagggagaaactcaggcaagcttacctcaagaaacggctggagaagttgattgctgaaaaacagacgtcttcagccagtgatgacctaccagctagctagtgtatgtcctcgcatttcttatgagtagctgctgcagtagatcatacaaccatgcaactgatagaacatcttcgcaagtgtttctttgatc

SEQ ID NO: 44023 - DNA, 540 bp, Setaria italica
  misc_feature (469)..(469): n is a, c, g, or t
  Peptide Sequence Number=SeqID_109997
tcctaatttcgtgtgcatcgattgcatttacactgttcctttctgttattccgctaaaatcagcgagcaatgaagcttagactcggttgctgtcagtgcactcacagagggaaacataggaaactacttatagaaaaactgaaatatatggaaaagttgtacgtgaagaagttcagagctcttgtgtcggcgctgttcccatggattcactgaaaggaaagttgttgcacagggagagcttaagaggtcttccattggcaccgtcccaaggggttcattggagggtcatcagaaatcattggagggttcattggagctttcgactgctgaatctgattgggtctctgggcaattgaatgctgctgatacaatgattaatcctgaagctcaccctcaccgtacagaacccacgaggagtgaaaactcagttggtgttgattggacagagcttcttgcagaggtttttacngccatcgtagtagaacacacagctgcagaaaatgccggaatgaagagctcaaatgaaaaggcatcgtcgag

SEQ ID NO: 44024 - DNA, 518 bp, Setaria italica
  Peptide Sequence Number=SeqID_109998
tgttccagcagctcatgccctccatctgcggcaccgatgcaggctgcaagagctacttcagcaactccctgttcatcgtcggcgagttcgggggcaacgactacaacgcggccctcttcacccccggcaagggcatggccgaggccaggagctacgtgccccaggtcgtcgacaggatcacaaccggcgtggagacgctgatcgggctgggcgccgtggacgtcgtagtgccgggcgtgctgccgatcgggtgcttcccggtgtacctgacgctgtacccgagctcgaacaaggacgactacgacgagatcggctgcctcaggagcttcaacagcctgtccagctaccacaacgagttgctgaagcaggcgctgtcgggcctccggagcaagcacgccggcgtcaggctcatgtacgccgacttctacgcccaggtcacggacatggtccggtcaccggagaccttcgggctggagtacgggctgagagtgtgctgcggcgccggcggcgagggcccc

SEQ ID NO: 44025 - DNA, 703 bp, Setaria italica
  Peptide Sequence Number=SeqID_109999
aagttaaagttagtactcagttgaacttaattgaccttgctggttctgagagttccaaaactgaaacaactggtttacgacgcaaagaaggttcatacataaacaagagtttgctcacccttggaacagtaagtatcctatatgctaactatttgtcttattaccatgacatactgatatatatagaaaagattaacttcgtggaccgtttcataacaattgggcgatttacattcgtaccactactttaggggcacttttcatttataccatcagactagtcaatgatatgtggggtctggttccacatgtcattgagacagactgatggtgtagattaaaagtgcaactcaaatggtggtatagatgaaaatattccttcatatatttgtgccaaccggtgttcctctctggtctatcagagctagttgggcgacagatcagcacatggctcctaatccgcaattaggtgaacttagatttatttgctacttgctagtcctgaaatatgactggctaggtagcaagggatgctaccaagatggtcatgttcttagttcatttatttggttgtacttcacttggtaaaactgttgtctacattttccttgcaggtaattgctaaacttactgatggtaaggccactcatattccctatagagactcaaagctcacacgcttacttcagtcttctcttagtgg

SEQ ID NO: 44026 - DNA, 567 bp, Setaria italica
  Peptide Sequence Number=SeqID_110000
ggcgaggacggtggcggtggcgccggcgccggccggggaggcgacggcatgacgagggacttcctgggcctgcgcgccttctcccaccgcgaaatcctcggcctcgccggcttcgactcctcgtgcatgggcgccgtcgccgccaacgccgacatgggctgctacgagccgcagcagcatgcgcaggcgccggctcagcagcagcaaagcagcaacgagccatggcacggcatgggcagccatagctaatagctcgccagctagctaccctgctggccagctactttcttcctcccaccagtcgtcatcggtcaccatcctcgcatctgatcgcagctgcagtgtgcagagccatagctagctagggccagtgcaccatgatgcattttgagttgggtaagctcatcttgcaacttgatgatcatgcaagcgaagcgatcaacaacatttcgaacactggatggaggacgacagcacagcagcagtgcagggagtctgaaattttttgggtttttggggtggttggagaagagatcgatcaactgtaaactaagctcgaatcaaggg

SEQ ID NO: 44027 - DNA, 303 bp, Setaria italica
  misc_feature (21)..(21): n is a, c, g, or t
  Peptide Sequence Number=SeqID_110001
ctagttttctgatgaactttntgttttccatgggtagtgcctccggtcaagccaaattatttatgcttaaataaacttaagcaaatgtgagtttaaagataaactacggttgtcattctgtgactacaatcaaccctaatcaaacaatggtaaattatacagtgggagttcaattgatgcacctggctctgttcttactttcttggtatccatcacacacttgaatggcaatcttggatgtctgaagtgtctttctgaaccatccatgttttgcttgttattatgaaattttgctcgttcact

SEQ ID NO: 44028 - DNA, 628 bp, Setaria italica
  misc_feature (186)..(186): n is a, c, g, or t
  Peptide Sequence Number=SeqID_110002
agggactagggacaaagagtcagcctggagcagcagctttgtatgggaagccctttgtgaattttgataagttatttgagatttatgctagtgacttggcaaaaggagcgaaggctaaaggacctggagatcaatttgacttgcatgaagagctatcctctgcagatgtgactgaacaaacccaanagatcgacagtgcagttgactcccattcacaaccaccatgccatggtagcaactcatcaagtggagttaaatctttagctggtcgtaagagggtcagctttaatatgagcatttggtagtctcttagcaagctccttttcaatgaaggaaaggtatccagacttatggcctgtgtccaccttccatccagagtcattcatttcatacagtacatcagtaagtaccttttcctcttctgcagtccagggcctctcgtctctcttcttccttagccttataggtttgtttcccttgtttgtctattttataccaataaattaagtaaaatgacaagatgacatatcagaagttcagtgtacagacattgaaagtatatagaaccactagaataaaagatatatattgatacaaaagccatgacactcagtccattatctaaatt

SEQ ID NO: 44029 - DNA, 310 bp, Setaria italica
  Peptide Sequence Number=SeqID_110003
gctgattttgtcttctcacgaggaacagacacttgttgaatccactccaactggaactggaactactcggcagttgtaatcctgaattccagatccaccccgccatccccaatccctcatcggagaggattcatagctagtaggtcactcgtcgatcgcttccttcctgctgcgccgtcttgtgtcgttccaggtacgaatgctcggctcacatcgctcgggctaacgggctagagttccgccgcgtcttggtcgttgggatcaaggatccatctctaatcacttcctcccatcatcgatcttcgatcgt

SEQ ID NO: 44030 - DNA, 385 bp, Setaria italica
  Peptide Sequence Number=SeqID_110004
accctgatgagccggcggtttcatttgttcatagtagtagatagatagaagttccaaaaaatggaacaagaggacatgaaggcaacacgagcaggcaaaggaatcatcccaaaattgacaactgatacaggaataccaaaacctaaacccatatagaagtgcaggaagggcatcattctgatatttagatggcagctctgacaatttccctgaccataagttgttccaagcaaaaactatagcaataacacaaggaccaagtaggatctggttcagtatgaccttagtggacaaatttacaaatgtctgcttgggcatgcaccgatcaagaaactgataccatgcatgggatcctggaccataaagaaggaatccataggaagtc

SEQ ID NO: 44031 - DNA, 487 bp, Setaria italica
  Peptide Sequence Number=SeqID_110005
ctcaaccggcagccaatccacagcctagggatgatcagcatgtaacccagaagaagttgcagatatgacaactagtataagtgatgggaactgttttcactggctttggaatctcatcaaaactagaattactggtgcatctcaacatctgcatgatcctcgatttcgcccaatcaatgatccaccaccagacccggtccaagggcttgctgcttctgagagagggtcaaggacgtgctgcttctgagagatagattgtgtttcgagctgggggacttaaatgtgtgctcaagttattatatgaaaaggagaaattaaaatccaaaataaagagctcatttatgagtggagtatggaacatggattttcacatgtgggcagccaaataccagtttggtgtgtcctatgtatgtacatgtgtgaattgcactcctaaaggactgcatgtaactattcctgcttacttcaataaactcgttgtgatttt

SEQ ID NO: 44032 - DNA, 398 bp, Setaria italica
  Peptide Sequence Number=SeqID_110006
acgggtgaccgcggcgcgcgtatgatgcggatggtgccgaggaaggcgacggagactgcggccgggagccagccgacgagcaggatgagcggcttggtgtcgacgccgccgccgccgccggggccgtagaaggcgaggtagagctgggtgaagatggcgccgctgagcccgacgaaccccttgaggagaccaagcatgacgccgcggctctcggggaagttcttgacgcaggtgacgagcgcgccggtgttggcgaacgcctgcgagttggctccgacggctatgtagaggcagacgagccagagcggcggcgcggggcgcacgcggccggtgacggagaggtagagcatgaggtagccgccgaggttcatggcggcgccgacagcgaggacgagccg

SEQ ID NO: 44033 - DNA, 346 bp, Setaria italica
  misc_feature (289)..(289): n is a, c, g, or t
  Peptide Sequence Number=SeqID_110007
ggcgcgggtacggcatgatgcggatggtgtggacgaagaggatggagacggcagcggggagccaggcgatgagcagcacgagcgacttggcatcgtcgccgtagatggcgaggtagagctgcgtgaagatggcgccgctgaggccgacgaagcccttgagcaggcccagcacgatgcccctgctctcggggaagttcttgacgcaggtgacgagcgcgcccgtgttggcgaaggactgcgagttggcgcccacgcagatgtagatgcacatgagccacacggggggccncgccgtacgcccgtcgatggcgaggtaaatcatgaggtagccaaccaggttcatggc

SEQ ID NO: 44034 - DNA, 309 bp, Setaria italica
  Peptide Sequence Number=SeqID_110008
gcggcgaggacgtcatgagcggaacctgccgctgctgctgcagctgcggctgcggctgcggatgcatcagcggcaccgcggccctcgacgcggtcgtgagcgacgacagcgtcgacgaaggcgacgccaggccccctccgaagctggacccggagaggaccaggggctgggtcggcccccgcccagcagggctgcgatatccgccgccgccgccgtgcgctgcctcacggcgcgcaggtacagcgcctgctgcgccgcgacgtgctgctgctgctggtgctgccacctctccagctcgccgaggctcct

SEQ ID NO: 44035 - DNA, 430 bp, Setaria italica
  misc_feature (412)..(412): n is a, c, g, or t
  Peptide Sequence Number=SeqID_110009
tgtctagaacaacctaggctcctagttcagactgtctcgataaggtctaaatcttatgcgctctggcattggaatgactgaagaaagttgcaagagtgtggcagcaaaccagcttggactcgagtaactttctaccgggcgtgcacaccatactgttttttgcatgttgcctgagacgagttgatgttgcagcattgcccaagtcaagatctgatcctgggcattgccaaagacaagagcttaggttagaaacatgtgattcattggtgatatgtctatgtaatgtagaacttcagtatatcacgatgtgcatcctgtgcattcccagatataccagaagttgttgacactttgtaattgtgtatgtgcagttccatgtcgtgtgctttgtaaacggaaaaaaaaaaaaaanaaaaaaaaactaagagac

SEQ ID NO: 44036 - DNA, 420 bp, Setaria italica
  Peptide Sequence Number=SeqID_110010
tccttcggcgtccaggtcccagagccgcacgtcgtggcgcggcgtctcgatgaccacgtcgtggaacccgaacccgctcagggcgcgctccccgggctcctcctcctcctccgcctgcccgccgtcgcccccctcccgcgcgggcggcggctcgacgtcgcgccgcagcgcggggtagaggttctcgatgacgcggatccgccacggcagcgagccgtcgggcggcacgcggaagatctggggcgcgcactcggactcgcggccggcgcagaaggggcaggacggcttggggggcctcggccccgggggcggggctagggttggtggggttgtgggacttgaggtcggtggggcggcgcgagcgcgccggcgagaagacgacccaccgcccgaacacggcgtcccggcgcgcctccgagg

SEQ ID NO: 44037 - DNA, 305 bp, Setaria italica
  Peptide Sequence Number=SeqID_110011
tttgttttttagagttcatcctgattgcagtctcatatctcatagtcacctgacttcacgttctgccaactgcaaagacacttcactgccacttcacctttatgtcttgaaaaatttgcctctgggaatagcaaaattcggacaattcatgcttcagtcagcgaaccctttgcatatgttttctcagttaacacaacaacctttctaatgtggcggatcttcatatgctcttaattgcctccatctgattcactttcctgcctaagcttgtctatgagctcctcagaagtgtcttgcaaacgtaa

SEQ ID NO: 44038 - DNA, 247 bp, Setaria italica
  Peptide Sequence Number=SeqID_110012
aggaagtttgagaggaaaggcatgtaaatagtaaatagttaaaaagtttaggttggcgcgcgtgcgctttcggtgtgcagtagtagcagcagcagtagtagcgcagttgatagcgaggaatctttctagaggagatggattgattgccttggttcggaagcaaagtccgagagggctactacctacatacatgtactgatttgattatcaaagctccgccgctaattaatcgcacgttgatcaaaaa

SEQ ID NO: 44039 - DNA, 723 bp, Setaria italica
  Peptide Sequence Number=SeqID_110013
ttttttttttttacttacgtaaaataccaattattaccagacacgagtcattgatagttaatttacatataatcaagagtgaggaaacaaaggaacgtcgccacaagctcccaatcacctggaagtacatatattacaattaagagccatatggagagagagtcacaggggtcaccgtggatgttacgctgccggctcgctctcttcgctgtccttgggctgcgtcgtggccttggggcggctgtcgtagtcgacgacctcggcgtcggcgatggagctggagtgctggacgatggagcggccgatggagttgatccactcctccttctccttctccgagtcggcgatgaagtacatggtttcggcgggggtggagagctcgaaggcgaactggcggttgagcacgtcctcggcgcccttgacggtgaggcaggaggcgacggggatgacaccgcggggcacggaggcgcgcgtgacggtcgagtccttgaaccagaagagcctcccctgcttgagcacgaaccaccgccgccgccacgtcttgatgtactcgccctgcttgttcagccaacccgcgcgctccgggatgcgccagaactccacgcccccgcccgctgagtcggcgtccgcggacgccgcgccggtgcccatcaccgcccgccacaagctcgccgccatgggtgtggggaaaatggggatcggatcgggttggggcgagtcgca

SEQ ID NO: 44040 - DNA, 1105 bp, Setaria italica
  Peptide Sequence Number=SeqID_110014
tttttttgaacaagctatacacgaaaataccaattattaccagacacgagtcattgatagttaatttacatataatcaagagtgaggaaacaaaggaacgtcgccacaagctcccaatcacctggaagtacatatattacaattaagagccatatggagagagagtcacaggggtcaccgtggatgttacgctgccggctcgctctcttcgctgtccttgggctgcgcaagtctttcagtaagaaaatttgctgcaacttcacatatccaatggtatagctccatacaataactgaaacagccaaatctaaatcaattgactaaagaaatcgaacgccagtgcggaaatctggacggagagaaccgatccatagtaccatatcggacagctagctatatatcaagatcccgaacttattccccaatgaccaatatattatacaaatgcacagatcatcatatccacgaaaggagcgacaacatagagatgtggcagaattacaaggtgagcggtgtgcccggcccttttgctcaccaatcaatcgaataatcgatcacttgtcgccagggcggctgtcgtagtcgacgacctcggcatcggtgacggagcgggagtgctgcacgatggagcggccgatggagttgatccattcctccttctctttctcggtgtcggcgatgaagtacatggtctcccgcggggtggagagctcgaaggcgaactggcggttgagcacgtcctcggcgcccttgactgtgaggcaggaggcgacggggatgacgccgcggggcacggaggcccgcgtcacggcggggtccttgaaccagaagagccgcccctgcttgagcacgaaccaccgccgccgccacgtcttgatgtactccccctgcttgttcagccaccccacgcgctcggccccgtgccagaactcgacgccgccggacgccgcgtcgggcgccgtgggggaggaggaggaggaggatccgctgacgctgtccatcacggcccgccacaggctggccgccatcgtcgccgccggggatttggggatcggatgcgccggtggggggtttgcgagttgcgacgggggcggcgagtcaaggt

SEQ ID NO: 44041 - DNA, 1481 bp, Setaria italica
  Peptide Sequence Number=SeqID_110015
tttttttttttttttggttaatggaagcggtgatgcaacgacgcaataaaagatgtgaagtacagagttgaccttgcaacatcctcttactttcgatcatctaaacgatgccccctcgccttttgtcgtgtcaccgagggcacagttggatctttcgttattttgttctgtggtattgatagtgcaggttcagtgcggcatcccgtttacagtaacctttctggctcactggctgggcgcagggcgcagggggagatctactggccggggctacctgccgcggaacgcagcagccgctccttttccagcttccaaatctggtgccagaacatatgcgagaagcattgaagcaacctgccctgctaattattctgctccatattgtggtgtttgtgtatttcggggtgaaactgaagaatggatcccatacatacagttgcagtcagagctctcgatttgataggttatttaagttgatatgccacgctgggttaatctaccatcttgtagatgtggcaaggtgagtatacaatataatgcagtggagtcaagcacgatttgtacgtcttccaacttgaagggcgagctcggtgtctatcttgagagagatgtcaagtgccttcacagaatgcgttaatgctccacttgaaatataggttactcctgtttcaccgattttctttactgtatcaatcgtcacatttccagatgcctcagtctcaaatctaccatttatcaactgaactgcatctttaagcatggatacatctacatccccatttgtaagaggaacaaccatattgtccaacattatacgggttaatgaagttttgttctcagcagcgtacttcaaaacatctttcacttcttcaattgtccttgtctcaacctcgacaggaattgtaagtttttccttctccaagaattggtcaacagacctcattgcatttgcaatccctccagcaacagaaatatgattatcctttatcataaccatatcaaataaaccaagcctgtggttctttccaccaccaatcagtacagcccacttgtcaaccagacgtaaacctggggcagttttccttgtttccaatatggatgctggacgggcagcatcagacatagcctttgttagggtcgcgataccactcattctctgcatgaaattgagcacaaccctttcagcaacaatgatgctccgagcgcacccatatactttgccaaattgcaatcctttatggacataatttccatcactttcaaaccattcaaccttcaatgatggatcaacctggttaaatatcatgtctgctaggcttattccagcaataacaccatctgctttcgcaataaatgtggcttcagcttccacgtcagaaggtattgtggccaaacaagacacatcccctcggtcgccggcgtcctcggagagggcgagcgcgatgacggcgcaaaataaaagaaaaaacggaaaaacaaaa

SEQ ID NO: 44042 - DNA, 139 bp, Setaria italica
  misc_feature (6)..(6): n is a, c, g, or t
  Peptide Sequence Number=SeqID_110016
ataggngggattgcactgaagtgtggatctaaggtggagtacaggtcaacattatgtgatactgcagagctacagttctctattgaggtagattagaacctcttctctcaattgattcatcatatgaacagcttcatct

SEQ ID NO: 44043 - DNA, 386 bp, Setaria italica
  Peptide Sequence Number=SeqID_110017
cgtctaaaagtttgggatgagaaagatcaatctagagttcatgtggttcctgcattcactccatactatgctcctcaagcagaggtgaagtttatagcctgtagccctgtaccactatgaatacatcgtgtgatcactaacagcattttcaccttctaggcaaactgctctatcccagttctgtgtgtcgccagaaatgttgcatgcaatgttaggggtggtttcttcaaagactttgatgaaggcctcttgccgaggattagcaatgttcattatgaggatgagataaatgatatctcaacagctccggatgtcggcaattatttgataagagaggatgagaatgttgcagcagtaaatggaaatagagatgcattgccttttga

SEQ ID NO: 44044 - DNA, 3376 bp, Setaria italica
  Peptide Sequence Number=SeqID_110018
gccgtcggcgcccgatgcctcgtcatggagtccaggccgcccgccgccaccgacgtggcgccactgccgctcgtcgccatgtacgccgcttgcctcagggacaacaagactgcagttgttcctctaggagatgaagaattgcatttagttgcgatgacgtccagaagaaacttggcaaatcatgcatgtttctggggctataaattgccatttggtttgtacaattcttgcttgaccatgttaaatcttcggtgcctgggtattgtgtttgacctggatgagacattgattgtcgccaatacatcacggtcttttgaggacagaattgatgcgcttcaaagaaagcagagtaatgagactgatccacagcgtagaaatggtatgttatcagagatcaagaggtaccaggatgataagtccatcctaaagcaatatatagaaggtgatcaggtatatgatgatggaaaaatgtataaagcacaacctgaggttgttccaccattgtctgataaccagcaaccaatgacacgtccagttataagattacaagataaaaacattatcttgacaagaataaaccctctgataagggatacaagcgttcttgtccgtttaaggccagcctgggaggatcttcgcagttatttaattgcgagaggtcgcaagcgttttgaggtctatgtgtgtacgatggcggagagagattatgctttagaaatgtggcgattgcttgatccagattcaagattgattaactctgttcaacttaatgatcgaatggtgtgtgtaaaatctggtttgaaaaagtcactgttaaatgttttccatgatggttcttgccatcctggaatggcattagtaattgatgatcgtctaaaagtttgggatgagaaagatcaatctagagttcatgtggttcctgcattcactccatactatgctcctcaagcagaggcaaactgctctatcccagttctgtgtgtcgccagaaatgttgcatgcaatgttaggggtggtttcttcaaagactttgatgaaggcctcttgccgaggattagcaatgttcattatgaggatgagataaatgatatctcaacagctccggatgtcggcaattatttgataagagaggatgagaatgttgcagcagtaaatggaaatagagatgcattgccttttgatggtatggcagatgctgaggttgagaggagaatgaaggaagcatcaggcaatgctcaagcattccatccaacagtggcaagctttgtcatgccagtagcccctccccagaattttatttcgtcttcagtcgcaccaatagccccacccccttggcatgatgccacctccattcaaccaaccagttgttcaaccaggtttttcagatccactgcaaggctctccagctagagaagagggtgaagttcctgaatctgagttggatccagacacaaggaggaggcttctcatattacagcatggtcaagacacaagagatgctacacctccactcccagcaataccaccagtgcaagtcccagttccaccagtgcaacctcatgggaactggtttcccgcagaagatggtatgaatccaagtaatctgaatataggtccagcaggtttcactgtagaatctgattctctgctctatgagaaaaagcaaccacctcatccttcattctttcatggtggggacaatcctatgtcctctgatagatttagctatcagaatcagaggtttccctctcagctaccgcatgctgatgatcaccacatacttcagaaccatggacctccaaaatacagatccttttctggtgaggagctatcaggtcggcatgttcccacaaaccagagaaacaaccagttagaatcaggaagacactttgcacaatatacagggacccctgctggcatattagaggggattgcactgaagtgtggatctaaggtggagtacaggtcaacattatgtgatactgcagagctacagttctctattgaggtttggattgttggggaaaagataggtgaaggaattggcaggacaaggagagaagcacaacgtcaagctgcagaaatgtctttaagaaacttggctaataaatacttgtcatctgatccaaataagatgactgatctgaaagaaaatggtttcagtagcaaccgaaacttttttggatactctggaaataatagggatgatattttgccagttccaagtacttccgaggaatctcgctttatgaaaatggaggagaataactccagaaaaacaggaggttctgttgctgctctcaaggagctttgcacggctgagggatataacttagtttttcaagctcgtccatatgctccagatggctcagttgggaaagaatcttatgctcaggtagaagttggtggacaaattctaggcaaaggagttgcgtcaacatgggaggaggccaaactccaggctgctgatgaggctcttggaactttaagatccatgctaggtcaacttggtcataaacggtcaggttctccaaggtcggtggcaccaaattttaacaagcgcttcaagcctgattttccaaggacaatgcagagggttccttatggaacatattccaggatagaaggccatgttccttgagaggtttgcatagttaatgtgcctgggcactggacttttaaactggatgaaacttcgagctgtcaactccagacaagcagtgcaaaccatggattcctggcttctggttgacttccaaggctctccccgtccccgggccccattggtgacaaaggagattgttatggttgcaccaagaaagttgaagtatttatggtggccatgacttcatgcagaatttttttacctgggcttcctccattatgtgaccggcgttgcaccatgttggtgtaatccccgtggatctggaaattgaaagcttgagctcgtggagttgatgcagcaccatttctttttggtgatcgaagagcagagctgtatctggtgggcattttgttggacccacgtagtttacgctcggggtcctagttgtagccaaatttgtaattagtttcttaggctagtgggtgcacagaactaatcagtttcttacgctagaggatgcacagaactaatcagcatgttgatatagtcatctttgtaactctaggaagccaatctttgtagcggttgatgaattcagtaggtgacaacgttcatatgtatgttgtaggcatcgttgtaatacagggtccccttcttcgcatggttgggagtatgccccctgtaattcttttggtccttgtgtcactctgatttgcgcagaggtccttttgtcccatagccataggccacattcacatcaaaaaaaaaaaa

SEQ ID NO: 44045 - DNA, 436 bp, Setaria italica
  Peptide Sequence Number=SeqID_110019
tgccattgctgccgccacctcacctcgccccgccgctgctccttaccgtcggtgaggggcgagtggaaggggaggggagggaagacacagatcgaggagcatggagggagagagataggtggggaggggtcactagtagagaactgatcttcgatacgcccccttttatcccggtttaaagttgacccgggataaaagggggcgcaccacggtaggcaaaaatggaggggagatttaatcccggttggtatttgcaaccgggactaaaggcccccctttagtcccggttgtaacggctagttcccgggcgtcgatggcgtgccccttttgtcccggttggaggctccaaccgggacaaagattggccgttttgtctcggttggagctttttaactgggataaaaaactcactccccattatataccaagatagagg

SEQ ID NO: 44046 - DNA, 338 bp, Setaria italica
  Peptide Sequence Number=SeqID_110020
cactgcctacttccgatccctccctgctgatggcgaccgagaagctcagctgtggatccctacggacaccaagctgtggatgcagcctcctcagattacccccatcaagtcggtgagctgtgaccctctgaagatgcagctttacttggaacaccctagccccacggaaccaaagaatccgacggggtaacaggaactgtgtctgtgctgtgagtggaaatcacaatcaggctagagaaatggacaaaggtcctggctgttgatgcagccatgagatgggcaggccgttaagagggctccttgtcgttcccgggcggatccaaagagcatatgaggac

SEQ ID NO: 44047 - DNA, 239 bp, Setaria italica
  Peptide Sequence Number=SeqID_110021
tggcaccagcaagagcaacatactctccatagaaccccggtagccgagatagaaaatatgagccccctacatctggaaagagacccagagctgtttctggcattgcaaaaatcgtcttctcagtggcaactcgaaatcttccatgtaaagaaacaccagcacctccacccatgacaattccagtgagaagagaaacctatagtcaaattttctagcctttagaggcaagcaggaatgga

SEQ ID NO: 44048 - DNA, 826 bp, Setaria italica
  Peptide Sequence Number=SeqID_110022
tccaccaccaggcggcgcagagctcggccgccgaggagacgctggcgacgcagcggcgcgtgctggagtccgtcgtcacgatgatccccggcgagccggggtcggtcaccggccggttcctgctgcggctgctgcgggtggccaactacgtcggcgcgtcgtcgtcgacgcgcgcgcagctggtacggcaggccgggtcccagctgcacgaggccacggcggcggacctgctcatcccgctgccgtcggatccgcaggcgtacgacgtcggcgcggcggaggccgtgctggagcacttcctcgcgcagttccagcggcccgcgccgcctgacgagcgccggcggatgggcgccgccatggacaaggtcgccaggaccttcgacgagtacctgcggaccatcgcgctcgaccgcgacttccccgtgggaagattcgccgacctcgtcgagtgcttgccggacatcgcccgcagcgaccacgacggcctctaccacgccatcgacgtctacctcaaggagcacccggagctcagcaaggcggacaagaagcggctgtgccggctgatcgactgccggaagctgtcgccggacgtgcgggcgcaggcgatatccaacgaccggatgccgctgcgcaccatcgtgcagctcctcttcgtcgagcaggagaggaccatgggcaccgccgctggagccagccatggcggcgcggccgtcgcgccggcagaccgggcctcggtcgacgccacctcccggctcgcgacgagaaccagagaggacgagccggcctcatccgccgaccacaagtcagacgtgcaccggccacgccg

SEQ ID NO: 44049 - DNA, 302 bp, Setaria italica
  Peptide Sequence Number=SeqID_110023
atcatgtaagcagcataatcaagcctcagagaaagcttataaggttcaaccttggtagatgaatctgctggagcattagaaataatatctttcgtttcaactgaagatacaggtgctgctgcaattttgccattgtttggcatcattgcatcatctggaagcggaccaaccttatgatgctccaaggcatttgctatatcctcattagcatcaacttcaggtgctaaaattcgaccactttcgatgagctgagctagaaccgagctatcgacgtctcctagcaattgatctgctgactgaag

SEQ ID NO: 44050 - DNA, 815 bp, Setaria italica
  misc_feature (793)..(815): n is a, c, g, or t
  Peptide Sequence Number=SeqID_110024
gttaagagttcatctccacagccagacttgtcctcttctctcctccgacgattcgtgcttgtccaactgtggtcggtggtggtagacggccggcgacgaggatggccaccctgaggaacttgaagatcaagacgtcgacgtgcaagaggatcgtcaaggagctgcgctcgtacgagaaggaggtggagaaggaggcggccaagaccgccaacatgaaggagaacggcgccgatccttacgatctcaagcagcaggagaatgttttagctgagtcgaggatgatggttccagactgccacaagcgacttgagactgctctggcagacttgaaagcaacactggctgaactgaaggaggcaaatgaacaaggtgctgagattggagaagctgagagtactatcacggaggtcgaagctgtggtcaagccaacagaagaatgaattctgaactcacagttgctgaactattagcaagcatccgctttgctcgtgttgagaccttgtgagctcgctagtaagatgtgtttgatgtaaactcatgtaccagtatcttgacttggaaattctacagttgggcacggaattgtgtttgctgctcttatgttgatgtgttctacgcgtcattgtggtgagagcacctgcttttgatcgaacaggaatggcagggaaggccctactgagatttttatattatattgaaaatagaaagaaaaaggaaaggaaggttgtgtacacatggtcgtagaccaaagagaaaccctaatacacgtgctgtgagaattgactaaaacggnnnnnnnnnnnnnnnnnnnnnnn

SEQ ID NO: 44051 - DNA, 685 bp, Setaria italica
  Peptide Sequence Number=SeqID_110025
agtaagaaaggttcagtgtttgcagataagaaataaataaggaatagactagaatagtacttcaggtaagtgctttaatatcacttctcgagagatcaagatacctcaggtgatgaagatatttcggccttattaggattgaaccacaatcgatctttaaagctctgtttgttcgaaacatgatctttaaagctcttatagagttgtattttgataaaatcttcaaatctccttctacatatccatcacacttcaaatatcctgcttcatatatgtcacaaatcaacgtttggaaagctgaagatcctttctcttgggaagcattcagaagagtttctggtcgacggattgacaaatacaagtgacgagctgaacgaagaacatcctctctttcgcttgggtgtgtagctattgtagcacattcttctcccatagcagactgtgcaacatcatgcataaggtcatggatcttacaagtaatcctaggacaatacctgtgcttagtactctttccataaatagaatattcatcttcgtaaaatgggacattcttcaaatcctgaaaaaatgaccttgacttcagctcaatgaaaattctttctccaaaagtttcaggacacacttttgattgctctgggataaaaccattggccatccacaaattagcaactcacgtcaatctcat

SEQ ID NO: 44052 - DNA, 908 bp, Setaria italica
  Peptide Sequence Number=SeqID_110026
cgggtggaagcttcaactggctgccgtgtttttattagaggaagggttccatcaaagatacagagaaggaagagaagcttaaggaaaacctggctatgaacatctaaatgagccactgcatatattaatcgaggctgagttaccagcgaatatcattgatacaagactcagacaggcacaagaagtcatggaagaactgctaaagccagtggacgagtcacaagatttctacaaaaggcaacagctgagggaactggccatgctaaactcaactctgagagaagatagtcctcatcctggaagcgtctctcctttcagtaacggtggcatgaaacgcgcaaaaccgagtcagtagagaagctgcttctccatccttcagtccttgttgcaggcgtgcatcatcaacaaggggcacttgagcctgcgctgcgtgggtgcttgtgtaagaaaaggtatgcgtttgctggatggttagtctggtatcaagcgcattttctccttcggataaggagaaatcaatggttgttgaaccgtcttgatctttttgtggatcgaggcatgttgttgtaacttgtaaggtcatggacattcattttattcgttattgactgtttaaccctaagtagcttgtgatgctgaggataggtggtttcaggggagactaggtaaacctgactgtttaattagcttgtattagtcccctgttacattatggagttgcaaaaaaaaaacgaagatcatggtgcactccactttatgatagtttgatgatggaagctttgaatgaaccatgtgaactcaaaatgcattgtactcgcatagtatgcgaatttggttacagtataaatgggatccatgggcattcaagtaagtggattttgaaacaaacaaacgactaggtgtcattc

SEQ ID NO: 44053 - DNA, 639 bp, Setaria italica
  Peptide Sequence Number=SeqID_110027
ggttcacgaccatggattcagcgattttgacaggcgtcggtttagaagtcccagtcctatgtcttcgccaattgtccgccctaatctgcatggcaatggatttggtccttggaatgggatgccccaagagagattgggctttcctcctcctggaacaagtatggactggcaaggagcaccaccaagtcctggctcctatattgtgaagaagattatacgcttggaagttcccgttgattcctaccctaatttcaattttgtggggcgcattctaggtcctagaggtaattctctaaagcgggtggaagcttcaactggctgccgtgtttttattagagggaagggttccatcaaagatacagagaaggaagagaagcttaaaggaaaacctggctatgaacatctaaatgagccactgcatatattaatcgaggctgagttaccagcgaatatcattgatacaagactcagacaggcacaagaagtcatggaagaactgctaaagccagtggtaagttattctaatgtataataaaattactgcatttattggtcctcatctgccaaagctaggagtttgtaggggtactcttatttgaattggctaaatgccgtgcaagaacacatgatctatgcatt

SEQ ID NO: 44054 - DNA, 627 bp, Setaria italica
  Peptide Sequence Number=SeqID_110028
tgcgggtatcaagcatggttcacgaccatggattcagcgattttgacaggcgtcggtttagaagtcccagtcctatgtcttcgccaattgtccgccctaatctgcatggcaatggatttggtccttggaatgggatgccccaagagagattgggctttcctcctcctggaacaagtatggactggcaaggagcaccaccaagtcctggctcctatattgtgaagaagattatacgcttggaagttcccgttgattcctaccctaatttcaattttgtggggcgcattctaggtcctagaggtaattctctaaagcgggtggaagcttcaactggctgccgtgttttattagagggaagggttccatcaaagatacagagaaggtatccaaaatgttatatttgttaatcgcatcccacttatgtgcttgtttaatttataatatcttaagtttagaaaggttttatagcctgttgggtcatggagcttctttgtcatatctaatgtaatgtcgcgtcatggaactctgtgaactacatgcaacacttaagttttatttcctgacttgtaaccctaatgttattcaactagtcttgcctctgacctttgctatcactgcaatggatct

SEQ ID NO: 44055 - DNA, 590 bp, Setaria italica
  Peptide Sequence Number=SeqID_110029
caaatcaaccagtttatcatcagaaaccagaccaaccaattcttggacaagagacaaggagatcctctgtcccagcaaactgagctgatcaagagtcatctcagcatccctcaaagacccatcagaacgggacgcaattagcttcagtgcatccttatcaacatctagactctcgctggtgcaaatccactgtaatgtattgacaatgtcgcactccctcaactttggaaaaaagaacttctggcatcttgacaggatgatatgaggaagttcaaggtttggactgacaaggataaacacaacacgacgaggagcccggtccaccactttagagataacactccaagtgtcagctggcaatgtatcacagtcatcaaatacaaacaccctgtagtgtgaaggtgctggtgaaagcatgacattatcgaggacatccacaatgccatccatgtcaatgttgccaacaggcccaatctccatcaggttcctgctcttgccgagattgtgagcgatgcacgacgtgcacgagtcacagggcctagggtgctcgggagagaggcaattgagcgccttggcgaagacccgcgcgc

SEQ ID NO: 44056 - DNA, 723 bp, Setaria italica
  misc_feature (84)..(84): n is a, c, g, or t
  Peptide Sequence Number=SeqID_110030
gtcaacttaaaggccatcaggcgcatgctgaagtatcttcactccttgagtacttgaagctttgcatgttcttctcaaagaaanctttttcagcatttctgaagtttggtgggtacaaacaagaagacattctgattcacaagactaggtcgaggctcatgcagccttctttcgcacttgtgtgtgacaaaaggaccaagtgctttctgctcttcattcggggtgctatcagtactaaagagcgcctgactgcagcaactgctgctgaagtaccctttcaccatataattctaagtgaagggcagatcagcaacgagttttaggatatgcacactgtgggatgcttgctggagctcgttggattgcaagactagctattccccatcttcataacaaaatacaagaatttcctgggtaccaaataaaggtcattggacattcaatgggagctggcattggagcaattctgacatatattctccgtgagcattatgagttctcatcctgcagttgtttggcatttgctcctcctgcctgtatgacatgggagctggcggagtcgggcaaagatttcatcacttctcttgtcaatagaaatgatgttgtgccagcgttttcaaaagtttctactgagagcctgcgatctgaggtaatggtatcatcaaagctggatgatgttcaggaccactttcaccacggtttatttgccaatataagtcaggg

SEQ ID NO: 44057 - DNA, 504 bp, Setaria italica
  Peptide Sequence Number=SeqID_110031
gtcggtgtagtcggcgacgagggagttgatcggaggggggaccggggagaggcggaagccgttgaggccccgcgagatggccatctggaggaaggtgccggagacggcgacgaggaaggtggcggcggcccagaggaaggccccgacggcgacgacgcgcgccctgtcgtggcgggcggaggcgtaggcggcgagcgggtagcaggcggtctggacgagcgcgcggcagagggtgagggaacccagcgccgtcggggaggcgcccagcgccgcgcccacctccttgtacacggccgggagcagcacctcgtccgccttctccagcaccgacgccaggttcaccagcaccagcgtccagcgccgccgcgccgccgcgtccgagtccctcgccatctcctccggtcctcctccacggccccgcgcgaggcgactagcggggccggccgtcccccgcctggctccggggatcggagccgcgtgcttaaaatgggaggaggggagggg

SEQ ID NO: 44058 - DNA, 394 bp, Setaria italica
  Peptide Sequence Number=SeqID_110032
acacgagcagctccccacactggacgtagggctattcctgcccgaaccagtataaaccccgtgtcctctcgtgcaaccatccgagccttacgcgcatagaaaacaaattcacttgccgtagtcttgactcgtaattcttgacaacgacaaatactaactctgggaggtagaatgagtgacgttttatgggctacagttaatgcgggcatgtgttcagtttcaccccccgaaatagattaagagagaatcaaagaaccaagccataatttctcataggttggaggcatagccgtatttttaccaattgttaaccgatattacttgctttaacacaatgatttaattagttcagtgtcgcactatatgcgtattgctatttatttgaaggtgtgat

SEQ ID NO: 44059 - DNA, 1037 bp, Setaria italica
  Peptide Sequence Number=SeqID_110033
gtagcactcgccaagcgataagctcggggcaagccgcaacagccgccgatgttgccgccgccgccgccccttatgcttctcccgctcctcctcctcctccttgccgccagctccttcgccgcggccaatgccaaggctacacccccgtctgccaccgcggcggcaggcgcccgcgccggctcccctgccccggttccgacgccgtggccggagcagttccacgcggtgattttcacgaacctcaccgagagcggcgcccggctgcagctgatagacctctactacgactggcccaagggccgcaacctcaacctcatccacaaccagctctccggcgacccgacctacgacgtcgagtggaccaacggcacctcctacgtcttcaactccgcgtcctgccgcaccattcggttccccgtggggatcctgccgcccgactggctcgccgacggcgccgtgtacctcggccgcgagcacgtcgacggcttcgactgccacctgtggaccaaggttgatttcatctggtactacgaggaagtcgacaccggccgccccgtccgctggaatttcttcaatgggatgcagcagcatgtgatgagctttgaggtgggaggagtgctggaagactccaagtggcaggcgccagcttattgcttcaatggcgacaatgccgacactggcaatgtggctgcagatagagttgatgtgatgaacagcttgatcaggttcgccggggctccagctgcagctatggctgcatcatttgaccagtgagaggttttgcgatgattgactgatgagaggctttccattcggtgatccatgatctgttcattctgttctgccctgttaatcgcattgtgcttcttaaactctcttgtgttttgtggtaacagtcattctgcaatccacagcaattaggtgagtagtagctgttctttcctttcaagaacgaaagatgtatgttcagtactagatctgtatctgaaagttggaaataatggtcacacctgctgaaaaaaaaaaaaaaaaaaaaa

SEQ ID NO: 44060 - DNA, 1569 bp, Setaria italica
  Peptide Sequence Number=SeqID_110034
tggaggggccatcggcgccggcggtgcgccgggatccctatgaggtgctcagcgtgcccagggactcctccgaccaggagatcaagtccgcctaccgcaagctcgcactcaagtaccatcctgacaagaatgcaagcaacccagaagcgtcagaactcttcaaagaagttgcatattcttatagcatcttgtcggatcctgagaaaaggaggcaatatgatactgctggttttgaggcattagaaaatgaagggatggatatggagattgatttgtccaatcttggaactgtcaacacaatgtttgcagcactttttagcaagcttggtgttcctatcaagaccacaatatctcccaccgtgctggaagaggctatgaatggcacagttacagtgagaccactccctgttggaacatcagctaccggaaaggttgataagcaatgtgctcatttttttggtgtaacaataagtgaagaacaagctcattctggaatagtagtcagagtcacttcacctgcacaaagtaaatttaagcttctatacttcgagcaagaagttaatggaggttatggactcgctttgcaggaagatagtcagaagactggcaaggtgacatctgcaggcatgtatttcttgcatttccaggtttaccgtatggactcaacagtgaatgcgttggcaatggccaaagatcctgaggctgccttctttaaaagattggaaggtcttcaaccttgcgaagtgtcggctctcaaacctggaactcatatatttgctgtatatggtgataattttttcaagccagctagctatatgattgaagcaatgtgtgcaaaaagttacgaagacacaacagagaggctgaaggaaatagaatctaaaattctagcaaagagaaatgatctgcgtcaatttgaaactgagtacagaaaagctttggcacgatttcaagaagtcaccaacagatatacgcaagagagagaagcggttgatgatatgctgcgagagagggataatatccattgctcattcacaactgaacgaactttggtaaaccctgttggtgctggtagcagcagcagtaggtatacaacagagcatagcatccctgagagccccgagaatggtagcgtagatggcagagacaaatctggcaaaaaaagtggtttaatctcaaccttaatagatctgacaagaaagcttgaagggtcttttgctggaaatggcatgtgttttcactttgttgtacatttcggaaacactattgtattcatgccttatgagctgtttggttaccaattctttgggagttttgtagcatataggagttttgggtacagcattttaatatcatgtattctcatctttaagtccatccattatcccatgtctccccgttcttttgcaaagttgcattggtgttaagcgtccgaatctgtgtatccgcctgccaagttactggcagttacctccttcagcattttcttttcaaatgctacacctttataactatgtcaataagaaattaaataaagtctagtagttaaagtttatcaggtaaaaaaaa

SEQ ID NO: 44061 - DNA, 405 bp, Setaria italica
  Peptide Sequence Number=SeqID_110035
ggttcccctcccgccgaggagaacgggggcgtcagcggccgtcggtccgccaccggctcccccgctcactcaggccccagtaccagccgcgccggtgccgctgaggcagcagccgcccccgccgccgcctgcgcctgcgccgcctcatcgcccggtgcaacgtaatgagccggagaccaatacgcctgagcccgttcagttcgcgccaccgcaggcggccgttccggtgctctcgcagacttcggccgccgctgccaatgtcagcgccagcagcagcagcagcgtcgcggggacatcacaaagtctgatcggcggcatgttcgcaccgtcgtcaatggccccagcgccgcagttcgccgacctcggcggaggggttagccgcccggagcgcgctctgccggacca

SEQ ID NO: 44062 - DNA, 466 bp, Setaria italica
  misc_feature (344)..(344): n is a, c, g, or t
  Peptide Sequence Number=SeqID_110036
tggcaataagcttctcggccggttcctcagcgagcagcagtccccctcccgagttgccacgacgtggttactgggttactgctggccccctcccgcgcggcacctcgtcccagtccggtgtgcggatgggaagagatacgacagggatggcggcgcgcccgtggacgcgggcaacctcaccgtggctgcaggtcctccagattaacgaagggtgatgctgatgcacgctctctgtttgcgtaaatgccccagcaaagctgacgacccgagcagggagcattgcctgttaatatatccgtaatctgtgcaggtcagcagcaggagtaagaaaagggtccaaaccngaactgagatgagtttgagatgctacgtcgtgcaggtcttagcttctcacttcatctctttgcaattaggcttcatgaattccagttctgacaaaatataatttaccaagctgcgtagtaca

SEQ ID NO: 44063 - DNA, 1208 bp, Setaria italica
  Peptide Sequence Number=SeqID_110037
cccaccaactgacggggagcccgaagtccgacggcatgcctcgcacaactgccggtatagaaagcacaatacagctgatccccagctgtaaaaaccagcctggtgccagtcagtgaggcagtggatccacatccaagacgcagtgtcacctgtagcgtctgggaaaagaacgcaggcaaagaggtgtagtatccacgccctgcagtagtgtccaactgtctcagcatccgcgtcctgggggcactggccgaagtgttcccgcagccaagagattagcactccagatgtgcgagtcccctgctcctcaacctctcgccccaggaaggctgcgactcgtgctctccaaccatctgagacgcacggcccagtgactggctggccccgaatcgacagacccagcatcttctaacagtcctgtagggtcactgtcatctctccgaacgggaggtgaaagctgtgagtctcgggtcgccacctgtcaaccaacgcagttatagccgctgaattgaacttgggcatcccacgacgaacctgatacgagatgacatctagaccagccatctgtagcaaaggagtgtagcggtcgtcgtactgcagcgccaaaaacccatcatgggctctagaacgaaggagcggaaggacttgccctcccgctatgagacgacctcagtgggtctggtcgtacgcctggtctagaaggtggaagtgcgccatcctcactaatttgccaacggcaagtgcgtgaattatgacccaatctgccgcacttgccgcactcgttctgttctggatcagcaagaaatggtgttgctctaccacgcctcgttcttccggatacctgatccatagtcatgttttgcctcgtccgcttccttattccacgtttgttccaacggtatgcaggatccgcaacatattttggcccatcatacggaggccactctctaggatcccggaaaggcacgaagcgggggctccatgtccgcacaagggtgcctacgctgaactcatgtggtatcatgctctcgatatcaaaattgcgatgcctagctgctgccaccaaatgagaacatacaaagtggtactgccttggcctaccacaagtgcacttgaaatctcggagaactaccacatgtatcctcgactctcggatctcaccgtcggacgttgtaccgcccctatgctccacctgataagtccctgagccg

SEQ ID NO: 44064 - DNA, 279 bp, Setaria italica
  Peptide Sequence Number=SeqID_110038
gttcctatgtggaggattcatgcaagcactggtcaagtggtcagtaacaaggcagttgggcatgcatattatggtgtcttggtatctttatataaagtttgcatcaccaaggatgtgctaatttatgaaaattttgagagcgacagtatatagaagaacatactattgttacacaacaaacctcaatggatgaaaatgtagatcttaaggagttaacgaagtcccgagcttcagtagggcccattaacctcctttccttgagatcggcgcccgcgcaga

SEQ ID NO: 44065 - DNA, 352 bp, Setaria italica
  misc_feature (347)..(347): n is a, c, g, or t
  Peptide Sequence Number=SeqID_110039
cataatgtcgagcgtgaggtcaagcccaacattgcttttctgctgaaatgcggcttaactaatgatggtattgccaagctcttcttactcgtccctaggatgttcatgttgaagccagagggtatcaagggaattgtggagtgtgctcacaagaagcttggcgtgccgtgtaactcagccatgttcaagttcgccttagcaaccacctacagcatcaaccctcagagagtcggcgcaaagttggatttcttgatgaaagctcttggatgctctgagactgagctccgcattgcagttggcaagatgcctaccactctaaaattatcagaggtcaatctgacccgtanagtgg

SEQ ID NO: 44066 - DNA, 232 bp, Setaria italica
  Peptide Sequence Number=SeqID_110040
ggagcccctcttttcgtatgatgaatgtgcgtttcttctcatggtcaagaacagcaattacgcctggggagccaacatagactcgatcaacctgcacaatagttagcaccctcttcagatttaaatactcgtacctcgaatggaacaatcaacgagagtgatatcaacagcatgcaaaagggagctgaagcgaacaggcccaggcacacttttgatgacccgagcttccata

SEQ ID NO: 44067 - DNA, 1476 bp, Setaria italica
  Peptide Sequence Number=SeqID_110041
aaactattgagacatcacattgcgggaacgggaaccatgtcgattacagcaatacttgcatctgacataagtttaaactcaacagctggcaggctgaaaatactgcagccagcagggctggacctagcgcccccatgtacaaacattgaaaaaaagtagtacatgcctttcgtcaggggcgagcgagctcaggctcaggcctcagggggggctctactacagcctgcccgggtggtccaggtggtcgctgcagttggtcgacggcacggcggagagctccagcttccccgtccactcctcgccgggcttcagcgtgatggcccgctctaccgcggccgcgtccacgcagagcatctgcttgtactcgtcatcgccgaagtccgccatcgtcttcgacttcttctcccaggggttccacacaacaatatcagggagcccctcttttcgtatgatgaatgtgcgtttcttctcatggtcaagaacagcaattacgcctggggagccaacatagactcgatcaacctcagattcaaatgttatagcatctccttgttcggtaaaacgttctcgctggctaaggttgtcaagataatcaagggtctccagaccttctatcctcacttcactgatgtcagaaacagaaagataagtatgataagcaaatgcgaaactgaatggcttcccattaacattcctgacacgtgatatcagcgaaaggtctccatccattgaaagagagactctgagacgtaactcgaaacagtgtggccaacacttcaggtcatcttcagatggctttagcagaaggtcaacagaagctttgttgttgttatcaccataatttagtggtggagcctcttcatctattgtccatatcttgttccttgcaaatccatgctgctccaatgttccacagtttccaaactgtgggaagcatattggaattccaccgcgtgtcgcttttggcggcttgaagattgccttgctgctagtgaagagaagctcctcgccgcggtcgttcttccacgagacgacctgcccgccgtgcaggcagacccggacggaggccccccggggcgaccggatcgcgacctggtcggcgccgttccagtccttggtcacctcgaaaccgggccgctgctcggagcaatgccccatgctcatcaaccggaggaggagcaccaccaccaacaccagtacacctccaccctcgcgagaaccgaccagccacccactgccttcccggcgcacgcaagcgagcgagagcacacgagctgctaagcctgagagcgagcgcgcgcccgggtcacgcgcaaagctacaaccacctaccaacctagtactcctccgtccgctgcagtacacaggtatacctccagcgctaccaccgccccagcaaagcgccggagacgacagcaacagcggcaggggtcgccattggaacagctcggatgttacggttcgctcccctccccg

SEQ ID NO: 44068 - DNA, 278 bp, Setaria italica
  Peptide Sequence Number=SeqID_110042
aggtagtaccgacccgcgtccagttcccgggcctacgggccaccgttgaggctcgagcagcccgcgaggcacgcacgcaggagatcctgaccgccaaggttgagcaattgcgtcaaagcctcgcttcaatcaaggctgaaatccggtccacgatggatgagattcgcaatgggttggagatcatccgtgctgaatatgaaaaatttgagggctatgtgaatgatgatgatgatgcagagcaggagattgcatccctgtcaatgcggagtattagatgg

SEQ ID NO: 44069 - DNA, 509 bp, Setaria italica
  Peptide Sequence Number=SeqID_110043
cggcgtccatggcggtgatgaaggtctagttgtcgtcggcgtggtaggcggcggatgcggcggtggcggccggcgccgaggacgacgatgcggcgcggagctcgacggtggccgggacgcccgactggaggaggcggttgagcgcggcggggcagtcgaggcggtacgcctggacgaagcgcgggacggtgacggcgccggcgagcgaggaggagagggagttgaactgggagatgagcttgaggcactccgcctcgtagtcggcggcggagacgaggtcgcggacgtaggcccgctccagcttctccgtcgccttgatgatcgcgtacaggtccgcgtagctctccaggagctcccgctcccgcttgtcgttccacagcttcacctccatcggcgccggcggggctccctcctccctccggcgagcggattggcggggagggcaggctagggtttcgcggcgcgcgagatttgggggaagaggagaggaggggaggggatcggagtag

SEQ ID NO: 44070 - DNA, 496 bp, Setaria italica
  Peptide Sequence Number=SeqID_110044
taaaagtaaggttaggtacaaaaaagaactcattttcattgcaaaaacaggcaagggagatcatctactttcctttttcaaattatttctagttacaaaagccgcagaaagatgtgaatcctagtgggaacacagagcagccagacaggagtaaaaacagcgacaacccccctaaatctgataactgactggacagaataaacaccattggaagtgtagaatcctaccatttcaacatcaactcaagagaaatggtccttctaaaggtcagcatgaggttttcgatcttcattagtttcttcacgcttgcactatgcataaatgaggtcaacggatctcgttctgaaagaaagggaccaaccataggacatgcagtggttcttccattggttaccatctttctcagaacctttttggttctcctttttttaactacagttgtctagttcttgtctagtcgtttttggtttgttcttactaatttttaaactaaaaa

SEQ ID NO: 44071 - DNA, 3028 bp, Setaria italica
  Peptide Sequence Number=SeqID_110045
gtatattgcctgtcccttcatcaagctgtcctttcaaaagtcccaggatacagatcaggtggctgaccgctgcttcgatctgcagcttgttggagataaccagcgtgaagaacttcccaagttaccccctgtgaggctcaagtctgaagataagttagtcaatatgaactgggaggaaaagatcaatcatcatggatctggagccaagcaatctagtgctgctgataatgcctttatgattggatcttatctcgatgttccaatcgggcaagaaataacatcttcaggtggaagacgcacaattggcagtagttggttgtctgtcagtcaaggtattgcagaggatacttctgacctggtatctggttttgcaacaattggtgatgattcacttgaatatccaattggtgaatattgggattccgatgagtatgatgatgatgatgatgttggctacacccgacagccaattgaggatgaaacatggtttctagcgcacgagatcgactatcctagcgacaatgagaaggcaactggccacacaagagggcctgatcgacatgatcgccctacaaaggacgaagatgatgaccagtcattcgttgaggaagattcctacatatctggtgagcaatattttcatggaaagaatattgcacaagtaggcacttcggtggggccaatggtgcatggaattccggatagtgatatgatggctcagtatgatggtcaacttttagaccccgaagagcttaatttaatgcattctgaaccagtctggcagggctttgtgtcgcagaacggtgaattaggtatgttagggaatggaaagttccttaatgattctgaacgacctcatcctgatgacccttttgtggaggatgatcagcatggctctgttaggtcaattggtgttgggataagcagtgatgctgctgacattggaagtgaggtgcgggaaagtctgattggaggtagcagtgaaggggatattgagtacttcaatgagagcagcctgagtgttagtggaaaaagacattctcagcaggaaactgaaaagaagagagtaggtggtaaaggagcaaaacatgaccaaatcaattatgctgttgatatgcagaaggtcaatctaccaccgggagcagctgacgggggattttcttttcctccaccattgcattctgggaaaaatcatgactctgatgctaaatctttgtggtcaaagaaggatgaaatgtattgcattaacgatcccgatgaatgtcaaaatggcatggtatcagatgatatgcttgccacatggagaaaaaagaatagcgagtcttctctaagaagctctagagatgaaatgacgtctgacgttgttagatcaagaaattcaagtgcttcgtatgacgaaacggaggacacagcgaacgttcggcatcacaaactagacgacgcacaagaagaagacactggaaccaccttagatgacgaggaggcagcagcattgcaagagcaagtcagacagataaaggcgcaggaggaagagtttgaaactttcaatcttaagattgtgcatagaaaaaacagaactggctttgaagaagacaaaaatttccatgttgttctgaattctgtcattgctgggcgttatcatgtctcagagtatttgggttcagctgcattcagcaaagctatccaggcacatgatttgcacacaggaatggatgtgtgtgttaaaataataaaaaataacaaagatttttttgatcagagccttgatgagatcaagcttctgaagtatgttaacaagcatgatcctgctgacaagtaccaccttttgcgtctgtatgattacttctactatcgggagcatttgctgatagtctgtgaacttctgaaggcaaatttgtatgaatttcaaaagtttaacagagaatcagggggcgaggtttacttcacaatgccaagattgcagtcaatagccattcagtgtctggaggcacttcagtttctgcatggtctcggtctaattcactgtgatttgaagccagaaaacatattggtaaagagctacagcagatgtgaaataaaagtcattgaccttgggagcagctgttttgagacagatcatctatgtgcatatgtgcaatcacgatcctaccgtgcaccggaggttattctgggcttgccttacgacaaaaagatagatatatggtcacttggttgtatattagcagaactttgcactggaaatgtccttttccaaaatgattctcctgcaacattacttgcacgtgtgatgggcatcattggctccatagaacaagcaatgcttgcgcagggacgggagacctacaaatatttcacaaagaaccacatgttgtatgaaagaaatcaggaaagtaacagacttgaatacttgattccgaagaagacatccttgcggcaccgtttgcccatggctgatcaagggtttatcgagtttgttgcgtaccttctagaggtaaacccaaagaagcgcccaagtgcctcagaagcattgaaacatccatggctttcttttccgtacgagccaatatcttcatgaggcaaattgctattggatcgcgggtggcttaacatttgtctggacacctgaacaccatgaaatttttgatagatcaagatgcaatatgttctaccacgactgagccatggcatcaaccataagtccaaaaggctaatcatccggattctgtttgatcatgtcttggtgccacaatcagaaggtcttatgcgccatgtactatcacagcatgccctgtgttgtgcttgtaatataactttgttttttttgtctttctagccccgatgtaacaggccattttggtttaggtactttggaacgcatttctaggaatagggctgtcatgttgtacatggtgtgatcattgttgaaccccgtgcaatgcggtgcacctgtattacggttctaacccaaattctgaacgtcttccattgccctgtcaggtcttaaagaatttgcctatcaaagttgtct

SEQ ID NO: 44072 - DNA, 344 bp, Setaria italica
  Peptide Sequence Number=SeqID_110046
ggcgagaaggacggagaggttgtcgacggcgtccagcaccacggagctggaggtgaagatgatggcgaacttgtcgtggaggcccatgatgagcacccagaagaagagcccgatcaccagcgaggtgatcgacgacacgatggtcgcgaacctggcgcccttgccgttgccggcgccaagctcgttcgccacacgcactctgcaagaatcgaccaccaaattcgaatattagctagacgtcggttgtagtgtggtactgtaccgaacagcagccacagactagacgtcgccggccacaggctatggcaaagcatatatgctcgtcttttcctgaacccctgggt

SEQ ID NO: 44073 - DNA, 953 bp, Setaria italica
  Peptide Sequence Number=SeqID_110047
caatggaaacaattacaagtgttggaacagatgagaaggtacaatgctttcgtgagttaacaaaagaaaacagagggcaacttaagtacatgtgccacaccatgatgcaatgctttacatgatctaacagaaaaaaacaaaaggagcctaaaactgcagtgtgactgtatgagcattcaacatttcacgtccaaatctatcatcattttttatgcatccgtgttcatcttgaatcataagaatttagcaacatcgcatgaaagttagagattgctgagaccaaggaactctgtgaaacttggatacttgggctgccatccgatctcagcccgggttttggaattctccatccttttccccagtggaccatcagtcccagtgaagccctggaatttagtgtcaaattttccacttctgttgacacggtccataatctcttgcctagatagaggctcattatcacagcccacaaagatgcggccgcgtaatctccttttcatgatggcaattgcaagggaggcggcatcttcataatgtatcagattgagtatatggtcaggacgtgcatccaaggttccttttgacaaccagtaaacatgaggacctcgatccgatttgtaaagtcctactagcctgagaacacagcctcctgcctcaaggacaacattttcagcttttagaaggacatccgtacgagggctttgaccaatctgtatgcatggagaatcctcactgcacaatccattatcactgcagtcatagacggcagtactcgaggtgaacaggaaagagccttctccattccaattcgaagctgctactctcaggtccccagcataatcctcagaacgatatggcggagcacagaaaataacatatggaaattttggacctggtatggaccccttcaaggagggaattgattacctaagtttctagtttaatttctacta

SEQ ID NO: 44074 - DNA, 751 bp, Setaria italica
  Peptide Sequence Number=SeqID_110048
aattgtaattcagtgggttcgggcaaagtatatcaaagaacactagatgcttgaaagtaggaatatgtattaaaaaaaggacatgtcggtgagtgtattggcatgtgaggatatgtaaagtcctactagcctgagaacacagcctcctgcctcaaggacaacattttcagcttttagaaggacatccgtacgagggctttgaccaatctgtatgcatggagaatcctcactgcacaatccattatcactgcagtcatagacggcagtactcgaggtgaacaggaaagagccttctccattccaattcgaagctgctactctcaggtccccagcataatcctcagaacgatatggcggagcacagaaaataacatatggaaattttggacctggtatggaccccttcaaggagggaatgataccaagttcagttaattcacagtgatgatctgtggttgcagtatggccataaacaattggaacctggatgttcctgtttccacatctcagcgacgatccggccaagcacgccaggtccgacgatcagtaggtcgttttgcccgacgctctccaacgagcgagcgtcgacccccgtggcatccgatactccgatggtggaggaggagtcggcggcggtggtggcagacatggcggcgcggcggcgcgggcgggagacgcgggcgctcgggattggagcggggcgatggacaaagagggtggaggaggcggcgacaggcgcggtagcgtgcag

SEQ ID NO: 44075 - DNA, 795 bp, Setaria italica
  Peptide Sequence Number=SeqID_110049
ctcagtcgcactagtgtgccgccgcagcagagcagcaagctacgagggatggcatcgatcatggccgccgccacctcccgcgtcctcgccgccaagacgctgttcctcggccagggccgcgccgccgccaatgccagccccctccgcgacgtcgccgcagccgccagcggccggatcaccatgagcaacgacctgtggtacggcccggaccgcgtcaagtacctgggccccttctccgcgcagactccctcctacctcaccggcgagttccccggcgactacggctgggacacggcggggctctccgccgacccggaggcgttcgcccgcaacagggcgctggaggtgatccacgggcggtgggcgatgctgggcgcgctgggctgcatcacgcccgaggtgctcgagaagtgggtgcgcgtggacttcaaggagcccgtgtggttcaaggccggcgcgcagatcttctccgagggcgggctggactacctgggcaaccccaacctggtgcacgcgcagagcatcctcgccgtgctgggcttccaggtcatcctcatgggcctcgtcgagggcttccgcatcaacggcctcgacggcgtcggcgagggcaacaacctctacccgggcggccagtacttcgacccgctcggcctcgccgacgaccccgtcaccttcgccgagctcaaggtcaaggagatcaagaacggacgcctcgccatgttctccatgttcggattcttcgtgcaggccatcgtcaccggcaacggggcccctcgacgaacctgctcgaccacc

SEQ ID NO: 44076 - DNA, 416 bp, Setaria italica
  Peptide Sequence Number=SeqID_110050
tagacgctctgggccgacatccctggcggtgcaggaggaggacgattgcgacatcgggatgggcttctggttcccggccgattggacggttcgggaccggagcatcgtcgccggcgcgctttggaacaccagccatggggctgccggcgcggtatcggcgtcgagcatcgacttcgacagcaacagaggcaacttctcagacgtggagtacagatacacgatggtcgatgaggcaaagaagcgctattatgcagacgtgttgagaggccacattaacaaggccaaggggcctttcccggccgcaaactttacttaccatgacttcgagttccgtttcttcatggataacgttaccggaggctcggagcttggagaagcccacccggtcactactcacactgagtcggagacgtact

SEQ ID NO: 44077 - DNA, 464 bp, Setaria italica
  Peptide Sequence Number=SeqID_110051
ttaaggtcatcatcgtgaagatggaggatcaaacggggaagggttgcatgtatctgcattaggcataagaaaacaagtaacagtaaaaggcacatgatgcgcgcatcaaattgtaaaaactatctagtttgtacttcccaaaaattaatacaataagaaaatcaagtgtcatggatggcacaactttatgtaacatttttaagtttgtaattgccttgacattttatatggtctctagtctccacaaccgcatcctacgaaggtaagcactataatgcaactaaagtggaagctgtatgctacctgctcaatgaaagcagtccgctgcaagcctacaccataggcacttaaagcaccataagctgcaaatgcattggacctcatttttgtattcatcgaaacctggagattccgcagccttattaagagatttattaagatgggatcaacagcatcttgctctg

SEQ ID NO: 44078 - DNA, 429 bp, Setaria italica
  Peptide Sequence Number=SeqID_110052
aagagttaattgaacagattcattggggtcttcaagtagtgctaatataactcctaaaacttgctggatgtatttaagcatgtggctgtcaggaatctgaaagagaacaaaaaagcagatctcatggttcactcagcaattagactacgttagtgtactagccataaaaccatacaatttgcgggaaagaaaacgcaggatctgataagtagacaaaataacatagataggtgaatgatcgtgaaagaagaaaatagaaacaccttcaactctatcttagtgaagcaacatccaacctatattactcaaataacaaaacagtatctaatgagagaacaggtatccatgctttattcaaatgataacctgcacaagtccacgcaaacagagactcctgacagtcggtgaatcatcagagacatgctgaca

SEQ ID NO: 44079 - DNA, 1236 bp, Setaria italica
  Peptide Sequence Number=SeqID_110053
ttttttttttttaactttaatttacttaaaaggttaaaattttactaaattaaaaataaattacaatcaaactgcgaggggttgctgtacaggtgtagggaagatctatagacatggcaactgaatttgtatctctacagttcatatcttcaagggaagaacaacaatatacacaagcatgtacaacttgaatactgtacatatacaagtaaatttacaagagtggtctggcttctgtcacctctattgctctacgtgcacatcattcggacttcctcctgttcttcctgaagttccgatggtgccttagtatcagaatcaccactctgcgaattgcgtgacgattctgctcgatcaaatcgtgaaatcattgacctcagcatgttagacctctttataagaatgcccagcgcagaagatgctgccgcccgaacaattgcgtctggtgattggctcattctacctaccaacgtagcaaacacctgggagaaataaggggcgatgaagcgttgatcatccaaaaaggatagcatgcaactcaccaaacaaactgcatttgctcttatgaccggccaaggtgcatcaaatgcctgtatagcagattctaggtagctgtcaactctggcaggagacagtcggcaaagttgtcttgctaagtccttaatgaagtcctcataatcagaacggcgatcagaagtaaaatactgcttgctgaggagcaaagataaaccatctacttccatcaatggggcaaggagctgaaatgtgttccgacatgcaagacgaacacttaggtcatcatcgtgaagatggaggatcaaacggggaagggttgcatgtatctgctcaatgaaagcagtccgctgcaagcctacaccataggcacttaaagcaccataagctgcaaatgcattggacctcatttttgtattcatcgaaacctggagattccgcagccttattaagagatttattaagatgggatcaacagcatcttgctctgacaaattaagaacagttaacaagcattggacagcagttaattgaacagattcattggggtcttcaagtagtgctaatataactcctaaaacttgctggatgtatttaagcatgtggctgtcaggaatctgcacaagtccacgcaaacagagactcctgacagtcggtgaatcatcagagacatgctgacacaattcctacaaccaattgttcaagcaatgtagttcttttcaa

SEQ ID NO: 44080 - DNA, 1481 bp, Setaria italica
  Peptide Sequence Number=SeqID_110054
tctagtctattctttgtcttcttgtactaaatttaagtaactagtttaactaagtctatttggtactagtctagtggacctcatttttgtattcatcgaaacctggagattccgcagccttattaagagatttattaagatgggatcaacagcatcttgctctgacaaattaagaacagttaacaagcattggacagcagttaattgaacagattcattggggtcttcaagtagtgctaatataactcctaaaacttgctggatgtatttaagcatgtggctgtcaggaatctgcacaagtccacgcaaacagagactcctgacagtcggtgaatcatcagagacatgctgacacaattcctcaaccaattgttcaagcaatgtaggttctttttcaatgtggcgtataaattctgatagtgcagcagcagcagcctccctttcagccctctgatttctgttcagagctttactcaagataacacaagttggcagaacctcttttggtcgttttactgaggaactacatgcaacctcttgaacaagatcaatccacttctccttctcagtttgttctccatctcgagcaaatatctttcccatttctacatcaccgacacactcacaaaatgactgaaatgcaattaacaacgatcgcagaagttcatttcggcccaactctgcaagaccatgaagactccccagttttagtataaggccagcaagaacggaagggtaacttttctcaactgcttgtttcccaatcttcccaccacctctcataaatgcattgacagcaaacatagttgcttgtagaatacagtcgtcagctgatgactcagaggtggtttctcccttctctgaactgtttattgtgacaggttctttatgaagtatagataaggtgtactccaagaagagaagtgcaagctccttatgctgggaaaatgcataaaaaacatcctgtatggcccagcctccacgaatccttggtatgtcttttgtacaaatatctcttccagccacagatagaacctcatcaaagaccacaatgtgattggtgttttctgctaggcatgatatagcattcaaaacctcttggcgtgagtgcttgtcagtaagagaaacagcagatgagagtaaagattgagttgtcctcgagacatcagcttcacgtagttccttgcctcttcttgtaataaacatgataatagcttgaatggaagcatctgctgattgttttactttatcacatgttgccaacgtacaagagtgtagcaagataaccagctcatcctttgataatagaatacacactgaggaaacaaccctctgaaatacttctgtctggtcaacagatgcctcccttctgacgacagagactaactcctcaagggaggacaaagcactatacgaggattccagatcaatatcattagcatatgccttctgcttcggaagtgacaatgaaatgttgaaag

SEQ ID NO: 44081 - DNA, 385 bp, Setaria italica
  Peptide Sequence Number=SeqID_110055
tgtcctaaattaagttgtagtgccgtgttgattaattagcaatatttggtttgattcctttacagtagcaaaatatcagaatagggtgtttctaagataatttgttcttgttgtgatacttgaaatttttttgtccttatctgaattctaactataccgtccaattgtgatcaagcacacgatgtaaacttataattcaacttctgtacatggctcaaatttcatctagaggataaggtttcagctcattattaatgtaaactgtaaattttgtccatgtacttaaagcaatcaaatataatattagaaatttagccagagtcatatatattattcactgcactaaacacatgacattcaagtgttcagataaactccagtcata

SEQ ID NO: 44082 - DNA, 533 bp, Setaria italica
  Peptide Sequence Number=SeqID_110056
gtactactattgttacagttgtacacaaatgacaacttttctaaaaaaaaagtatagtaaatacacctatatatattatgttataggcatgcaagttgccataggcatgtgatttgtgtaataaatacggctgtatttttataaacaaacataatagcagtgtctagctgtgtggttgtgttaaaaaaaaatcaacaaactatgctatgcgctcttgcgtatctccattggaacctttttttggacccagaatttgacataggtccatgcttcctgcagtaaaatagattctatcaatgtgaattgtcaaccttttaaaacatgcataaagctagttactttcctcacatggaaatggtatagatagatttgtcactaaaaactatgcccttattaaattagaaaagatggacaaaggtgtgttttggatatcatgtctgtccaaaatgactattgtgagtagtaaaatagaacagaggtagtgctgtttaatctgccactgaggctactccttatcattatatttttatttt

SEQ ID NO: 44083 - DNA, 609 bp, Setaria italica
  Peptide Sequence Number=SeqID_110057
ctggatttcttcccccatccacttgattaccatatctgcccagaaaagcacgatatgctggaattacattttcagatattgatattttcagttcttcccggagctgaggatctggaactttccagagtgtctggttcctgtaaatttcctcaaaggccatgttgaagttcttgaaccgttccttgatggacatcctagaacttgaatgcccactgccactgccactcccactccccacttcccactcggcaatggcgtctcgcggacatctcgctcccctcacacgagcgctcccttctctgcccaaatcctagctcctccgccaccacccccaccttactcagctccgaagatgtcttccacacggccaccgccagtggccggcaagtcgggcaacctcacggtctccgtcaccccaccgtcggagacgccgagctcgcctcagccggagagcccggggtccgagttctccacgccccctacgagtcctcgctttgaggactcgcctgattcaccgccgtccaccccgtcggggccggcgcagagggcccttcggccccgcctgttgattgggtccccacgccgccgctggtcaggacggtctccccg

SEQ ID NO: 44084 - DNA, 602 bp, Setaria italica
  Peptide Sequence Number=SeqID_110058
atctggaactttccagagtgtctggttcctgtaaatttcctcaaaggccatgttgaagttcttgaaccgttccttgatggacatcctagaacttgaatgcccactgccactgccactcccactcccactcccactcccgcttccgctcccactcccactcccatgtccatcttccttgaaataagacaaagccttggtccaagatatccttagatagctctttgagtactgccgaatcttaccactccgcctttttatccagtgatcacctaaaatctttcctagctcggaatcctttaccttctgaacaatatagagcaaattgttcatggcaaatatgcactccagggcagcatcttcatagagcctagatttttcctccaaattggcttccaaataagatattagcttcaggagacgccttccaagaggggtcatgctctgcaagtgttcctgatcctgatcatcagaatttctgaaagcatcttgatcacaattgtcatcagccaataggacatcaagcgtctcactgtaaacaaccagcaacctcaaatagttcatgacatagcgtgtcatcgggtggatctcaccagccgtcatcg

SEQ ID NO: 44085 - DNA, 412 bp, Setaria italica
  Peptide Sequence Number=SeqID_110059
accatggccatgtcttccgcggagagctcggcggagccggcgagcgcggcggcgtccttcctcttgccgccgccgccgcctcccgcggcgctgctgccgcggcggacgatgttgcgcaggaggtgggtctggccgcgcaggaacgacgcgtgcgcgaactcccaccggtccggttgaaccttccggaagccataggtgttgagctggcgcacgaagctggagaagttgttgtgcttgaagtgcgcggggagcagcagcctcgagaagccggcggggtcgacgacgacgaagctgttgttcccccgtcccatccgatgaccccgtccgtcccggggtcctccaccatcatgtacgtcttccacacgaacggcgccgccgcgccgccgcccgccgtcatccccgcttcctccgg

SEQ ID NO: 44086 - DNA, 476 bp, Setaria italica
  Peptide Sequence Number=SeqID_110060
ctgctcctcccgcagccgccgcacgtcccggatggtgccgcgcacctcctccccctcctcgcacagctccctgccgccgccgcccgccttcttcttcttgcgcacgatcagcggcagcaggtgcgcctgcccgcgcaggaacgggactcgtgcgcgaactcccaccggtccgtgtccaccttcctgaacccctgaaaaccaccacacaagaattgttatcacgtgacaccaccacacgaagagtgcaagctgagcgagcagagcagagcaggggaggtggcgcgcgaactcacgtaggtgttgagctggcggacgaagctggcgaagttgcggtgcttgaagtaggagggcagcaggtagtcggagaaggcggcggggtcgagcacgaggaaggtgtttgctggcgccgccccagcgcacgacggcgtccgtggccgagtcgctcaccatgtggaacgtcttggccacgaacggcg

SEQ ID NO: 44087 - DNA, 662 bp, Setaria italica
  Peptide Sequence Number=SeqID_110061
ttaacgttttaggttccgttactttaagtttatttgttccctttgttcttacctaattccctaacccttagtagcgccccagccccgtcccatcctccgccgctgccaccggtgtccgcggcgacagccgcgagggcgcgcgaggaggacgggctctcttccggcgccaatgatgacgagacaatatggaggctgcgcaaggagaacaggttgctcaagaaggaggacggcaaaggagtatgcaaacagagctaattttttcgatgaatggtacagtggtaatctctttagctgtacggctctaggtacagtcctgccatgttcttgattgattcaatctctaggtgtactgtactatggcagtgctatctaattgaattgctgtagtactagtagtaaatttgagctagggatcaggttagttctactcttagccttcggcctagtatcttccaagtgaacaaaagagcctggaatgtgaataagatcaaccaatttgaataaaataccaacttgttttggttttactgactgcttgtatttttaatactacaatgagtaggtttggcatccattatttttctgaactctttgaggcagaaattttgattctgaatatgatgcagttgttttggctcacagctaactgtattttgttccca

SEQ ID NO: 44088 - DNA, 371 bp, Setaria italica
  Peptide Sequence Number=SeqID_110062
aaagaataaggaataggaactggttcatctgtggcagagaagcaacgacataggcacatggaggaccacggcagatacggggagcagaaagctcctcgagggggaggaagattcgggcgaggacctaggggtagcaggccggatgacttccaaaactgtgacactcggtgcaatcagggcatgtgggatgagggtagacgcagcttcaaaggaggaaggcaccaaaactttcagtggcgacataggggagctggcagattccagagttaggataacgagagaggatcccagttcggcttgagatggaacctgaattacagagaaaaagagatggaccaataaagaacagagtgaaaaataggggtaaagaa

SEQ ID NO: 44089 - DNA, 502 bp, Setaria italica
  Peptide Sequence Number=SeqID_110063
cgtctccaagggcctccctgtggaaggaccgcgtccggatcctcgccgagcagcggtcggcgctggcgtacctccactcccggcgtccccacgccatcatccacgccgacctgaagctgaccaacatcctcctggacgccggcaacgcgagccggctgggggacttcgggacggcgcgggcggtgcacgtgaagccgctggaggaggagaccatcggccggcgcacgaacccgatgggcacgacggggtacatggaccccgtcttcttcatgaccggcgagctcaccacggagtcggacgtgtacgcgttcggagtggtgatcctgcagctgctcacgggcctcctggacctcaacgtcgcggagcaggcgcgcgaggcggtgaagatggacgccgtgcacagcgtgctggacgcgtccgcgggggcatggccggaggtgcaggccgagcggctgctcaagctggcgctcaggtgctgcagcctggagaggaagcggccggg

SEQ ID NO: 44090 - DNA, 460 bp, Setaria italica
  Peptide Sequence Number=SeqID_110064
tcctaaagttaacccttacctttaccaagtaacctcttggaagaatgaccatggagatgagttactttttgtcagcagcaaggccattttcaagcctccaaaagcaatccgtggtggaatacctatttgctttccccaatttggaacacaaggaaatcttgagaaacatggatttgacaaggaaccgtttctgggctattgatgataatcctccaccttttccagtaaacactgctataaaaactttcgctgatctcattctgaaagccttctgaagaagatctcaaggtttggcctcacagctttgaatttcgattaagagttgctcttgcacctggaggagatttgattctcacttctcgaataagaaacaccaacattgatggaagaactttctcatttacatttgcatatcatacatacttgtctgtatcagacataagtgaaatacgcgttagaa

SEQ ID NO: 44091 - DNA, 306 bp, Setaria italica
  Peptide Sequence Number=SeqID_110065
cgtaatacatttcagagcatggtccgcagggtccagttgcgccactagtccaaaagttatcttccgcacccatcctctttatacgctcttttggtacaccaacctcattgtgccagatgttgaatgcttcattatcatcttcgaaaacactaatccacagcctttctgcaggcaacccatactccttggttgccagctcccatgcccatgcggttgcttccttcttgaagtaatcgccaaagctgaagttcccaagcatctcaaagaaggtctggtgtcgagctgtgcgtcccacattttcaatgt

SEQ ID NO: 44092 - DNA, 838 bp, Setaria italica
  Peptide Sequence Number=SeqID_110066
aaattagtagagatacatcgtggaacccaacaagtcgccggaaatgtaccatcaggacttcaaattgctcacttcacttagctctttttctgagcaagcctggacttgatcttctccacctccttgctaccgacctggaacgccttggtgaggacatagttaggcacctccggcgtcgccgcgaacagtgtcatggggagggactgcgtgccgggtagctggctgttgaaggccgatataacggcggcgggcacgtcctcgttgttcttctggaagtgtaccaggccgcgggggaagacgaagacgtcgccggcagtgatagtcttcgcaatcagcttgttcccggtggttatgaagcccacatccagggtgccctgcaggacgaagacaatctcggtggcgcgagggtgggtgtgcggcgggttcaggccaccgggggcgtaatctatgcgtgacagcgacacgccgagggtgttgaggcccggcaccttctcgacgttggcgccggtgacgacggagccgtaggtgttgttggtgttaccggggttggcgaggcctttgaagtagaagtcgtcctctgtcacggtggccttgcagggaaatccgttcaccttcatggtggacgtgatatccgcgacgcagatgtcctggagcaactcggggtcgccggcaagggacggggagggaaggaggagcacggcgacgacgatggcaaaggaaagcaacggagatggaatggccattgtgaacttgttcctctgctcgtgcttgtattatggccaggggccaccctttctttactcccttgtgctcactccttttactgtcgctggttgct

SEQ ID NO: 44093 - DNA, 290 bp, Setaria italica
  Peptide Sequence Number=SeqID_110067
tgacccggaccacggcacgcagcttctccgaccggcccacgaacacctccggcagcgccgccaccagcgccctgtactcggcgccgccccgcgccatctcgaactcgccgcggaagcccggctcgatcaccacccgcaccgccttaccgctcctcgtcggcaccaccacgtccacgtagctgtgctcccctgatgggatctccggggtgcgcggccacttggacctgcagatggcgctgttgtacccggcgtcgcgcagccgctcggccacgaaccgcagcgcgcaggcc

SEQ ID NO: 44094 - DNA, 993 bp, Setaria italica
  Peptide Sequence Number=SeqID_110068
tttttttttttgttactcgaaatgtttcgtttccagaaagaaggtttatgcatgccccggaaatgaactgagaaacctaaatccacattgtatcatggaaaaactgtagctcgctcaatcgttccggaacaatgatcagcctggcacatgcgagagcctgagaccgtacaacatggagttttcagttggttgtcccataaccgcgacgctacgtcgctactcctcctgtatactactcctagcatgattctacagtacgtctgcatcacgccatcatttgtttcagataacggcaaaactaacacacgcacacagtagatacagcagtctcgttttcccatcatggatccatcgtcgtcgtcagcttcagggacagtgatcatcagttcatatcacacgacctccaccacggtccggccaccgaggtcgagcgtgagcatggacgccctgaacctgggcggcttctcgggcgagccgacggccaccggcactcctccgccgccccccggcgcgacccgctccggcgtgccgagccacttggcctccatgtaccggtgcttcctccagggggccatgtgcatgccgctctcgcgcgcgcaccgcctggccgcgtcgcacatgacccggaccacggcacgcagcttctccgaccggcccacgaacacctccggcagcgccgccaccagcgccctgtactcggcgccgccccgcgccatctcgaactcgccgcggaagcccggctcgatcaccacccgcaccgccttaccgctcctcgtcggcaccaccacgtccacgtagctgtgctcccctgcgcagccagacagatcggcgtcagaggttacggaaaaaaaatatgggccttggtgaatgagccgtggttggtggtgaccgatcactgatgtgaccatgtgcatcatgtgagttttgcaaggtcatgatgccgttcgacgttgcagacaacaattttcttgttatgaccagaacaaaaaggaa

SEQ ID NO: 44095 - DNA, 430 bp, Setaria italica
  Peptide Sequence Number=SeqID_110069
gatccgtgttaccatctgaacgaagctctcgtacttgtccaaaaattccttctgcaaatgttgagcggattatgtaaaatcagcttcaggggcatcgatcttcatttcaaaacgatgacacgtggtgtgccaatactgaacaaaaacatccatactaatacgattggttaggcggcttaccttgcgcttgtcccacagcgaaggcaacctctcatcggaggtcagtgtcttctgcaacctcctgtacatggcaccaattgacctgtcaatcccagataaactggattttagcaccctccttaggtcagttttcgataaccccagctgaaacaggagcttgtggcttcggaagcagcaaatgtgtaccaattactggaaagtgagcctttaatagaggaggtattgcagggtctggatgctgctagtgcca

SEQ ID NO: 44096 - DNA, 1211 bp, Setaria italica
  Peptide Sequence Number=SeqID_110070
gcgtcgccaaggccgcggcatcttcgagaagctcggcaggctcgccaagccccgcgtcctcgcgctcaccgttaaacaatcatcaagaggcgaggcaaacaaagcttttctccgagtattaaagtattcatctggggcagtgcttgagccagccaaactttacaagctgaaacatctaacaaaggttgaggttatttccaatgatcccagtggttgtacatttgttctgggatttgataatcttagaagtcagagtgttgctccgccacaatggacgatgcgtaacattgatgacagaaatcgtctgcttttttgtattctgaacatgtgcaaggagatacttagttatcttccgaaagttgttgggattgatattgtggagctagctctttgggcaaaggaaaacacattgaccatagataatcaagtgagcactcaagatggacatgaaacatcagttgctactcaaaccgagaggaaagtaacagtaacagttgaaaatgatctcgtgtcccaagcaaaggaggaggaagaagacatggaggcacttcttgatacgtatgttatgggcataggtgaagcagatgcattctctgagagattgaaacaggagcttgtggctttggaagcagcaaatgtgtaccaattactggaaagtgagcctttaatagaggaggtattgcagggtctggatgctgctagtgccactgtagatgatatggatgagtggttacggattttcaacctgaagctcaggcatatgagagaagatattgcatcgattgaatcacgtaacaacggcttggagatgcagtctgtaaataacaaatcacttatggaagagctagataaattgcttgaacgtctgcggattccacaggagtttgcagcatcattaactggaggatcatttgaagagtcaaggatgctgaaaaatgttgaggcatgcgaatggttgacgggggccatccgcagccttgaagttccaaatttggacccatgctatgttaacatgcgcgctgttagagagaaaaaggccgaattggagaaactgaaaacaacttttgttcgacgagcatcagagtttttgcggaactatttctccagcttggtagacttcatgataagtgacaaaagctacttttcacagcgaggacaattgaagcggcctgatcatgctgaccttaggtacaaatgcaggacatatgccc

SEQ ID NO: 44097 - DNA, 306 bp, Setaria italica
  Peptide Sequence Number=SeqID_110071
aagtaaatagacgtgcgtgggtgcttgacaaagctcaaggctgagcgtgagaggggtatcaccattgatattgccctgtggaagttcgagaccaccaagtactactgcaccgtcattgacgcccctggacaccgtgacttcatcaagaacatgattaccggtacctcccaggcagactgtgctgtccttatcattgactccaccactggtggttttgaggctggtatctccaaggatggccagacccgtgagcatgctctccttgctttcactcttggagtgaagcagatgatctgctgctgcaat

SEQ ID NO: 44098 - DNA, 1122 bp, Setaria italica
  Peptide Sequence Number=SeqID_110072
tcaccaatacagaaaatagcaaaacaagagaaaatggaaagggcaatttgttcatcaagggaaggaaaatatgctacctgagaaagagattcatgtaactttagaaaaagcaaggcatagcatctgcatttctgatctgtctcaggcaagcaatatatatactgaaaaataccctgatgatgatatcagaactgaggatcagcaaaaatctgattctgttgttcaacatgataagaaaaatttggaaggtcatatggggtgggcatatcagacactagcaacatcgttttcagagacaaaagaagttctatcgattcagaatcaggatatcatagcattggaggagggaagaagcccatcagtggagattgacattgctcaagttgacactcgagcaacacaatcatcagcgagtattgcaagtggagggagttgtgaatgctcaagtccaagtgcttcatcgccacgtagttctggtgaagagacttcttattctggaattattttaaaggttcaaccttggtattcaagaactcagagcacaactgaagatgctgaagatggaaggccaagatgacatctgtggagactattctgatacgctgtcaactggtgagtgcaacaatataaacatcgcaacgtaccaagcaactgaagagctacctatattcaagaatgaggaggacagggatttatgttatgtccaggacatgcttgcaagtgtgtgtgacttaccagattacctggaaggttggcaggtggactcagatgtgtttctattgcttgaaaacaagtattgcaagctgctcctgtggtcacaatcagacaggaaacttctgtttgatcttgtgaactctatcttggctgacatgactactcctgacaacagtttgcattcaaagattatgatgaaatgctggcctgaaattaatcgcgaacagttagctgaaagtgtctggcaattggtgcagaagcaaagtaactatgagcagtttgcactggaggatgttcagcctttgccactggaccatcgttctgagctagaagtgattggaatgaagattgccaggatgatccatgatgatcttataaaaggttctatcatcgaattcttgtcacagg

SEQ ID NO: 44099 - DNA, 582 bp, Setaria italica
  Peptide Sequence Number=SeqID_110073
gggagcgtacacaatcaggcactggtgcaggtatccactgtctaacttactatctgcagttcagagtggattttcccagcattcatttgcattaggattttaggacttattgatggttgtttctttacactctatggataaaccaaaagatcactttgagcatgcttttccaatgccattttaaatatcgggagtgaaaaattccacatgagaataacaatcttaagtgacaaatacgaaagtaactaaatgtcttctgggaccaagtgactagtaggaagaagcctgtggttttcatgattttttgaggtaatcttactccactgggatgggatcccagtctttgccagaatacagttttatgtcattctcacaattacttgcttagacagttggctgcctttctatgtggatttacatatgcccttgcttatatttgacaatttgtggaacttgaatgctagggcaatgtcaacctcaacaccttgatgaacatgttcagcgggcttggtgctggtggtggcctaggtgttccaaatgcccctaatgtggctccagaagaactgtatgcaacacagctag

SEQ ID NO: 44100 - DNA, 817 bp, Setaria italica
  Peptide Sequence Number=SeqID_110074
aataggttttttagtaagacaaactaatcctttctgaatgcaacaacaatgggtggtgagggtgatcgaaatccaaacccatttgctgctcttctaggaaatcaggggtccaaccaagcaagggacccagctgcaaacgcaccaactacagcttcagacccggcagcagggtctccagctccaaacattaatccacttccgaatccctggggcacaaatgcaaggccccctcctgctagcaacacaaacacaaggagtgctacagcaggtggtctaggaggattgggctcagcagatttaggaagtgtgcttggtggtggctctgatgcttccttcttgagtcaggttttgcaaaacccaactatgatgcagatgatgcagaacattatgtctaatccccagtccatgaaccagttgctcaatatcaacccaaatgtacgtaacatgatggaatcaaatacccagctgagagaaatgtttcagaatccagaatttcttcgccagttgacgtctcctgaaacattgcaggtgatcaatcatacttctctaattacatgtgcatcatgcaattatgtgtaatactgaatggttttttgtagcaactaatttcattccagcaatccttggtttcacaacttggccaacaacaagctggacagtgagcatctcaacttttgatctccaactttttttttataagatactatatgcttgttgagcctaaaattataagtttgggattttttttcatttgttctgatatcgccatgtattgctttatgcaccaactggctttgattatttttgttgtttgttt

SEQ ID NO: 44101 - DNA, 1759 bp, Setaria italica
  misc_feature (1714)..(1759): n is a, c, g, or t
  Peptide Sequence Number=SeqID_110075
tgaatactaacaagggccggatcttgaaggacgaggaaaccctagccagctacggtgtggagactgatcatactattcacatggtacgtggtgctgctccaccaccagcatcaactgcacctgcagccaaccaagaaacttcctctactgctcctgccagttccccagcagcaggtttgagtggcttgttgcaaggtctgggtggtacaggggctgctaatagtggagggttgggtttgtttggatctggcctcccagaattagaccagatgcaacaacagctagctgaaaaccccaacttgatgagggaaatgatgaatatgccactcatgcagaatctaatgaataatcctgatctcatgcgcaatataataatgaacaatcctcaaatgcgtgaactcattgatcgcaatccagatcttgcccatgtcctcaatgatccaagtatcctgcgccagactgttgaagcagctaggaatcctgaacttatgagggagatgatgcggaacacagatagagccatgagcaacattgaatcttcaccagaaggtttcaacatgctccgccgcatgtatgaaactgtccaagagccttttctgaatgcaacaacaatgggtggtgagggtgatcgaaatccaaacccatttgctgctcttctaggaaatcaggggtccaaccaagcaagggacccagctgcaaacgcaccaactacagcttcagacccggcagcagggtctccagctccaaacattaatccacttccgaatccctggggcacaaatgctggatctgcccaaggagcagcaaggccccctcctgctagcaacacaaacacaaggagtgctacagcaggtggtctaggaggattgggctcagcagatttaggaagtgtgcttggtggtggctctgatgcttccttcttgagtcaggttttgcaaaacccaactatgatgcagatgatgcagaacattatgtctaatccccagtccatgaaccagttgctcaatatcaacccaaatgtacgtaacatgatggaatcaaatacccagctgagagaaatgtttcagaatccagaatttcttcgccagttgacgtctcctgaaacattgcagcaactaatttcattccagcaatccttggtttcacaacttggccaacaacaagctggacaggagcgtacacaatcaggcactggtgcaggcaatgtcaacctcaacaccttgatgaacatgttcagcgggcttggtgctggtggtggcctaggtgttccaaatgcccctaatgtggctccagaagaactgtatgcaacacagctagctcagctccaagaaatgggtttcttcgacacacaggagaacctccgggccttgatcgctaccgctggaaatgtccatgccgcagtggagcgacttcttgggaatttgggccaatagaatatgatcataactgtagttggcattgtgagatcctgtctggttcattggttttacacccggtgagatttgagaggcggcatctagattctgtgttctaagatgaataaggagtgtaacagcagaaccttgcatatacatgggctctggtgtcagtgatggttaaaattggtgttgtcgatgccttgggttgctgtacatacatactattgaatgagcgggtcttactgcaatgtacatggccgatgtcttctaaaaaccctaaaaaaaaaaaaaaaaannnnnnnnnnnnnnnnnnnnnnnnnnnnnnnnnnnnnnnnnnnnnn

SEQ ID NO: 44102 - DNA, 1622 bp, Setaria italica
  Peptide Sequence Number=SeqID_110076
aaatacgaattttaccgaagtgttgacggatcattttggcaaaagctaggtagaaactcctgagaagaacagcaagatttcccattctcacaactgattttggcaaaagctctcaaacttctatgtgtgcataagtcatcaactcgctcaaaagtaccatggcccctggccattttatcatagaaacagggaaccccaatctcaccatgtgcaacctgatgggatttattacccatgtgagtgcagcacatgcaatttgcaggacatgaaactcttgcacaatttgagattccagcattaggttgattaggcagcaaatgtgatgggcaatccccatgaatcaaatgttcctgactattaccatgggatgcatcttgaggattatatccactgtaagatgctgaaagagaaatgccttctgatctccttttcatatgaataatggttggggccaactttggatgattatcattaacccttgtctcaatatgtctactggcattttttggatgatcagaaccacatgcgacatccagggccttaggatgataatgctcgttactgttgagaatatcgtcaatgggttcaggtgtactatttctctcaaaggtgtgaaagaaataatgagataaatgaattcttggatgtatcatccgtaagctcaccaacttcagaatgttttgttccattagtaactagaagtggttgcttatttccagtactaatggatggtccattatgttcaggttcagctagattgttgttgacctttgttgcttgctttgggcaaggattctgatttatcaatggcctgtgtgattgaggtttctgaaattcaatgaccgccgactgtaccaatggaaatagagtggtcatagattgatgataagaagattgtccaagatttaattcagtgtttgaagtgttgcacacagtgtcctgcaatattgtgggggggaaatcaggtctgcacgccctactatcatggttcacaactcttgaggaacgtggctcaggattacgaaaagaggcatcaaggtttttctccaaacagattccataattatgtgccaagtgatttcctttgtaatgtcttcccatgcttgcttcagagtgtaggcttccactaggtgtgctaagagggttcaggtttaatgcatgaaccgtatggtttctagcgagccctacattcattgttgtggaattctgtagtaaagcagagtcctttgttaaaccttcgtgcacatcaacgctctttttgtaatttgttccaactgacccattcatttgcttatcaacattagtgcatcctccaccttcgatgtacagatcgctggaataagctgggttgtttataagtccattgatttttccatatccacctaacaaccttacttttcctgtaccactgtttcttgaagcaagacttttcaacatgtattcttctggagaacttttcatacatgcccagtctggccaatcccacctggtattagcaatagatcccgccactcctatgcagaatttgaaccattgcgcaatagtcatgccattctccacgtggacaatttcaccagctttttctggagttccacccgcatgctcgcagaatttagctacag

SEQ ID NO: 44103 - DNA, 266 bp, Setaria italica
  Peptide Sequence Number=SeqID_110077
aggggacggcgggatgatctcgtcggcgaggtcccggagctggaggaggaggtccttgccgccctgcttgcgccaccgctgctcgaagttgtagagcacgtcccaggccacggggccctcgaggcggcagtggatgtcgtgccagggctccctcggcccgcccttggcgatggcggcggtcgcgaagttgggctggtggaagtcatcgtggtgcgccgcgcccagcgtcccgaacagcgggtggcacggcgtgtcgtagcgcccgt

SEQ ID NO: 44104 - DNA, 423 bp, Setaria italica
  Peptide Sequence Number=SeqID_110078
gctacttgaaaacggccttacatatcgcttgacaagtataccgtggaggaccctgacatcagcgagccgattccagaggagaagctcacctgcgacctcagcggcctcatgtcatcactaaaagcctgatctgctgtgcccctttttgatgttgaagccctccagctgcagagttgtagtctgaaactctgatctccatgaatcgtgaccaggagcttcaaatcaagaaacagagcacgcggaatttgggacttggcttgcccttgtgaccaggagcttcaagtgaagaaatcagagcaagcggaatttggggcttctcttgcagtgcaattgtgttggctggagttgtgctatgaacatggataaacttgtaggattgcgttcgttgttgaatggaaccaaccttgtcctgttttctgaaaa

SEQ ID NO: 44105 - DNA, 460 bp, Setaria italica
  misc_feature (431)..(460): n is a, c, g, or t
  Peptide Sequence Number=SeqID_110079
tgggtctgcgctgtctgccatggcctattttgcctttggtggttaatctggctcacttcagcccgtagtggagccgggcatgggaggagttaggcagtactccagagtccaggcacctgtgtgggtgggtggttcctcactttcacggtaatggtgggtcaaaccgtcaaaggttaaggtttactggaagttaccacttgcatccttgcatggttgggccgaaacggaacgggaacgtaggtggtggaattttaggcttttgtaaatgcggactccagagcgtggtggaagactggaagagtggaagtagaacctttgtcgttggctgtggcgtgacctgtgtcgtctacagatacttggtgtataaaatgtgagctactgacttcaaatctcagttcgcacatggcacgaggcatggtagtaaaaagttnnnnnnnnnnnnnnnnnnnnnnnnnnnnnn

SEQ ID NO: 44106 - DNA, 474 bp, Setaria italica
  Peptide Sequence Number=SeqID_110080
aatgttgattcctaaccataatgtttttgggaaaggatagcattggctaaaatgtttcgaagaggatacttacagacttcaagagcagtggagagagtaaaattagcaaactcatgagtcacaagatctctgaagtgagcatgtaaatcaattcatttacaatgactgatcgctctccttcattaaatacctttaaacaccactcaacaacattgctgccatattattttttgcaagtgtcacatagtgatttcttaagcaagatgcaataactgcaatgtgaaaggagtctcccttttttagaatatcctgaagaatccagttcccacaagaatttaaagctagatgaaggctctggtaagagagtttgatcaaaatgttatccatttccatccagctgacgcgttctaagcaattttgcagtaggctcagtccatttgattggcgtgcaagtcttgtacactccttagcaac

SEQ ID NO: 44107 - DNA, 519 bp, Setaria italica
  Peptide Sequence Number=SeqID_110081
ggtttctgtttcttattcgggatcttgcttttcatggttctcatctctgcaactcgcgattttcgcgagagaaccaaatccaagttggtgaagatcatgatttgggctggcatagtagttattacctttgcaattgcggttcgaatctatccgatctttatctttttgctcaaagaacgaataaaaccccttgttgaagccctttatgataagcttccctggatctgggaagtttctctttcacggtattgggatcgtttgatcgatttccttgatcgctacttatgggcgtgcgctcaaaggatacaaacagggattcgcaaacaaaaaggggaattcgtagtcactttttcctgtcgcgttaaaaaaaaggctttacggtcgtagtagagtaattgggatggttttggttcttctgagcaacctcttttggattcttaagaccacccttgcagtaggataccgtctgctttaggttctttattatctccttcgagggttttaggtatcgttcaggct

SEQ ID NO: 44108 - DNA, 224 bp, Setaria italica
  Peptide Sequence Number=SeqID_110082
gaacaatttgcgcgtgctttctgcagatcttgtcagtcctagctcaattcaacatcttacaatcacaaccatggcctcagtcggccaagcactcaccgatagccggaacgcctcagaaagggcacacttcgtgctcattccactgatggcacagggccacaccattcctatgactgacatggcacgcctgctagccgagcatggtgcacaggttagcttcatca

SEQ ID NO: 44109 - DNA, 472 bp, Setaria italica
  misc_feature (472)..(472): n is a, c, g, or t
  Peptide Sequence Number=SeqID_110083
gatgcaaagatcagtgagaataatcaagaaagtgaggttcaggttgaaggtgagagttctgtcgccatggtgaccaacacagaattgtcagatccagcaaccaacatggcggaaagcaggaatgaccttgacgcgaaatccaatttctgacagctcgatcgtagacttctggtgccggctcaggtggccaaaatggccagcaaacctagatatcagtgcaggatggtgtaggaaaaccgtgcttctcacctgttaggcattcattgtcttgtaggttgtagttcgaacaggaataggatattgtggactaagatggggtatactatcagatgtatcatgtatggtcgtttggacgcatgggtcgttctttagcctcgtgtctagattgtgagaactgagtagtagtagtagaaacattatgcggttcatactccatgtaacaaatgatacaggtctggaagtgaatcaaatn

SEQ ID NO: 44110 - DNA, 622 bp, Setaria italica
  Peptide Sequence Number=SeqID_110084
cgggcgcaggattgacaccatcttgtcatagtagacccatttcacggggccaaagggggaggggaggtcgcggcgcgcggcgaggcgcgccttgtccatctaccttacttagaaattgcttcctgagcgtgtcgacgcggttgcggcagtgcgtctcggagtagtaccccgcgggctgacccgcggcggcggacgtgaggcgggcgacctcgagccactcatcggcgcgaatgccgctgcgccccgcccccggtggacgaagcggtcgccccaggcgtcgaggagcgcgaaggtggagcgctccgtccacttgggcgcggcgcgcggggccaggacctcgacctcgtacggcgccagtcgcggggcgaactcgaagccgagcgcgtactggtcggtgcggcggcgcttggcgcgcggggaggagggcgacggggagccgcctgatgaggaagcgggggatggggagggggacgcggcggcggccgcgtcgtcgaccatggccgcggctagggcctcgagctcgtgggccgcgtcgtcgcccatggccgcggctagggtttcgagttcgtggttggtggagtggatcggcgaggtgggttggccgggaccggtaagaatccgg

SEQ ID NO: 44111 - DNA, 388 bp, Setaria italica
  misc_feature (5)..(5): n is a, c, g, or t
  Peptide Sequence Number=SeqID_110085
ctccnttaaaaaaatactcaatcaatctcttccctctgatttctttcaagcaataaaagaaaataaccatctcctccttccatttcagctcctgcgagcgagctcccgattcgatcggccgcgtctcccaatctccttcgattcgatcggcggagggcggggagagatgaggaagcgtgagcgggagaacccgtgcgggatctgtggccactaccacaagtacgaggagggggaggtgtgcggcgtctgcggccaccgcccgcccgtggcgccggcggcgggggcgaggcagcaggactcggcgttcccgtccgagatcctcaaggagttcctcttcctcggcagctacgacaacgcctcccgctccgagctcctcaagaccattggc

SEQ ID NO: 44112 - DNA, 1221 bp, Setaria italica
  misc_feature (1178)..(1178): n is a, c, g, or t
  Peptide Sequence Number=SeqID_110086
tcgtattcggtccgtcgttcttccctaattcttcctttcgtatttcgtattcggtcggtagggcggggagagatgaggaagcgtgagcgggagaacccgtgcgggatctgtggccactaccacaagtacgaggagggggaggtgtgcggcgtctgcggccaccgcccgcccgtggcgccggcggcgggggcgaggcagcaggactcggcgttcccgtccgagatcctcaaggagttcctcttcctcggcagctacgacaacgcctcccgctccgagctcctcaagaccattggcgtctcgcacatcctcaatactgtaccgttatgtcaaaacctttaccggaattcattcacttatcactgcctccaagaggacaaaactctgcagtttgatgatgcaatccactttctagaacaatgtgagagggagaaagcacgcgtccttgtgcattgcatgtcagggaaaagtaggtcggccgcatttgtaatagccttcttgatgaaatcaagagggtggagactggcacaatcttttcagtgggtgaaagagcggagaccacaagtgcaactgtctgatggggcacagcagcagttgattgagtatgagacgaagctttttggttccaatgtcagcatgcctgctccatcttttgttccagcagattctttcccttctcttggatttggttttcctaaaccagcaggcgacatccaagtgcctacctttaaccagcaggctccagcatccatctttgagcgcgtcagcccaaacaactttcctactaatttcacatttggagctgaaagagctggcgaagtgaaacttccagatagcaataatttcggtgtgataaactcatctggaggcgatagcatgatggacagcacctagaattgtttagctcgtgccagtggcattgatacatgaaaggaatgagtcagactgcaaatttagccgggtttctcggatgtttttgatttctgagaaggaaatgcatttttgtaaaatgatgttatgatatttgccagcgctctgacaattgctactgtgcgttttaacaaacatgtgtgtgcttttttgtggaacttttcaagtgtaattcaggctaaccaattactctggaaagtttgaatagaaagttacacatgtgcttagttaaaaaaaaaaccaaaaaaacngaagactacgaaccgaaggacaaccaacgggaagggggtaagt

SEQ ID NO: 44113 - DNA, 369 bp, Setaria italica
  Peptide Sequence Number=SeqID_110087
tttttaaaggaaccaataaattcttcatttgatgagaaccatgccaaagataaccgatagattttttttgagtccaaccactcccctaggctaaactaatctaatcgcaataaaaaatcttattcgggcaggcaggcaggcaatgcgagaagacgccgcagcatacacacacgcacacgcacacacacatacacaacctagaatctttgatcgatcggatcgagctgcatctacgtgcatttcatgttgcggcgccgacggcggcggccttgagggattcgacctggctcttgccgcgcggccccttgcggcggatgtagaggcggtactcgtcgaaggtcatgttctgtagagcgaggggcggtccgg

SEQ ID NO: 44114 - DNA, 623 bp, Setaria italica
  Peptide Sequence Number=SeqID_110088
ggcgggggcagctgtcgtggcggtattggaggccaagttcgggcagggttgctgaggaggaggggatgctggggcagttcaacctcagtacgacacagctgcaggcgttggtgtccctcctctcgtcgacagagagagaatgtatgggaaaatctggattgatccatggtggaaatcaagtaaatggcatgtcttgtatcccagatagtctttgtattcgagataagatatatgatggaaagcagaattggttgaaagatgcaattcttcaacaattctgcacagttcaagataaatatggtgtcaatagtcatgcacctgcggtattggaagctaagttcttgcaaaatgtcatacaagaagacattagttctactacacaaggcaatccgcatgaatgtgagttatgtgctggaatgaatggcgtgaatgtggtccagaatattgtgtcaagttccaatcacacagtgatgctctttctatctgctttatttgggagcattgtggtttcaatagttaaaactatacacaaaagaaggattcaatcaaataagctgtgtgagtctgacaaagttctccagataccaagtgctaaaataagtcgaaagtggtcaaaaagagcc

SEQ ID NO: 44115 - DNA, 221 bp, Setaria italica
  Peptide Sequence Number=SeqID_110089
tgcaccacatcatctcggacagaatcagcctggggataccaataataatcatcatccatccacagatgacagttttacctgcaatgcttcatggcacagaaatggcgggatgagccgcaatccatctgcatcttctgttgacaaccactcggtcaagtctggggatgattctgatggggctgagagtaccaaaggcagtgatacggagatttcacgcctga

SEQ ID NO: 44116 - DNA, 488 bp, Setaria italica
  Peptide Sequence Number=SeqID_110090
agttgagcgcctcctccatctccaggcagcaccgctccagcgtctccccgtccaccgcgtcctccccctgctccgccgcggtggccagcagctcccagtacacgacgtagtggcccgggatgctccgggtgcacgcgtggctcgtgtactccaccaccgccgcgccgcgccgctcccggagcagcgccgacgcgcggtccacggcgcgctgcagctccgcctcgtcggtcttgtcggactcgatggacagcagcacgttcttgcggcgcacgaaccggaactgcggcgccgcgttgtggaacccggtgacgagcaggatgtctccgacgcggtagcggcagagccccgcgtaggtggtgatcaccagctcgtactccttgcccacctcggcgtccgccaggtccaccagccgcggcggcgggtcgtccttggacagcggcctcgcgtccgggtcgtgcggcagcagctcgaagtagcccatgttggca

SEQ ID NO: 44117 - DNA, 1632 bp, Setaria italica
  Peptide Sequence Number=SeqID_110091
cggacattctacctctgctatcgagcaatgcccagaatatgcaggagattccaatctaattaagcgaagccggacagtccaactcctcgtcgcgccgccggccggccggtctagtcgtcgttgcgctggccggggtccagtgcggcagcgcggggctgaagtgggtggacaccacgcgggagtccagcagctcgatgatgggcgggaacgtcacgcaccggggcaccttgtactggttgatggacgcaccccgggagatggcgtagtccatgagctcctcgaaggtgcccggccggaccacccggatctccagcggcccgatcgagccgtccgccacgcggctctgccggtacaccgagttcagcgcctcctccatctccaggcagcaccggtccagcgtctccctgtccaccgccgcgccggcgtcggggctcttagccagcagctcccagtagatgacgtagtggccggggatgctcttggtgtacgcctggctggtgtactccaccacggtggctccgtgcgggcggagcagcgcggacgcgcgctcaacggcgcgctgcagctccgcctcgtccgtcttgtcggactcgatggacaggagcacgttcttgcggcgcacgaaccggaactgcggcgccgagttgtggaacccggtcacctggagcacgtcgccgacgcggtaccggttcagcccggcgtacgtcgtgatcaccagctcgtactcgcgcccgagctccacgcgggcgaggtccaccagctggctcacgtcgccgcccgacgccgcggcgtccatggggaggaactcgaagtagcacatgttgggcatcagggtgtaggacacctccgacgggtcgcacatggggcggaggttcaggccgaagtagcactccgacgacgcatacatggtgcaggccatcgggaggccgccgctgtagtacttgagcgtcgggatgtactgcgccatcgcgccggtgacgatgacgtcgaggtacttggtgttgggccaaatgcgcgtgatgatgcccgcccagtcgccgctggagcactcggcgcggatcaccgcagcgagctcggggtccgggcggaggatgccggcgacggcctcgcgcaccgaggggtcggtgacgcgaggggtgagcgcaccggcctcgatgtccgcggcgagctgttcccagttgagctggaggaagcggatggcgcggaggaggccggatgcgaacacggcgcccacgcgcagcacgtcgtggcgctggcacagcccgcacaccatctgcgcgtacatgctctggaacgcgtcggcgcagaggatggccgccgtcgggcttgtgtagttgttgtaggcgtcgaacggccggttcttgaagtggttgctcttgtagtagctggtcaggaccggccgcgccgcgaggccgcccggcgtctttgtctccgatttcacgaagaggaaatggagagccttccccttgtccatgccaggcacatacaggttcatgacgggcatctggaggctgtagagcagctggcggcggttgagctcgtcctcgatggtgggcatgagcttgcgctcgccggcggacgtcccggagctggtgaggaactcggagacggggtgcccggacaggatgggcg

SEQ ID NO: 44118 - DNA, 368 bp, Setaria italica
  Peptide Sequence Number=SeqID_110092
ttgttgggagtagggtaacgtaaatttgtcgtagtaggttggtcgccggcgatggtgaaactgatggagtttttcttgcgtggaccagcagaggcaggggaggacgagcggctgctcaaggatcttcccggttcttcagataaggaagcccatacctctgcaggagaggatcaagagaacactaagagagactccgaaggaacaaccacggaggaatgtggtagcggtgggtccgtaatcaaagccaccgtatcgagtgaagatcagaatgataggcatggcaatgacagcaacatccagtgtgctgaatctgatggtgcttgtaaaccaatgccagaaatggactccaagagcatcaacggtgagtg

SEQ ID NO: 44119 - DNA, 406 bp, Setaria italica
  Peptide Sequence Number=SeqID_110093
ccttgaggacgtcgagcagctcgcgcattgcctctgccttgccgctccggcggttcttgatcagaacctcgctcacgtccgccggcgtgatctccgcggcgtcgacccactcctcgagcccgcgcagggccgccgcggcgccggcgtcctcgtcgccgaggcggtccaggtcctcgtcgctctcgaagccgaggtagttcctgagcaggatcctgagcgccgggaacgaacagtaggacatgaagatgtgcatgtccatgcggcccgaccggagcagcgccgggtccagcttctcgacgtggttggtggtgaacacgaagatgcgctccgcgccgcagcaggaccacagcccggcggtgaagttgagcaggccggagagcgtgatcgaccgccccgccccggcgcc

SEQ ID NO: 44120 - DNA, 495 bp, Setaria italica
  Peptide Sequence Number=SeqID_110094
aaggaagctgcatgtatagccatattctgcactgtaaggtataaatctcagaaaggtaccacccacttcctagagatactcacaagtaaagaaaaccaaagttatctgccaccaaaagaagacctttgtcagtgtttaagtccatcccatatatcatgcgccaagagcttggaccattccaaccattcgggttgagatttaacaaggaggagccaatgccagtatccaagtctgtgcaactgatagtaccatcagaggaagctgtatatagtattccatcgttggaggtatcaatcttcatactgttcagaatgcaggagtgcacagaatcatatgtaatcttctcgtgcaacttaacataatcccaaatacccagaagccctttcttatctcctgataaaagaacattgttcttagttggatgaaattccaagcaagtcacacgtctctgatgaaattttatgtttccacactctaactagtgcgacttgagtt

SEQ ID NO: 44121 - DNA, 1206 bp, Setaria italica
  Peptide Sequence Number=SeqID_110095
ccaccgctctcgtttcattcccctttctcgtctcctctaccgcgaccgaccaggacgaggggaacagaccgccgacgagccccgagcgcgcgcgcgaggcagagagggagggggcctttcggttcgttcgaagaggagcggaggcggaggggagcggaagcgggggtcggagatgaacgtgttccggctcgcgggggacatgacccacctcctcagcgtggtggtgctgctcctcaagatccacaccatcaagtcctgcgcaggcatatctctgaagacgcaggagctgtatgcacttgtttttgcagctcggtacctggacttgtttgttcattttgtatctctgtataacacagtcatgaagctggtcttcttggcaagctctttctcgatagtttggtacatgaggcggcataagattgtacggagaacatacgacaaggatcatgacacctttcgccattactttttagtgttgccttgtcttcttctggctctactcattaatgagaagtttacttttagagaggtgatgtgggcattctccatttatttggaagctgttgcaatatttccacaacttgtattgctacagcggacaaggaatattgacaacttgactggccaatacgtcttcttcttgggtgcataccgtgtgctttatatctttaactggatctaccgatacttcactgagccccattttgttcactggataagctgggttgcaggaattgtgcaaactctgctgtatgctgacttcttttactactacacaatgagctggaagaacaatgtgaagctagagctgccagcttaagcttgttattcccttccaagatggactagggtaatacatggtaatacaatggataggcagacctgatacacagcatgagcatcggtatccacccatggggtaatgacatgcattttggttctccagcccttgtatctttctactattagtgggaggagaggcaggtgggctcagcttgtaacttgtacaataagctgtgtaagatcagcaccaggaagctgggaattatgagtgcttttgggagtttcgtgctgctgtaacccttttggcaagtgattctgtcatacaatataatctcatactgtggaatgtggtgattgtgtggggtccttcatactcaccctgagtcggaactaaaagagaactagccaaggcacacaggggat

SEQ ID NO: 44122 - DNA, 459 bp, Setaria italica
  Peptide Sequence Number=SeqID_110096
ggaaagccaggcattaaactagtagagagccacttctctctcccagtcccagcatattgaggcgccgcgtggttcttcacttctccgattcccaattttccattgcggagggcaggtgcgtggatccctgcgccccaagacgacaggagggaggaagagaggacggcgggggtcggaggagggaaaagtgggccaactctagcgttccccttcttccctgcggcgcctgcgtctgggcagccctgttccattgcgccacttcgcggcttcctgcctggtctgggccttcttgcgtatcctggtctgagcatcattcacagtggaagaaacaatgtttaggagaaagcatgcccctgatgttaactcaaatgatgctgagcagagagaagcaaaagataaaatgaaattgaaaagctaaaacttgggcctttgtctgcccgtgctgagaagtactgcagt

SEQ ID NO: 44123 - DNA, 418 bp, Setaria italica
  misc_feature (377)..(377): n is a, c, g, or t
  Peptide Sequence Number=SeqID_110097
aatcttcaagagctcagaatgcaacttcggcttctcaagagggagactacggatggtggagatgacactgagctttttatattgagtgacaatgagacagcatgtcagcctcttcctgaaatggaggaatcccatgcttttagggatgaagaagagggggatttctcctacgtgcttgatatgcttactggtttggccattcatgctgccaaccaggatgagctgcttgaaaactgctacttactggagtgtcctgcaggcgctgatttatatgatgaacttgaaaacaagtacagcagcctcattttatggccaccagctgagaggaagctattgtttgacatcacaagtgctgttctcagggatataatcacctntctaatgcagagttgctcaaagggattggttgaaggatgtg

SEQ ID NO: 44124 - DNA, 568 bp, Setaria italica
  Peptide Sequence Number=SeqID_110098
ttaaattaagtagttagtaaaattggtatggataggaaccttatgcttactggaaagggaatccatcagtttcggcgacacggcaggaattggttaagtgtaatgtctctagtacaattaattggaacgcaaggatttatgctcaggactggttcaaagagagcaaggcagggtataaggactcagatttgggtagtcaatgttcacacaggtacaagatctatattgaaggatcagcgtggtcaatcagtcagaaatatatactagcttgtgattcaatggcactgctagttacaccaaaatactatgatttcttttcaaggtcactcatgccaattcagcattattggcctgttcgggatgacaataaatgtgcctccataaaatatgctgttgactggggcaattctcacaagcaactggcacagcgaataggaaagcaagcaagcaatttcattcaagaagagctcagtatggaccacgtttatgattacatgcttcaccttctaactgaatatgccaagcttttaaagttcaaaccaactaagccaacctgaaagctagttga

SEQ ID NO: 44125 - DNA, 534 bp, Setaria italica
  Peptide Sequence Number=SeqID_110099
ggtttgcagaaatcttgactgcccatggttatttctttactctattatatctataaccattgtgacacgccaccaaaaaattaaatagaatggacacatcaacaagtttgattctaaattgttaccacatataatcatttgttcgtcactccatgcagacaacacaagcttgccttgagcaggggggcgtccaggttctgctggggatggagcggcgccgggcaccaggggaacgtaggagcttggtgggacgaggtgccacggcgacgggtcgaggccacagagcccaggaggtccgagcctccgaggcgcggcgtcgccgggcggggacgagctggcgcaagcgcgggagggggagccgcggcactgtcgaggaggcggctcccgtcggaaggtaggaggcaggagcgagttcagatccgcgcggacggaaatgaagccggcgggatccccggccgccggcggccgctccgcgaaaccctagcggttggggctttcttctgcggtgcgggagaggagtcagttgggcagggg

SEQ ID NO: 44126 - DNA, 940 bp, Setaria italica
  Peptide Sequence Number=SeqID_110100
cgcggccgacggggagggctcccccgacgacgcggcgtgggtggaggagggggagttcgaggacgccgacgacctgcacctcaccagcggggaggccgtggcggcgtgggcggccaccgccgcggggcccgtcctccgcgaggtggagatcgccgattactggccgcaggcgtgctggaggaaagcggaggcgctccttctcatctcccactactgtcacagtctcatcaagttgggccttaaaaatgcatggctttctgttgatgggctcaagaaaatgccaaatctgactcatctgacgcttgagttcattagactagatgatgaagacctcgaccaattgaatgaatgcttcccttgccttcgcagtcttaatcttataggagttggagggctcaaggaccctaagattcaccttcttcaactgaacacttgccactgggaggtatcaaatgtcccacggtctttggttgtccatgcgccaaacttgtactctctagagttgaaatgtgttcgaccagataggctcattttggatactccatccttgtctactctgaagctcaccattgagaaacttggtgcaactgcccaagttgatggtcttgtgagtttgacagatcttcgcatagagtcattggatcttagctccctgttttcagcatttgtagatagtcgagctatcaggacattggagcttgagctacctgagtctgcaagccagtatgatcttcttgaatcagttaacccagattatcttctgagaatgcttgctagcatcagggaggtcaagctggccccaagattttcatgtcaactgacattatgcctcgccctatgcacagatagtcagttccaaagttgtctgaagaaactcctaatccatgtgcctcaatcagtagttttattttcagctgtcacgtattgtttcagatatgcg

SEQ ID NO: 44127 - DNA, 398 bp, Setaria italica
  Peptide Sequence Number=SeqID_110101
gcttcaaatgctttcagccaacaaatctgataaagaataaacagagacaagaatatgttaagaggacacatgcaattagtgaaatgacatgccatgtcttagctatagagctggtaattcagtaagtatatgtgcctcaattgtaaagatatatagccttgcttgattgaaaactgaccatagcggcattagttggtagtagtatcattaccatttcaggcctcaatcatccctatctagcaattagtagtcagaaattcgggcatacaaatatcgccaaaggtataaatttgtaccaaccgctaatctctttgcacctctagtgaccttttagctagtaaaatagttttggggcataagagtaataccatcatgctacatgctttctaactgattta

SEQ ID NO: 44128 - DNA, 301 bp, Setaria italica
  Peptide Sequence Number=SeqID_110102
tgtcgtacggttggttgttattcggacatgtacagcttggtgtcctcaattattgccaacccgctgaaatatggatttgagaatgtagcacaaggttgctgtggcaccggaattatcgaggcgttgttcctttgcgccttggaggaaccattgacgtgcgaagatactgataagtatgtgttcttcgattcggttcatccaacagagaggatatacaagatggaagctagtgaaatgctgaatacttcgctagcagtgttcctgtgacgtgttttattatgctctgcaacaaaaacaatta

SEQ ID NO: 44129 - DNA, 229 bp, Setaria italica
  Peptide Sequence Number=SeqID_110103
gccggttattggctgcatgtactgtgtggaacttctgaaatcctggctaattcatcagaattcagaagaagtacatacagagaggcagagagccacacgaaaactttatcaatgcagtgaatacacagagcaccatttctcagtgaggaaattcactatccagatggtgagagttgcaaagacataaacagctgacacttaaacaagttattgctcttctattgcagct

SEQ ID NO: 44130 - DNA, 327 bp, Setaria italica
  Peptide Sequence Number=SeqID_110104
cccccaggtggttccaaatcacctccctctctttctctctcttcccccgattcctccctccctctccctccgctccccagctcgctctccccctttcccattcacactgctctcacagacagttccccccattgccattggcgccgccaatcccgagctccaaatctcacgagcgtcaccccagggtccgaatccatgcccccactaccctcactccgctgccactctcctgcattgctataaaatccgctgcatctcggctctggcccatctaatccaccgaggagccatggccggagcccctaaatccaccggcattgccctcat

SEQ ID NO: 44131 - DNA, 424 bp, Setaria italica
  misc_feature (298)..(298): n is a, c, g, or t
  misc_feature (338)..(338): n is a, c, g, or t
  Peptide Sequence Number=SeqID_110105
agtagtgttgtttgtttattaagatttgttattttgcattcacttgttgatgtctgtcacctactttctgcttcgttgaaaaatgagctgatttggcttccttttatttattgttctgtaccaaccagatggcggttgtatctatactgatggttctccttgttgcttccactaatattatttttccctctgcatacctaaacaatgaaaagtttattcactgaaataggatgtcaaaaaaattcttacagtacaagtttaacagctgaagtgagtatgtcttgtcaatttaaaaccngaaacgctatgtgttttgagtcagaagtctgatgtttggngcccactgtctatgatctggttggttttttcgtattgagggattcttttttttcctgccaaatgatttactatttgatgctagtct

SEQ ID NO: 44132 - DNA, 266 bp, Setaria italica
  Peptide Sequence Number=SeqID_110106
ccgcgctcgccttctacctcgacttcgccgcctccaccatccacgcctccgcgctgctcaccctctccgcgccacactccggcgacctcctcctcgacaccctcaccctcaccctgcccccgacaccacctccttccggctcaccttctccacctcccccgacgcctccgcgctgcagtggctggccccgccgcagaccgcctccgggcagcccttcgtcttctcgcagtgccagtccatccacgcccgctccatcttccccagcc

SEQ ID NO: 44133 - DNA, 282 bp, Setaria italica
  Peptide Sequence Number=SeqID_110107
ttcgacggcatcacctccccgatctgtagcaaggccaggagccaccaccttctgagggccaccgttcgtgcagacggcctcggctatcaccaccaccatgctgctttggttcctgccttcctggcgccaccaccgcccccgtcctcagcacatcaatggctggtgggtactcgtcgatggaaaagggcccggcgaagacttggcgaatagcgccggcggcgctcgcccagtcgtcgccgccgccaggaaaggaaggaggggggaaaggaacagagatcaggg

SEQ ID NO: 44134 - DNA, 308 bp, Setaria italica
  Peptide Sequence Number=SeqID_110108
ttggcatcagctgaaatgacagaatccacctccggttcacccccatcagcctcaccttcgaaaccggagctggtgtccccgaacgagctcgagcattcgacggcatcacctcccgatctgtagcaaggccaggagccaccaccttctgagggccaccgttcgtgcagacggcatcacctccccgacaccacctccttccggctcaccttctccacctcccccgacgcctccgcgctgcagtggctggccccgccgcagaccgcctccgggcagcccttcgtcttctcgcagtgccagtccatccacgc

SEQ ID NO: 44135 - DNA, 1624 bp, Setaria italica
  Peptide Sequence Number=SeqID_110109
ttttttttgtatacagtgctcggaataatctcagataataatacggtcttgagtttccacatattatcaagatacagtattaagtttccagttttttctaagttagctgcaggaagggtgatagttttatgcaaaagaagcgactgagcaaacagtggatgttccgttgctcccagggacgaccaattcaccaaagccttagctatcttagctatgcttcgacaaaatggactccgcaacactgcgagctattgggtggtaaaattcttgagcctctgagaagatcctctgggccagcatcttctcctcgccagagcacttggccagtgagctgtagagcgggcggaggtacttcatccttcccacctgcttcaagcatttctcgacctcgttgaagtagcacttgcacccggtgggaatcgccagctggaggaacgcgaccttgacctcgtagtcacggctttcagatagcttgtaccgctcatcaagagcagtaacctgtgaggcttcaacatctgtgggtagattttccaagtaaagctcccattcttgcccactccagtctgccacctcatcttcacttggaagcttacctgacttgaattctgcagctaagtcacagatcttcttgtaagtagctgaatctggttccatggcatcaggaggaataccagtcccctcaacccacagttgaaggtcaatttggttttctatcccaggtacattcgttttcaggaattcaagaaacgtctcagtgtctatggatttgaacttgaacgtggcaatgtacttctttaagaactcatcaaaagcaggacggccaatctggcgctcaatgcgccaaagaaactggaagcctttctcgtagggcacttcagagtacacatcatcagggtcaatccctgccatcttcggcttcaatttggtgaactccatgttatccttaaacctctccatcattctgttcaaccccctccatccaattcccatgtttaaggctgcccgctcctccccttgcaccacctcaacaatcctcctctcagcatatgttgtgaatccctcatttagccagaaatcttcattggtcttgttagtaatcagattgccagtccagctatgcgcgagctcatgcgccacaacctgagcccctgcagcatcccccttaattaccgtcggagtgaggaacaccatcctggggttctccatgcctccataagggaagctcggaggcagtacgagcagatcgaacctctcccattcatacggcccaaacagcgattccccgaccttgaccatctcctccactccggcgaactccctcgccgcctcgtccagcaccttgtcccctccctcggcgtacacccgcgtcctcgggccgaggtccctgaacccgatcccaccggcggcgaacgcgaagaggtagggcggcacggactgctccatctggaactcctcgacgatgcggccggacgcgcaccacagctcgtcgtcgcaggcgccgcggtggtcggaaggcagcgggtcccggcggccgacgtggcgcgcggcggcgacagcggagagctgcgaggggaccttgaggaggagcgagaaggtgatgcgcgcgggcgggggtgtcgtggct

SEQ ID NO: 44136 - DNA, 664 bp, Setaria italica
  Peptide Sequence Number=SeqID_110110
acaagacccaccgaaagcccctcggctcgacccgacacgaccggaccaaccaaaccctcccatcccgtctcgttcgccgccgcagcaggaggagcagcagccatggcgcccgtcgatccccactcctacaccgacggcgcgcacccggtggtgtcgcacgccgcgctcgccttctacctcgacttcgccgcctccaccatccacgcctccgcgctgctcaccctctccgcgccacactccggcgacctcctcctcgacacccgcgccctcgccgtccactccgtctccaccgccgccgacccgccggagcccatccccttctccctcgccgcgagccccgaccccgtcctcggctcggcgctgaccctcaccctgccccccgacaccacctccttccggctcaccttctccacctcccccgacgcctccgcgctgcagtggctggccccgccgcagaccgcctccgggcagcccttcgtcttctcgcagtgccagtccatccacgcccgctccatcttccccagccacgacacccccgccgcgcgcatcaccttctcgctcctcctcaacgtcccctcgcagctctccgctgtcgccgccgcgcgccacgtcggccgccgggacccgctgccttccgaccaccgcggcgcctgcgacgaacgaa

SEQ ID NO: 44137 - DNA, 821 bp, Setaria italica
  Peptide Sequence Number=SeqID_110111
actcttgaaaggggttccagtttctgctctttgctgctgaggatggcttcccagtttcctgcttctttgctgctgaggatggcttcccagtttcctcctttgctgctgaggatggcttcccagtttcctgcttcttcgatggtacagattcacgcttcttcgcatctgcaggttcatttccagttttgcgcttcttcctagctgagcgagcagtcatggttcccagccccattgaaccagagggcgcgctctcagttttctccactgccgcagcagaaggtgtgcccccagttttgttctttgcagctgagggtgtgccctcagctttctcctttgcaggtgttttggaggtctctttcttcttcttctgcttcttggtgaagaaagagcatttcttcctcctcttcttaggtttcagctcttgcttgatctgaggggagacaggctccacagctggagctgaagtgctatctgtttccactggagcacaagtgttcttcacttccgctggagcagaaatgtcctccatttctgctggaccagaaatgttctggcctttggaagaagttccggaaggcagatgcttggccttatccaactgctgacactcttcattggctacttgattgtctatgaggatatcgtcagtgtttctttgcataaatccccaatatgatcatttggtatggaattgtcagtacccaagagtaggtccactgtgacagctttctccatcgagtaattgcactctccacttctttcttcagcattcctattttcatattttatacgtcacactagtttccctgtcaggcaaagca

SEQ ID NO: 44138 - DNA, 1985 bp, Setaria italica
  Peptide Sequence Number=SeqID_110112
tttttttttttttaaactaaattaaggtactttttaatggcatatttttctccttttttccatttccgatatagaggtaacacaacatgacattgttagttttgtcccccagaagataagagttaagaacaaccaaccaaccaaccaaccaaccatttgggtgagaacccttcttttttttgtacctagacacaagctgatatgtacactaaattacatggcgatgcatcacttcttgctatatgttttaatatggccacctactttggcggccagacaggatacatacacatcagagaagtttctctgcttcattcatcaaaaactttgggcttccggaccctttggctcctcctgctatttacagccaccagcacagccttctcaatcttcatattcaagggggcgctctcagcctcctttattgtggagggcttgttttcagtctcctgattctttgtagctgaggatgggttttcagttttctgcttctttgctgctgaggatggcctcccagttttgtgcttctttggtgctgccgattcgctcccagattcacgcttcttcatgtctgcaggttcatttccagcttttcgcatcttcccagctgagcgaaaggtcatagttcccaaccctgttccagcagagggtgtgctctcagttttcaccgctgctgcagccgagggtgtgctcccagttttgttctttgcagctgagggcgtgccctcagttttctcctttgcagcaggtgttttggaggcatctttcttcttcttcttggtgaagaaagagcatttcttcctcttcttcttaggtttaagctccttgctctgaggggagacaggctccaccgctggagcagaagtgctatcaactggagcacaagtgttcttaacttctgctggagcagaaatgttcttcgtttctgctgggcctttgttagaagttccagaaggcagatgcttggccttaccaaactgccgatacactacattggctacttgattgtctatgaggatatcataagtgttttctttgcataaatccccaatgtgaccatttggtatggaattgtcagtacccaagagttggtccattgtgacatatttctccctcaagcgattgcactctccacttctttcttcagcattcctattttcatcttttaaatgagcatcaatttccatgtcaggcaaagcaggtctcactgcaagagctgatacatcatccttcagcaaaatgtttagattcttccttttccgtggtttactatatcgacactccatataagagaatgagtgcttttgagtatgctgcctctcctgaggcaccatgacatgagtaccgtcctcagaaagtgccaaattttctcctccagaatgagccttgctaagacaatcttgcagcagatgaactctagactggagcccgtcaattgtcatgagtgtgtgctttaaaatgagttgctcaaaaatcatatcataattctcggaattgagcaatgtaatagtgtcaagtccacctctgatacagccatcaactgtactgccacaatcatcatcaattaagataccaccagtttcagctcccttattttgcttatcattatagtatgacaatatctggtgcttgttgatgtacaagggcccatccacattttcttcatgtctcttcctctttctcctcttcataatactgtccccatggcctttgtgaatctgcctcgattctaacctagaaacatttgctttgcttactgctagctgtagttccttttctttcttgattagagcaagctccctgtcatactttgatacttgagatgacagctccttcacacgcaactctaaccactggcatctccacagaattggaagaacagaatccctccactcagctgtcacctttttccttctgaaggcaatccatatcacaaaatttgccccaaaaaaagaagtgtctcagaataacaaaactttacatta

SEQ ID NO: 44139 - DNA, 558 bp, Setaria italica
  Peptide Sequence Number=SeqID_110113
tctacagttcctcatcttcctgaggaagtagctcctcctcctcctgctcccttaagagctgcttctcccttatcctcctcctcctctcctcctgggcctcctcatcctcctcgtcgatatcagcttcctgcctctcattctgctcctcaacagttgacacaatctcggcctgccgtatacggcgatggtctgccctcagctcctccttgttctcacgggtttctgcaagacgccggagccgacgatcgtcctttgcagggatatcaccatcctcatcctttgggaatgccttgtcaagggagacgcgtgctgtgcggaggtctatttcctcctcagcatcatcagcccactcaggcgcctttcctggccagtaccgcttgaccttggtctggccaatcttgccgcggagcttgtcccgcaccgcgatggccgcatcgcttacaccggccgccacggacatggtgactgttggtcaccaattccccactcctgcgcacccaatcaaccagcggcgacagaagcaaccaatcccaagcccggaaggatctccacgccgca

SEQ ID NO: 44140 - DNA, 308 bp, Setaria italica
  Peptide Sequence Number=SeqID_110114
aatactagttacgaactaccaacgaaaggaacaatacaagacgtagactgcagtgcggccacacgattcatctggagtgcatgaacgagatgagagcgcaccatcacttctcgtgcccggtgtgctcgaggtccgcctgcgacatgacggacacgtggcggaagctcgacgaggaggtcgcggcgacgccgatgccggagatctacctgacgaagatggtaagcagcagatcgctaactccccacacacgaccctgcaggtcggatgccgattgctgaaagactagaaacgaataggaataggaacta

SEQ ID NO: 44141 - DNA, 238 bp, Setaria italica
  Peptide Sequence Number=SeqID_110115
tactggatcctttatccttttttttctagaactggcggtgcagacaacttctttcactgcgacacatgcggtaagtttctgcatgacattcgttctgctatgattctattaactgttccgcaacaaggatttcaccaactctcgcgctgcctttgttgtaatctgacagggtgttgctacagcaatgtcttgaaggactctcaccgctgtgtggaaagagcaatgcatcacaactgcc

SEQ ID NO: 44142 - DNA, 520 bp, Setaria italica
  Peptide Sequence Number=SeqID_110116
aaggacatcagcgtgctgcagtgcggccacacgattcatctggagtgcatgaacgagatgagagcgcaccatcagtgagttcctcgctcgcatccttcagagacaactttttcatcccattcccgcaacgatctcaagccctttttgactttgatcttggcatcagcttctcgtgcccggtgtgctcgaggtccgcctgcgacatgacggacacgtggcggaagctcgacgaggaggtcgcggcgacgccgatgccggagatctacctgacgaagatggtaagcagcagatcgctaactccccacacacgaccctgcaggtcggatgccgattgctgaagctgaacgatggatggactgcaggtgtggatcctgtgcaacgactgcagcgcgacgtcgagcgtgcggttccacgtgctggggcagaagtgccccgggtgcagctcctacaacacccgggagacaagggccggcccggcgctcgccgcgcgctccagagtttgagcagaggcccacgccac

SEQ ID NO: 44143 - DNA, 649 bp, Setaria italica
  Peptide Sequence Number=SeqID_110117
cagctctcctcgcgcataagcgcccgcgctctgctcggacgagcggacgaaacgggcgggagcttctcccccgcggcttcgtctcccgccaccgccacgcgcgcctagctagcagctttccctccggcgcggcgcgcttcgcatcgtcaccgaggggaagagaaacaagcggcggcaacgaggcgcgtccggatggatttcgcaaccgagcagcacggttgcgagcattacaggcgcgggtgccgggtcgtggcgccctgctgcggcgaggtcttcggctgccgccattgccacaacgacgccaagaactcgctcgaggtcgacccgcgcgaccgccacgagatccctcgtcacgaaataaacaaggtcggtgcttcttggctaatcttgtgcttgagttttcaccgtttgcttctgtccttccttttctgaagttgttctgaatttagttaggcttcatgcatcatgattcattgattctttcctctttgggagacccaatgtttcttgtccaatgtcaaaatccaaagaaaccattggccctttcagtctaaaagaagcccgtcctcagatctttcgcccatttcttcagataaggttaagacaacaaataagacctaagtagaataaaactaccaactaagggtaa

SEQ ID NO: 44144 - DNA, 1201 bp, Setaria italica
  Peptide Sequence Number=SeqID_110118
ttgttaagttaagttagttcttaagttaaggtttgtttcgtttacttaagttcggtaacttacgtacgggttcggttggtcgctgcccacgggcgggcacggcggcgacgtcgtggtgtacgccgacgaggccgaggagacgctgctgcggttccacgagaaggcgcggtactgcgccaagaggggcgggaacgtgggcgccgccggtggcacgctgagctcgaggatgcacagcgggttcgccggggagacgctcaggatacccgtgcctgtaggaactgttgtgaagcgcaagaaggggactgttcttgctgatttggctcatcctggcgatgaagtgctcgtcgctagaggtggacagggcgggatcagcttgatagatgtgcctgagtacaggaggaggaaagccatgactttatccccaaacatcatgcgtgatgctagtgacaaagtattaactcatggtcagcctggtgaggaagtaagcttggagttgatcttaagggtagttgctgatgttggccttgtgggacttccaaatgctggaaagtcaacacttctatcagctattacactcgcaagaccagacattgctgattatccattcactacattaatgccaaatcttggccgtcttggtggagatcctgctttaggagccttacagttttcctctgaagcaacattggcagacttgccaggtctaattgagggtgctcatcttggaaagggtcttggccgcaatttcttaagacatttaaggagaactagagtaatcgtccatgttgtcgatgctggtgcagatgatcctgtcaatgattataagattgtcagagaagaattaaggatgtataacccccaatacctggagcgaccttatgttgtggtcctgaacaagattgatcttcctaaggcccatgataggctatcatcactggctttagaaatatcttcaattggttgtgaagaaaggcaggacataagtggcagcaaagataatctaaatggacacgtaagcaaacatcaggtctcatcggaggctacagttgaaggtggtgaaaagcaactcggggactatccaagacctcaagctgttgtcgctgctagcgtattgaggcatatcgggatcgatgagatgctgaaggagataagggcagccctgagaaaatgctttgatcacaagttaccagaacagtgagca

SEQ ID NO: 44145 - DNA, 261 bp, Setaria italica
  Peptide Sequence Number=SeqID_110119
tcgagcgccggcggcgcgcacaggccgaggccgcgggcggcggcgacaaggaggccgtccgcgcctacttcaactcgacgggcttcgagcggtggcgcaagatctacgggtcggcgacggagggcgtgaaccgcgtgcagctggacatccgcgagggccacgcgcagacggtggccgccacgctgtccatgctccgcgactcgccgctccagctcgcgggcgccacggtgtgcgacgccgggtgcgggacggggtccctcg

SEQ ID NO: 44146 - DNA, 667 bp, Setaria italica
  Peptide Sequence Number=SeqID_110120
tacagaataggcagcccaagcagctgctcctcgacaacttttcactttttttagcgttagttacttcttgattcagccaaacaagatgaacatgtcctacaaagctagagtaatcatgttctgcaaaagcattatcatccctgctgcattcatcagcttactggttacttctactcttacagcatccggatttgtagcattacaaagcagcgttgacaacaacctctgctgatcagtattacccccatcctggttgctgtaacatctcatattgatgcttcctcctgctgctgccgcacctgcaactacactacaagacctggccggctgccagttggttgatcgatccatctcacttggggctcttcttccagagcccgctcatcctgcgcagcacgctgccgctgttgcgccgcttcggggacccctcatccacctcgtctgagaacggcgagctcatcagcttcccgccgatggagttgttgtactctggctccagtgaccccatgcgctccactgtcctcccgacgccgttgttatccccgccgcaagggacggacagagcggccgcggcagcctcggcagccttgcgccattggtcggattgcacgcgcagccggcgtagctccgcctccatctccccactcgcggcctgcgcggcgtccag

SEQ ID NO: 44147 - DNA, 414 bp, Setaria italica
  Peptide Sequence Number=SeqID_110121
cctacaggttagagctttcagaaaaaaggtaataacataccaaatacatttgagtataggaaaaagaaagctttatatatccagatgttatgtggaccagtttgatgacatggttacgtgtcctaattcaaatgggaagaactggacactttccagctgtctcccgaataggacacaatacatgatgtgttaacaacttttaacaaatataatcttacatatcttccaaatttgtcaaactccccaaataatcaggcattttccctgtgaagtcattatccgatgcccgcagaatcctcagcttcttaagctttgagaatgtcgaagggaagggaccacttaagccactgctatcagtgtacaattagactacaaagtttaggaacaaggttagaccaaagttacttactaaga

SEQ ID NO: 44148 - DNA, 818 bp, Setaria italica
  Peptide Sequence Number=SeqID_110122
cccctcgagctgccagtcagtgacaacgtagcttggcttcgccacctcgtctgccacctccagcttttccggtaagcattgccacgaccctcgacatcggcggccgctggtgcggtgagccctgcgtgcagatgagcgcgacatggatgaccctcagagcttcctcggcgtcgaattccttaagcctcggatccaggattcggagcggctgcttcccttcgtacaactcccatgcccactctaaaagatagatgctgctttccttgagggagctgtcagtgttggatcgaccagagacagcctccagggcgaccaccccgaacgcgaaaacgtcgaccttttcagtcagctggcctctcattgcatattcaggagccagatagccaaatgtgccagcgatcctcgtcgtgctgacatgggacttgttctcctcgtagagcttggcgagtccaaagtcggagaccttggggctgagattggtgtcaagtaggacattgctggctttgatgtccctgtgcacgatccggatgctggactcctcatgaaggtaagttaggcctcttgcaatgcctaaaataatctcaaagcgtgttgaccaatctagcttcatgctactatctccaaagagagctcgatctaggcttccattttcaaggtactcataaaccaacaaatgcgtgttactgtcaatgcagcatccatgcagtttgacaagattcctgtgttggactgcagaaatcgttgcaacctctgccacgaactgtctttcccctgatgagatgattgagaaagttgtttcacagctatcactcttccat

SEQ ID NO: 44149 - DNA, 3103 bp, Setaria italica
  misc_feature (1)..(21): n is a, c, g, or t
  Peptide Sequence Number=SeqID_110123
nnnnnnnnnnnnnnnnnnnnntaaagtaacccaatagcagaactataatgaaataaacctgagaattaagagagatgatgcatggtcatccgccactgtcatcaccggaacaaaggatagaatatcggtaagtagtaggaacagcgttcaaatcgatcacttcaaaccgatcacattttttttagcctaaaccgatcacatttagcagcagcgatcatctcttttttttcaccttccttcgatctggtgacttgctccggtgatcgtcggcgactgggtgggagggtcggcctctttcatcctgctcaactcaggggtggtcgtcgacccccagtagctgctcgtggtggtgcagctactgctgccgccgcccctgagctgccagtcagtgacaacgtagcttggcttcgccacctcgtctgccacctcagcttttccggtaagcattgccacgaccctcgacatcggcggccgctggtgcggtgagccctgcgtgcagatgagcgcgacatggatgaccctcagagcttcctcggcgtcgaattccttaagcctcggatccaggattcggagcggctgcttcccttcgtacaactcccatgcccactctaaaagatagatgctgctttccttgagggagctgtcagtgttggatcgaccagagacagcctccagggcgaccaccccgaacgcgaaaacgtcgaccttttcagtcagctggcctctcattgcatattcaggagccagatagccaagtcccatgtcagcacgacgagggacttgttctcctcgtagagcttggcgagtccaaagtcggagaccttggggctgagattggtgtcaagtaggacattgctggctttgatgtccctgtgcacgatccggatgctggactcctcatgaaggtaagttaggcctcttgcaatgcctaaaataatctcaaagcgtgttgaccaatctagcttcatgctactatctccaaagagagctcgatctaggcttccattttcaaggtactcataaaccaacaaatgcgtgttactgtcaatgcagcatccatgcagtttgacaagattcctgtgttggactgcagaaatcgttgcaacctctgccacgaactgtcttttcccctgatgagatgattgagaaagttgtttcacagctatcactcttccatcagttagcgtacccttatagactggtccatatccaccttcaccaagaatgttttgagggttgaaattatttgtagctaacttgagttcatcgtagctgaagacattaggctgtccaatcatgtcgtacagttcttgcctctgttgtgccaatcttcttctcctttttgtgaataaacatattccaaataaggctgctaatcctaaaactgatgcaccaatcattactccaacaattgcgccagctttgcttttctttttcggtacaccatttcgcacagttggagtaaaatttggagtaacgcttaaagctgagatcattggcccatagtaaccttgtgtagggatacagcaagtgcccttgccagcccagaagagatggatctcaaggaagtttttcgacacagttgctgtgtaactcttgctaactgcagtaaaagattttccaccagccgtcttccttatattgaagttcttttctctaagggaaccttggacatatatgtcaaagactctccttcctaggctttgccaagtctgtgtgtcgggataagcagtttctgcaaattgtagcacaacagtgtaatttccattctcaagtccaaggccgtagtatctcagcgacgatgctgacatccttgcagtttggaacagttctgtatcctctgcattctgaaactgctggttggagctatatattatgttacttccatttggggcctggttgaactttcctacattgctgacaccccatcttgtttgaccggtgacgtaatatgatgcagccccaaggtctgtaaaatctacatcgtagaaggtattatctgaccctgtcatagaactattgctgccgcagtcaaccgcaaaggagtaatactctggaaaaccaaggaaacaaggagtgccttgctggaggcagtttagtcctgcaggtagaatactgttgttggtactaccaagaacaaagttgtttgccaccaaattcagacgcaaattgctctcagtagcccaagaaggaaagcttccggtgagctggttgtatgaaaaatctaaattttttaatgaagggcttttcacatcaggcaggcttcctgtaaggctattgttcccaagaaacaggaattcaagtttgtcgagcgtaagaattgatggaggaacttggcctgtgatattattaaagctcaagtccagcaatattaaatttgcaagcttagaaatattaacttctccaagattaccagataccttgcagttcctcagtatgagggtactcaaagatgacagattactgatgaaggccaacgaagagcttccgcttagaatatcaccgaccgctaggtttgtcaacctggttagattagacaaacttgctggaatcgggccctcaaaagagtttccttggaatgccatatcttccaaatttgtcaaactccccaaataatcaggcattttccctgtgaagtcattatccgatgcccgcagaatcctcagcttcttaagctttgagaatgtcgaagggaagggaccacttaagccactgctatcagtgtacaattgctcaagtttggacaggttgccaagttcttcaggaagtccaccactaaaattgtccaaactgatgcctagcaagttgagattcgtgagattcccaagttcctttggaagtggtccagagaatggattgaatcccaggctcaagtgttgcattccggaaaattggccaatgaatgatggaattggacctgtcaaataattttgatccaggttcaggtaagttaggtaggtgaggttctgcagttctgaaggtatctgaccgacaacgttcaatgcgtaataaccctcctagtaacgaaatagaaacaaagaaagtaacggaaaaaaattttaaacgaacaaaaaccaaagttaacttaaataagtaaaactaa

SEQ ID NO: 44150 - DNA, 672 bp, Setaria italica
  Peptide Sequence Number=SeqID_110124
cagcagagataccgtatcgaggctgctctgggcctttttccattactgggcatacgagcacgattacacaagggatgtcatatcaattcgtactggaaggattattaggtatgtcatattaatgaagtcaacacttcattttcctaaggctctctttatgtgatgaacttctgtttctcagtccctatttttaaacatcatgatgattagaatggtgataacacaaaatatgcttgtagcctcattgtacgtagtatccattcttattaatccaattactgtattttaaacaattgacggttgcaaagcagcttccaattatctttatcgcgtagtgaaaatgccatgttagctagaggacattgtttccctcatccttttgacacttgtttcagtaaggaaaggaaggattggacgagacgggttggaaatgacaggcatctcatatgcatcgaagatccttttgagacctcccatgatctcggtcgtgttgttgacaagttcaccatcaaaatacttcgggaggaattcgagcgagctgccaatatattacagtttgatccgaaccctagcgtgacgctctttgagccgtatgtggccccctcgttaccgaccctgatgcaagaagaaactgtgaatggtgcagtaagttgaactttatttgttattctt

SEQ ID NO: 44151 - DNA, 2524 bp, Setaria italica
  Peptide Sequence Number=SeqID_110125
ccacttctttgtcgaccccgccgtcgccgccgtgggcccgctcttcgccgccccgacgcagatgcaagggggctgcttcccatggtcctccgcctccgccccgcagccgcagcagcacctgctccggttccccggtccccaattcgctccgggagaaccctacgctgctctaggcggcagcggcggcggcggtaggggtttcggatctggggatgcggtcaaggcggagaggcctcggccgggggcgccgcctcctgggtttggcaagccgtcgcatccgcccgctgctgcccgtgatgcatcgaatacgtttggtggagcaccgagcagggagctgaaccaccatcgtcccaggggtttcggtagaacgtcgaataaagagctgaagactgttccgccttttgctgctggtcgcgaggcggttggtagaatgcctcacggagagccgcgtgcaatgccaattactggtggccgtgatgtgcctgcaggtatgatgtacagggagcagcagcaggattgctttttgtcacggacaccgcctgatatgaacaccaatagatcgtttggcaggatgcctcttagagagcagcatacacttcctaccacatgtggcagggcgctccatggagatcagtatacgcatgcaacccaagcaggaaggatgcagcgtagtgattggggtcagcaggaaccccacttaacctacacgtcacaaagggagcagacgtggcagggtcctagtaaggaaaagggcttgcggaaactgccaaatgcgaatgcccatgatgcatttggtaaggtacccgtaaaagaagtgcaccatgtgacagtacctgctggcagttcagttgcagtgggtcctaaggaggatcaagtgaatggtttggaggatggcagaataagggaagtagttttggagcatggaatagatggagaggtggtagcagaggcagaggcagaggcaaggaagtttgaagtatcatatcaaaagggcaaggttagatttgctgggcaggatgaagaatatgatgatgatggcagggaggagggttccataattgagcagatgacagaaagtctgatgattgatggcaatgttgaggccaagggagtagtattgcaaaaaactatcacaaggagtaaggatttcagatcagacttttctagaggacatcatgtatcaagccagcgaataagatttcagaggagaaataggccatgtcgatatgacatagatcgatttgcacctagtttcttgtcaatttttgaatcattggtgccctcacaggatgaaatcgcgaagcagaagcagttgttaacatctctaagcagaataataaacaaggaatggcctaattcaaaactatacctctatggatcatgtgccaattcttttggtttctcaaatagtgatattgatctttgtctctcaattgatgacaaggaaatgagcaaggttgatattatattgaaattggcggacatattacatgctggaaatctccagaatattcagccattaactcgagcaagggtcccaatagtgaagcttatggacccggaaacagggctttcctgtgatatatgcgtcaataatcttttggcagtcattaacacgaaacttctgcgagattatgcacaaatagatataaggttacggcagttggcattcattgtgaagcactgggctaaatctcgccgtgtaaatgaagcataccaaggaacactttctagttatgcctatgtgataatgtgcatccacctcctacagctacgaagaatactcccatgtctacaggaaatggaggccacttactttgtcacggtggatgaaagtaactgtgcttacttcgaccaagtggacaagctaaataactatggtgctcacagcagagataccgtatcgaggctgctctgggcctttttccattactgggcatacgagcacgattacacaagggatgtcatatcaattcgtactggaaggattattagtaaggaaaggaaggattggacgagacgggttggaaatgacaggcatctcatatgcatcgaagatccttttgagacctcccatgatctcggtcgtgttgttgacaagttcaccatcaaaatacttcgggaggaattcgagcgagctgccaatatattacagtttgatccgaaccctagcgtgacgctctttgagccgtatgtgccccctccgttaccgaccctgatgcaagaagaaactgtgaatggtgcagaagttgaactatgatcacagcatctggtgcttcctgatgccttatgttctgaagtattgttctgttgtgttttgtgcatagctgtacaacagagatattttgctgtgtagttcccaggtgggtaacggtacttggctgcctcagtaaggttgagctgacagttatccagcatgggactcgtggcacaacattactaaggcaatctgccagatgccttagtaatgttgtgcgagaggatacatccacctttcttattttctatccaagttcattttttg

SEQ ID NO: 44152 - DNA, 404 bp, Setaria italica
  Peptide Sequence Number=SeqID_110126
cttcgtgcggcggtcggagctggagcagaatcggctccagaagcgccgcgatgagcatcccaaggccggcgcgctggcggcctccctcgaatccgcagcagcctccgatccccagcagcaacccgtacgccgcagcgcgaaatcataaccctacctcctgctccgagcccagcctcccgcggaacgaggtgatccggcgcctccgcgtgctgcgtgagcccttcacgctgttcggggaggacgacgccgcccgcgtcgagcgcctcaggcttgcgcttaagtccagcgtcatcgacgacatcgacgatctcgacatggcccgtgggcagaccaacgacttccttggggacatgatcgagatgggcaagcggcaaaagttcggaagggacgcctacgccaagagt

SEQ ID NO: 44153 - DNA, 516 bp, Setaria italica
  Peptide Sequence Number=SeqID_110127
aagtgcagtggttctgccgaggacattccatttaacatttctggacatggatgggaagaccacctggagttgagtctttgccagttgtgataaattctcatcaaggtcaatcagttccttgggatacctctcagcatttgcatgcccgaactaatgatgataggcataactctcctggtttatgaaatcaagcattcaagatggagagagtcttctgcgcagcatgcaaaagaactacagaaggagagggaaaacattcaacacaaggcaacatctattgcaaaaccacaaggtttgaacagacgtccatttctacataatcagaagtcaaatgatgcacctggtaaatctgcagattacattgaatatggaggatggcgcgcttcaaggaacaggcatggtagttctgccgaggatatttcatttaatatgcctggacatggatgggaagatcaccctacagttgattctttgccatttatgacaaatactcatcaagatcaatcatttcctggg

SEQ ID NO: 44154 - DNA, 582 bp, Setaria italica
  Peptide Sequence Number=SeqID_110128
gggcaagcttggcgagtacaaggattacgccgcggacagggccaccgggatgaaggacaccgccgcgcagaaggctggggagacggcggaggtcaccaaggacaaggctgcggcgatgaaggatgcggccgcgcagaaggctggggagacggcgaaggtcaccaaggacaaggcggtggcggtgaaggatgccaccgcgcagaaggccggggagacagccgaggcgaccaaggacaaggctgcggcgatgaaggacgccgccgcgcagaaggccagcgactccgcagaggcggcgaagaacagggtcggggagtacaaggagagcgccgcgcaggcagccatggagacgaaggactcggcgacagagaaggcgagccagacggcggatgccggcaagaacaagctaggggagtaccgcgacgctgcggcggagaaggccaagaacgccaaagacaccaccatggacaaggcaagggagtacggagagggagcggtggggaaagcgcgcgagacgacggaggccgcctcgtcgaaggccaagccgagcacggaggaattcggcgaggctggcgggggacgacc

SEQ ID NO: 44155 - DNA, 714 bp, Setaria italica
  Peptide Sequence Number=SeqID_110129
ctgatgatcctgattatgaggggcggaaggcctctaatccacagccgcctgtcggtatcgctgcagcagcagctccatctgggagctctacttctgctgagggaaggatggaggagagggaggagaatgccagggtggttgagaggaggttcaatgtgtcactgccatggccgttcagtggattgggagggcaggcatcacagcaggatgggaacaatggaggcagcggtagcaactctcagggcagtggctcgcaaggtggaggcacacccagcagcaagaattgagcacatatcaacctggaggttcacctcttggcgatccgtccaaaacccttcagtatttatgtgccgctggtgactatacctacagacatgaaagaaccaaaggaatttacagtctgttatggaacaatctgttcattttagctgtaccgttggtgttcattaggtcgtgtacacaaggcgcaaaaactgccccctgcagcagaatctgcgcgttgagagagttccgagacttttatgtgcagatttgttgattggtcctgcttcattaaacggtgtatactaaatccaccttaacccgtcggcgtgtgggggaatgccaggcgcgctgtgcctgccgtgcaacctgtatgtgcttgcgtgctcgtatggttgcagagctgtagcctgtaggcgtcggcgcccactgcatctggcactccgcatgcta

SEQ ID NO: 44156 - DNA, 855 bp, Setaria italica
  Peptide Sequence Number=SeqID_110130
acactatccatcgcacggcccaatagccgtctttctcctcccaaagcactgcccacctcgccggttcttctttctctccggcgaaactcccccgccccgccggcctaccgctcgcggctgccaccgccggatccgcctccgctgccctgaccacgctaaccgagccgcaacgtgacacccccaccgtcatcttccaccgcccacggccgccggcgtcctcgccaccacgccgtgttgcccggcgcccaccactgtggttgactgaccaccaaagacgccacgtcaccccgccgccgacctcaccgtcgtttcgtctgcctccatcaccggaccagccagtcatcccgagcttccttctaatccggcaaccaccggagaggccccaccccccagaacccaaaacctaagcccccatggcggcagccctggcgtgcatgatggcggtggcacgctcaggagcggagagaagacgcgtggaggaggaaggaagaagcggatcgcacggtccacaacctatgcatgaatctcaaaatttggaagatgagtgggcttcctaccttccgggaagatgtgtaggatctccgtccgtccgtccgcccccttcaatctaggcctcactgaggtaagtcttctttgttgcgtcgtgcgctcctactgggctactgcttgcctgcttgagcaattctgatcgtgctgctagattagtagtcagaaaacttaagaaagtgaagcttaccttaaaaaggacaattaccatgagtgtatataagaaattatctaagcaaaggtttgtaaggtactctgaaggaattggattcgatattgatacctgttaaccacatgtcatgcagttat

SEQ ID NO: 44157 - DNA, 1707 bp, Setaria italica
  Peptide Sequence Number=SeqID_110131
taccgggaggcaggacgggttcaggtgaatcgcccgaagaagccagctctcggggttctgcatcgtctccaccagctggttctgctggaaagcggcagcggccgactgcctcgccagcaggtgcatttggaagtacacctccgcaggccgcagttctgggggccatgagaaccattccaggcgaaggttcttctcccacttggttttggagccaaggctgccctcggcttgtgccagtagaagtgacaccagaggtaacgaagcatgtgatttctgctgggcctttctgaggctggaagatgcacgggatataaattgaggagctgcaaacctccgggcaatttccatacatgttgcaccattgaagaataagatgcagctatcgggatctccttcagcgcatgcctgagcaagagctttttcagcacttgcaaagttttcgtcccatacaaagcactgagcacagactagattgaaaagagacatccatttcgatgggtcactgccattccttttaatgcactcacgaagatttatatctatttcatcagaagaggcctccaatgaacatgcagattcaaggtgcttcagaattacccaacccatctcaatattcgtatggtttttcaagcagttcatgtactcattcctggagttcaaaagatccccttgcactgcataggcccgacacagttgcaagtgtgcaaagaaagtatcaacacagctagaggcagtcattcttagagcttctttagcttgaccaatgcaattctcatagtctaaatattgcaaacagatttctgaagataaaagaagaagcaagaacacctcatgctgcacaactttgttctcacgtgaattgctaatgttggatagcacttgcaaaatgagcctcttcagaatgatacagatatgtttggggtacttctcttcacgtgccttctggaaaatagcaaggacaagcaggtagcgtgcatcttggttccatggttcacgatgaaccaacctttgcaggtggtgtatttcatcatgttcacttaagtactggtgttcacatgttgggaaggagaactttgggtaagaggtgcaggtagcatagcaacaaaccattgcacatgcttgaatctgatgtgcagatcttaggcccatactggatgtgtgaccatgtgtcagagaagtaacccttacagctttatgagaagccatccaatctccactccacaggagcagagatccaagttggtttctcactaaactgcagttgggatacatgtgcaggaccttttttaggtaagacaaactagcatcaaccctcaaaggcttgtccaattcccctccaatcgccttcccaagagcaatattcgagtggacttcactcatcacttcataggatgtaagcctaggaggcatgctcaactgaggcaactggaaacgcttgtttggatgcaaagcatccaatgcagaaataataaatttcaactgcgagctataattgagttggccaggaagcttgtgaatgacagcagctgcagtgtccttcccagaaattgcatatgtcaatgtgcatatgaatcccaaagcctcagttgcactctccggcttcatgcctgataaattttcagctaagtttctagatacagaaagagcttcctcacttcgtccagttttccacagtgcaagagcatatatttgtaataccaataccaa

SEQ ID NO: 44158 - DNA, 258 bp, Setaria italica
  misc_feature (2)..(2): n is a, c, g, or t
  Peptide Sequence Number=SeqID_110132
anaagttctgcagatggttttctcgcatcaagctcattgattgcatctcatcttttatttgcctgttccctgatgttgcccaggtgatttatatattctttgtgttctcagaactgtcatttaaaatgactactatactagtaattggtttccattattatgattgcaggatctgattggatgtttgcttgacatgctgcacgatactgattatcgtgtcaggttgtatttggccagggaattgttgtgttattaccg

SEQ ID NO: 44159 - DNA, 1740 bp, Setaria italica
  misc_feature (1703)..(1740): n is a, c, g, or t
  Peptide Sequence Number=SeqID_110133
ggactatccagcaaccaatgcttctttgagctcatggacttcatcaaaggatttgtggcctcaaatgagcagtttgagaaattggacttatctaatcttgtatttatttgttctcttctctgcaatctggttcatcgtgcattgttgtcaagggccatgggagataaatcttcacttatgcaagaagtattaaattatatcaccaatattctaaaacatattgtgtcatttgttatgaagaggaacaatgaactttctcatggtctcactaacctaagtttaccattggatacaacgggctctgctttatcctcattcaagagctttctatcttctccattatttaatctgtcaagagttgataatagagttagttctgtggttatcaaaggtgttactgaattacttgatgaactcttggtggcaatttctcagctgttttctcagctctctagtttagtgaacagttttgatggagagaatgccggaaaagtgttgccaatatcttgtgtcaactcacaggatctaaatcctattgttgactgcaaaagtaagtgttgctgatatggatcttgatgtgatggactctggtgaagtagattctgtcacaactagtgggagtggaaatatgggtagcttcttacgaccattggagtggaagctagaactagttagcattatttcaacttttttctcagtttcgtcgcttcatacatgggagatcttgtacaacttggtggagaaagaaagtgacgtgaaggtttgtcaggtcatcttgcttaatctttgcagaaacatctctgcttcatctaaaactgtatcttccatggtccaccttataaatgatacaagggacagatgcacaagttcatttcttaattctacagggtgcttagcttatgtacacgctttgttaagaacattggtagctctgcgtaacagtgggcaaaatactgatggaaagcaacaaggatgcaaagggattttcagtgagaacgaggatgtcctattagacttggtaaataaggctacagagataagttctgcagattggttttctcgcatcaagctcattgattgcatctcatcttttatttgcctgttccctgatgttgcccaggatctgattggatgtttgcttgacatgctgcacgatactgattatcgtgtcaggttgtatttggccagggaaattgttgtgttattccaaacgtgggaagggcataatgaattattttatgatgttcggatgttttcattacaaccggtggatcttattattagattgctggagaccaaggggaagcaaagggagcgggacagccgggagtgggacgggaagcgggataaccgggtatacgaaaatgaacaaatatgagcagaaatacaacggaaacaggcgggaatcgggaccatacgccgggatgacacgttccaaagtccaaatcaagaccacaagtccacaaggcagtagttctagtttattacatcgtttgagacatgttcgcatattttttccaaactgtcacagctcaccctcttcattcatctggtctggatcactttccattccttgttcctaaaagaatcaagacatgttctcaggttagatgtttcaaatataacactattgactaatgtaatgatccgtacaacatgtcttgaaggtcgatcacccggctgtttatttcaaggagcaagtnnnnnnnnnnnnnnnnnnnnnnnnnnnnnnnnnnnnnn

SEQ ID NO: 44160 - DNA, 924 bp, Setaria italica
  Peptide Sequence Number=SeqID_110134
ccacgtcgtcgcgccgccggagaaggtcgaccacggcgcctggccccggagccttgccgggtacagggaggcgaacgaggcgtactgcctccacatgcagcggctggcgcgcgagctgttcgggcacctctccctggggctggggctcgaggagggcgccatggccgaggcgttcggcggcggcggcaccgtgttcctccagaagatcaactactacccgccgtgcccgcagccggagctcacgctcggcgtcgcgccgcacaccgacatgtccacgctcaccgtgctcgtgcccaacgacgtgcaggggctccaggtcttccggaacggccactggtacgacgtcgagtacgtgccggacgcgctcatcgtccacatcggcgaccagatcgagattttcagcaatggagcgtacaaggcggtgctgcaccgtacgacggtgaacaaggagaagacgcggatgtcgtggccggtgttcgtggagccgccgggggagctcgccgtcgggccgcacccgcggctggtcaccggcgagaacccggccaggtacaaggcgaagaagttcaaggagtaccagcactgcaagatcaacaagctccccatgtaactgacgggttcacgacatgctcgttgccgcgggtgttgtggcgtgcgccgcggtgcacgtttctctgtcgttctactagctgtcgtcatttcaatcacatggccacgcacaattatccttttgctttggattgggccaccaattgtgggctgccctactatcttgtaataatgtggcccggccttgttagcagctgaagtaaactgtggtatatgggccggcctggtttggcttcagtaattgtaatgcatgggcccctttactacatttgtgtgtgggaatgcagatggggttttggtcgtttggaattcgaccgg

SEQ ID NO: 44161 - DNA, 388 bp, Setaria italica
  Peptide Sequence Number=SeqID_110135
ggaagattgggaggtcgagttcgggccacacaggtttccctacaaggatctgcaccgtgccactgaaggattcagaaacaagaacttgctcggcgtcggagggtttgggagagtgtacaagggtgtgcttcctatttctgatcttgatattgctgtgaagagggtgtcacataactcaagtcagggcatgaaggaattcatcgcagaggttgtcagtctaggccgcctccaacaccgcaatcttgtgcagttacttggttattgccgaagaaaaggtgaactctttctagtctacgactacatgtctaatggaagccttgacaagtacctgtatgatcatgaaagaaggccaactctgagttggccgcaaaggtttaagattatcaag

SEQ ID NO: 44162 - DNA, 682 bp, Setaria italica
  Peptide Sequence Number=SeqID_110136
tttgatgatcttgcaggccttgcagcagagcttgtcggcgagcttgtccgcgtcgaagggccccgtgacgatcaccacgttgttcttctcgtcgtacgtgatgtcgtcgatgcagaactcacccttctcttggatcctggtgagcaccttctggatcttggtgtagcagcggcagcattccaggtccacgctgactttgatggtcggcatctgcactcaaacacgatcagaaagaagttcttctaagccaattttccctatctttgtttgcacacaagatagttcaacaaacaaacacagagagatgcatcaacttcatgcacacagagaaattaaaggcagagaaggccagccacctgtgtgattgctactgatctatggctaccagcacgaaagaaggaaacaatcaagaagggcagcaagaaagcaaagtgcccgtttgaagcgtgcagcacactccagattaaacaaactaattaaccagggccaggacggccggccactcttgccatcaagaagtttggcagaagatcaaactcaatacgcaatctttatgccatatatcctctaattctgcaagagtaaagaacgagaaggacatggagagagcgagccagcaccttggttcaaccgacccggcgcccgccaatgcgagccaggcaggatgaagaagaagaagaag

SEQ ID NO: 44163 - DNA, 442 bp, Setaria italica
  Peptide Sequence Number=SeqID_110137
ggcggagggggctcctccttcgggggcgggggcggcggggggtcggactttcgccggtggcggcggggcgggctcctccttctgctccggcggcggggggcttgggctcctccttattaggcggcggcggctccacgatctcgatctgcttgatgatcttgcaggccttgcagcagagcttgtcggcgagcttgtccgcgtcgaagggccccgtgacgatcaccacgttgttcttctcgtcgtacgtgatgtcgtcgatgcagaactcacccttctcttggatcctggtgagcaccttctggatcttggtgtagcagcggcagcattccaggtccacgctgactttgatggtcggcatcttggttcaaccgacccggcgcccgccaatgcgagccaggcaggatgaagaagaagaagaagaggtggtggtggagagagagaa

SEQ ID NO: 44164 - DNA, 298 bp, Setaria italica
  Peptide Sequence Number=SeqID_110138
aaaaggaaaccaatgcaggaccagatgacgacgattttacaaggaaaaacaaaggccctgcctgcacagaagaatttgcagaacccaagcacgcggtcgcgcgaaatcgccaccgagacggctcatccctacaggttatctgagctggaagtggcgaccaacaacttcgcgagcaggatcggttcagggggtttcgggatcgtgtactacgggaagctgagtgatggaaaggagattgcagtgaaggtgccgaccaacgattcgtaccaggggaagaagcagttcaccaacgaggtcg

SEQ ID NO: 44165 - DNA, 399 bp, Setaria italica
  Peptide Sequence Number=SeqID_110139
tagtttccgggctctgaccgaagacgacttagactaccgaaaggtcactgacggcgtgatccgcgtggctgccacgggcatgatcacgtttgccagcccgaacgcgctatcggcatttcgtcgtctaggccttgccggtgatttggatggggaatacctcattccgacggtgcgagagctgtgtccgaggctgcgtgaagtcggtcaatcgctgaccctggacttagaagggcgctggctcaccgagactgatatcgaaaactctgatgccactgtgcgggctcgcgtcattccgctgcagacctggcttgacgatgttgaggtttcggctggcacgttgatccttattcgtgatctcaccgagttgcgggacagagatcgccagctcgtaactaagat

SEQ ID NO: 44166 - DNA, 320 bp, Setaria italica
  Peptide Sequence Number=SeqID_110140
tttttttttttttttttcttattggtctattattctattattattcctacagctattcaagtaacaatgactgtaggattattgacacaaacatctcaacggaactgatagcttagtgctaatacggtctcacttcagcttattgttacacaaagcgcagcataaagtaataaacacaatgtaaactatatagaagtgtttggcgattgtgcagcggagagaaagccttcatgactcctggttctggaatttccttataatggcagccttgctcagagccgcctgcacataaatcttgttgtataattgatcatcgtgcc

SEQ ID NO: 44167 - DNA, 258 bp, Setaria italica
  Peptide Sequence Number=SeqID_110141
tgcatccccatcaacattacttacgttgacgcgatgttaattatattttttacatcaacattactgactttgtgtacagaaaggagaatattccttttttgaaaaacaaaatgtcatggtagataggttggcacaagtttctaaaatataaaacgaaaacatgcaacataaatatgatagacacaaatttcacaaggatttcttaaattatttcccttggaaaattgtatcatggacagagtaacaaaaaatacaatt

SEQ ID NO: 44168 - DNA, 763 bp, Setaria italica
  misc_feature (746)..(746): n is a, c, g, or t
  Peptide Sequence Number=SeqID_110142
gctcagtttcgacacagcagaaatcagctcgtcgatcttctgttcgacctccatttcgttctccttgacctcctggtgctgacgctcgttcccttttgactctttgtggtcatgctgcttcggtcgatacctccagtttgtttggctcgtgccttttccatctacatccatcaagttatcccttgtctcttctcccttgtgggcagtttgccgcctctgggatttctgccggtggcgttgggagggccttgccttcttgaagaactcgaatgacttggggaattgatgcttatcaatgaggtgctgctgccgacttttgtaactcttcaacttcaccccacaaccctccaccaaacactcgtacattggaaaaccacgggcaacttttgcttggaaatacgaatcatgtgcctcagacacatgaatgctaagcaaccttgaggttggatatactctagaacatacagagcatgatgcagtatgtcgagtgacatagtggtcctcaaagtcctccaaacaatctagatgggcaccacaaccagcaatcgggcaaaacacagtacatgtgctggctacttccatcttctcaagctggttccggtcatcctctgagagatccaaggccacgtgcttggcgaggagctcgcgctcgaggtccccggcggcgaagaaggggtcgtcgggtgtcagccgccgccgcgccgcgagccagaaccctagctccggccccgccgccgccttgggcnccgcctcggcctccacc

SEQ ID NO: 44169 - DNA, 686 bp, Setaria italica
  Peptide Sequence Number=SeqID_110143
cttatttattaccaaaagatcagcttgggttatccccgggccaccttttcttggtattttatccccaccagagacatcaattatgtagattatgtagtctgctaattccctgctgaagttagcagccaagttatctcctccagattcacagagtagcaaatcagctttacacaagcttgatagctcctccagaggaccaagatttatactgatgtcttcacgtatagctgcatgagggcatcctccagtttccactgcgcgtatgcgctcttctgggagtgctccatgcttgattaagaattccccatcttcttttgtgaaaatatcatttgtgaccgccgcaagactatatttatcacgtaggaatctgcatagtgctaacatcagggcagttttcccggtgccgacggggccgccaatgccgacggtgaaggcgcgctcggtgaaggtgcgcgaggcgagcggcggcgcgcgcttggtgaagtcgccgggggagtagatgggctcgtgggagtgcggcgcgaggccgtcgtgggagtgccacacgcggccgtcctccccgacccacgaaccccccgctgcttggccatcgccttccccgtgggagtgatggtggtggtggtggtggtggtgatcgtgagacgccatggatcggagcttggaggtggaggtttcggataaggagt

SEQ ID NO: 44170 - DNA, 697 bp, Setaria italica
  misc_feature (1)..(19): n is a, c, g, or t
  Peptide Sequence Number=SeqID_110144
nnnnnnnnnnnnnnnnnnntctcagaaataagtccatgtatatgctgcctattggagtatccaacttaagaatactgtcgtcatacagtcattgatatcattctctaatacagttgtgccaaaatgatgtaaaatttattcataaattgccaagtgcatcagctgcacgtccaagataaagctcaggcgatcttttatcggcgcttattgccggtcgcaatttcccacgcttgcagaacatgattcacgatttcctctacgcccactccgtgtttcacctgtgcaaacacaaaaggtcctccttcccgcatgcgaagcgcatctcgttccattacagccaggtcagcaccaacagctggtgcaaggtctgtcttatttattaccaaaagatcagcttgggttatcccagggccaccttttcttggtattttatccccaccagagacatcaattatgtagattatgtagtctgctaattccctgctgaagttagcagccaagttatctgcatgagaaatgcacaaatggcaccctttaatgcttgattgttgagttgtggaaaaaaaaatatattgcccaaaactcaggatacccattattattcagaagcagagggttcagggcacatcaggatattcaattaacatgagcctccaaaaaaaaaacgcagaataaggcttgaaagaagcattctctg

SEQ ID NO: 44171 - DNA, 1208 bp, Setaria italica
  misc_feature (1)..(20): n is a, c, g, or t
  Peptide Sequence Number=SeqID_110145
nnnnnnnnnnnnnnnnnnnntacctcctgtgctcgttttttttttttttttttggatttaaacagagtgtatactgtattactattgcctatcagtcaaatgcatcctggttctcttttggggttgcttttgacccttttacagttttacctccccaattggcctcaaacaagagctatgggtatatatattgtgctacagattcaacagccaaagaatgtacatctgaatttgcgaacacttttttacttctcatgatcttcgtttgatgtgtcaatcttgattacaagaggttgctgtagatccgagggagaggctaccacaggaagctgtgaggttccagcgtcgagctctccattctcagccaatgccttctccagagatgattttgcaacttttgtgacgcagataatcaagacagcagacaatacaaagccagatattatcagaatccatcgagtagttgagatctcgctccacccatgcgtcacatctgatagatctttcagtgttgttccaacatataccaaagcgagggtgattggcatcattcctaaccaagaagccagcatgtattctccaatgccaacaggagtgacagacaacaggtagttcaacatgttgaacggaagtaaaggcacaagcctcagtagcaacacgatcttgaagccagacctttggatggcaatagctacggcttgaaacttggggtaatctttgcatttggagagaacgtaaggcctcccaatcgtcctgccaagaagaaatgcggcagttgcacctattgttgctccaagggaatcagcaacaaacccaacaggcaagccgaaaagatagccccctccaagtgtaagaattgatgctggaacagctaagaccgtcagagggatgtaagcaagggccagcaccaaaggaccccatggacccaagttccccttgatccaaaccagaaaatcctttagaatcttctcgacggggagcgtgaagagcgctacgccgacggcgacgagcagaacggtggcgacggcgaggcggacggccgagggccacgagagcgccatggacgcgagcagcctcctgcgccagggcctgagcctgccgcagtcctccccttccctccccgccctccgcgccgtccgcccagccccccgtcctcccccgcgcccgcagccccaccgcggcgcctgccagatttgccgcccccggat

SEQ ID NO: 44172 - DNA, 355 bp, Setaria italica
  Peptide Sequence Number=SeqID_110146
caccaaccaagcacgcgtccatccctccctccccgtcccagatcccaatccgcagcaccggagcagcccgccaatccgatccgtctccgcatctccacgccttgcgcccttgcccgttcgctctcgccggctcgcgatggagggtctcatcaaggggttggcccacgtggcgatcgacgccgtgcgggatcggggccgcggcggcggcggcgacgaagacgacgaggcgccgaggaggggggcgccccaacgcgccgacccggacgccgacggggaggagggccgcgacgagcggtcgcggtccacgtgggccgaggtcgtctccgagcagaaggacggcgggccggacgacggg

SEQ ID NO: 44173 - DNA, 285 bp, Setaria italica
  Peptide Sequence Number=SeqID_110147
gtcggcggtggatttggcgaggaggggatcccgcgcgaggcaatgccgcgccgggcggcatggcgcggtgagcacagagggcgagcgcggtgaggaggaagaggggcggcgaggaagtgctgcagaccatgggtaaaggatggcggttggcgagaggcagacccacgtgggcgggcagaaccacggacctatcgatgcggtggacggcgtcggcgacgcagggaggaatcggcggcggcccggcggcagcgcagggagggagacggggatggccagtgaagtggt

SEQ ID NO: 44174 - DNA, 718 bp, Setaria italica
  Peptide Sequence Number=SeqID_110148
cttccggctttcaaccacgagaagatcaaggtcatggtcgacaccacgcctcccctgcatgcaccggccgagatatgaacattagcagcatgtagcagcgggctgatgagatttaatttgcccgtgttcagagcatgtcggcggtgacagcggaggtcaccaagcagatgatgcagcaatggcgcgagcagttaggccagagcggcggcaaggaagaagcggagatagacatgatcctcgccttcaacgacctgacggcaaagatcaacggccgcgtcgccttcggcacgagccacgaggacgtcgaggaggtcatcgtcttgatgcacgagatgcagaagcacgccactgcggccacgctcgatgctccgatcctctggtatctgccgacgcggcgcaacttaaaggtgcgacgtctggacaagctgctgaggaccaagatcatggcgatgatggaggcgcgggtggcggccgccaaagacgaagacaattgcagcagcgtccatggcggtggcggtggctacggcgacgacctgctcgggctaatgctggaggcgtggtcgccggagcggcaagggagcgacgcgacgtcgacgctgacaaccgaagaggtgatcgacgagtgcaagaccttcttcggcgcggggcacgaaaccactgccaccctcctcgtctggaccatgttcctgctcagcacgcacccgcaatggcaggagta

SEQ ID NO: 44175 - DNA, 831 bp, Setaria italica
  Peptide Sequence Number=SeqID_110149
ggagacgaatggaaacgacatctgaaactagtccttccggctttcaaccatgagaagctcaagagcatgtcagaggtgacgactcgagtcaccgaacagatgatacaggcatggcgcacccaaatacagcaaagcagtggccaccgagcagctgaaatagacatgaccaatgccttctctcaagtgactgaagaggtcatcggtcgtctcgcgtttggcacgagccaccggaaatccagggaggtcatcgtcgccgcgatgcgcgagatgcaaaagattgcaaccgtagccttcagggatcctccgatactctggtatctgccgactcgtggcaacttacgggtacggcgtctggacagagtgttgaggaccgagatcatggcgatggtgcaggaacgggtagcggcggccaaagacggcggcgcgtacggggacgatctggtcgggattttgctggagcagcgagggagcggcgagacgctgacggccgacgaggtgatcgacgagtgcaagaccttcttcgccgcggggcaggagaccacggccaccctcctcgtctgggccatgttcctgctcgccgtgcacccgcagtggcaagacagggtcagggaggaggtcctacgggagttccgcggcggcgacggcgaggcccccaacgccgatgtcctcggccaactgaagctgctccacatggttctgatcgagacgtcgcgcctctacccgccgatcgtatacatacaacggagagccgccatggacgtcgtcctcggaggcatcaaggtgccccaggggacggtgatctcgatccccatcgccatgctgcaccgggac

SEQ ID NO: 44176 - DNA, 1432 bp, Setaria italica
  Peptide Sequence Number=SeqID_110150
taacgtaaccgtttttaaacgttaattaactttttaactaaacggtaagtaagtagaatactaaccagctgattaagcaagtgctcacggacaggacgggcctgtaccagaaggacttcatgatccccgtcctgaaatttctcttcggcaacggggtcatactgataaacggagacgactggaaacggcaccggaaagtggttcttccggctttcaaccacgagaagatcaagagcatgtcggcggtgacagcggaggtcaccaagcagatgatgcagcaatggcgcgagcagttaggccagagcggcggcaaggaagaagcggagatagacatgatcctcgccttcaacgacctgacggcaaagatcaacggccgcgtcgccttcggcacgagccacgaggacgtcgaggaggtcatcgtcttgatgcgggagatgcagaagcacgccactgcggccacgctcgatgctccaatcctctggtatctgccgactcggcgtaacctgcacgttcgacgtctgaacaagcagctgaggagcaagatcatgtcgatcatgcaggcgcgactggccgccaagggagccaagtccggcgccggcgatgccgccggctgcggggacgacctgctcgggctgttgctggaggcgtggacgccgcagcggcgagggagcgccgagacgctgacggccgacgaggtgatcgacgagtgcaagaccttcttcgccgcggggcaggagaccacggccaccctcctcgtctgggccatgttcctgctcgccgtgcacccgcagtggcaggacagggtcagggaggaggtcctccgcgaattccgcggcggcgacggcgaggcccccagcgccgatgtcctcggccaactgaagctgctccacatggttcttctcgagacgtcacgcctctacccgccgatcgtgtacatccaacggagggccgccatggacgtcgagctagcaggaatcaaggtgccccaagggacggtgatatcgatccccatcgccatgctgcaccgggataaggaggtctggggccccgacgccgacgagttcaaccccatgaggttcgagcacggcgccaccaaggcggccaaagaccccaaggcgctgctgtctttctccctggggccgagagtatgcaccggccagaacttcggcatcgtagaggtgcaggttgccatggcgatgatcctcaggaagttctccttctccctctcctcgaagtatgttcataagccgaaatatctcctgtccttgacccccaagcttgggatgccgctcatcgtgaagaatatagatgggtgacaatggttgtaaaacctccttgtagggtgtgagaataaatatatggttacattgtgtgatgaatggtggcgtttcaattatagtttaattttagaaaaaaacaagagacacgcaca

SEQ ID NO: 44177 - DNA, 408 bp, Setaria italica
  Peptide Sequence Number=SeqID_110151
aagataatggataatattccggcttcaacctcctcaaagaagagaaccagtccactactattacagatagtagcacgttgctacacccacaaattttttttaaaaaaagatacaaagacgactcaaaaaccaattcgcaaactaaaagaccatccatttaaattaaagaaacgtaaagctactatctccaatgtccggcatgccaaatgaagttgttccaaacaaaaatcttttactcctaatgctagtagttaggattggcaagagaattaagtttctaagtgttcttcaactttacacgatgttacccatttctgtgcatggacgtggagagtaatgcaagaaaatgagtagctttttcaattagcaaattcacctgtatttctggtagatcaacgcgcatgaagg

SEQ ID NO: 44178 - DNA, 372 bp, Setaria italica
  misc_feature (269)..(269): n is a, c, g, or t
  Peptide Sequence Number=SeqID_110152
agtaatagtttaaccaccggcgaccagaagagcctcactgttgggtacagaatggcgcttctgaaactgcattgcgcaaacggctagctcttgggcagcaagggacaaagagggactggtgcgcagcagaatcatcagattcgccacaacaggacaacacaaaaatgagacctgaaagtgcagatcgacttcctgggcaggagtataatgagggctctgaagaggtcacccacaaactgcacgctctgaagcagggaggcgcgaaaacngatgggtgcgaagctgaagcgccaaggttgccctcaaaatcaacacctgaaagtgcagatcaacctaatggtaccatgtgggacgcagttctggtgccttttc

SEQ ID NO: 44179 - DNA, 274 bp, Setaria italica
  Peptide Sequence Number=SeqID_110153
tccggctcgtcgcgttccgggcgtcccacccgtagtaggtcgacgcgttcacatcgagcgcgttgatcaacggcgagttgtcgccgggccgcgccaggaagtcggcgccggagtaccgcgccgtgcagaggtcggcgtagaaggtggcgtccctgtccgcgcggcagaggcggcgcagcctggagaaggcgtcggcgaggcacgccgagcagacccgggggtcctgacgtcgccgcggcagagcgcgaggccgtacgccgtgtccggggcgccg

SEQ ID NO: 44180 - DNA, 711 bp, Setaria italica
  Peptide Sequence Number=SeqID_110154
aagaaccccgttaagaaatttaaaataaaaaatagactaagaaacaatagtaaactaatgccaaacagtaataattgaataaatgataagaaataaaccaaacagctagaataaaccatttatgatgtatttatatcaggccaggtcaaattgatcattctttgatactcaaactgatattcataaggaaaacaaggatgatgctcgatttaaacccaagtcaaattaaatctgtctacaacaaacaacctaaaataggtgggtttacttacctagggaatagcaaaataggtcaagcttatcataagcatgtttagccaaaacaacataaccttctttgtgtcttactaggttccatgattaaatggcctcatgaaccgcatatgatctgtccttgtggagttcaccagttaaggataacaggaagacttcctacatgcctacaacatgctggttagtccacatgtaatttggaggtctaaaactatttgatccagtgattttaggatcgttatgtgcacctgatgctgattctatctggtatgaagagaattagctgatgcgcattacaagcagctaaacgctaaacccactagtatgcattctactcgacacagtcctcttctattgttctcttccgtctttattcccgcgaaggcttgttttggcttcccaacacgctcttctaacaacgcaatcctctcagcaaaa

SEQ ID NO: 44181 - DNA, 293 bp, Setaria italica
  Peptide Sequence Number=SeqID_110155
tatattgttgaaacaacaactaccatataatatatttaaatcggcaatttacagtaaaaaaaaagaagttgagttaatgagaaaatgttaaatcaacattcattgtaataatgttgaataagtaaattcagcaagtaaaaaaattgagtcagcaaggataggacatgaaccagagcatcctaaaaaaataaagtaatggggaatagtggtaaaaatgaaatagatgaggaaattaaaaataaagttatggggaatagtagtaataaatgaaatagatgagaaaattagctaac

SEQ ID NO: 44182 - DNA, 396 bp, Setaria italica
  Peptide Sequence Number=SeqID_110156
tatttctagttatctcaaaaggcatttgcctcagtgcctcatcagttttagagcatgtggctcagagaaatcccacattgcagcctatgataaaccgtataactacatcttaaccaatatcgaagaactgggccaacatatatccaacccaaatattacaaatataacagatcaagaattattcacaacgtttattcatgaaacatatcatgttgatctgaacgaagtaccacgggatgtaagtaatatctacgagttggaggtcagcactacgtttcagaatccaatgctcttcaagaacatgtgaagcatagcatagaaaatatgtttgtactgcatttcagaatccagagctaacagttgaccgagaacaagttcaggcatgcatagcatagg

SEQ ID NO: 44183 - DNA, 653 bp, Setaria italica
  Peptide Sequence Number=SeqID_110157
ttttttttttttttttcttaaaaaaaattgttattcagttccatcattcactcctatttacagaggcgaacataattgattcccatttcttcgccagctaccattgttcacgtgtcgccttgactacttgggcctctatgcacttttacaatatacacagagagaggccgtttttttcttcttgcgagtaagagagcgagaggccgttgtctagagaagaataaagaataagcagtcaaagaactagcatatcaacactcctaagaccttgcgggtgggaagtacgaagaaatggtagaaccccgtctcttcgtgctcggctccttcgatggacggatccatccctgtatctctctctggatctccagcggcagctcctccactactgctgggtcgatgtcttcaacgttgaacaaccaggggttactgccagagggttcaccaccactgttgatgttgctcctatctgcagcttgcccagacacattgtgttcttcagctttgtttgcttccgaagaactccctggaccttgaggactgcaaattagtacatcagattttcatttaacagagaaacgtgtaagcagttagatcggtatttgcatcattgcatctgtacagaagtagtccaccaaaccttgaggactgcaatt

SEQ ID NO: 44184 - DNA, 812 bp, Setaria italica
  Peptide Sequence Number=SeqID_110158
ccgccgcctgccgctcgcgcccctcgtcgcctcctccgacgccgtcgaggcgggcgtcgagtgggccgacgaggaggaggaggaggaggcgggagaggctttcgatgaggctgaggaggaggtggtggcctcgggcgacgaggaggaggacggtggggacgtcgagggggggtacaccgcggtggagccgcccgaggaggccaaggtctacgtcgggaacctcccttacgacctcgacagcgagggcctcgcgcagctcttcgaccaggcgggtgtcgtcgaggtcgccgaggtcatctacaacagggagactggccagagccgtgggtttggcttcgttaccatgagcaccattgaagaagctgacaaggccattgaaatgttcaaccgctatgacattagtgggaggcttctgaatgtaaacagggcatctcctaggggcacccgcatggagagacctcctagacaatttgcatctgcattcagagcttatgttggcaacctgccatggcaagtcgatgactctaggctggtgcaagtgttcagcgagcatggagaagttgttaatgcttcagttgtctatgatagagaaactgggcgctcacgaggatttggctttgtgacgatggcgtcaaaggaggaactcgacgatgctatttccgctcttgatgggcaggaattggatggccgcccactccgagtgaatgttgcagcagagcggccacagaggggcttttgatgctgcactatgagagatgttgcttgtttgtaatgagcacggaaagacaacagaggagcaatgggatgctttt

SEQ ID NO: 44185 - DNA, 1201 bp, Setaria italica
  Peptide Sequence Number=SeqID_110159
gccattctaccatccatcaatctcaccggaaactagcatacgaccaaatgctacggttacctgtatgtattatacaaggaaggacttgctgataccatcacgtgcgcttcaagttactcctcagcttggtcagcttctgccactgccagctggttgtcctcctctctcgctcacgcttaattgcttaagttccctcagtgccactgcaacaagcctattggaagctccaaattctagtctgggacttctccggggctcggtatcagggttctgcgagtaggctgtggtgctccggaaaatggaaggctggttctggttttgtagatacgcaggactgccctggacaacggacggcagattgccattacctgaattgctatcagcatgatttccccaagattgctctcgcacacgagtttcactactagtagcggcattgggatccttctttgagaactgagtagctgcagctcgagccccggctatcgctgcggtaacactcgaggacttttgtacctcagacttggaagcatcaaatgtgagggatcctggcttcagagagaagcgatctcttggatctggaagagggaacttgatgggtagcggaccttgaacgggtgtaaggcccctcacggccccatcatagatccttctttccaaattgtagacaccctggtaaccacgcatctcgaatggaaccaccaacttctgtggattctcacaaagccaacaaaagtcagtcagcccttcaagcctaacagactgaggcacatcttcccagcaaacaagctcttcagacctgagacatcccaccacttcgacgcaaccaaggaggcgtgagacggggaagtgatcagggaacttgatgtcagtgatcccgtcaacggcataaatctccctgtagaaatcctccatggctttgatggtgtcgggatccgggaccttggacgcagcatgaatccagagccggcctgtgattggggacggccaggagcgtccctcgacgcgcttgatgccgtgcaccagcagcgacgcccacggctggtgcatcgtcaggcaagggttcccgtggtatcccctgccatcattgctgctgctgctatgccggccggcgccgaatccgccgcggcccgagtagccaccgcgcatgctgccggtcgctggtcgccgggttggggttcgccggccggatagacggggg

SEQ ID NO: 44186 - DNA, 240 bp, Setaria italica
  Peptide Sequence Number=SeqID_110160
gtactgtaaaatcaacaatcgctacgcaacttgctcagaggctcaatttgcctaatgttctgcaggtttagttatcttcgccacttcatcactcacatctcgtatgctttgttcctctcccttggtccatcttgactccaaattttactggctacaacacgcagacagacatggtgtatgagttgctgcggacatcaacagatgcaccacttacttctgttcccgttgggctcgtgattt

SEQ ID NO: 44187 - DNA, 625 bp, Setaria italica
  misc_feature (607)..(607): n is a, c, g, or t
  Peptide Sequence Number=SeqID_110161
aagatagccttgagctcaagaagctgcttgtcgacaacagcctgcttgatgtttcccagagtgatctagaggctaatctattcaagcttatggagaaacgcggatacggtgaggactatataaatcgctataaaatgatgacaaggttccatcatcaaagagtaccactagtaatcttggtgtgtggaactgcctgtactggaaaatcaacaatcgctacgcaacttgctcagaggctcaatttgcctaatgttctgcagacagacatggtgtatgagttgctgcggacatcaacagatgcaccacttacttctgttcccgtttgggctcgtgattttgactctcccgaagagcttatcactggattctgcagagaatcgcgagggcaaaagtccgttggctgggcacaccttttgaatgggagctgctgatttgtgggccatatttatcatggatcgcttctacactctcattacatggatttttgattcatgtttaagctcctattctcatttgctttattactgtgttcaggcattgttagaggaatggatagccactagagctttcagagataattgccttcctcaggatcatcgaaaacttntaaacaaccttaaagctt

SEQ ID NO: 44188 - DNA, 576 bp, Setaria italica
  Peptide Sequence Number=SeqID_110162
gtattctacaagaaaaaaatccaaagatgaaagtgatgggcacaaagatttgggccaaccgaagaataacactgccaagaaagataaacctgctgctgaaccgatagttgttccaattgtgctgaggaagactacctaattactacaatttagactttgatcaactgtagtcaaggcattgttagaggaatggatagccactagagctttcagagataattgccttcctcaggtatctacacctctatggaagctctggtacacatgcaattgacaaactgttatttctttgaaattgttgtgcaaccgatatgctgaaaacaaattgtaattgacattaaatggtagttgtttttcatgggaggaaatgttgcacggtgaatggtcaatggtgatacctacctgccagctaatatcatactgcatgcagccagtggttatttatctgcaatgcgtgtatgaagtcttaccggcacttgcagtcaccaagcttagtcataggtattctatgattctgaagggtgtccagctgtctcacaaggttgcaccttggaagttatatgggtcttcctatgg

SEQ ID NO: 44189 - DNA, 1358 bp, Setaria italica
  Peptide Sequence Number=SeqID_110163
cgaaccttctgtttgtccattgcagagcagtagttgataatgtttatgcttctggtatattcgtgctaggcctagtactttagcaaactcttcttctctcttacttcagtggcactcaaacaatgtgtttctgctgtgctcatccctgactgcatgcaggttccatcatcaaagagtaccactagtaatcttggtgtgtggaactgcctgtactggaaaatcaacaatcgctacgcaacttgctcagaggctcaatttgcctaatgttctgcagacagacatggtgtatgagttgctgcggacatcaacagatgcaccacttacttctgttcccgtttgggctcgtgattttgactctcccgaagagcttatcactgaattctgcagagaatgcagagttgtacgcaaaggtttggctggcgatttgaagaaggccatgaaagatgggaagccaattattattgagggaatacatttggatccaagcatttatcttatggatgaggaaaagagagatgataattccaggacagagaaaacggtaccggattctgaaaattcaggcatctctgcagcaaggaagacagaacatcaatccaaaaatggactagccgagaacagaatgagtcccacaacagaaaatgaaaattttgtcaaaagcaaggaatgcatactggaggaaggtagaatcagtgaaggggtatcttatgctgagagccacaaaactagtactcatgattctgtgtattctcaagaaaaaaatcccaaagatgaaagtgatgggcacaaagatttgggccaaccgaagaataacactgccaagaaagataaacctgctgctgaaccgatagttgttccaattgtgctgaggatgtctgactttgatcacaaggcattgttagaggaatggatagccactagagctttcagagataattgccttcctcaggatcatcgaaaacttataaacaaccttaagcttattcaggactacctttgttcttttgagtcacagggattgaccattgttgacatatcagcaaattcgtttcctcaaacgttggattggcttcacagctatcttcttcagtgtatcgagcgaggtcttttggctgcatgttcagaaagctgcaatcaagggtgaaattgatcacatgggaggcagcacctgattccccttaaatatggaggcattttgttcaaatcaatctggctgacttgatctgttgtgctgccaaggacaaatcgctgcagcagcggtgcgtgatgtactgatagtcaatcctcatttgtattccgtattcgacaacataaaatttgaatcctggtgactgttattcatgcaaagagaagcactt

SEQ ID NO: 44190 - DNA, 612 bp, Setaria italica
  Peptide Sequence Number=SeqID_110164
agatattaccagcccttcaactgagctatttgtatctcccagaagcggttaagagatgtttgtatttgctccatgtttccgaaagattatagctttgaaagagatgagatagttgacatttgggtggcacagggctttgtggcgccagggggaagcatacgtcctgaagatgtggggattacttacttggatgaattgaggaaccgatttcttttccaaactgatccgatgttcccgaatgaaacaagatacgtaatgcacgatctgatccatgatatggcagtgtccttttctatggatgaatgcttggtgatgcatgatttaagaaaccagaacaagagcagaatgcataacacagttcgtcacatgtcaatcgaggtggatggtgaatccttgaccagaatgggagacattcaacatttgaataaattgcactcacttaggtttggaatcagatttaatgttgaaataacctggtttaatcaactttccaacattctatttttgagcctaaaaggttgcaagctggtaaagctacccgatagcatatgtgagttgaatagtcttcgttatcttgatatatctcatagcaatgtgcaagaattacccggg

SEQ ID NO: 44191 - DNA, 509 bp, Setaria italica
  Peptide Sequence Number=SeqID_110165
cgcgttccggggcacggcgccgatcaacctcacggagcggctctaccagatcctgcgctggtcggggggatccctggacatgttcttctcccgcaactgcccgctcctcgccggccggcggctccatccgatgcagcgcgtcgcctacaccaacatgacggcttacccgatctcggcggccttcatcttcgcctacgacctcctccctttgatgtggctctccggctgcggcgagttctacatccagaagccgttcgcgacctacgcggcatacctgttcgctggcatcgccatgatggaggtgagcggcgtggtggagatcacgtgggcggggctcacgctgctggactggatccgcaacgagcagttctacatgatcggcgccacgggcgtgtacccggcggcggtgctgcacagcctgctccggctcgtcggcctcaggggcctgccgttcaagctgacgtcgaagccgccgccgccgatgccggcggccgcatcaccatgcgccg

SEQ ID NO: 44192 - DNA, 295 bp, Setaria italica
  Peptide Sequence Number=SeqID_110166
aatgttgcttgaaggagtgcgtcatcaactggttctactactactacgattcaattgtcctgcgctgatcatcatcctaggttcaggggtgcttgcgtttttgccttaacttctccatcttctatgtgatccattcaactacagcagtgactttcaatgttgctggcaaccttaaagtaagacacgactatattctgggctgttgttctctccctgctccctccgctcgctgaatcaacatgcttttgtaggttgcggtggcagtactagtgtcgtggttgatcttccggaacct

SEQ ID NO: 44193 - DNA, 1547 bp, Setaria italica
  misc_feature (1456)..(1547): n is a, c, g, or t
  Peptide Sequence Number=SeqID_110167
cttctcatccggaacaggggaaggaggaggagatggaggacggcggcaacgcggcggccggcctgggcaccctgcgcgcggtgctcgccatcctccagtggtggggcttcaacgtcaccgtcatcatcatgaacaagtggatcttccagaaactggatttcaagtttcctctcaccgtgtcctgcgtccacttcatctgctcttcaattggcgcatatgttgcaatccatgtgcttaaggccaaaccattgattgaagttgaaccggaggaccgatggagaaggatattcccaatgtcatttgtcttctgcattaacattgtgctgggaaatgtgagcctgcgctacattccagtctcattcatgcagaccatcaaatctttcactcctgcaaccacagttattctgcagtggctagtctggagtaagcattttgaatggcgcatatgggcttcactggtccctatagttgggggaatactcctaacttcggtaacagagcttagcttcaacatttttggtttctgcgcggccatggttggctgcctggctacatccacaaaaaccatcttggcagagtccctactccatggatacaaatttgacagcattaacacggtgtactatatggcaccctttgccaccatgatactggctctaccagcaatgttgcttgaaggaggtggcgtcatcaactggttctacacacacgattcaattgttcctgcgctgatcatcatcctaggttcaggggtgcttgcgttttgccttaacttctccatcttctatgtgatccattcaactacagcagtgactttcaatgttgctggcaaccttaaagttgcggtggcagtactagtgtcgtggttgatcttccggaacccaatctctggaatgaatgcaattggatgtggaatcactctggttggctgcactttctatggctatgtgaggcatctgatctctcaacggcaggctgtggcccctgggaacttgccaagaaatcagatggagatgcttccccttgtggacgacaagcaagaaaaggtctagcaagttggcgtttctgaagtggaagaggtacaatacaggcagatggtatacccagagaagactggcagtggtgataggaaggttgctgggctcaaggctgcacaaggcaggacttacagtagtttcttggagacagaatatatatgtactcatgcatgcttggggcgtgtaattgggcacttcttatagaatcatttcatcgtctcatttgctgtggtatattagcctccagcatcagaacttggatttgttattaggaaggttgttttgctgtgatatgtattgaagctgcagcctgctcatcgactcgatgctctgctcgatcgatttgtattctattctcaatagcatttccaaagctgctcgatttcaatgccattaaataagccaccaaaaaaaaaaannnnnnnnnnnnnnnnnnnnnnnnnnnnnnnnnnnnnnnnnnnnnnnnnnnnnnnnnnnnnnnnnnnnnnnnnnnnnnnnnnnnnnnnnnnn

SEQ ID NO: 44194 - DNA, 242 bp, Setaria italica
  Peptide Sequence Number=SeqID_110168
caatttcaagacagacaaacgctggagtcatctgtcccgatatggacctcgtcttttttattgctccatataatcttgctcgatgaagtggttagtacgatttgagagctgaatatttcgttgtaggagattaggtcgtgcaatagtctagcgtgctggtcgagtggtcgaccaaatcccgggaacgtgctgatagtcccctctgctgcagcgagatatttcctctttcctgcatcgcctca

SEQ ID NO: 44195 - DNA, 396 bp, Setaria italica
  Peptide Sequence Number=SeqID_110169
ttacgttaatttagttaattttaccttaagttaactttagttaaccttaatttgtctttcctaaaatttgtattctaattgtagtttgagtcctttctgtatctgaccattcactctatcagttactcttgcccaccaatcatcaaaatgaattctcctcaggttgtggggaaagagcctgcaggttgtggggaaagagcctgcaggccgaccttctgcagtaaactgaaccacatttgtcgagtgaagacacatgatacttgcctaattattagcttcttattctacaacctttgttctccaatggacatgaacatgcaccgaatacatgaattagtattgtaagcatgtgttgtgtgcattactgcattgtcttggcatctggattacaggatt

SEQ ID NO: 44196 - DNA, 705 bp, Setaria italica
  Peptide Sequence Number=SeqID_110170
cactacaagcacggcagcgccgatcgcaagtacaacttgaccgaagcactcctgtttctgtcgcacttcatgggagatgttcatcagccgatgcatgtggggttcacgagcgaccaaggcggtaactccatagacctgcggtggttcaggcacaaatccaacctccatcatgtgtgggacagggagatcatacagactgctctcgctgagttctacgacaaggacatgggcaccttccggaagcaacttgagcacaacctcaccaagggcacctggtctgacgatgtatcatcatggggagactgcgaggacctcttgtcgtgcccaaccaagtacgcgacggagagcataaacttggcgtgcaagtgggcctacagcggcgtccatggaggggaaaccctatccaacgactacttcgattcgaggctcccgatcgtgtcgcggcggatcgcgcaggggggagtgcggctggccatgttcctcaaccggatcttcagccagcacaaccgtgacgttgcagcgccatcctgaccaattacaacctgatgaagccacacgcccacacttgtaacctgacatcgtctctgttgcatctatccatgctaatcccgtaattcgcgtgttacatgactcatgatggaagactagcttgagcatgtactccatacgaacaacaaattttaacgacaagtatataccaaaaaa

SEQ ID NO: 44197 - DNA, 1102 bp, Setaria italica
  Peptide Sequence Number=SeqID_110171
cccttttcaattttcctcccctgagattttattctagctgctactgcgcttagacagtgccatgcacaggaagttgatctagaaacaggtggttgatttgattgcatgctgtgattaatttttttgcttcttggctcgcctcaccacacggctagcaggcacacgcttcttgcttcctctcctagcgctagagctctgcttacacaccaccgtccgcgcccgccacccttcccgccgccggcagccgcccaccgagcgagcaagcatggatttggtctcgcagtccgagcacctgtgctacgtgcgctgcacctactgcaacaccgtgctcgcggttggggttccatgcaagaggctgatggacacggtgactgtcaagtgcggccactgcaacaacctctcctacctcagcccacggccgccgatggtgcagccgctctccccgactgatcaccacccgctggggccctttcagggaccctgcaatgactgccggaggaaccaaccaatgccgctggcctcaccgacatcagatgccagcccgagaatgcccttcgttgtcaagccccggagaagaaacaccgcctcccatctgcttacaatcgcttcatgagggaggagattcagcgcatcaaagctgcgaagccagacatccctcacagggaagccttcagcatggctgctaagaactgggcgaagtgtgacccgcgctgttcgacgactgtctctactgccacttccaacagcgctcctgagcctagagttgtgcctgctcctcaggagagggccaaggagcaagtcattgagagcttcgacatcttcaagcagattgagcgcagcatctagaccagatcaggtcgaccgatggtgcagtagcccaggatcgagctagtatcattagataaccggcctatatatcccatatcgccgttatatatatgcatcatgcatccacccatcatcctgtactgttcctgttcttgttcttgttgtgttgttggagtgtacgcacctctttaattatgaacagctgctaccctatataatatttgccgtcctattattccctatatattatgggtaagcatgcatgtgcaaaaaa

SEQ ID NO: 44198 - DNA, 1012 bp, Setaria italica
  Peptide Sequence Number=SeqID_110172
gtaaaaacactcaacttcattgatcagaatcacagaaaccaaagcagagcagagagatgaagatcagcagcggcacaatgggcactagtcccatcgtcgtcctcgcgacgctcgtcgtcgccggcctcgccgccaccgccgcggccaggccttccgcccacgccaacccaatccgcctccccaccagcggccggccgtgggagtgctgcgactacgtcgtgcgggacccgaacttcaggtcggggaggtggcagtgcaacgacgttgccgacgcgtgctccccgaactgccacgagtgcgaggcgtcgccggccggcgatggcggctacgtgtgccgcgactggatcgtgagcctgctcgagcccccggtgtgcacgccgcggccgtgggactgctgcgacgtcgccgtctgcaccagggcgtacatcccgtactgctggtgcgccgacaaggtggaggcgtgcccgggcaactgcaaggagtgcgagctggtggagtcggaccccgcgcctcgctaccgctgcgtcgaccagttccacggctatcctgggcccaagtgcacgccgtggatgatcagcaagggcaactagcccagcccactactacagtacgtccacaaataaaactagctagctagcgtacgagctaactgattgtccattccaacatggacgattagcctaagcttagctagctgctgctactctattttctgtcactaaataattgacgagaagccaataggtagtactactcggtcccatgtactgatcgatgtagtgtacgtgtagagtgtgggtatgatcagccttcatcgttgatcatatcgatctcatctttgttcgcggttccaagattgagtactctgctgctttctcgtcaagaatcaatgaagaaggtcgacacacatattactcgggaccaagtagtactcacgtcatttgttcaaggacaggaaaagtatatacttgcattccgaaaaatgcagagaacacaagtttaacaagaagcc

SEQ ID NO: 44199 - DNA, 333 bp, Setaria italica
  Peptide Sequence Number=SeqID_110173
tgattcgcctgcgcggcgggttcaggaaagcgacgcctacttcttctgcctcgaggaccgcgcgctgctctgccgaagctgcgacgtcgccgtgcacaccgcaaacacctttgtctcggcgcaccgccgcttcctcctcaccggcgtccaggtcggccaggagctggacgaccccgccccggagccgccggagacgtcgcctcccccgccgacgaagagcgacccggccccgccgctcttcggcgagagcgacttcagctgggcggccggcgtcaccgggaccctcgcggactggtcggtcgtgaacgaacagttcggcggctccctgctccg

SEQ ID NO: 44200 - DNA, 1384 bp, Setaria italica
  Peptide Sequence Number=SeqID_110174
cgcagatccatgtgaagtgggcatccctttactcggtgacaacaatatcaaagatgatggcaattatgcaatggaagagtgccgtactgaagatgacagtactaccaaccgtgttaacgggaatgctcatattgtggttgaagatgacattgtagaggtatctcatgaaaatggtagggatcagcagttcacggacgctgaaagtgctcatccctttgaagggagcgtctcttcggttgatgatgggaatgaaaagttgaatcaaagttttcaacgagatgatctgattgcagatgtcactgaaaaaatggaagagggttgtatggaagatgacaacgtgaacagctatgttcatgatattgagaatctgctgttttcaaatgaggacatttcagatagaccttgtggtaatgaagggttaatggctgattgtcgcgctggagaaaatgaagagagccatatggacgatgataatatgcctaacactgttgatgcagatgagaatgttgcagttgcagatgaccacattgcagagagagctgataatgatgaagcccctcttcattcaggtgatatggctaacgctgatggtaaggattggcagtccctggaagctgaaggtacacatctaggtgaagaagtcctctcttcacttaacaccggacatatcaaatctgaacaaggtcttcaacaaaatgagttaatatatgatggcactaaagagaaggaagaggctgatatggatgacggcaatgcaagtgcaactgttgccagtttttcaagcttgtcgtacaagaggacacaacacaaagtacctagctttaataagaacaaagaagagatatcctatggatatttagctagtcaacttcgtcagggactctctcttgattctgaagacttcaagtcaatacaaaactttattgagtcgcaagttgatggtacctcaagttctcgttcaagtgggtctcccagtcaaggggttttgggccccagaacgtcaaacaaattcaataatattgttagacacgagcacctcaaaaagatggatgaactaagagatcagctaagtaggctttctagccagagagtctcagagaaaagttttcagaagagagacccagagtaccagcaacaatccaacagctgtgatgttgagcagcttctccaaagcgttgatggtgattccattccaagctcctgtgctctagaatcctattatggtcatggaaggccgccaccaaggtaccaaccatccaatcctttctcaccagcccatgcatacacacactgccattttggacatgcccaaacacgcatacctcacaactacgacccgtgggagttcaattcatattatcaatcctcatatgctgaaagcaca

SEQ ID NO: 44201 - DNA, 355 bp, Setaria italica
  Peptide Sequence Number=SeqID_110175
tgggctatgcatatattcgcattttttaagtaagagttggatcaactaacttagttgttagacctctgctccttaattttgtttgattttgttgaaggctgtcatcaataatttttaaagattttggcacgaaacatatacctgataccgaggtacatatatttaatgaaacaacgaatatgtcaaaagtttggataagatttttccttgtaaattgcaagagaattcctatgtgttgttttttatgcttctatattcatagtgttagatgtatatgtactctttgtatttttccccattgtataaggtcatatgcatctaaacacatcggtcattcattacctacacaatagaa

SEQ ID NO: 44202 - DNA, 302 bp, Setaria italica
  Peptide Sequence Number=SeqID_110176
ctccccggcgccgaaatccccccgactccccccccccccaccccctccaggacctctcggaagccgaatcctccggcctctgcgacgatgccatccgcgccggcgctcgtgcccgcgtgcgacgcggaggagcccctgctggcggagtcgtcggaccgcttctccatgttcccgatccggtacccgcagatctgggagttctacaagaaggcggtggcgtccttctggactgccgaggaggtggacctctccgccgacgcgcgccactgggacgcgctctcccccgacgagcgccacttcat

SEQ ID NO: 44203 - DNA, 552 bp, Setaria italica
  misc_feature (514)..(552): n is a, c, g, or t
  Peptide Sequence Number=SeqID_110177
cgagatcgtcgccgacgccgtcgacatcgagcgagagtttgtctgcgacgcgctccccgtcgcgctcgtcggcatgaacggcgcgctaatgagccagtacatcgagttcgtcgcagaccgcctgctcatggctctcgggtgcaagaagatgtacaacgccgccaacccctttgactggatggagctcatctcgctgcagggcaagacaaacttcttcgagaagcgcgtcggcgactaccagaaggcctccgtcatgtccagcctcaacggcggcggcgcggccaaccacgtcttcagcatcgacgaggacttctgagctctattactggatactggttaccccgataatctttatttgttttggtcgcttgctagttctagtagtaactgtgatacatgtactccgtgacgcgtggtggtgtttcagttgctgtattactggtgcttcctgttcgtgatgtaatgtataatcgatttctcaatacaccctgcttgttcttgagctgcgaaaccnnnnnnnnnnnnnnnnnnnnnnnnnnnnnnnnnnnnnnn

SEQ ID NO: 44204 - DNA, 1331 bp, Setaria italica
  Peptide Sequence Number=SeqID_110178
ccccagccctataaatcccgcgcctccccgctccactccgtaacccacccatcccaccagaaatcctccccccaaattccccactgccccaagccaaatcaattcctccgaccgacgatgcctgccgcgccgacgctggtgcccgcgtgcgacgccgaggagccgctgctggcggagtcctcggaccgcttctccatgttcccgatccggttcccgcagatctgggagttctacaagaaggcggtggcgtccttctggacggccgaggaggtggacctctccgccgacgcgcgccactgggacgaggcgctctcccccgacgagcgccacttcatctcccacgtgctcgccttcttcgccgcctccgacggcatcgtgctcgagaacctcgcgtcccgcttcatgtccgacgtgcaggtcgccgaggcccgcgccttctacggcttccagatcgccatcgagaacatccactcggagatgtactcgctgctgctcgagacctacatccgcgacggcgccgagaaggaccgcctcttccgcgccatcgacaccgtccccgccgtacgccgcaaggccgactgggccatgcgctggattgacggcggggagcgcttcgccgagcgactcgtcgcgttcgcctgcgtcgagggaatcttcttctcgggctccttctgcgccatcttctggctcaagaagcgggggctcatgccgggcctcaccttctccaacgagctcatctcccgcgacgagggcctgcactgcgacttcgcgtgcctcctctacgacctcctccgcagcaagctcgacgagccccgcgtccgcgagatcgtcgccgacgccgtcgacatcgagcgcgagttcgtctgcgacgcgctccccgtcgcgctcgtcggcatgaacggcgcgctcatgagccagtacatcgagttcgtcgcagaccgcctgctcatggcgctcgggtacaagaagatgtacaacgccgccaacccattcgactggatggagctcatctcgctgcagggcaagacaaacttcttcgagaagcgcgtcggcgactaccagaaggcgtccgtcatgtccagcctcaacggcggcggcgccgcgaaccacgtcttcagcgtcgacgaggacttctgagttgtgaccgcgcgcggcgtattctattgctccgataatctttatttgctttggtcgcttgctaattgtagtaggagttagttcgtatactgtttcagttgctgtgttgcggtttctgttcgtcatgtaatgtactaataatcaacttctctataaactggctgttcttactcaaaaaaaaaaaaaaaaaaaac

SEQ ID NO: 44205 - DNA, 324 bp, Setaria italica
  Peptide Sequence Number=SeqID_110179
tttttttttttttttgatcacgtttgagtttatcttgttaaggaaatttgtgttggatttttattgatacagtactcttacaaccaagttcctgaccgggtacccctgaaaaaaagataaaatgacacataagtccattacaggagcatccagtgcccgttaccgtcgccgaccatcgctgcttcaacctggtcctcctccatctcccgcaatgaagaagatgacctagaataaagcttccggccgattccctattcgacgaagagtcttcaaattttcatccgttgaacgccccaggcaaacccccatttttatcggaaacca

SEQ ID NO: 44206 - DNA, 494 bp, Setaria italica
  misc_feature (3)..(3): n is a, c, g, or t
  misc_feature (475)..(475): n is a, c, g, or t
  Peptide Sequence Number=SeqID_110180
tanactaggtacttgctggtctgcctgcaggctgcagcctgcgctccggccggcttttcccccgaccccgactccgactccgaccgccagcgtgcaccgccggtccgaggtccgccgctgaggaaggaggaaagccaggggtccctagtgctttccaaatttcaccaggccaacaccgtgcgtcgcatccacgcaaataccgtggcggtggcggaagtggggcaggcgcttgcagtcgagggcggcagcggcggcgagcggggacgaaaccctagagccgcgctccagcgccgcgccgcgccgcgcacggatcggttccccctctccgttcccggcgatgaaccggcggcatgagctctgcaggaacttccagcgcggcagctgcaagtcggagcgcagtgcaggttcgtgcacgcgtcctctcagcagcagcagcagcagcagcagcagcaggtcaacgccaccgttggtcgcncggagcaggcagcagcagc

SEQ ID NO: 44207 - DNA, 585 bp, Setaria italica
  Peptide Sequence Number=SeqID_110181
ttagttaaacttgttgtagagcattttacctaatcgcttatctgctttgcaagcttctgccttgacttaggagttctatttcgttttgcagattaataccttaccgatgaagcgatgacatttatttattatcgtaatccgaactaggatggacggctcaggccaaaggaacttcggcttcgctctacagtaacgcacagtgctggaaacggataccgatacggatactttaaaatgaactgggaaggaggtgaatcaaaaaagtggctccccacggcttcggctccgcctgctacagttgcaaagtcaaagaccccctaagccataccaaatgagcccttacgaccccttacccatgtcattcacatatatcacttcccgtgttgttgttaattggacaacaataggatggcaccttgaactagtaagacacaacaagaaccacaagtatatgtcatctactactatttttggaaccaagttgtgcattaccccctcccaaccattgataacacatccctagctaaattaagccaaccaaaaacaaccacaaaacttcttataaatacggaccacttccccaca

SEQ ID NO: 44208 - DNA, 264 bp, Setaria italica
  Peptide Sequence Number=SeqID_110182
ttactaactaaactaaaattttctactaacttctagtccgtttcagcttttcagccggcttataagctaaagcgaacaggccacaagaactagtaggcagcacatagtgagtttgtagtttgacagaatttgagtcttggattgcagtgccagatccagcaatcatagaagaacccaattactaagcccaaaaactttacctctactatgttctgcaaagaatgaaaagtagttcttctaaaaaaaagggtgaaaaagtaagtt

SEQ ID NO: 44209 - DNA, 1267 bp, Setaria italica
  misc_feature (1264)..(1264): n is a, c, g, or t
  Peptide Sequence Number=SeqID_110183
cactccccctccgcgccgcgtccacctcctctagactagagcctagccgcccgcccatggcgaggccggcggcgaaggcgcggccgcctaagcacctggtggcgctcgccgtcgtcgccgtcctcggcctcgtcctcgtcgccgactacctctgggcttcgtcctcctcctccgccgtctggtcctccaggcttaccctcccaaccagccccgccgtgcaggcgccgcccgtcgcgaaggagaatacaaaggacaagaaacctgtaggttcgatggacataaatgcaacttttgcagacttgccggctccagaattagaatgggaggggatggctgaagcacctgttgcacgtttggatggtgctgctatacagattaagaatctcttatatgtatttgctggatatggcaccattaaccatgtgcattctcacgttgatatatacaatttctcggataatacgtggggtggaagatttgatatgcccaaggacatggcacattcacatctggggatggttactgatggaagattcatctatgtggtaactggacagtatggtccgcaatgtaggggacctacagctcgaaattttgtattggacacagaaacaaaagaatggcatgatttgcctccattgccagttcctagatatgctccagcaacgcaactttggagaggtagacttcatgtgatgggtggcagcaaggaggataggcatgaacctgggcttgaacattggagtctcgcggtaaaggatgggaaagcattggagaaagagtggaggagcgagataccaataccacgtggaggtcctcatagggcttgtgttgttgcaaatgataaactttttgttattggtggtcaagaaggtgacttcatggccaagcctgggtctcctatatttaaatgtgttaggagaagtgaggttgtgtatagcaatgtttatatgcttgatgatgggatgacgtggaaggaacttccacatatgccaaaaccagattcacatatagagtttgcttgggtgaatgttaataattctctcattattgctggaggaaccactgataagcacccaataactaaaaagatggtattggtcggtgaagtatttcggttcaatctggacacactggaatggagtgtgattggacggttacctttccgtatcaagaccacgttggtaggatactgggatggctggctgtatttcacttctggttactttcttgggtttgtcctgttttatttttctttattttnttt

SEQ ID NO: 44210 - DNA, 383 bp, Setaria italica
  Peptide Sequence Number=SeqID_110184
agcttctccatgcaaagggttctgttctggcacttattcagatggattcctttgttgatcctgcgccatgcatactcctcccagccatttggcaaagcatcaatatactcctttgtgagtactgttgtactgtttcgaacctgctcccatgaggccacagcttcgcacagattgaactcaaatgacaaaccttcaacctctccagtactcggatccatccacttggaaactgtgtcgcttgggtattgtatcacaactcgacagtagtccttcccactcaccgctttcagtcctagcccatttgcatccacgcacttgctgaagcggccctgcagcgcggcgagcgccgccaagtccgcctccgagagccgagcgcttccatt

SEQ ID NO: 44211 - DNA, 610 bp, Setaria italica
  Peptide Sequence Number=SeqID_110185
cgggcaaccaggcctcctccacccgtcgacgccttcccgtaggggggcggtcgctcgcctcctctcctccgcgcgccgggtcggcgtggcgtggataccttcctgtccggactcgaatctgctcctccctgccggctgaaaggatgaggaagggactacatcctcaaatgcaatggatttcatatgtgacgcaaagtggtaggctgatcaatatcatgatgacaaaggtgaaccataccggcaaagtataccacatgagggccaagcgtcaaatggctcaaagccttggccagattgcaaagttcaaacgccgatacgagcaggaagccgaggaaaacaaagacaaataggatggtggcaagggtctctgtaaccttaagcagttctgttcaccgcaagaagcaacttgctcattgaattgaattgagcaatctgaattgacttgtgaaccagaaaaaggttcttccagattgctctcccttgagttaaagtaccttttatttgagtttttagtttccatggttatgtgtcattgaacatacagcagcattattgctctgcaagtagatattcactgtgaattacttgcaatcgattctttctttcattc

SEQ ID NO: 44212 - DNA, 744 bp, Setaria italica
  Peptide Sequence Number=SeqID_110186
catgaagtagtagaaactcaaaacattgaacccactgagttctcatctcaagctagtaactacttcttactcgaatgcctcaatatccgtggcaaaacttcaaccgaagaaattatagattcctcaaaagtatctgcatagagaagcttgaaaaagagagtatgggccttggagatgttaacattgaagtccacattctcaacttgcaatagtgcgctgtccaagatagaaatttgctcttcattgcaaacaattctactcctgatatcacattgaggacaccagaaacctctcaagagaagatctaatgttgacgtgtgttgttcagagtgcttgtccaagaaaagcttgcaatggttccccacgtttttggtgtaatcagtggttccatttaagcaagatagaaaaccaagtgaaacggcaatacttttccccactttctcaagtcctaaagcaaccattgaatcaagtttcttaaacattgctccaagcatcgtagggccagagtacaacacaattatgggtagtgacataattgcctcattttgaatctcagcaattccattatggatagccaaatcaaggacttcaagatcacatccagcattcagtctattgccaagcttagcaatgacttgcatcaaaaggcattttatcttgtagtctgaagtagtttgagtgacagcatgaccatccgtcccacatcagtttcaacatgctgatgaggtcagcatatacttgatg

SEQ ID NO: 44213 - DNA, 791 bp, Setaria italica
  Peptide Sequence Number=SeqID_110187
ccatgaagcacctcctcctcccctcccctctcccgttcctcctccaccgcccatccaagccgcttctcctccaccctcgccgccgcctcggcttcatctccccgccgcatccggcggcagctccggcgaacccgcctcatcggagcccgccacggacaccgtcacccagccctctccaccggccgccgctgccccctccagcgccaagcccaccggcatcaagaaccgcctcaaggcgaggaaccaggcccgccggttccagctggatgccccgccggaggaggtgacgccgaagaagaaagctacggtggcggcgccgcggagggagaagcagcgggagcggaaggagtgggaggagatgagcctgcccgagaaggccgtggagctgtacgtcggggagaaggggctcctcttctggctcaacaagttcgcctacgcctccatcttcatcatggtcggcgcctggatcctgttccgcttcgtcggcccgtccctcggcttctaccagctcgacgccccgccgctgccgccgaccgccgtgttcggcggctcgccgtgagacgggtgagagcgtcggctgggtgttcttgcagagtggagcgctatctaggtagcttagcgtagtggataagatatatggaaaaagattgaggaagaagaggatgcaaatagcttttcaaaaaaaaagagagagaagaggatgcaaatttaagaaaacgtggcttgattgcttcgacaatgtgtgccttgttatcataatcggaggattggattgaattgtgcagtttttg

SEQ ID NO: 44214 - DNA, 457 bp, Setaria italica
  Peptide Sequence Number=SeqID_110188
tgcttgctggtggtggatctcgtcggatctcctagctgctgagcctttgaatgaggtcgttggtcaatggttcctcatcgatgcggttgctctcgagctgcgagcctctgaagccatcttggatttgtagctcccttgcaagatccggcagtaggattgatgctgtaggactgacctggagttgatttgccatgtctggctgttggattgttggaagatgcttcaagggctgacgaggtagcagtcgtggccggccggagctgcgccatgacttgacttgatctccttcaatgtggggtcttccaggtagggagaacaatgaggatgtagatcatcgaggggcgcaaccggatctcgggtcgggatgggtggccttggcgtcggaggtggcggatctggctgggatttggtggttgggttgggtgtcgccatgggagtcgcctctcaaggggttccg

SEQ ID NO: 44215 - DNA, 548 bp, Setaria italica
  misc_feature (505)..(505): n is a, c, g, or t
  misc_feature (513)..(513): n is a, c, g, or t
  Peptide Sequence Number=SeqID_110189
caaaaaaacaaaaaagataacaaaggttgtagatgcaaggcaacttcctccaacaaataaaaagatcgctgccactagtttcttgtagtgctttgcctataattttcacttgctcacagataaattaaaggttgcaacaataagcaccattatcatcatcaaacaactaagcccattgttggataatttggctcaataagttaaattactctagatgttacttcctttatttcaattcatatacaaacagaaataatgtgtttctccaaaaaagattaagaaaactacgatattgttcaaattgtccaaggatgggcagctgcaattgtaacaatgcttcaagaggtgcagcatcattaatttagtagtaaccactagacgcatgggcatagcaaaatatgagatgcacaggcgcaaccctggcaggaacttcctattttgatccttcatccttaataattcttattcatcccactataatcttcatttcataagttcaaaaccncaactttnaacaaaaaagatcacagccaaaagagccattatca

SEQ ID NO: 44216 - DNA, 793 bp, Setaria italica
  misc_feature (1)..(21): n is a, c, g, or t
  Peptide Sequence Number=SeqID_110190
nnnnnnnnnnnnnnnnnnnnnacttaatccctcgacgtttttgaatcatggtacacccggctggacatcgattatttcaaacaagcgaggagctagtctcggcacttgcagtttacagttacaggacaagcaacaaaaaacgaaggcaacaacaaaaacccacccaactgccagaggaccctctacaaaaattggaccaaagaaaatgtgcgctgagtatttctgacgctgcggacgttacaccgcagatgttagataatacaacacctcctccccttgttgaactattgttgccgatcctgtctcgggaaagatagcagggccgtgatgaagctgagggccttcaggagcggttggggtggctggctcagcttgctgtcccgaccttctctaggctgcaactggttcatttacagaatgagaaacacctgaattaaccttagctgctttgaagagttcatccaggacctcagacaatgtggggtgcgcatggacggcaagcttgatgtcttgcacacgagttcctagggcgatggcattcgacgcctcatggatgagatcagcagcatgcaaacccaaaatgtgaaccccaagaatttcacccgtgtccggccggtaaatcaactttgcaatcccatctccttcattttctgccaaagctttagtgttagccttaaagctggtcttaacaacatctacctcaaatccttctttgtcagccttttctctggcttgtggctctgtcagtccaaccatactaatctctgtggtattgtagttgtaaacttaagtt

SEQ ID NO: 44217 - DNA, 1424 bp, Setaria italica
  Peptide Sequence Number=SeqID_110191
ttaaatttagttgtaacccctaaagtaattttctacccgttgttccggtccggttacctgccggtaaatcaacattgcaatcccatctccttcattttctgccaaagctttagtgttagccttaaagctggtcttaacaacatctacctcaaatccttctttgtcagccttttctctggcttgtggctctgtcagtccaaccatactaatctctggatgagtgaaacaagcagctgggatgcttaaatgatttaggatgtggtctcttccagagatttgctcaacaactgaaattccttgtgcactggcagcatgggcaagcatgagcttgccattggcatctccaatgcaatataaattgggtaccacgttgccatctgcatccatgactcgcatccgttcatcaactggtacgaaacctcgctgtgtgacaacattgatattttccaagccaagccctttggtgaatggcgcccttcctgtggcaataagtgctgcatccacctcaagggtttctttgtgctcctttgtcttggcatcaatgagttcgatgagcacaggttttccgtcctttgctggagtaatcttgcttgcaaaaacactagtgtgatagtcgattttccgaggattaataagaactctctgggctaattttgcaatttcaggatcaaatcctggcatcagctggtcaagagcttcaacaaaagtgacctcacttcctagagctgtgtatacatcactgaactcaagtccaatgtaaccacttccaacaatagctatccagtctggaactgactcaagctttagtgcgtgatcactggtaaatacagttttcccgtcaatttcgatgcctttagggacaaaaggagttgatccagtggcaattatgatgttcctggcagtaatttctttatcagggaagccaacttttccatatcgtaccttttgctttcccacaatagtgccaacacctgtcaatatatccacgcccagagctttcattgagttcgtcaagttgcttcggattttggaggcaagattgtttgcatgatcagcaacagcttgtctatcatatccagtagaggaaacctgtagacccaaagatttcatatgatgttcatcatgaagctcccgcatccgaccactgacagcaaggagtgctttcgatgggacacaacctctgtttacacaagtcccgcccacaacatctccctcaattatggcagttttcaagccctcctcgacggcgtgcagcgcggcgccgtggcccccgacacccgcgccgatgatgacgaggtcgtagtcgaacccgccgctccccgccaccgcgccgttcgtagccgccgccgccctccccaccgccagcctcgctggcgcctgcgagatccgcagcgaggggcacgcgagagcctctccccggagcc

SEQ ID NO: 44218 - DNA, 155 bp, Setaria italica
  Peptide Sequence Number=SeqID_110192
gtggacatgccaggagattgcacataaccaacacctctggaccccatgatgtctcaggttccattgtaccagtcgttcaaccatggctaagagattctttatgctggaaagttgggaactatttctgaagactccacttaacaacacgacatagt

SEQ ID NO: 44219 - DNA, 714 bp, Setaria italica
  Peptide Sequence Number=SeqID_110193
aaaggcccaaagttattccaaaatggcgcagctgatgctggaaacaagaacggtgcaccaaaaactagttgaagagaggatagaggaatacaataaagctcgagcgcgcatcttcaatggttccatttctgcagatactgatgctgcaagtgttttgggagctctttccactggcagagatgagccagtgaatgttgagcctcctgctgatgagatcaaagtcagcacaatgaacagccgttccagggtcgcagttttcaaggatactgaaaagatcgtagtgatcctgactatgatcggaattacaaaagtatggtgttggttatgtgcaatctcctggcatgtccacaaaccagcctactgtgtactttggccaacctgatctatcaatggggtcatcttctggagcagctgtttacccacattggcccccccagcaatgatgtatccccattgctatgacaacactggacccatgatgtctcaggttccattgtaccagtcgttcaaccatggctaagagattctttatgctggaaagttgggaactatttctgttgaacttgcactatgtcgtgttgttaagtggagtcttcagatttgagccatttctattacaaaacttcgtgtagtgtcgaacgtagtttgtataaggagtcctaattcgatgaaactattattgtgaactaaaaaaaaaaaaaaaaaacaaaaaaa

SEQ ID NO: 44220 - DNA, 838 bp, Setaria italica
  Peptide Sequence Number=SeqID_110194
ttcttttaagttttgttctattcttattcttaaaggtccctaaagttatttcctaaaaattggtcgcagctgatgctggaaacaagaacggtgcaccaaaaactgttgaagagaggatagaggaatacaataaagctcgagcgcgcatcttcaatggttccatttctgcagatactgatgctgcaagtgttttgggagctctttccactggcagagatgagccagtgaatgttgagcctcctgctgatgagatcaaagtcagcacaatgaacagccgttccagggtcgcagttttcaaggatactgaaaaagatcgtagtgatcctgactatgatcggaattacaaaaggtatgttaggagcccagtgcctgacttcagcttgaaccctggtgccttcaacttttgttgtacctcaatttatgcagtatggtgttggttatgtgcaatctctggcatgtccacaaaccagcctactgtgtactttggccaacctgatctatcaatggggtcatcttctggagcagctgtttacccacattggccccccccagcaatgatgtatcccccattgctatgacaacactggacccatgatgtctcaggttccattgtaccagtcgttcaaccatggctaagagattctttatgctggaaagttgggaactatttctgttgaacttgcactatgtcgtgttgttaagtggagtacttacagaatttgagccagaaccaaattaaaaacttcgtgtaagtgtacgaaacgtaagtttagtaataaggaagtacctaaattacgaatagaaaactaattaattagtagaaactaaaaaaaaaaaa

SEQ ID NO: 44221 - DNA, 708 bp, Setaria italica
  Peptide Sequence Number=SeqID_110195
ccgccgccgtagccgccgacgagggcgcgcgggcggcggaggcggtggtggccgtcgacgagagggtcgcctccaacgtggacccgttcctcgtcgaggcgctcgacaaccctcgccaccgcctcatggttttacggatggaactggatatacagaaatttatgcagaaccctcagctgcaagaatttgaattccagaactttccaacttcataccttcgctgtgctgctcatcgtgtcgcacaacattatggcttagagactacagtagcagatagtttagtagatggttcagttagcaggatagttgcaagaaaaacaccggaaagcagatatccaccgattgctttatcagaagtttccagcaaacaagcaagaaatgaccatgaagcagcagagaagcttaagtttgtcatctatcaaaggcccaaagtattccaaaatggcgcagctgatgctggaaacaagaacggtgcaccaaaaactgttgaagagaggatagaggaatacaataaagctcgagcgcgcatcttcaatggttccatttctgcagatactgatgctgcaagtgttttgggagctctttccactggcagagatgagccagtgaatgttgagcctcctgctgatgagatcaaagtcataatgttgaacagccgttccaggatcactacgatctttttcagtatccttgaaaactgcgaccctg

SEQ ID NO: 44222 - DNA, 1164 bp, Setaria italica
  Peptide Sequence Number=SeqID_110196
ccttcgctgtgctgctcaatcgggtcgcacaacattatggcttagagactacagtagcagatagtttagtagatggttcagttagcaggatagttgcaagaaaaacaccggaaagcagatatccaccgattgctttatcagaagtttccagcaaacaagcaagaaatgaccatgaagcagcagagaagcttaagtttgtcatctatcaaaggcccaaagtattccaaaatggcgcagctgatgctggaaacaagaacggtgcaccaaaaactgttgaagagaggatagaggaatacaataaagctcgagcgcgcatcttcaatggttccatttctgcagatactgatgctgcaagtgttttgggagctctttccactggcagagatgagccagtgaatgttgagcctcctgctgatgagatcaaagtcagcacaatgaacagccgttccagggtcgcagttttcaaggatactgaaaaagatcgtagtgatcctgactatgatcggaattacaaaaggtatgttaggagcccagtgcctgacttcagcttgaaccctggtgccttcaactttgttgtacctcaatttatgcagtatggtgttggttatgtgcaatctcctggcatgtccacaaaccagcctactgtgtactttggccaacctgatctatcaatggggtcatcttctggagcagctgtttacccacattggccccccccagcaatgatgtatccccattgctatgacaacactggacccatgatgtctcaggttccattgtaccagtcgttcaaccatggctaagagattctttatgctggaaagttgggaactatttctgttgaacttgcactatgtcgtgttgttaagtggagtcttcagatttgagccatttctattacaaaacttcgtgtagtgtcgaacgtagtttgtataaggagtcctaattcgatgaaactattattgtgaactagtctggaactgatggtccttgtctagtgctcgtctgcccttaatttcggtttagggtaaccgtgaactgcctggtggtggctcgaggcttcctgccgctgccagttacttgggttgatcgttattagtagtactagttcatagagaacatggtagaccaataaaagttttaggttggaatcagtctttacgt

SEQ ID NO: 44223 - DNA, 286 bp, Setaria italica
  Peptide Sequence Number=SeqID_110197
atcaacttggcttacaagctaatctttcctccgccgccactccgttcttcctttctccttgccgttgatcccaaactcctctttggattcccttcccccactatctgctgctaacaattggtatcagagacaccgatttctggtgaaatttgctatcaatcgagttctgcatcccttgattcgcactggcaatgagtttggttcgtcgatctgaatccgtgttcctccgcggatttggttcctgtaattccggctcacgctaggcgaatccatgtgacctcgtcaa

SEQ ID NO: 44224 - DNA, 637 bp, Setaria italica
  Peptide Sequence Number=SeqID_110198
cttagcacaagtgtcgggctcccctttaaaaactttccttttttcttaaagggtgattcgtaggaagaaatcgacgatggcccatatacaccaccttccgacagtgtttcaaatacatctagacagtgggtgaatgcccgatatcctttgttcgtctgtcccgataggtttactaagtgtaggccaatcattgatggttaccaaaagcaatgctttgagaatgaaagtctcttgtttgtcgttatcccacacaggtacactttcttccttccagaatagtaaaagttcatcaaccaatggtcttaggtacacatcaatgtcgttgccaggttgttttggaccttggataatgattgacatcatgatgaacttgcgcttcatgcacaactaatacggaaggttgaagatatatagggtcacaagccatgtactatgagcactaccgaactcaccaaatagattcattccatcagtgcttaaaccaaaccttatcttgcttgcgtcattctcaaagcatggaaattctctgtcaacgtttctccactgggaaccatctgcggggtgtcttagcttctcatcttgcttacgttcttctttgcgccatcgcatcaacttagcgtgcgccttatttctgaac

SEQ ID NO: 44225 - DNA, 421 bp, Setaria italica
  Peptide Sequence Number=SeqID_110199
ggggatggggatgaacttcgcaaccttctctggcacttgatccttgatcaaattgatggcaaaggaaatggcgaagaaaatgtagcacagtgtgaggcagtgctttggaagcaaggacaagccatccacgccaaggatcgccatattacgatacatgatggtgtaaggtgctggataagcgccatcacttgcaccaatgtcaaaggacttgtaaaacaaccagaagacacagggtgcaataacacagcccatggctgtgcctatcacttggctgatgaacattgaccttggcgaggccagagtaaggtaccccgtcttgaagtcttgcatcagatcagaggctgttcccacaatgctcatcatgacaccacatgcagctaatcctacaagcacaccaccatgcgaagcacctgcccacgca

SEQ ID NO: 44226 - DNA, 1313 bp, Setaria italica
  Peptide Sequence Number=SeqID_110200
acaatgacaactatccagagaccttataccaactgtacatcataaatgctggccaaggtttcaagatgttatggggtacaataaaatcatttcttgatccagaaactgcttcaaaaatccatgtccttggaagcaagtaccaagctaaattacttgaaatagttgatagcagcgaactcccagattttcttggtggcaagtgcaggtgtgaagaacacggaggttgttcgaaatcagataaaggcccttggaaggaccctgaaattatcaagagggtcctcaatggtgaagcaaattatggtcggcgagttcttgctgtatcaaacatcaatcagaaggaagttggctgtactgagcctcaacacacaactggaaagggaaatgatgcgtctgccgaatctagttctgaggtggaagacgtttcttctcctactgcttcagtgaaccccatcataatccctaatttgacccatgttcacgagtcaaaatttccaggacatgcttccacatctgatgctcctcccattgtagaggataacatccctgttgtcgacaaggttgtggatgcatgctctgatccaagaaacagctccatggcttccacctcaggttctttctccttgagaaatacacctgcaacactgggaggacttaaaactcaaattgttgcgtggttgacagtcttaatcgtgagccttttggcattccttcgttctgtcccgagcataatgactaaaaggctcacaaatcaggtcattacttgtgatcactatagtgccgagtaccctcctcaaggaaatacaggaaatggtacccttacatctgttttaagacggctaggtgaattggaggagaaggtacagacacttgaagtaaagccacaccaagtgccatttgaggaggaattgctaaacgcagccatccgccgtgtggatgcattagaagctgagctaatttctatgaagaaggccctttatgaggctttgattcggcaggatgagctgcttgcctatattgaccggcagcagcaagtcaagttttgcagaaagaagttgtgcttctaagtactggagcacctgccgccaccttttccccttctcttccgagatggcgtgctgctactgttgatccagaatacttacaaatgttttcatttttccttgtaaaatattgtaattattagaaatagataggaatgagacattgagtagctgggccagccacaacttcttgtgagatcttgtttcagcaggaaaggaaaagaaagtttgagatcttgtttgcatgagcaaggtcgaccgagatgcaggctt

SEQ ID NO: 44227 - DNA, 388 bp, Setaria italica
  misc_feature (22)..(22): n is a, c, g, or t
  Peptide Sequence Number=SeqID_110201
tcatatcctaaacttgtattangtttccaaaaacttccaattcacaaataataaaggttttatatatcctctactttcaaacttgtaagttccatatacaaaacttataatttagatttagaaaaatattttatctcacatattcaaaactttatatcttctaactttcaattcaaatattcaaaacttcgtaattagatatcagaaacttagaaactgcatacactcaactttctacctccatagctttcaatttacatatttagaacttcatactcaaattttaaaaactttcaaatcacatacatgattctttctacatcccgtctttcaatcaacttttattaaaacttactattatttctaaatttttcttaaaggtttctta

SEQ ID NO: 44228 - DNA, 1997 bp, Setaria italica
  Peptide Sequence Number=SeqID_110202
tagtctaattggtcgttgtccttcggtctaaaccaaagattcatgcttccactgaaattaccatggacagctcttgcattgccgatgctcctagcaccgagcatggcagaaatggcacagggagcaatgagagtggtgatgtcgtgccacctgagaagaatgatttggaggttgagaataaagagagcaaagatcatcacgattttgaaggccaggataccaactcaaggatggaagatcctgctgatctggaaaactccaatggaaagagcacatgtggagattctggcgaagtagaaaaccacatcatggaacaacctgcagagaattcagagacttgcagagtaagagaagatgatggtacggaatgccacttgaatgcttctgaaaacaacatgctttcttctgagatgagcaaagcagctgtcaatatgcaagatgctgagcagaaggaatcaagccaagagcagaaggaatcaggccaagccgagcatgcagcaaacaagaagagttatcttgtgagggtactgtctcggtcttgtgatctccgagcaacggttaactcgcttgatttccattccgcacggacttctcttcagtcaaaaagcttcagagcaagtgaacctctccaatcgaagatcatgaacacggtggatgaactgaaggacgacctttctgaattgttccataaaccctcagaatccaagccgaaggcttatcctccacgcccttccaaacaagatggccacatgactcgtgcagcactcacatccagtgcaccgcttgcagcataccatcctgctgccaagcattctggctacgcagctcgcataagcaggtctggccaggtcgctccccgtggcctgccctcgctgcgttaccgccggcacagggtttatccgtgccatcacaacgtgcaaatggaaatgagaccctgccgtcacgagtgctgccacagctgccagccaccctgttacagatcctgcaagcaagagcccgcggcgatgcacaagccaccaccggccaaggagatcaagcgccgccccgtgcccagaaaccactgccggccggtcctccgcggtgccccgttcgtgatctgctccaactgcgtcaggctcgtccagctgcccaccgacttcgccgtcccgagcagagggacgcgccggctccagtgcggctcctgctccgaggtcctgtcctactcctacagggacctggtctaggaagaagccgcagtcgccgttcgggggcgacgagtacagcacggacgactacgaggcccacgtccaccaccaggccgctgccgacgaccaccactacgccgccgccggcttcgagcaggcggacccggtgtcctactcggaggagtacgggctctcgttcggcgtgagccagtcgaccagcaccgaggacgggcagccgctgtacgtgtcgaggaactcgtccttcaacaccgtcgacgagagggcggggggcagggacggcaagctccaccggctgatggggtactcgtcggcgagcgagctgctgcgccactccccggacctgttcgagagcttcgacgggcgcgcgcccaacaacgcgagagcgcatcatgtcgtcgacaggaagggcaaaggcgtctgccatggaggggaaccagacgatgcggggaagcgatcgatggccaggagcggtggcctgccgctccaggggatcctgaagaaggggatccatagcctggaatcgctcaagctcaggtcgtagatcacgcagaccatttgttgcttggcaggagcgcagcgagtttaggaggtgacagcacaaaacatgacagccaacaggtttagatttaggcttagtcgctggcgttctgatgggtgttttctagtgtggttaggcattctgatcggtgtgttgagtttgctttgcagttcatctgtgcttgaagagttggttggtttggcaattttttgtgtgctctttgacgtgtgtatctatgtagggtttgcactcgg

SEQ ID NO: 44229 - DNA, 743 bp, Setaria italica
  Peptide Sequence Number=SeqID_110203
gagctcccgcggcgcggccgtcgtgtgccaggcccagggcggccaggacaccgccatccaagttcctgatgtgagcaaatctacctggcaatcgcttgtggtggagagcgagctccccgtcctcgtccagttctgggcctcatggtgcggaccgtgcaaaatgatagaccccatcgtcggcaagctctcaaaggagtatgaagggaagctgaaatgctacaagctgaacactgatgataaccccgacatcgcgacccagctcggcatccggagcatccccacaatgatgatattcaagaacggcgagaagaaggaagcggtgatcggcgccgtgccggagagcaccctcatcacctgcatcgaaaagtatgtcgacgggaggtgaaatctgaaaccgagccggttagccttggacctctatgtgtagatggatgggtatgagtataccgtttgtcattaatttgctcttaaagtagccatatgtagataataatgtgagataacatcgaataaaagcgattcaaggatgagaagtcatggaagatggcccagaggttgcttctggtctagctcctccatgtttcattcattgggttgtgctactgtatgcagatctgctaaatcgtacagcatcgacctaatcctttatctgaatttccttatgaaagttttggactgagttaatggatcaggagctgggcctggatgctatgtcggtaatgctttcgtgggctttgcaggac

SEQ ID NO: 44230 - DNA, 656 bp, Setaria italica
  Peptide Sequence Number=SeqID_110204
gtcggtttgcgggttctacccggaaaacccggcggcggcggcggcggcggtggcgaagcggccgcgtgacggcatggctcgaggcttgagatggagtggggcgcaggcggccgaagcatcacgagagtagtggcggaggtttcctgtctcgctaggtggacgaggactcaccctagcgtctcgcaacggatctcgacgctaacatctgaagctttcaaggttctctctcagctctcgatccgactgaactgaacaagcaggtcacctcctatgtcttaatctttctctgggctcgattctatcttgctcttatttgctccttgtttcgtgggttgtctgtagccttgaacggtagttgaactcgagttgaaatgttcagatcgggattaggatagtttgcaaagaccaaagaaggtacagttctacgggcattgcctacaatccgttggatcgattcgttcttgtggtagtttcttgtcatgtaggaatcacaaatgattaattcgtccttggggtaacttccatagtagattggctacgatccgtttcatgatggatctttctatgcatgtacttgttccaactcaatagtgcttcctaccgaatcagtttgtgcaaattttttcaaatgttggtgttacatccagcttctaact

SEQ ID NO: 44231 - DNA, 419 bp, Setaria italica
  misc_feature (349)..(349): n is a, c, g, or t
  Peptide Sequence Number=SeqID_110205
tagtttaggtaagtaaggagacttggagcggagcagaggcgacgcttgccggcgatggctagttccgtcgtcgacgccgcgtgtgccactaccgcccgacggcccgacctgcggataacgccatcatcctccaggcgttcgtgtcagcatacactgatccacgtcgagcttctgcacgtcctcgccgtacgctgtcaggtgcctccgccggcggcggcgatggctgcgaacttggctcggagctgcgcccttccttcatcccccgtgacagccttggacacggtaccctccgcggggagcgtgccggtcctcatccgcgcacagcaaggagcgcagcagacgcaaaacncaagacaaggcagaggaaccatggccgggccatcgtggccatcgcagagctacgcgagactgctggttcg

SEQ ID NO: 44232 - DNA, 357 bp, Setaria italica
  Peptide Sequence Number=SeqID_110206
gatggacttactagatcgtgggacaataccacggattgctgcaaatgggaagggattacctgcagctcagataataccgtcactggtatcttcctagcttctcggagccttcaggggcacatctcaccatcccttggcaacctcgccggcctgctacacttgaacatgtcccacaacttgctgtccggagtcctaccaatggaactggtgtcctccaacagcatcattgtgctcgacgtcagcttcaaccaactcagtggaaatttgcaggaactgcaatcttcaacactacaacctctgcaggtactgaacatctcaagtaacttgtttaaaggacgttttccatcaaccacatgg

SEQ ID NO: 44233 - DNA, 387 bp, Setaria italica
  Peptide Sequence Number=SeqID_110207
ggggagtgggggagaggagggaggaggaggtgaggaggaggagcaggagcaggaggaagcaggcgctggggacggcggcgggggcagtgcgcgcgcgcctgcgggagagcgccataaaatggggagcgaggcggggggtttaaccggagcggggctcggccggcatgccgcggcagttggggatctcggtccgtggacggaggcgggttgaggcggtcgtgggggctcgtgacgagatgcgcgggggcggaggactcgtgggcggctctgctcggttcggagctcggaggcagcaggactcgggggagaagagacgactgggcttgggttgtggtgggcggtcggggtgggcgcttccgttccttcgtttaagttaattggtccggt

SEQ ID NO: 44234 - DNA, 1732 bp, Setaria italica
  Peptide Sequence Number=SeqID_110208
gacggtgtgttgagtcctaattttccaagagaggaagaaaattgaaggaactagtagagatgttttgtgctttcatagtttcatcagaccaacttcgcctgtgaacaatattacaaccagcaaactataagcttccaccttatggtctaaaggatctctagctaccatcaccaagttccttgaggttacttcttcacttatcaatctcaaaatttagagctttggataaatacctgtcacaccttttctacttacctagacaacctaaagcatggtgttccggaaagcggaaatcagtcttggtgacaacagcaggatgaatgccaagatcgaaccgaagaacatcttggtcaggtaatgcatcaggtcaatatcagagtcggtgtcatcaggcttcctggtcacgagtgctgaggcagagggcagggcttcgacaacagcatcagcaaggtccgatatgaacgaggaagtacatccaagagcaggaaccctaccccagttctcgattccagattccagggccaactccttgtactccatgtcgatctcttccaatgtctcaatgtgctcgctcacaaagcttactggaacagctaggaggctctttacacccttttgaccaagttcaactaaaacttcatcagtatatggcttcagccattgaactggccccacccgactctggtatgcaagagtgtgactgtttaagattcctctggatctcaactcccccatgatcaaagcaatacaatcctccatttgatctctgtaaggatctccagcatcctcaacataagtaagtggcacaccatgtgcactgaagaaaatcataacctcttcaggattggaaaaggcagatatctctttctcaattaagtcagccattgatttcacatagccatcacgctggtaccatgattcaatgatggaaattggcaagccagcaaaaaacgaatcttccttgacaatgttttggagaacacgaatgcttgatccacttgttgatatggagtactgagggtaaagtgggagaacaacgagcttggtaatcttatccttcttaatctgctcaatggcttcttctgtgaaagggtaccaataacgcatcccaacataaatatttgcttgcaagtttttcttttccagtgcaatcttcagagcatttgcctgctcatcagtaattttcctcaatggtgatccaccacctattgaagcatacccctctttactcttaggagctctaaaagtagaaataagtttggccagtggtctttgaagaaacctgaacagcctaggcagtcgaatgatatctggatcagcgaataggttgaacaaaaacggttgaacatcatccagggtctctggtccaccaagatttaacaggagtactccaattttttcttcaacaacactggaagatacacctttggcatcatcaaaagtgttaaccacatttgcagagctacacctaacagagaggttccgctgctttttaagtactggactagcgttagccaaacaagaggatccatttgctgctaattgcaatggcttaacatcatgtttggtagaaccagcaaaacttgttgaagttgttttgccacatgacgtcgcggccgcggacttgatccccaagatttgcccggccccggcggcgcacctggagccaagaaccccgcgctccatgatcctccttcgtgcaggggtattttaatgagacaaaagaagaata

SEQ ID NO: 44235 - DNA, 1570 bp, Setaria italica
  Peptide Sequence Number=SeqID_110209
cggccgggcgctggtccccggttcttggcaccatcggtccatcgcggaccaaggcagtcagggcaaggcggatccggccgcggcggctccgactccagcggggtctggagaagcgaggacgttggtcaaacaggatcttggaagcagcgccggcggcggcggcggcgacgaggagccggagatggggatgcgggattttgcgcgcgcgcaccacgtggcgtttttcgatgccatggccaccgagctccccgacgactacgcctcgcaggaggtcaaccacctcacactcggttacttcgccgttggcggcctctcgctccttcgggagctcgaccgggttaacaaggatgaaatagccaaatgggttttgtcttttcaagttcatcctgaggcacatggtgatgaggacaatgggctgttttatggattctgtggttctggatcaactaagtttcctttgcctaatgtgaaggaaccttgccacagtggtagtcatcttgcaagcacttattctgccctctctatcctgaagattgtaggctatgatctagcaaatattgatagcaaggcacttctaggtcagtctatgaaaaagctccagcaaccagatggaagcttcatgcctattcatattggtgcagaaacggacctgcgctttgtgtactgtgcagctgcaatctgctcaatgctaggtgactggacaggaatggacaagttaaaggcaaaggaatacattcttaactgccagtcatatgatggaggctttggcatggttcctgactccgaatctcatggtggaggaactttttgttgctgttgcagctcttcatctaatgggctttctgcaagaagatttggcatgtaacttacgagattctgcctctattgacatacgcatgctccttgagtggtgtctacagagacaagtgactgatggaggattccaagggagaagaaacaagcccagtgatacctgctatgctttttgggttggtggtgtactgaagatcattggcgcttaccatttgattgatcgttgtgctcttcgggaatttttgctgacctgccagtcaccttatggaggctttacaaaatttccgcacattcggatcccagacatctaccattcttactacggcctggccgcccttgccttgttggaagaggaagggctcgaacccctctgcgttgaactggggatcctctccgctgcattgtagaaatttgcatttctagcgaatctgattagtctatacagtgtttttgaaagtcaagtcttgtaatgtagtaccatatacaggctatacagctgaaagccgaggaagtaatttacagatggagtaagttggtctagttttttatcagtgtgcttctttggatgggcagatcatataacaatagttttgggtgttctaaagatatgtgatagctgagtgcaatggacatgctaaccgaactgtcatcgtcccagttggttgagctaattgttgacagttgagttagctgaacggttttattatcacttggaaagctacacgaatgttcgatgtttcctaaaagtcaaaaatta

SEQ ID NO: 44236 - DNA, 499 bp, Setaria italica
  misc_feature (473)..(473): n is a, c, g, or t
  Peptide Sequence Number=SeqID_110210
cgccgctgcgagggctggtaccgcggcgccagctcctcctcggcgtcgtcgtcgtcgtcgccgaggctctcgtcggaggtgtcgtcggcatcgtcccgaccggcgccgccgccaccgccgttgagcataagccgctcgccacggcgcctctcggagcgcggcgagtccctgggggccccgccacctccgctgccgccgccgttgctcctaaggcgcctccgcggctgcggcccgcccgcgacggacacgccgcccctcctgctgtcccggatcctgtccatctcagatctgagacatgcggcgccgatccccggaaaatcaccgccgcctcgccggattccgacgagcaccgccgccgcgcggcagatccgcggatcagcgcctcgggaatcctcgcgaatctagcagcgccgccgagggttcggcggaggggagagctcctcggctctcgctcttcttcctctcgccccctntacaactctactactacttggcttct

SEQ ID NO: 44237 - DNA, 1434 bp, Setaria italica
  Peptide Sequence Number=SeqID_110211
caagattcgccaagaagaagagaggagaagaagacctcaagctgccaagtggagaacattcgagcaagcagcggcagagatacctcgcgcgcgcaagctttccttcccagctagctagcgagccatggcggcgctggctcaccaggtgggcgccaaccagccgccgctgctctcatccccggcccgcctcccacggagcagcaatgcgaggctgctggtgctcccggcggcggccgcgtccctcggcggacgcggcgtgaggctgggcgcgcggagggccgccgccgtcgtcgtccgggcgtcgtcggaggcgaaggcggaggcggagaccaagacggagggcggcggaggcgaggaggaggaggagcgcccgtacgaggagtacgagatcacgatcgagaagccgtacgggctcaagttcgccaagggccgcgacgggggcacatacatccaggccatcttccccggcggcgccgccgagaagaccggccagttcaccgtcggcgacaaggtgctcgccaccagcgccgtcttcggggatgaaatctggccggcggcagggtacggccaaaccatgtacagcatccgtcagaggtccggccctctatacatgaagatggagagaaggtttggtaagtgggatggtgctggtgagctctccgagaaggagatcataagagctgagaggaactctggagtggtcagcggcagggtgagggagatccagttgcaaaactaccagaggaagatggagcagaagatgcagagggaagaggacctccgcacggggctcaggctgtacaaggatgggaagtatgaggaggcattggagaagttcgagtcagttttgggatcgaaaccggagagcaatgaggcttccattgccagctacaatgttgcctgctgctactccaaactcgaccggatacaagcagggctttctgcattggaagacgccctgaaagcaggatatgaagactataagcgaatccgcaccgacccggatctcgaaaacttgaggaaatcggagcaattcgatcccctgatgaagaactacgacgagtcgttcatcaacgagaacgccctcaatgccatcaaatccttgttcagattcggcaagaactgagcaactgaaacatggtagcagcagcaggcaatgccactcttgtctggtcttgcagagcctactgtgctaagctcatgcccgtacagttcgttcccctctccagtaggttgcggttcacacctgtagcttagcaattcttggtgagacatgtacttaaccatttgatgaagatacagtatgtaattccaaatgacgcatctgcgtgtgtaaaggcaaatgtgcagtagctgtgcttgttaaggtatgccaaatatgttaagcatgaaccaaaaggcgaatatatttttcgatgaacgcatgaaaaaaaa

SEQ ID NO: 44238 - DNA, 393 bp, Setaria italica
  Peptide Sequence Number=SeqID_110212
tttctttacttaagttctaacagaaatggcggccaagtgcgctgccgccgcggccgatctggccaccggccgcccccgcaagcgcccgaggcttggctgggacgtggcgccggctgccgaggtaaacgcccctttttaccgactcccctgctctccgatgtgcagtttaggatacgttttgcctagatatggcatccccaggaggtgatttcgcatggatcaatcatctatttcggttagcttgatttcgcatggatcgatcatctatttagctacctatgtcattaccttgttatgaattgcggataaatgaagattctggatctaggtctagttgtttaatttagagtccggatctgtagagtttctagaactgccttgcaaaattagcat

SEQ ID NO: 44239 - DNA, 417 bp, Setaria italica
  Peptide Sequence Number=SeqID_110213
cgaagaatatacaactgaagctttagtgttagtcattttgaattcggcgctgttagtgcccagacgtccgatgggaagttttccatcggacgctctgttgcaacaccaaaacaaaacacttgcaacatcgaaaatctatttttgcaacatcgagacagataaacaaaatagatctatatatttcgagaggaaaattcccaccgcaacattagtgcttgtttcatgcaacattttcatgcaaatcatgcaggactggttgagtttaaacacatataaatgaaacactacaaacaaaacaccgcaacataaagaatcaatagatgaaacatcaaaagccaacaatgttgcaagatgcatacatttgaaacttcttagaacaccttgtgcaccatcgagaaaatactaatagaacaaaag

SEQ ID NO: 44240 - DNA, 645 bp, Setaria italica
  Peptide Sequence Number=SeqID_110214
tggttaagttattaaggtaaccgtgtccaaaggaatataaggggcaaacaatgaggacagccaggatgccaaggtagcagaagctgatgaaatgaagatcattagagcaaagacagatgttagaaatgcagaggtgcaagaaaatgtgaagaaggaacaaacggaggacaaggttgaagagaacaaaaataacaccaataatgaagatgatgacgtgaaaactgttgacaaggaggctggatgtcagaaagaaggcgaggggaaataatgaggatggtcatgatgccgagtttgcagaaggtgatgaaatcaggatggaagaaatggaggacaaggtggaagagaagaaaaataataacaataactagaaagatgatgacgtggaaaattttgacaaggaagttgcatgtcagaaagaagatgaggacagtcacgatgccaaggtagcagaaggtgatgaaatcaagatggttgtagcaaaaactgatgctggaaatgcagaagtagaaggaaatgggaaggaagaaaaggccgagaagaccgaacaggggaaaaataatgccaatattgaaactgaggagttaatagttcttgacaaggacgatgcatgcatgaaggaagataagaaggtaatgaatgtggata

SEQ ID NO: 44241 - DNA, 458 bp, Setaria italica
  Peptide Sequence Number=SeqID_110215
aaagggaagaaaaattaaactaggaattactaagactgactgactttttaccttcataaagctaggctaagtacttgaacaactcttcatcctcatctgttggacacagtggctaacagctactctctttttgcgaaaagactaacagctactttatatacgatttcttggacgcttaaacatttttggttgatttgaaatgcatctataaatgccttgctaaatggtagataacaaggctcagaaaatgtgtaagcatatttgttttgatgagatctgctaaggcataggcaaatattagttggacacagataccaacgctgcatacgagcgatgcatgtcatgatatcactgttactgtttatttcatatgatacatatacatttattttgacatgtgcttatattgtagcaactttgcgtctttatgatccgtgcctaacataacactactggcc

SEQ ID NO: 44242 - DNA, 1010 bp, Setaria italica
  Peptide Sequence Number=SeqID_110216
cgacgacgacgactacttcgccaccaccgcgccgccgcccaggcccgtctggggggccggaccgccgcggcgacgccaaggaccagcgccacgacgcacccgccctggaagaggattttgagagtgaagatgatggccttgatgatgaggtcgaggatgatgctgatgaggaacatgagcatgaagcagaaaatgccgttcctgctgaaccaaccgtgaacaatgctccacctccacctgcaccatccaaagatactgaaagacaactttccaagaaggaattgaagaaaaagagcttgcagagcttgatgctgttttggctgagctgggacttggcacatcaaccaattccactcaagatgaatcaaatggtaagaaaggtgcagatcaagtcaccaatggagagaaaaaggaagatgcacctgctcctccagagagtaagagctcaaagaagaagaaatctaagaaagacaagtcttcaaaggagtcaaaggaagcacaggatcaggccaatgggtcggaagaagcagctggtgcagaacctgatgaagatacagcttcagtggacgtcaaggagcgcataaagaaggtagcttccatgaagaaaaagaagtcaagcaaggagatggatgcagcggctaaaatcgccgcgtccgaagccgcagcaaggagcgccaggtttgccgcagcaaagaagaaagaaaagagccattacaaccagcagcctctgcggtgaactgcccttattttggatctctagaaaacttttgagctctgatatccccttgttcgttttcgactccgcaataagttttgagatgccgtgtttatggcttagtgaggtgtcatctgatgctcgctttgtgaattatattaggtatagggggcctaattgtcgctggattctggatgatggtgtaaatgggctcagaaatgttcgtcataggaaccttgctgactatatggaaaatatgggatattagaataaaacctaaaaaaaaaaaaaaaaa

SEQ ID NO: 44243 - DNA, 607 bp, Setaria italica
  misc_feature (1)..(32): n is a, c, g, or t
  Peptide Sequence Number=SeqID_110217
nnnnnnnnnnnnnnnnnnnnnnnnnnnnnnnntttttttttttttggtgcagcggcgaggcggtgatactcaatttctaacaagcatgtacttgtctagcatcaaggtccattgctaaacagcaccatcgtcattattcttttacactacgagcgattcttacggcgctttgaaccgaagttcgaggcccacatgaaaaggccggcgatgccggccgctactccaaatcctgaccggatgtctgcaatcaactcacgcagatctctcacggtgctagccagcaacgactcctctgccaggttcttctgattagacatcctccgtgcggttcctggcaaggtagggggcatccgctggggaagttgagcatcggctgtatgaacgatgctcatggaactttttacaccctttgtcaattcttgacttagatcactaagatctgcagctaagtcaccgacctcccttccaatcagtctcaatgaagccatagtttcaggaagtttttatcttgctgaatcaaagtatttctcgagaaactctgcctcgctctatgctggcatgtaagagggaggcagagtttctcgagaaatatcttgctgaatcaaag

SEQ ID NO: 44244 - DNA, 431 bp, Setaria italica
  misc_feature (378)..(431): n is a, c, g, or t
  Peptide Sequence Number=SeqID_110218
gacgaagagacaacacgcagcaatacaataacaagaaaaaaaagagagagaaagaagaaaggaaatgaagaagaataggaactcacttgaggattggttgcatagttcgtagccatttcaggtttggtaagtccctagtcaatatttgtgtcgtcgaagcctgtattctggtggctagctacttgcattggattgatctctttagtatatcagttgcatatgatcgtgtcgtctgccctgtcttttggtgcatgacacatttgaggtagaatgtgtcagttttgctggctccatagggcatatatagtctatagagttatataataatatgatccggttaatcttgtgtggcataaaattctatgcctcgttgagcannnnnnnnnnnnnnnnnnnnnnnnnnnnnnnnnnnnnnnnnnnnnnnnnnnnnn

SEQ ID NO: 44245 - DNA, 423 bp, Setaria italica
  Peptide Sequence Number=SeqID_110219
ttcgctccttcttcctcgcctcacctcgccaccattcttgcatctcttgcacacagttcttgctgctcttccgcatgtgtctctctctgctcatccatttctagcaatctagataaagagttaatgctgctcttttgagagacctactggacaccgcttccccacccattacgccttagcccaacctcgagaaaaacctttgcagcatgtaacgcagtccctatccgaaatccaaacccaaccccaaaaaatcacaaaaaaagaagaagcaactttcaagatctccaaaagcatcggcggtgcgaagcaaagcgtaagttggtagactggatacacccccactaattccttagcacaaaaccaacaaaagcctccggatcatgtaagtttcgccactatctttgcttgacacgcccagactag

SEQ ID NO: 44246 - DNA, 805 bp, Setaria italica
  Peptide Sequence Number=SeqID_110220
tttcattgatgatgatgcacctgatccatttgaggctcgtcatacactgctttctttcgggtacatactgtcaggaaagatgaagggaagatccgggcaaaacttgcaaatatattaaaaggaaaggatggtgtgcgctttgagaatagctttgccaccggtgacggcattaaaatatctacagaaggtatgcggtcatcaaagttttgtcttcaccctgctggggacactccttcctcgtgccgcctgtttgatgccattgtcagtcactgtgttcctgtgattgtgagcagtcgcatagagctcccttttgaagatgagattgattacagtgaattctcccttttcttctcagttgaagaagctctaagacctgattacttgctcaatcaactcaggcagatccccaaaaagaagtggatggagatgtggttgaagctaaaaaatgtatctcgccactatgaattccagcatccccccagggaaggtgatgctgtgaatatgatatggcggcaggtgaggcacaaaatccctgcagttaatctagctattcacaggaatagaagactaaaaattccagactggtggggataataattggtgactagtgtacatattaccacatccactggtaaacctggttattttggtgtctgatagaaaccatggtggtcattctgtgtgaaccaggtgctcatcttaaaatccaaggactgagtccagaactattctctgatgggaactgacattatcaccctttttttaggttaacatttttgttgtactaggtattaactttatttta

SEQ ID NO: 44247 - DNA, 407 bp, Setaria italica
  Peptide Sequence Number=SeqID_110221
aaatcatgtgttcatcaatttgttctcgggaaactgagctatcgaggcaatcttagagatctgaattgcttctcttcatgtcctcaagcgcgataagaattcttatttcgtacataacctcaccattctctgcagaaagcatatctggttcaacaaacttcctggcaaaacaatgtcagaatgagtggcctagtagaacagattcggggccccctctctaatatacaaacacttgcaaagatgttatccgttcatatgaagagaactgagattccttatgatattattgaagatattctcatccaaggtgaccacttgaaagatgctttgcaacaaattcaagaggctgtatatctgactaaggcaaacatagtcagaagcagtgaagagactttaaagaaaattca

SEQ ID NO: 44248 - DNA, 604 bp, Setaria italica
  Peptide Sequence Number=SeqID_110222
ttgcacctacaatttgttttgtttgagaattccgatatgctttacctgacttcaatgttatagtatgtgtcagttattattatctttttgttgtcaggcagaccatgtgatctctgcgatgtgctgaaagatttagttgcaggagcgttaccacttgcttataagcagcaacgcacattagatataactggaatttcaaatccacttcatgttgctgttgaggaatctgccttgagacaagccttgagtaatctgatagaaggatctcttctacgtacacagcatggtgaagagttcaaatatatgcaggtgaagcacctgcaggaggtactctcgtggtcattgatgatgatgggcctgacatgcaatacatggagtgtgccatccaaattgtctctatgaatttcttgcttagcaaaggaatgttcgtttcaattttcagactcagatgcgctccctggccccatttggatcagaccttcttgcggatgatatgcttgaagataacatgacttggaacttcattgcaggactaactgttgcgcgtgagatacttgagaattatggatgtgtttgcgtgtgatatcacctcgaaggcctgatg

SEQ ID NO: 44249 - DNA, 1917 bp, Setaria italica
  Peptide Sequence Number=SeqID_110223
ctgcagaagcttttctagtaaaacaacagatggaagtcgtaacagaatttggagctatagttcttccgatggtgaaacatccctttgttgttggcttccttgttgcagagcttccagaactacatggtggacgtgccattaattttcatactgccgatattcagttaccatccagtacatccatggacaaatcatctgagataactccacatactaaatttaaagcatgggatgttcaaacttctggtgatcaggcaaataattattcacaacttgttaatgaatggaagaatactgctcttatgatttctcgaactttggcaatggcttatgttatggatcagaaagcatatctggttcaacaaacttcctggcaaaacaatgtcagaatgagtggcctagtagaacagattcggggtcaccttactgatatacttccacttgcaaagatgttatccgttcatatgaagagaactgagattccttatgatattattgaagatattctcatccaaggtgaccacttgaaagatgctttgcaacaaattcaagaggctgtatatctgactaaggcaaacatagtcagaagcagtgaagagactttaaagaaaattcaggggtcaccgcatccttcaagagctttatcagattatggatcagtacatggcaatgattcacaaaacgtagatccagtgttggctctgaattctgataaggatgacatggtaatgcctatgccacctctatggctggtacctcttcagcaccaagatgctagaccatgtgatctctgcgatgtgctgaaagatttagttgcaggagcgttaccacttgcttataagcagcaacgcacattagatataactggaatttcaaatccacttcatgttgctgttgaggaatctgctttgagacaagccttgagtaatctgatagaaggatctcttctacgtacacagcatggtggaagagttcaaatatatgcaggtgaagcacctgcaggaggtactctcgtggtcattgatgatgatgggcctgacatgcaatacatgactcagatgcgctccctggccccatttggatcagaccttcttgcggatgatatgcttgaagataacatgacttggaacttcattgcaggactaactgttgcgcgtgagatacttgagaattatggatgtgttttgcgtgtgatatcacctcgaaggcctgatgcagttataggcactggaggaagtcgtattgagatatggttaccatcttttcagacagaagtagctgatattactgaagaagcatagtttgaatatgaggaacttaggtcacttacttgatatgatgctggtggtgtattattgtgccctatcttctgtgaaaatgttgttgatactcaatagtggctcagctcaattgtttgtgaacgatggatattatccgatgtgtctcaggcttcaccgctagaacatccagatgatagaaagcttcgggggactccaagattttgcttctgcatacctgtccggacatattccaacgtgagctcacccaaatatctggtgacaaagacatgattaaggtggagtacatgcgtcagagaattgatattttgcataaagactcaacaaaacatccagtgttaaggttcagggcaggcaaaagtcttccaaattgacaagttcaacactgcgttgatacatcttgtgatgcgttaaccatccggcatgcgtacatgccaagagaactagggaaatttcgtactatgtaatgattcaacgacattctgacgcttacaagagaatatgtcggaccatgacgtgcatagcttcagcataataagctggaaaattccggttctgagatgtatgtaatattcctcaaaatgagtaatattaatttgagtgaaattttaaaaattta

SEQ ID NO: 44250 - DNA, 390 bp, Setaria italica
  Peptide Sequence Number=SeqID_110224
gccgtgcgtgcgtccggccggcctaggcgaaggctaaccgagttctctacatcgaacacttcatttgtccgggcggcgagtcggcggccatggcctctgcggggttcgaggaggcgtgcagggagatccgcggcgcgcgcggccacccgcggcgcctgggccagctcctggctacgcggagccccgccgagaggcagcagatcagggcggcctaccgcgcgtccttcggcgaggacctcgtcgcggcgctgcaggggatcctcgtcgctggggccggcggccaggaggacgagctccgcaagctgctctacctgtgggcgctggacccggcggagcgggacgcggtggtggcgcgggaggcgatggagggcggcgtcaccgtcgccggct

SEQ ID NO: 44251 - DNA, 607 bp, Setaria italica
  Peptide Sequence Number=SeqID_110225
tcccagcatgatggttggtgcaaatagcttacctctctttcatgcctaattttatgatgtttgtgcgtattggtcttagtcgcttagaaaatataacgaattgttaaccatgatacagaaagagcaaataacatcctctgaggtatgattcattctaggcacaactaatcagaatagatctatctagggcagatatgtatgtaccataagaaaaaaaacccgtgtcatgtgaatttgggtaatatttctgcatgctatccatgtcctgtgttagaactaggggagggctctcttatgttgttaggctttctctttcctacggtgaaattcattaatttagtttcgcctagattgttttggcctccaataattttggtttagtctgatctccatggtagagggtactcacaaattattcacttttagcacccttggatatccatccaccaaaaagttatttctcatcccctacccttttaacatgaaaatatgatataatatacggaatgcaatagcgggtaggaggtgataatgaatttagattgatgtcattcgtgtcggaatcaaggtctactaagacaacaaaacaactaatgtcataggtgaa

SEQ ID NO: 44252 - DNA, 1446 bp, Setaria italica
  Peptide Sequence Number=SeqID_110226
tattacctacttgtcgcctttctacgcgccaccaccaccaccacccctcgtctccttcctccccgctcctccgtgatcccgtctcctcacatccctagagatcaagccccgcattccctcccctctccctcctccagatcgcggcggccggcaccggacattccctcctcggggcgagcgcgacaccggccgcagccatgatcccccgcagcgcgccggcgtgcgcggcgctgctgctgccgctgctgctcgggctcctgagcccgcacccggcggcgtcgcagcaggagggcgacgtgcccgagtcctacgcggcctcgttcgcgtcgcgcttcgccgcgccgccgtcctggtcgttcccaaacccgcgcctccgagcggcctacgccgcgctccaggcgtggaagcgcaccgccatcttctccgacccgaccaacttcaccgccaactggtccggccccaacgtctgcgcctacaacggcgtcttctgcgcgcccctccccaccaccaccgccaccaccggctacagccacggccacggcggcgatggcggcggcgacctcgtcgtcgcggggatcgacctcaaccacgccgacatcgcggggtacctgccggcgtcgctgccgctcggcgtccccgacctcgcgctcttccacatcaactccaaccgcttctgcggcgtggtgccggagaccttccaccacctccgccttctccacgagctcgacctcagcaacaaccgcttcgtcggcgggttccccgaggtggtgctgtcgctgccgtcgctcaggtacctcgacctcaggttcaacgagttcgagggctccatcccgccggcgctcttcgaccgcccgttcgacgccatcttcatcaactccaaccgcctccgcaaccccatcccggccaacctcggcaactcgccggcctccgtcgtcgtgctcgcgcacaacaggcttggagggtgcatcccgcccagcatcggcaagatggccgagacgctcaacgagatagtgctcatcgccgacgagctcacggggtgtgtcccgccgcaggtcgggctgctgaagagggtcaccgtgttcgacgtcagcgacaaccacctgcagggacagctcccggccagcatcgccgggatggccgccgtcgaggagctcgacgtcgccaggaaccgcttcgagggcgccgtgccggccggtgtctgcgccttggcgggcctcaagaacttcacctacaccgacaacttcatcacttcgcgcccgccctgcgccaaggccaccgccgacggcgcgtggaactgcatccccggcgcgccggcccagcgtccgccgtcgcagtgcgcggccgccgcggcgcacccgttcgactgcagcaaggcgcaatgccaggccccggcctacaccccgacgccgggtggtggtggcggcggcggcggcggtcatggccgcg

SEQ ID NO: 44253 - DNA, 623 bp, Setaria italica
  Peptide Sequence Number=SeqID_110227
tctcctccgatcaacatcggctccatcagacgtcagaccctgaggggatcggtcgtgacgtcggccctctcggcggcgatctgctcgtagaggtccctgaccttgagcccaacgatggtctggaagagccccgttccgttgctgctgcccgggaggtcggcgtgcttgagcatctgctgcgccacctccccgtagaacttggtggacaggttgctcaggtgggtctccacgtagatgagctcgtccagcttgtcgaactgcccgtccatctccagcacggacacctcgtgtccgaagtaggtgccgaagccgtaggcgaacttgatgccggggtacgagcaggagagcttccggccgcaggggatccaggttacgacggacccttcgtcgaagaggtacaccggggcgaagtgcctcacgccttccttcatgatcagcctcacgcgcagcaccttgccctcctcgtcgttcgggatcagctgcgtcggcaggacctcgatcacggcgtccgcgtactgcttctgcgggtcaatgtaggcgtcaaagtccggcttcctggcatcgatgctcgccttgatgctctctaggctgtgcccgcgctctgccatgtccctctggattta

SEQ ID NO: 44254 - DNA, 253 bp, Setaria italica
  Peptide Sequence Number=SeqID_110228
ggctctgtgtttttaaataaggggtgatctgtgattggtaatggaattcagcatcatgcaaggaggctggctttaccaatgtaggcgtcaaagtccggcttcctggcatcgatgctcgccttgatgctctctaggctgtgcccgcgctctgccatgtccctctggattttccatgcaaacttgacctcttcgctgatgtccaggtagatgctgaagtctagcaggtccctcacgcgctcatcgtacattgggt

SEQ ID NO: 44255 - DNA, 561 bp, Setaria italica
  misc_feature (476)..(476): n is a, c, g, or t
  Peptide Sequence Number=SeqID_110229
aggaaaaagggtgtggccgctggccagctccctgcccactgcccagccaaccgcgtcgcctccgccaccgccgcctctcttcctccgcctcgccgtcgctgcttcggttgccctctgcggtcgcgagggcgggaggctccgccgggggcctctgcctcctctcaaaggccacctactcataatggaatttgcatgcactctttaacgatcgctaattgaggagcactgactgcaggttcgttattgcaacagcctaaaattttcgaattcaaaaggaagaacattcacctgacaccagcaccttctcaacttctggaagacattaatgtccaaatctttggaaaagagttcatctggtggcaccacacctacaagttcggcttcacctccagagtccaaaaaagcatgagaagactctgccaaattatctcagagcttctagaggctcatgccatgatttttgcaagtacggacanaaaaatccttctgaagaggagacaagtttatcaggaggaaagaagaaaagaaacttcctgctcatctgaaaaatttgacgttgca

SEQ ID NO: 44256 - DNA, 397 bp, Setaria italica
  Peptide Sequence Number=SeqID_110230
cttttgttgatgattccatgtacttgacaaaaatagaaaagattgactgtaaaaggcagaggacctccagggatataagtagtgccagagccagctcaagtaaagagtataagaatggttctggttgtgataaagaagccaagaattcacagaagcttttcctcgatgctaaagtatgtctttattcattaaagagaacagtggaagatctgcaaaagaagggtttgttcccttacaacccaaagcctctccttagaagcttggccaggtttgaggagctgtgtgagcagggatgaaatttgagttgcatatggtgaaaagctactatttgtaaggttgaagagtggcattttggtaatcagatagttatgttgcctttcgcagtcatgatttggtc

SEQ ID NO: 44257 - DNA, 263 bp, Setaria italica
  Peptide Sequence Number=SeqID_110231
acgacttccactcggcgtgggccgacatcaacctggcctgggccgtgctccgtcccggcggcgtcatgttcggccacgactacttcacctccgccgacgaccgcggcgtgcgacgcgccgtgacgctcttcgccaaggtcaaggggctcaccatccggccccacggccagcactgggtgctctccccgaagccgcgcgggcacggcagcaacgcccggtgacggtgactcacacacgcacacaccagcacctcgatcaaaagc

SEQ ID NO: 44258 - DNA, 644 bp, Setaria italica
  Peptide Sequence Number=SeqID_110232
cccgccgccgcggcacggggacgcgctgctgctgccgcagttcatggccaacgtggccgcggcgggcgccgacgccgcggcgcgggtgctgccgctgcccttctccacggcgtccgcgctggcggcgctgtgcgggtggggcgtgtacgcggacctcatcgaggtggacgccggccacgacttccactcggcgtgggccgacatcaacctggcctgggccgtgctccgtcccggcggcgtcatgttcggccacgactacttcacctccgccgacgaccgcggcgtgcgacgcgccgtgacgctcttcgccaaggtcaaggggctcaccatccggccccacggccagcactgggtgctctccccgaagccgcgcgggcacggcagcaacgcccggtgacggtgagtacgagtgctcgtcgctctcgccgtcgccgtcgatcgggccccacgcactcgccatcatcctccggtgcagaacctgacgtgtcccgattgcaccagcgcccttcttacccgtgttcgtacttgcaggtgactcacacacgcacacaccagcacctcgatcaaaagccgacgatcgaaaaaggatgcgttgccactattctccgaagtgttcctctcaaccaccatcaaatttcttcccg

SEQ ID NO: 44259 - DNA, 304 bp, Setaria italica
  Peptide Sequence Number=SeqID_110233
atgctaaagttttaattaaacgggaaatatcacctttactgccttcaagctgccgctatgtgccaacttgcagtgagtactctatgcaggcatacaaaagatatggtgttgtaaagggtctgcatcatatcatatttatgggacttcagccctgtgttatctgatgtacatgcaggcggttatgggtatgatcctccaagatggtttggtgaagaagatctacctctggaataatgcctggtaattgcaatataggcaatgcaaatcttcagttgcggacttgcagcagatttctgtaaataac

SEQ ID NO: 44260 - DNA, 436 bp, Setaria italica
  Peptide Sequence Number=SeqID_110234
cgctctaaagttaccgcacatgtaggctcttctaaaacatgaatttaggaatgggagcacgccctgttatatataagagacattttttatggtaacacattgaacattgcttcttattagaaacgtagttgtgttttttgcggtagaactatataataggtctgtttgactacagtctgtgcacatgtgactctcagcagaggaagtcaaggatttgggagtcaatgtggcactatccatgctaaagttttataaacgggaaatatcacctttactgccttcaagctgccgctatgtgccaacttgcagtgagtactctatgcaggcatacaaaagatatggtgttgtaaagggtacaatcttgactgcttggcgtctgtgccgctgtaatcctcttggcggttatgggtatgatcctccaagatggtttggtgaa

SEQ ID NO: 44261 - DNA, 863 bp, Setaria italica
  Peptide Sequence Number=SeqID_110235
gccaaccaccacccgctcgtgtcccgcgccggcgcgccgccgtcgccatggccgccgctgcccctccacctccgcctccttcttgcctgttcgggctgcgcaacctcttgccggaatcacagtttctttcggtgcttcgtaccagaagaggagaaagattccggcgcggagagtccgatgtgctgctgacgacgaagaggaattcaaggatttgggagtcaatgtggcactatccatgctaaagttttataaacgggaaatatcacctttactgccttcaagctgccgctatgtgccaacttgcagtgagtactctatgcaggcatacaaaagatatggtgttgtaaagggtacaatcttgactgcttggcgtctgtgccgctgtaatcctcttggcggttatgggtatgatcctccaagatggtttggtgaagaagatctacctctggaataatgcctggtcatgggctcctggccactgtgtgcggtagtttcaagggaaagcctatctatcaactatagtgtcaaggaacatgattggatttctgagatctcagacgcccaagatgcttatgataagctacttgttgaacatctatcagtataattgatattcatattccaggctcgatggctccaccatcaggccataatcaatcagggttcacatgcatggcacaacaaccatcaccaccacctagaggaaaggaaattactggttagtagcttatcacaacatatattttattttaattgtaaaattgtttgcaacccctttcaagcgaaccatattgactatttagtgtctaatacattctctgatacttgtcaatattctgaactcattgcctagttgcactaaa

SEQ ID NO: 44262 - DNA, 656 bp, Setaria italica
  misc_feature (569)..(656): n is a, c, g, or t
  Peptide Sequence Number=SeqID_110236
agacaaagaaataagccaaccaccacccgctcgtgttcccgcgccggcgcgccgccgtcgccatggccgccgctgccccctccacctccgcctccttcttgcctgttcgggctgcgcaacctcttgccggaatcacagtttctttcggtgcttcgtaccagaagaggagaaagattccggcgcggagagtccgatgtgctgctgacgacgaaggggaaatatcacctttactgccttcaagctgccgctatgtgccaacttgcagtgagtactctatgcaggcatacaaaagatatggtgttgtaaagggtacaatcttgactgcttggcgtctgtgccgctgtaatcctcttggcggttatgggtatgatcctccaagatggtttggtgaagaagatctacctctggaataatgcctggtaattgcaatataggcaatgcaaatcttcagttgcggacttgcagcagatttctgtaaataactgaaactagacccattccacaaatgaaaggacaagaatctgcattatctatgaaattctgtcaaggagcatgtactcttttttttnnnnnnnnnnnnnnnnnnnnnnnnnnnnnnnnnnnnnnnnnnnnnnnnnnnnnnnnnnnnnnnnnnnnnnnnnnnnnnnnnnnnnnnn

SEQ ID NO: 44263 - DNA, 454 bp, Setaria italica
  Peptide Sequence Number=SeqID_110237
tctggaaaacaacaccgcttctgtgtttctagaggtgccaggctgccagcagcatagtaggatgaagctttcaaggtgcaggctaggcattgttgtcggacaaggacaacccagaggctttggcaacgctacaaccatcagtgtcaatcccaacattttgcaacaaccaaggggagaaggggcagccaaagatcagatgatcgctcgtctcctcactacctcgatcggcacacttcgcaggtcggatcagagatgacattcttcacaagtaggtttgcacggatctctacataacgaaatatgagccaagctctagcatttcaatgggccacatcgactatttttttttccactggtggattttgttggggatcgccaaaaagtcagttaccctcgaacgtcagtcgtagtcttagaaaaacccactaaccttgcaagttgcatgctggcaact

SEQ ID NO: 44264 - DNA, 974 bp, Setaria italica
  misc_feature (953)..(974): n is a, c, g, or t
  Peptide Sequence Number=SeqID_110238
cccgggtccttcgcccgcgacacgccgcgctgctgttcccggtgcacctgtccaagcggcacctcatctggtacggattcgagagaaagaatggagtgcattcggtttgcccggcttattggtcggctcacaagagatggttcttcatgtccatgttatgcctgaacccgtttgcttgctcattcatggacatgcaattcccaaatgggcaactaaggtatgtggctggcgatggcttcacgacgcgcgctttcctccctgtcggcggtggagtcctgcaagcccatggaaagttcccgggggagaagaggatcagcttctctttcaagaacaggagtgggagcagcgtcgtcccaatggttcagtggccggataaatctctatcattggggtttgtccagccattgtcttggaggagatctggcctgatgctgcaaccagcaacacagatcagcatatgccctacgatcggtggacgccatcctggagtgtgcaccgagctgatccattcggtgaacgagaacgtcggggtcatctatggctattcccacactgcttcgccttctgcacatgcctccctatcgatcggaagatcgaagctgaacggcggcgtggcaaggtcagggatagtgtttagagtagacgctccgctccatggctttgaccggccatggttctcggttcagatgagcagcgggatcgagttctgattccatattgttctgactgcacatacagagttatcacaccattgcaaaacaaacacacagggttacagatcgtacacacgtactatactacattgaaatgtacagtcgatgttgtgtatatggcttggcaaggactcgttctatagatgatctgagaatggcaattgagaaaaaataattgcagcaagcatttttatgctggtaatacaaaaggtaacattagaaaggaaaaaaaaaaaaaannnnnnnnnnnnnnnnnnnnnn

SEQ ID NO: 44265 - DNA, 573 bp, Setaria italica
  Peptide Sequence Number=SeqID_110239
tctttgcttgtctaaaatgccatccttcgtgctggatcctctcagacatgaccgaactatgcgattgtgtggtgaaggattacatcagactgaagattataggtgtcaggggagtggtttattggtggaggattgcggtagttgtggttgaagttggtgagagggcatcacttagcaaacctgtagatggaaccttatagttatagaaaggatctttctagagcaaactagagctctttctaatttccaaatcgacctgtggacacggcgtgaaaggataaaggaagtgctgccgctgctcctacagtgcgcgcaacctcctgactgtgtggccaggcagtactgggttggttgggcagatgcaacccaagtccacagcatctggatggtctaattaataaaacaatagtgtaacattacaggaggcacgatcttgataagctcaaagttccaatttcccaaaaaaagtgagttataaagtactaaataacatggactccttaattagtgacattttttatgtcagtcttgcatggtcccttctctgtcatcttggattctctgtctctgttt

SEQ ID NO: 44266 - DNA, 237 bp, Setaria italica
  Peptide Sequence Number=SeqID_110240
ggttgctgagctcacgtggaaacgatcgttgttgtggtggcggccagggttgccgcatgtttgtcaggttggctgcttgcagcggaccgcggcggctagtgctgctgggcaactgtcagtgcagcgtgggactgcgtcagtggacggcgcttgcggcagcgacatcgtgggacgactaggtttgcagcggactgcgacgggttgctcagctttactgggctactccagtgcggtaca

SEQ ID NO: 44267 - DNA, 289 bp, Setaria italica
  Peptide Sequence Number=SeqID_110241
tgcagaacgcccggggtgatcacctcatataccaaagaaaggaaggcgtgccagtgccaccgatggcatccggtgtcgtcgtccgcaacgatgacgagtccgcgtcgctcttggacgacgatgggtctccggtgctcttggccggcgtgtctactccgcctcctcctccgaagcttcacgggaaggcgacgaggacgccgaggcacgccgtcatgaggctcatatgctcgcccttcgccgccgtcctccggatgacgacgtgcgcggatactgacgccatcagcccaag

SEQ ID NO: 44268 - DNA, 360 bp, Setaria italica
  Peptide Sequence Number=SeqID_110242
tacttacccgtacgtccgtctagtccggttgtcttgtagtcttaccacgcggcacagccgagcgcgagcgtgtcctacttcgcgccgcagccgcacgcggcggcgtactccatgcagcagccgcagccgcaggcggcgtactcgacgcaccagccgccgcagcagcaaatgcggcagtggtcgccttcgtacctgtaccttccgtacccgcacgcggcgccggagccgtaccaccaccaggactactatagcccgccggggatgcacggctccgtacccgcacgcggcgccggagccgtaccaccaccaggactactatagcccgccggggatgcacgcgtcgccaccgccgatgcagga

SEQ ID NO: 44269 - DNA, 444 bp, Setaria italica
  Peptide Sequence Number=SeqID_110243
cttcagccccttcggcgaggtcctggagtccaagatcatcctcgatcgcgacacccagaggtcccgcggcttcggcttcgtcacgttcgcgagcgagcaggcgatgcgcgacgccatcgaggggatgaacggcaaggagctcgacggccgcagcatcaccgtcaacgaggcccagtcccgcggcggcccgcgctccgccggccgccgtgccgtgggcaattagttggggagcggcaccgcaaccgcaatagagacctctctgtggttgtaggtagagtagcctgttactctcttccactaagaggtcaaacctctctccatgacagagcctctcctctttttccattttctttattatccttttactgttctaatcaagtaattatagagcatgtaaattgtaatgagatacgccctttacttgtagttaattccactacgtct

SEQ ID NO: 44270 - DNA, 1195 bp, Setaria italica
  Peptide Sequence Number=SeqID_110244
gcggcggcggcggacaagaagccggaggaggcggtgaaggagccgaaggccgagagccccgagaagaagaagccagaggaggcggtgaaggagccgaaggccgagagccccgagaagaagaagccggagcaggagggcgccggcgcagagaagaagccggaagcagagtcgaaggcggagaagaaagtggaggcgaagaaggagggcggtgatgacgaggcagctgagcccaaggccaagggcgcagagcccgcaaaggaagaagcgaaggaggccgtcgccgccgctaccaaggatgaggacgaggcgaagaaggtgaaggacgaaaagcccaaggacgccggcaaggcagagcccgccgccgtgacggagaggtccctgtcctcgccgccaccgccggcgcccaagcacgcgtactacgaggaggagtaccgccgcccctactacccgacgccgcagccggtgctgagctaccacgcggcacagccgagcgcgagcgtgtcctacttcgcgccgcagccgcacgcggcggcgtactccatgcagcagccgcagccgcaggcggcgtactcgacgcaccagccgccgcagcagcaaatgcggcagtggtcgccttcgtacctgtaccttccgtacccgcacgcggcgccggagccgtaccaccaccaggactactatagcccgccggggatgcacgcgtcgccaccgccgatgcaggactcgtaccgcatcttcgacgacgagaaccccaactcctgcagcgtcatgtgagagttgaccggcgcgcccgccccggccgccgccggccgccgtgccgtgggcaagtagttggggaggcggcaccgcaaccgcaatagagacctctctgtggttgtaggtagagtagcctgttactctcttccactaagaggtcaaacctctctccatgacagagcctctcctctttttccattttctttattatccttttactgttctaatcaagtaattatagagcatgtaaattgtaatgagatacgccctttacttgtagttaattccactacgtctatgccggctactaatacagagcatgccagattatactactataaattactttttttaaagttattttttatttaaaaaaaatgcaacgacgtacgaccaaccgaccgaatagacaaggaactacgtaaccgacaatacttacgaa

SEQ ID NO: 44271 - DNA, 373 bp, Setaria italica
  Peptide Sequence Number=SeqID_110245
tcgccgccgtcgtctcgcctcacgccgccctgcggtacaaagatgtgtgggaggcgctcaagattctggatgcagctgatgcagaacaccctgaggcatcctctgaagtgattgagatatactcgcagagagcagcgccgaagatcttagcaggcaaaccagatggatggaatagggaacacctgtggcctcgatcatatggcctaacttacggcccatcactaactgatcttcacaacatacgtcctgcggatgtcaatgtaaactcttcaaggggaaacaaatattttggagaatgtactgcgacatcaataaattgtgtgaggccagcaaatcatgaagccgcatctgacactgagacagacactgaaaa

SEQ ID NO: 44272 - DNA, 450 bp, Setaria italica
  misc_feature (371)..(371): n is a, c, g, or t
  Peptide Sequence Number=SeqID_110246
cgcggtggagtggacttcttggtgtattcgagctgtgtttggatgtcatctttgttgtttgggtttggattttgggttgtcggctttcactctatttttgcttcagttgtgcgctgtggcatctgggtagtggtggtttacttccttcgtggaggcaggagggagtaagtccagatcgaagagaccaacggctgatggtcttttaccgaggatctcttgcagctttccaatgttgcagtccgttctttggtttggataggagagaaggtaggtttgatgctttggtgtgcacctcggccaactggtgggcagcgacggcagctcagtccaaggaggaagaagaacagtagggatcttgttgtaattttagngttgcccagggtcctttctgtaagcatgggatgtactgtgctaactttttctttagacatgttatatccccttctacgt

SEQ ID NO: 44273 - DNA, 355 bp, Setaria italica
  Peptide Sequence Number=SeqID_110247
acaccggggatgagtgtgttcgcaatacgacacaggacctcaccatcaccgagcagctctctcagctcttcatcggatgcatccgatggcaaactcaattctgggagcaaggcattgagccatcttaccaactcggcacgccgattagctgcgtggatcccgtcgacctcgccgtccacgctccccattcctcgccgcccgcgccggcgcgcggaggccccggcccagatcgagcccgccgccgacgagattgcgcggattcgagctcggctccggccgaatcaggcaatgcggcgcgggggggttttgcctccgcctcctcctccgccacgggtgccgggcctgcggcttggcc

SEQ ID NO: 44274 - DNA, 322 bp, Setaria italica
  Peptide Sequence Number=SeqID_110248
ccgaatgggtggtgggagccgagcctttccctctcctccctctgcgccaccaccctcgccgccgccagagccccccgcgcccccttcctctcccccgcccaccgcgcgccgcccctccgcctcgccgccgccgccatgtcctcctcctcctcatcctccccgaaccccgccgcgtcgggcgacgccgcggccccggccccgtccgcgtccagcgctatcgacttcctcacgctctgctaccgcctcaagacgaccaagagggccgggtgggtgaagcgcggggtgcaggcgcccgagtcggtggccgaccacatgtaccgga

SEQ ID NO: 44275 - DNA, 355 bp, Setaria italica
  Peptide Sequence Number=SeqID_110249
attgtgctcaaaatcaaggtccacttctagggcactgttttttgggcctgctggaagcagtaacctctccctgcatggtccacgtactgggttcaagattagctttctccatttgctctattttagcacgcatcttcagccgctccttttcatgggttgagagaccctggtcttcatttccatcatcgttctcactgccatcaagttccatttcatgtacatcatccttgaattgaactttctttgtggaaccatctctccaatcgaggagagaagaagaaggtgacgaaaaactggatggaggacagtgatgatgagggtgaggaggacagagatgaggatgacgatgaggggg

SEQ ID NO: 44276 - DNA, 1572 bp, Setaria italica
  Peptide Sequence Number=SeqID_110250
ttagtacctaattacctaaactttactaaagtctaactaattgttgcattactttagattcagctgcacttgccgccggagagttggcttcagccaactagtaggctattacaaaatatgtattgaactttgttaactttatgaaatttcgctcactactatcttactttctgaaatttcattagcagctttctgagttccaaaacacgcactccgcagcagcatcctcacaattacaattcagcaagtcaaaacgcttgtgctttcctaaacatgtgacaaacaagcagactatagtaaggtgtacaacaccaaaattgggaatttggaccagtgcagctcgtggaccctttccaactctcaatattcagggatctgggacactggcatggcatgcatgcagtccttggttcggaaacattgagtctaatctttctgcaacttgactggcctctccttgtgtgatcctgcatatctccttttcttgttggctcttcttctcttgcgctcagcctgtgtaagttctccctcttccttaacatcaccttttccttcaaagatttcttcaggagcaagcattgcagcatcggaaacggctacaggtgcaatctcttccattgctaaggctggcacattagcttgtacagacatatcttcaatgaccggctttggagcaaagtggaaatgtgatagtgcatccaacttcaagcataccctcttaaataaagtatttgcctctttctttagttcatctgaaatcgatagcggggcaggtgcaatgcctgatttttgggcataatcatcctcatagagttcagcaagacccttcttgctcttactttcatccagttccttatgctccctgggagctttagacggcaagagagaaggcttctcaacatcatcaaaatgaccctctgcaattcttttctttatcatctcttcaagagaagctgtgacttcctcagtgattactggggcaggtcttacattgtgctcaaaatcaaggtccacttctagggcactgtttttgggcctgctggaagcagtaacctctccctgcatggtccacgtactgggttcaagattagctttctccatttgctctattttagcacgcatcttcagccgctccttttcatgggttgagagaccctggtcttcatttccatcatcgttctcactgccatcaagttccatttcatgtacatcatccttgaattgaactttctttgtggaaccatctctctttttgactggctggttatgctttttctcaaaaaaatctttgtacattatacctccaccaccgtctccttcatcctcttcatcatcatcctcgaaatcttccaaatccaattggccttcatcgtcatcatcttccccctcatcgtcatcctcatctctgtcctcctcaccctcatcatcactgtcctccatccagtttttcgtcaccttcttcttctctcctcgattggcaccgccaccatactcctcttcatcccccctatccaggaactccgccatctctcctatcttcaggaaccggtcctccaaccctttccctcctct

SEQ ID NO: 44277 - DNA, 380 bp, Setaria italica
  Peptide Sequence Number=SeqID_110251
aattcaaaataccctgtagaagcaactcggtgaaaaaaaatcttgtcttgcgaacagatgtacactataagtcaaccacttgttgaactaggaagattaagccccgcataagctgaaaaaaatgttacaaaagtgaagtgccaaacaaccactctaacatgtatggaaagtttccttttatctattctatttgactgacctaagcacgcttaagcaaaactaccatgatggacgcaatggccaagagcacaaagactgatggcgcgctcggaaaatctttgctggtgctcatgatcagagtcttgatcttccccttgcagcggccctcgtccgaggttgcgacgagatcttgcatcatgtttgacagattggtcaccatc

SEQ ID NO: 44278 - DNA, 1244 bp, Setaria italica
  Peptide Sequence Number=SeqID_110252
taccgacgacccgtagacaagacctacgtaccggcgtcgcgccggcggatcgtcaggagcttgtagccttgggtaacggaacagctgctcatgcggatccctgcacgacgaagcctggtaacatgcaggatgctacctcacccgacgacaatcttccggagctgctgaggcgagcggccatggaggacaacaccgtcatcatgaccttcacgaacggagcgttcgcttctcccaactcgctcctcgacctcttcctgcacagcttccgtgtcggcgtgaggacggcgcccctgctccggcaccttatcatcgtcgccgtcgacgacaaggcgtacgggcgttgccggcacgtgcacccgcactgctacgcgctcgccatgggcgccaccaacttcacgggggagcagcgtttcatggccagggactacctggacatgatgtggcgccgtaaccggttccaggcccgcgtcctgcggctcggctacagcttcgtcttcacggacgtggacatcgtctggttccgaaacccgctgctgcgcatacccgtcggcgccgacctcgccatgtcctgcgacaagttctacggcgacaacccctacgacctcgacaagtgggccaacggcgggttcgtgttgacgtcctaggagggccagcgccaggacggtggcgttctacgagagctggtaccaggcgcggggggcgcacccgggcaagaacgagcaggacctgttcgacatgctcaagcgcgagctctcggcgcggcacggcgtggcggcgcagttcgtggacacggcgtacctcggcgggttctgcgaccgccggaaggggagggacttcaacaagctgtgcacctaccacgccaactgcctcgtcgggatgaagctgaagctcaggaggctcactcaagtgttcgccgagtggaacaagttcagggccagcgccgcgctgacggactgaatagcatccaccgcgctccactccacatggccacgccgcaagttccatagtctttacaagtaggagcacaccttaataacacagagacatcagacaacacatcatcctatggcatttacagtggtccatgcatgtcagccacttaataataggtttcctcgtgtattagcacctagaactttaggtaatgtaaaggagaaagatgaatgaaagagaaaaagaacaattcttatgaagcagcatctcagatgctgtagctataagatgacacacacccgaaaaaaaaa

SEQ ID NO: 44279 - DNA, 388 bp, Setaria italica
  Peptide Sequence Number=SeqID_110253
gacagcggttggattttgtccaagatatcctcaatatccgtaccagagtagaggtacaacttgctagacatgatactcatccgatcagccctgtttccaatttgctcaatactctcctcaccagacacatatacaacaggagaagaatcgtcggacttgaaaccctccaatatattagaagcaagctgtaacatcaatgaacttttgccaacacctggatccccaccgactaatatcaaggagccaggaacaatgccaccaccaagcactcgagagatctccattccaaagctccctgacaggggtatgcgccacgacgcctgattgacccccttgttcacctcctgaaggctctgcggcaccattcttcctttgtcttctttcttgt

SEQ ID NO: 44280 - DNA, 330 bp, Setaria italica
  Peptide Sequence Number=SeqID_110254
gaaacttttgttgccacaaatgaatcagtggtcaaagtgtaaacttgatgatattttgggacagagggagtacttttttctttggtgtggtattcattcatctagcttgctttcttgttttcctttcatttttttatgtttcttttattatgattttcttgctggcatcttccattttgcataacttggggcatctaattagttctccgaaaaggttatccgtactttacagtactcttaatatgtgtgacagcatactcctgaatgtcaaatgttggtaagttttttttttttgttgtatgtagaaaaaaaagcataggctatatgata

SEQ ID NO: 44281 - DNA, 744 bp, Setaria italica
  Peptide Sequence Number=SeqID_110255
aaacccaccctgcatgcaagttcattcgacatgtagtgagaaaaaatatactattttcaacaagctgtgtggttttacctctttttattcatgtgcagggtactaacctaacaattagagatttcgagataccagagtcaaatataatacatatacataataagaaaagtgaattaaatcaagcaaaggagtgacatgccaactgcatttgataatggcaagaacgcagatactagaagaaagaatatcaactgaatcaggaaacaatatctcaatagaaagctggcaatatgtgaggattatctattaacttaattgtcatctagtcccagaaaactacttcaaagttcaccaaacacttagcacttgatgttcagctaacagagtttacatttgaacatgtatttctgaaaataaattaaataataacaatggtgcgtgtaagatagtggcataaaaccccaaactgccgccaaggtctctaatagattcaaatatatactttgtttcagttattatacatatggtctaattggattgtgagaaaagagaaaatcttcctgtcccagctatcaaagaaactggttagtaaaaatcttgaataggacttatgcatgtcataaagaaaaatttgtccatcactctaaaagttttggcaaagtaaaaagccaattcaaaggctgcaaattctttctggggtctgggattttttagtgtagctaagtcccgaaagggggccccagc

SEQ ID NO: 44282 - DNA, 464 bp, Setaria italica
  misc_feature (440)..(440): n is a, c, g, or t
  Peptide Sequence Number=SeqID_110256
aagtctgaaccgatcaaacgctccactgaacagtcggcgtgtgcggtgtgcccatcacattcgcaatcgcagccaacctgcggtagattgaagatgttcaccctgcgccatggtctctgcatgcaggctctcgcagactccatgtggtttcggatccaacgaccaacatggataacgtaagatacaggaagccagagcaatactgttccgatccaagatccatgcctgcaagtcaacaactcatctttgttccccgacctgtaatcttgggcagttgggcggaaagaagaaacaaggtctgagaatgaagaagttagaagctgctcctgacgctccaccaggcaccagcaaattctctggtcagcatctggcagctcctatgaagctacgtgacatcctacaagctacaaatcgcaaaccgaaatggaaaaaaaaaaagngcaaaagtttctctaatatctggc

SEQ ID NO: 44283 - DNA, 299 bp, Setaria italica
  Peptide Sequence Number=SeqID_110257
gaacaggtcgaggaaggacgacaagaatccgcgcatggacggcggcgagatctcggcgttgtagacggaggtgacgacgatggagaacccggacccgacgctggtgacgcatcgcgcgaacatgagcgcggggaagctgccgccgagcgccatggcgagcgcgccggccatgagggagacgttggcgagcacgagcgtgccgcggcggccgaggacgtcggccgcccatccggcggcgaggatggacgcgagcatgaacacgttgatggagcccgcgagcacctcgatctgcgcgtccg

SEQ ID NO: 44284 - DNA, 432 bp, Setaria italica
  Peptide Sequence Number=SeqID_110258
atgagatcccacacattgaacattgcaatcaaaacgagcgcataccaagcccccagactgtgtgatccagtgtcttcagataaaaatccagggaagatagatagagtcaagacatatacaagaaagatatcgagagcataatccatgttttgcagcaacagttgtttggtgcttaaacgctcatatctttctggctcctcctcaactatttcatcttgttcagttgggactcctgcagcagctaggtcaccagcaacggttttgctaccttcagaagctgcctttgagcgataatatttgacaatcggcagtgtggggaaaacagatgtgtacagaaggacacacaagagctcaaagaagcacgctattgaaagaataacatagctcctttgcgcaagccatcttgtgagctctactagtgcgactgagtcg

SEQ ID NO: 44285 - DNA, 275 bp, Setaria italica
  Peptide Sequence Number=SeqID_110259
ttggtctagtccagcgagactcaccacaagcatgaacttcttctggagtgtgaatggaagatccacatttgaacaggcgacagctgactgttgagatgcacatagttctacttctcatccattcagcttctgtccaaaactgaaagcgtgcaggaacctgcaagcataacacaacacttcgcccttctccgtagttttactatccactctgcagcagcgtgttatctgaagtttcttggaacattcagcaaaacattctgatttgtgaaaggaaa

SEQ ID NO: 44286 - DNA, 557 bp, Setaria italica
  Peptide Sequence Number=SeqID_110260
ttttcttttagttttatttttgtttaatttacttctattgaagaggctggccaatgtatcatgcacttgttgaagataatcttttctgtcatcatcgaaagcgttaaaatcaaggtgggacatgatgtgtttcagacggtaattaggatccatgaccataggcataaaaatgcatgaaacatacggtccagcattccatgaacttccttttcatcttctcccgcactttggaaaatgcttcttcttccctggagtgcctgtacctatcagcttcgtgcacctctttcttcacaacccacaacttgttaaagaaattagttggactaggaaaattgcgcatgaagtccatgtgtttatgaaaatcttgcgacatcttgcaaattttctctgcatgtatccaatcttcttttgacagacgatagctgcagttagaatactgtactactgaaggagtggagcccattgcatacttggaaaactttgccgacttttccatgtatgtgtcaagctcatccaaccccacctgaataacctgatcaagttaaattgtagtttgt

SEQ ID NO: 44287 - DNA, 445 bp, Setaria italica
  Peptide Sequence Number=SeqID_110261
tatcaacctgatcagctgttactgttgcatcagctctgacagtgtttgcaactgtatgcctcgcatgcaaatttgcatttgcctctcttgcagtgggttcagctcctgcagaaccaagcgtctgtgctctccctggaaacctggggtcttctccttcctgaacagtggatgtctgcctgtttggcatccatgaagatatatttctcaagaaatttccatttatgagagcacttggtgcggcagatgtgttagagtatgtaggaagctggccatatgtagtccctccagtacatagaataaagccaggacgcctcacacaaatagatgctgacaagccctcgattttagaataaaatgatggtccaggaagcaagtagttgaacagcccataagtgtatgcaaatcccgataagtattgtccgcacaggtggcccagcagtgaaac

SEQ ID NO: 44288 - DNA, 1325 bp, Setaria italica
  Peptide Sequence Number=SeqID_110262
ctgtatgccaaagttcgacagaaccttcaacgttaatttctatttttacatatattctgagataaaccttgagaaatacaactcggctgcacgctactgtttcatcaccctgggaaaaacacgatcgtgggcatcctttcagcaaccaccaagtcacaacctaatcacccccatgctaaattcccaaattctaatcacagctaattttttaaccttcatatgaaaaaaattggctccacattcgtgcttcctttgaacttgtactgtgcgaacttcaaacctgctgactcatcagaatctcaatggcaacatttggatctccatcagccgcagcaagagcaacctcagcctgagtatggatagctgagatgtgggctatgactgacatgctgtgtgtttctataaccttttcaaagcccataccaaccagcttctttagttcttcatcaaatgtatcaacctgatcagctgttactgttgcatcagctctgacagtgtttgcaactgtatgctgtgaattcttagggggtcacttggagttgtgttatccaacaacctcgcatgcaaatttgcatttgcctctcttgcagtgggttcagctcctgcagaaccaagcgtctgtgctctccctggaaacctggggtcttctccttcctgaacagtggatgtctgcctgtttggcatccatgaagatatatttctcaagaaatttccatttatgagagcacttggtgcggcagatgtgttagagtatgtaggaagctggccatatgtagtccctccagtacatagaataaagccaggacgcctcacacaaatagatgctgacaagccctcgattttagaataaaatgatggtccaggaagcaagtagttgaacagcccataagtgtatgcaaatcccgataagatgccgcacaggtggcccagcagtgaaacattgcttgcaagaaactgaaacagtaccagcaaaatccatgcataccattttgcaggaacattgaagaggccgaagacacttcgcgattgaacaccactcagacttgtttcgatgactatcattgagaatataactccagaaaagccaatggagcattcatccgcaagatttggaacaggggacagaggattgtaagccaccaagaaagcaattgtcagatggagaattgcatttgttgttgcaagaaggaacatcaagaataagagacggactgatcccataattctctccaactcggtgcccaagggtaccaatgcaagcatgttgaatagcacatgaagcacggaaccatgaaagagaacagatgtgtagaacctgtacactt

SEQ ID NO: 44289 - DNA, 1039 bp, Setaria italica
  Peptide Sequence Number=SeqID_110263
acaaatcccaaatggcaagtatataaaccagtttgcacccatccaaagttcataacagcataaagagattatgcagagaatcccagtatattcaaattgccacaaggaaatcgtcatcagtagacagaactaaatcaaaatcatgcacaatgccagataactcataccatcacatcatcatttggtcataagaaatctagacagtatacccaagttcatttcccaaatttcagaactttaaccattgcttgatcacctaactagtcttggaaggcatacattgatgattcaagatttgatgcaacctaccgatccagctcttgaccacagaggaacctactcatggcgtgcagcttccaccaaacgaaccgtgggatctcgtgcccagaaagaccaatagatactaaaaatcacagatgtgaccataaatgatattgttaggtgtagcaactccggataaagctcaatcatcctaaggtgaaaacacgcgttgagaaataggaaggcctgcaaactgccattccatgccacaaccattgcccaaggagcagtatcgggaaaagaagaggcaataatgccaagcaatactgaaacgagggcaatgatgaaataaaatgtgcacaattgagcagaagtatggttgtgttggtagatcctgttgagcagagctgctttatcagtccaaacaacaaaagccgctccaaagaaacatatcatcttatacttcttcattctgtggtttgctatagcttttttcacctcaggtgtcatatttgtaaggtctatctcaggatcactgaaaatatcacagaggctctgaatcaccattggcaacagcgctgatctgcgacgccgcggaggagcgcttacaggaggtagcggcagcgcggtcgccctggtgaagcggcgccgggtagctcgatggagtggcggcgcggccgccgcaaatcgagcgcgaactgtaccggtcgggggaggcgaggcggttcgtttcgtaggtaaattcgggttttgtctaagtccttccccctttacgttt

SEQ ID NO: 44290 - DNA, 463 bp, Setaria italica
  Peptide Sequence Number=SeqID_110264
ggcctgagggacatcgagctgacgctcccgccggggttcaggttctaccccagcgacgaggagctggtgtgccactacctgcacggcaaggtggccaacgagcggctcgccggcgccggcggggccatggtggaggtggatctacacacccacgagccatgggagcttcctgacgttgcgaaactgagcacgaacgagtggtacttcttcagcttccgcgaccgcaagtacgcgacggggcttcgcaccaaccgcgccaccaagtccggctactggaaggccaccggcaaggaccgcgtcatccgcaaccccaaggccgccggccgcgccgtcgtcggcatgcgcaagaccctcgtcttctaccgcggccgcgcccccaacggcatcaagaccagctgggtcatgcacgagttccgcatggagaatccccacacccccacccaaggaggattgggttctgtgc

SEQ ID NO: 44291 - DNA, 801 bp, Setaria italica
  Peptide Sequence Number=SeqID_110265
ctcttcctcgcgcccaccccctccgcggcgctgctgggcctccacgcgcagctctgcgagctgctgcggaaggacgcgggcgtcgaggtacccgacgcgttccggccggaccactgggtcccgcgctgcgccgtcgccgtcgacgtgccccgcggccgcatggccgaggccttctgcgtgctccgagagctcaagctgctccccgtctccgggtacgggatggacatcgcgctggtagaggtacgggccgcggttagggagctcgtctcctacccgctcggcggcagtggtggcgctggagccgactgagaggtgctgttgtatgttgtacaatatctagaacatcatggatggacaatcatatttaacaaggacgacatagatataatgtggcattttatcgtccaatttgccttctatggaggaactgcatttggaaagaaggctagaccatactgtatcctaacacatacagtattttgtttgatcatttctttaatcttttggttgataatgtgtttgataatgatgttcctccattgtagacacttcacatagtattgcttgtcctcaagtttactgtaatgaattgttgttagtcattgtgttcatgtgccctgaaccacctttgctctctccacactttcactccccagatttgttttcatgactcccgagttgcatgctccgtgtttgatgcctttttgtaaaatattttttggaaatgcgctgcagtgctgatattcggccttgtcaggtgactggtgacccagttctatatagaattcaaagttatatttt

SEQ ID NO: 44292 - DNA, 1083 bp, Setaria italica
  Peptide Sequence Number=SeqID_110266
ccagccttctcgctcctcttcaagccccggatcggggacttcggcctcgccagctccgtccgctccccgccgtcgccgccgcccgcgccggcccaggcgccgctggcgatcaagatggccgacctcaccaccaatggcgacgaccacgaccgcgacgcgcacgcgcaagcgaacgggttctccttcgccgggaacgggttcgcggcgaacgtcgcggccgccgcggggaggggcggtggcggggtgggcgcgctgctgtccgggatgcagctcaccaccaggagcgtcctgccgctgtggagcaaggcgagcctgcggttccattgggggctgcgtgtgccgccggagctcaaagctgcactcgccgacgatggctacgggcgcaaggccggtagccttgccatcagcaagctgccgctgctggtgatgaacaagatcaccattgagcatacgcccaaggcgtcgtcacagtctgaaacagacaagaagaggaagaaagacgcccctccagcaggcgagggagaggaattctcattgatgaagcggcagctggaggcgctgagcaccgagagcacattactgcagcgtgcggtagcggacctgcgtgctgagcttggggctggcaaaggcgagggtcgcaggctgccagcagcactgcctgctccgcaacagccattcatgtcgaaaccagatcgccattaccatagcagtgggaaggaactggtggacagtggactgaaaccggcctcggatgaagcaagcgaggagttgaagaaggcgcttgaggcccgccggaagtgaggaactatgctagggtttgctgacattgcaatctctgcaatttgacatggttgctgtctgccgtgttaagttttgtgcttaataatagaccgggaagggcagttcacatccctagctggaagcaagtgaggttcccataggtgatgtcatggctttgcctcaatcttacaattttattacatttgattgtgttaggatgtcttgttatgtataaattcgtgtttttccattcctgaatgaatggatgattagctttttagaacaaaaaaaaaaaaaaaaaac

SEQ ID NO: 44293 - DNA, 1907 bp, Setaria italica
  misc_feature (1)..(45): n is a, c, g, or t
  Peptide Sequence Number=SeqID_110267
nnnnnnnnnnnnnnnnnnnnnnnnnnnnnnnnnnnnnnnnnnnnnaggtcaagatttcaagtgatagatatcactgctcggcagtagaactgcgtccatcacaattgagtgcagctaatttgttcaagataatatggtcaacaagggcaacatgtagatacagggacacaaatctcattagaatacactatatttgtgatcaatattcctatgaaaaaggggatgaaactgaacaagctcgtcaggcaacttgttgacactgttttctgattgaaaaggtaatgcagcatctcagccctcatctctgctgatcgagccggatctctaggagtctttagggagccatggccttctccatcaaatgaactgaagatctagaccatttctaaatcaaagtacacaggtccgaaagtctttaccacacctgagatacctttatttaatgaaaaagcaaatgatccctgggaataaaattgttggatatatcaatctaaacaaccaaaccaacatatgatactagaattggtgcaaattttagacatgtaggtgcagatgcaatagtactcagtatactgtgagttgatcaaattataccatctcagaacattatcttctttactagtgtgaaggcaactaaaatagcagtcttaaccttcttaggcagcctattaactgaagagcctagtttagaatcttaagacaatcgacactaatttgtaaactgaactagaatgacctcagcaagctaggtaactgttagaatctctatataactagaagctgcagccttgagatcaatcgtggatcggtttaatccatccaaacatataaagaaaaaaactgatcagtgtgagctagatattgatgccatacgatgatgcacgggaattatgctttatcacaaatatcatactgtcctgggtaagtggcaaaaacaaggagactaacaaccaaaacctctgcatgctgaatatgatatcgcttaagaaacacatgtcatgggttatgggcatttttcttcataggaggctaaaacattgggccagccaaacaacatatatttgctaaatatgattggcacgataaaaggcataaaagataaatctggtgtcaaataagtggcataaaagataaacctggtgtcaaataagtgaggtaattttctctagtgtcatatagggaataaagattagttccgatgtcatataaggaattctttcaattaagtttgaatgtcattgggtagcatcattgagcaaggcttcaaattgttaaatgttccttattgtgcataatttaattacattcgtgaggaaagcaagggagatgacaggtagaaccaaagctccggtggcatcagtgaggcattcattctggtaaagtggtaatcgaagttgatgtcgagtgtgagctgatcattggcatgccagccggtgatacattggaatatccttgacctgaaaagaaaatgacaacactactgttagagattctaagagtctttacagctgaaaattctaagagtctttacaactgaaactgcaattactaaaaaagcattctttaattcaggtgatatacccaatagtaaacaccataaaattcagatgatctattatgctttcatacccacagccaacgtatcctgcatatggttagtatttcataactgttgatcattttcatctatcttttagatcccaagacccaagtttttccattcgtaatagatgctctttattgctcctacgttccaaaacagaaatgtattgctattggacaaagtacttatgatcggacagtgaatatttggtgcaccaaacactgggatcaccacaaaatagtgcataaagaatctcagcttattcaaattttcgtattcctagtacctacttattttttgttta

SEQ ID NO: 44294 - DNA, 551 bp, Setaria italica
  Peptide Sequence Number=SeqID_110268
cacatcgtggtggacgatcggcctctgcaagcgcgctaaccgggaggcgcagctgcacgcccctgccaccaggccgagcgggagatcgggcggcgcatcctcctttgttgggcggcgtgggtgatgagtgccctatgccgaatatcacagcggaggcaggacggtgcagctgtagccccgtgcgattgtggctacagtgtaccgcccgacaactgtggcgggtcacgtcgagaagcgcgggcgcctccttgcgcgtcagagccgcattccgggtacgccccccatggttcgcatttatggcaagatcggtgggggcccacgagatccgcgcccccgtccgctggtccgcgtccgccctcgggcgaggcgaagccctgtcttgtgggcccggatgcgtccgagccctagcgcctggggtcgggcgaggctgagccttgcgacgaggggtcgggcgaggcggagccttgcagcgaggggtcaggcgcgtccgaccctaggaccatgggtcgggcgaggcggagtggaatatttccccgtccgtgccaagtcgg

SEQ ID NO: 44295 - DNA, 402 bp, Setaria italica
  Peptide Sequence Number=SeqID_110269
taagaaagtaaaggaagtcccaacaataaaaatagcttgtatagaatttatcattgaaccaagtgtctcgagcaatctttaaagacttgaaacagtattgtgcctcatacgtactttgatgacgtttgaattcgtagaagaatttttcgttgattggaattgtattggtcgcatcaagaggaacaagcgtgattggaatgccagaatgaaacacctggtatgcggcgaaaggatctccgaatatgttgaattctgcatttggattggtagagtaactggtaaacaagttaccatggtcaccacactgctctggcgtgcatgatgtggtagcatttttttggacagcaacctgtagggttcttcgatctcactccaccacccataatgtacatgtgctccaca

SEQ ID NO: 44296 - DNA, 413 bp, Setaria italica
  Peptide Sequence Number=SeqID_110270
atctgaggatggcagacaaggcgatgagcacctagcagcacattgcatcactttaaggggttaggatattcggagaattggttagaacatacattgggataggaaaatatctgggaccaaatagaccaatccctctttgcctgcttcctagtaaatgcattgcaatgcttctataaggatgacctgtattgactcttgacgcataggaaacaatatcaaaacctaggaaaatcaatcactagtacgtggagcgtatctaaaagcaaataaccaaactaaaaatcatcatccataaacttgagttattatgaacaggaccttgccactaaggttgctcggtgctacatgagtacatgactgcttcggtatttcttcgcaactgctgctgctgttgggccatgcaacatccgcaa

SEQ ID NO: 44297 - DNA, 275 bp, Setaria italica
  Peptide Sequence Number=SeqID_110271
ccctcgcaaaacaatgttgaatgcaacattaatatcagttttttcttccaaaaaaatacacttacaaagtgccaccgtgacacgaatgcatccttaggatctcggcagatgtacacgattcggcaaccttggattcttatggactctgggagcaatgaaagcggcaagtgagtagcaaggatcctcggaggcgggagtttttcgatgaagttcaggtccccatttaaagggatttcaacgtcaatggtcggaatgacttcgttgggggtgacggg

SEQ ID NO: 44298 - DNA, 377 bp, Setaria italica
  Peptide Sequence Number=SeqID_110272
agtatccaaagcaatccaaaatcagtatcattaggccattctccaattgtttaatcaattgatagggatgtagatctaggcagaagacaaagataaactacaaccaaattgctcatgaggattgaaaggaatgtgatgtttatcttacagtccagtaggtgaagagcctagtgttgttgtccccgtacaagtctgggctaacctgcaaatttcgtggagagcagagccattagccttaatgaaagagactgcccatgttagtccaccattacagcatgcttagctcctaaagacaacactgccagtagagatcatgaaagagaaaatctgtgtcaatggagaatctagtatagctcctacacatttaatggctctta

SEQ ID NO: 44299 - DNA, 524 bp, Setaria italica
  Peptide Sequence Number=SeqID_110273
gtgcgcaccatcaggctccgagttcaccacctcaccaccccactcgatcatcgaagcactgtcggcaaggtaggagaagaggaaggatggccagtagccgaggacatactccttgccaaactgcatccaccagttgccttcctttgggtccttccagatcaggatgctgatatcgtactgggagccagcgtagttcgagatggggaagatgctcgcccccatggcgatctcgctgttgatctgaatgaaccccgagcacaagatgttgtagcaccctgttgcctggtatgcatcgctagtccagtatgtgaacagcctagtgttgttgtctccatagaggtcagggctaacctgccaaccagcctctatgctgttgagatcctccccaaatgaaccccccaagatccagagctgggacaggctaaattcgttagcctgctgaacctgtaactctcacacattaattgtggccttcgcaccgtagtacttgtcaccctcaacgtacgctatcgcgtgttggtgac

SEQ ID NO: 44300 - DNA, 571 bp, Setaria italica
  misc_feature (1)..(76): n is a, c, g, or t
  Peptide Sequence Number=SeqID_110274
nnnnnnnnnnnnnnnnnnnnnnnnnnnnnnnnnnnnnnnnnnnnnnnnnnnnnnnnnnnnnnnnnnnnnnnnnnnntgtctttattttattattactttactaattctttcccaagtggatatgcggttgccaattcaacggttggagtatacaagagtttcagatatagatatagtacttaacataccactttttgatagattcatttctaatctttcatccctgctcacataaataaaattgcacaatcgaagaggttgcttcatagaaaatcatgagaatccttcgatggaatcaatgcaagaggacagcctttgaagattcgagttgtacactatatgtggacctttgttgctcttgatccttttctttttttcctgtttgcttccttgttttgatacaaagaggtcttcttgctcctcttgcacttttttccgattggttttccattatccacaagagtaaacacttcataaattaaagttgctatacgcctgggaggttggcattttgtcaaacaccttgccggcaccggaggcaacgtcggctatggccactggagggatggtg

SEQ ID NO: 44301 - DNA, 743 bp, Setaria italica
  Peptide Sequence Number=SeqID_110275
tgacacatgcacatctaaggcagtgaaacaaagaatagacaagaatgaacacgactgtattgcacacttgaatgcttggttacatttttttcatggtgacagcactcacactacacactagaagtagtcatgggcaatttgaattcttgccagggccaccgtagtagaaataggtgccccagtcgccattgttaccgttctgaacgtcatagcagttggactgctcggtgaaggtgcccaccccctttggggcactcagctggttgctgctgtccaccacctgaatgttcttgaagtagctcgccttgctgaacccttcctcggggaagtgcccgctgcccatctgggtcgttgtgtgcgcaccatcaggctccgagttcaccacctcaccaccccactcgatcatcgaagcactgtcggcaaggtaggagaagaggaaggatggccagtagccgaggacatactccttgccaaactgcatccaccagttgccttcctttgggtccttccagatcaggatgctgatatcgtactgggagccagcgtagttcgagatggggaagatgctcgcccccatggcgatctcgctgttgatctgaatgaaccccgagcacaagatgttgtagcaccctgttgcctggtatgcatcgctagtccagtatgtgaacagcctagtgttgttgtctccatagaggtcagggctaacctgatgaaccaaacatcacataaatgataaggcacac

SEQ ID NO: 44302 - DNA, 561 bp, Setaria italica
  Peptide Sequence Number=SeqID_110276
gctgggtgaggttggtcagaggagtgacgggctgcggcggtggtgccgagggtgaggagggttggcgccggctggatggcgtcgaggaggctgcggccggtgctgtagacgccgccgaggtagaaggagaaggcgcagagcacgatgacgacgagcgccaccggcaccgcacgggacccggcgccggcgcccgccgccctctcgggcttgtcctccttgctgtacttcatggctccaccctggtgaactgaaggaactcgatcaactcaacctattaaaaaagagaagcagaagcagaggcaggcggccactgctgcaaccgggggggaaaaagcggggaacatccggcgcattacgagatccaatccgatccgatccaaggaggaagtagttgctcgcaatcttaaattccgtgaaaccaggcaaccaaaaggattcggtcgcgggtcgcgttgacgaccgtgcttgcttgcttaccttaccctggagcgctggagtgaagtgggagtgagctggtggtagctggtgcctgatggaggaggaggaggaggagggtcgggc

SEQ ID NO: 44303 - DNA, 923 bp, Setaria italica
  misc_feature (907)..(907): n is a, c, g, or t
  Peptide Sequence Number=SeqID_110277
cgtcttgtcggtgccgagcgctggcagtagcgtcttgtagtgcttggccctgagcttccaccagatcaggatgctgatatcgtactgggagccagcgtagttcgagatggggaagatgctcgcccccatggcgatctcgctgttgatctgaatgaaccccgagcacaagatgttgtagcaccctgttgcctggtatgcatcgctagtccagtatgtgaacagcctagtgttgttgtctccatagaggtcagggctaacctgccaaccagcctctatgctgttgagatcctccccaaatgaaccccccaagatccagagctgggacaggctaaattcgttagcctgctgaatcttgggctcccacacattaattgtggccttcgcaccgtagtacttgtcaccctcaacgtacgctatcgcgtgttggtgaccaccctcactgagcatgttaggatcaacagacagtgggttcggagcagtatgccgcttcctgccatagcgcttcatggagctcgctcggagcaggtcatccttcttggttctcctgattggaaccgtgccctctggacatctgccatttcgatgccacatttggagcattggcttctctctggcattgttcgagcctatgctgctcttgacatcatcatatagaccttcagggtggtaggccggcctaaactgtattgtgtggttcttgaggagaggatggtcgaaggctggttggtgggagatgggcacgcagtcgatgatgtctccatctgggctctcgatgctcttgacggccggcttgttgagccgcttgaggtgccggtgcaccctccccgccggcgacctggcctccgccgccgtggccatccacagcacccacgccgccgcaacagccaccacccacgacgcggggccnccgccgcgcgccctcg

SEQ ID NO: 44304 - DNA, 1166 bp, Setaria italica
  Peptide Sequence Number=SeqID_110278
caagagtaaacacttgaaacaatcaatttgttataagttatcatctactaattgtaagctccaatattattctcacttcataattaaagttgctatacgcctgggaggttggcattttgtcaaacaccttgccggcaccggaggcaacgtcggctatggccactggagggatggtgcaggcatgcgaacctgtggctggagctgctgctcgctccaccatgttgacttgcagctgtgcgagctgcttgtcaagctcaccccatcactgcactgtaggagctcttacttggtgccgccgtcgcattgatctgcagctcgcgtggctccatgggtcgtggccacactgatggagaggctggggcggccaaggaggtggagcagcacaatggcctcccgcgacctccatcagcgcatccctgcgtgacggcatcgacttttcgcctgcattgttggagcctatatatactgctcttggcatcatcatatagaccttcagggtggtaggccggcctaaactgtattgtgtgattcttgaggagaggatggtcgctggttggtgggagatatgcacgcagtcgatgatgtatctatctcgatgttcctgatggccagcttgttgagccgcttgaggtgctggtgcaccctccccgctggtgtcttggcctccgcccacgccacggagccgccaccgcgcggcctcgccatgtgcaccccccactaactgccgcagcacactgactcctcccaccgctcaggcgctcagctcaaccacgcctaacaaagacaccaacgcctggcatttgatcgagcaccttgtaggcagaacagcaccattccaggaaggagcagctgctgctagagctggcagggtgagcacggtgtggactgcagaggacaccacggtgctgctgccagcctgccagtgcaagaaccctgctgccgctgccgctgttgttgatgccactgttggtgacggaggcgtgcttctgcgaaattgcgacgagcagggcgctgctgggttgctgggatctggcagttgcgacggccgcgggtgtaagcggcggcatcgccaaggtgaagaccgcttcgctgcccgtgcagccgtcacccaccgtcgcctcgccgttcgcacgcccccagccagcgacgccctcccccgaccgaca

SEQ ID NO: 44305 - DNA, 1825 bp, Setaria italica
  Peptide Sequence Number=SeqID_110279
gcacacctgttttttccatatcaatagaaaaaaaattgcaatacagaaggtccagcaagccaaatggcaactggggcaaaattcaggccagtccaattgcaggttctactatacaacagtggcataaatggattcaattatgcacaggggtaacctacagagaaacacagcgcatacgagaatatacgctatggatcaacaagtgcagtactggagcagctttgcatccacaattttatttggcgaggatttggacaccacaggcagcctttgcatgcttgtcttcagcaaatacaagatttcctctcacaaaagtagacaggaccttaccagaaagctctttacctaaatatgctgaaatattccgatgtttatgatatacagaatggctgtcatcaagttcgaactgtgcctcaggtttccatactacaatgtcagcatggtatcccggcagaatagctcccttgttcttttgccctgcaagcttagctggattttcactccaccatgcggctagttgattcagagtaatgccatacttcttcccgtacgaccatgtcacaggaagaacaaactgcaatgatgatatacctccccatgcctttaaaaagttgccttcttccattagtttgagatcaggagctgacggtgagtggtctgagcttaacatgtctatgtgcccgtcaagcagagctttccaaagattttctctgttcatgccatcacgtataggaggagcacatttgaagcgagtatccccatctggaacttcgtcagctgaaaatgccaggtaatgaggacatgtttctacagtcacacttgcaccagtgcgtttagcatccttcataagttcaagggaagtttttgcatctgacagatgaacgatgtgaatatgggctccttctgaccgacctcctgcctctgtatccttcatcgcacgttgcaaatctctaatagctgattcctcccatgctggtggtctagacttcagatatgtcgcataggatcggggatctagttcaccatcgagtccatcttcatcctcgacatcaggtatacgttcagcatggacaagcaaaggtctctggtattttgccagtgtgaccaatccttcctcgatatgagttgaatttgtcatgggaaagtcgttgatgcccgagggacacataaaagacttcagtcctaaaactcctgcatttaggaggctctctagagcacttgggttgaaggcgttctctggcacgagacctccccagaaccctacatcaacatatagcttatcccgagctgcttcgagcttcagcttgagagtttcttcagaaactgttgatggaaagttgttgagtggcatgtccactagcgttgttatcccgcctgcagcagctgcctttgtaccagtggagaagccctcccactcttcacgtccaggctcatcgagatgggcatgcacgtcgatgagtccgggcatgatgaccgcgtcaccgtagtcgaggagcggccgccggagcacgaagctcctgtagtccccgacggcgatcgcgttgatcagtccccctttgacctccactgcggcgggcccgacgcggccgagcgtgacgacgcgttcgctggcgatccagaagtggtcgtgcgggaggagactgcacccttcgccgcccaaactcttggagaagggcgcgcggtagaggagcgcggccgcgagcgccgccaccaccgcgagcaccggcacgagccgccccttcgccgatgccgccatggctcctcctcctcctcgcctaagtgccgtccctttctgtttttgctgcgtcgtcgtggtgaagccccc

SEQ ID NO: 44306 - DNA, 1600 bp, Setaria italica
  Peptide Sequence Number=SeqID_110280
caattagtagatgataactttttccgattggttttccattatccacaagagtaaacacttgaaacaatcaatttgtcaccaacaattaatcaattcaattcaactcgccaacaggttgaaaaggcatggggtggacaaaattatttgacagacacaaggcacaaccaaaccatacaggcctgtttctcttcagaaacttgaccacgctcctccctagaaccagacgaccaacatctctgaggcagagaacaaattcacatgtcaacacacacacacactcacctagaagttaataaactagggggtagaagtaaaacaaaacccaaaccaagaacaagaaaaaaaattaagaaaatgaggtatataagctaatttacttggatgatacagagggtgttagggctctgatagcaagctcaatcttcactatggacagttagagttcttcccggggccaccatagtagaagtaggcaccccagtcgccattgttgccgttctgcacgtcgtagcagttggactgctcggtgaaggagcccacgcccctcggcaccttgaggttgttggacgagtccaccaactgtatgttcctgaagtagctggccttgccaaacccttcctccgggaagtggccgctacccatctgtgtggaggtgtggctgccatcaggctccgagttcaccacctcgcctccccactcgatcatggaggcactgtcagccaggtaggagaagaggaaggacggccagtagcccagaacgtaattgttaccgaactgcaaccaccaatttccctcctttgggtccttccagaccaaaatattgatgtcatattgggagccaccatagttggagatgggggagatgctggcgcccatggcgatctgattgtttatctggatgaaccccgagcacaataggttgtagcatcctgttgcttgatatgcatcactagtccagtaggtgaagagcctagtgttgttgtccccgtacaagtctgggctaacctgccatcctgcttcgatgctgttgaggtcctggccgaaggagccccccaagatccagagctgggacaggctgaactcattggcctgctcgattttcggttgccacacattgatggtggccttggcgccatagtacttgtccccctcaacataagctatggcgtgctggtggccactctcattgagcatgtcagggtcaacagacatggggttgggggtgctccggtgcctcttcttgccatacctcctcacagagcttgctctcaggacgtcctccttcttggtcctcctgataggtatcgtgtcctcggggcacttgccattctgatgccacatttgggtgatagtctgggtctgctgctgggaggcgaccttggactcatcatacaggccttccgggtggtacgcaggccgcatctggatggtgtggttcttgaggaacgggtgatcgaaggcaggctggttggagatgggcacgcagtctatgatgtcaccgtctgggctctcgatggtggcgagcggcgccttgttgaggcgcttgaggtggctgcgcacctgccgctgccgcagcagctggcccccgccgttgcctcat

SEQ ID NO: 44307 - DNA, 1867 bp, Setaria italica
  misc_feature (1)..(49): n is a, c, g, or t
  Peptide Sequence Number=SeqID_110281
nnnnnnnnnnnnnnnnnnnnnnnnnnnnnnnnnnnnnnnnnnnnnnnnnttttttttttttttttttaacctacaaggacaagtgaatctaccatataggaaaaggaggtaggccaccataagggcaacacatcaccaccacatgccatgcttctcttcagaagccatcttggcactaacaagaaaaaaaaagaaagagaagagaagaaactcagcagagagagaaactactacacaccagcaacaaaagaaccccattcacatgacacactattgatctagggctacgagaaaactgatgcttgcgacggtgtattacactctgaatcgcggctacactttcagagttgctactggcagttggagctcctcccagggccgccgtagtagaagtaggtgccccagtcgccattgttgccgttctgcacgtcgtagcagttggactgctcggtgaaggtgcccagcccctttggggctttcaggttgttggtgctgtccaccacctggatgttcttgaagtagctcgacttgctgaacccttcctccgggaagtgcccgctgcccatctgcgtcgaggtgtgcacgccgtcgggctgtgagttcaccacctccccgccccattcgatcatcgacgcgctgtccgccaggtacgagaagaggaacgacggccagtagcccagcacgtagtccttgccgaactgcatccaccagttgccctcctttgggtccttccagatcagtatactgatatcatattgggagccagagtagcttgaggttgggaagatgctggcgcccatggcaatctcgctgttaatctgaacgaaccctgagcacaatatgttgtagcaccctgttgcttggtatgcatcactggtccagtaggtgaacagccttgtgttgttgtccccatagaggtccgggctaacctgccatccagcctcaatgctgttaagatcctccccgaatgatccccccaagatccagagctgggacaagctgaactcgttaggctgctcgatcttgggttcccacacattgatggtcgccttggcgccatagtacttgtcaccttgaacatacgctatcgcatgctgatggccaccctcgttcagcatggtgggattgaccgacattgggtttgctgttgtgtgcctcttcctgccataccgccgcattgagcttgccctgagcaggtcgtccttcttcgttcgcctaatggggacggtgcctaccgggcacctcccattctgatgccagagctgtaccataggcctctcgccattgctggtggaggccacattggtcttggattcgtcgtacaggccctccggatggtagttcggcctcatctgtacagtgtgattcttgaggtacgggtgatcaaacgctggctggtgggagatgtgcacgcagtctatgatgtccccatctgggctctcgatactcttcacggccggcttattgagccgcttgaggtggcgatgcatcctcgccgccggcgtcctcgcagcggcggcggcggcgcacgacaaacagatcaccgccacgagaaggcacgcgaccccccgcgcggtgtccatgggcggcgcctcttcagtcttcgcacctccaccgctgccccgcctgccttgccctcctcctccccctccctacggcgagcttgcagcgaagcaaagcggcccccttcaccagaagagcccctcgccgcagtcgccggcggccagggggatgccaccaagggccgattcgagaatttttgaaacaatgcgggtgcgtggtgggattgggagtgggagtaaatggctcctcgtcttgggcggctcgtcgtctcggttgggagcggagccgcactactagcgcttgc

SEQ ID NO: 44308 - DNA, 2760 bp, Setaria italica
  Peptide Sequence Number=SeqID_110282
ttttagggtaaagaccggcacatcagtcatatcttgctccataaatgtttaaataaatatggcactctattacaatgacagcaccaaactatatgttgtacaaatgaacacatgtagtgttggattgtggagtaacttacagttgctcttggtatcaatcgacccacccctaactattcatacaaaaagaattaacagtgtgattaatggtaaaagtactaacttttggatcctatatggagtttttgctcatcttatttattttgataactgtgaaccttcttgtatatcagattgttcatctttcatgtgtactggatggtgaagcgtgcctttgccttgttggctgagatcacagcatgtttgagctttggataccattgagcagatcaacatatcatccatccaggttaaggatactttctttttatacttggatcaacaattctctctcactgctttccaacccaaagcttcttctggcagattaggatcttgtccttgtcagtcttgttctcagggttacgcttctcacagctccacctcattcctttggcaatggctgctacagagtccaggaagtaggtgctctccctgattattgcataacctgtgggacgaaggatacggtccatctcaagaagtacaaacttcatctcgcacctgtgagactccgcggtaaacaagccatcaagatgcaagagatcataggtgcgtgggtatgtcgagaatgcctcacaccagtcgtggttgacgccgatgagccctctgtcgtagacgacgccgagggagttgggcccataggaggagacgacgttcatgacccagatggggtccttgatgaggctggccgcgaaccctccatagaccgtgttcatgtccatgacgttcctgatcttgtcggtgccgagcgctggcagtagcgtcttgtagtgcttggccctgagcttccacctggcgtcgtcgtgcttgaaggcgccggcgctgctgcctgggacgacgttgatgcgctctggcgcgacgctgagcctctgcggccacttgggggtggcgttgagccccagcttcttgtacttggcgctgggtgccgtgacgcaggagcgcatgggcacgtaccaggcggcgtccgggtcgacgctgtcgtcgcacttggccggcgtggtgatgggtgtgagcttgtcgtagcaggcggtggcgtcgggcgacttctgccagacggcgatgtctcccttcatgttgtagagcttgaagcacatggcggcgagcatcttcttgaggcggtcgaagtcggccttctgcgcctgcgcggtggtgttccagccgtgccaccggttctcgtagttgatgggcgggccggagagcacccagaagccgccggggcggaggatgcggtggatctcgaggaggtagagccccccgaactctgtccaggggatgaggcaccgggagcagtgcgccatgtcgaaggcggcagaggggaagggcaggcgctgcgtggagatgatgccgaggatggccgggatgccgcgctcgagcgcgaactggacctgggcctcgtggttgtccctgggcgcgagggagacggtgaggatgccgcggccgagcaggtcgccgccccagctggcgacgccgcagccggtgtcgagcgcggtgcggacggtgccgtcgcgcatcccggggatgagcgccgccatgaggtcgacgtaggcgctgacgccgttggggaacatggtgccgccgccggggaagcggaagcggtcgccttccttggcgagccagtgctggttggacttctggctgttgatccagtcgtaggggacgttgcggtaccaacactggtccttgctcttgggccaccggatggggggcttgtagcccttgggcggcgggacgaggcactgctggcggtccggcggcggcgggcagtgccgctccatgaagctcaggcggtagttgccgtagcgccgccaccgcttggggtcggtgcagggggtgtagtcctggaagtcggcggggcactcggggaacgccaccgccgtggcggtggtgggcgatgctgggtgaggttggtcagaggagtgacgggctgcggcggtggtgccgagggtgaggagggttggcgccggctggatggcgtcgaggaggctgcggccggtgctgtagacgccgccgaggtagaaggagaaggcgcagagcacgatgacgacgagcgccaccggcaccgcacgggacccggcgccggcgcccgccgccctctcgggcttgtcctccttgctgtacttcatggctccacccttaccctggagcgctggagtgaagtgggagtgagctggtggtagctggtgcctgatggaggaggaggaggaggagggtcgggcaccgacggcacgcggcgggggaggcggtgcgtggatccgcgatatatgttgctgctcgcagttgcagcgctggcaggatgtcggcgggcaccgcccgtacgcccagatcttgtcgttccttatttgtttttgttctacgcaaggaggggacgacgacggacggaggcggcacgcggcagcgcgcgatgcgatcagatcaaatcaaacaaatcttgcgatgcaatggcgccgcgacgacgcggaggagggccggcgggcggcgcggttgcccctgctacccttctctttgttctgctcaggtttgaggttgtagcgcacggcggcggagggagcgggcgtaacaaacctagcaaaagaagaggggatacgctctcaattctgc

SEQ ID NO: 44309 - DNA, 290 bp, Setaria italica
  Peptide Sequence Number=SeqID_110283
ttaggagcaatccaagcagcgagcacaagggcggcagcggccagcggtggctcagcacaacgagtaggcctctcggcgatagaatgggtcggcagattgtatcatctaggatgtttgaggacattggccggaactatggatattttcctgatccaacaaacctgtatgtggtcaagtgcaaaatgtgtgtgaaagatgctcgctctattgctcttcaagctgccaggataagaaggccatatgataattatctattatcggacgggattcctttttagttcagttagtgt

SEQ ID NO: 44310 - DNA, 332 bp, Setaria italica
  Peptide Sequence Number=SeqID_110284
aaataatctatgcagcttcaacttctcttggtcaacgaaatttcaaaaaaagaatagcctactcctccgtatctcacatgggtttcataattataggaattggttccataaccaacattggactaaatggagctcttttacaaatattatcccatggatttatcggtgctacactttttttcttggcgggaacggcttgtgatagagtgcgtcttgtttatctcgaagaattggggggaatatctattccaatgccaaaaatttttaccatgtttagtagttttcaatggcttctcttgccttgccaggaatgagcggttttgtgcagaatt

SEQ ID NO: 44311 - DNA, 247 bp, Setaria italica
  Peptide Sequence Number=SeqID_110285
cttgaggaggacaaggcagctgtgatcactgaggaggtgccacagagcactggtaaaatggatgaggatgacgaggaagatcagttccaaactgcttttgttcatgatgatcaagtagtcactgctgacagcgtgccggatctgaaaataacaggttttgaaccaattgaggacaagacaacactgataactgatgagaagcaacagagcacagtcacaatggatgaagatgttgtcgatgatcatt

SEQ ID NO: 44312 - DNA, 473 bp, Setaria italica
  Peptide Sequence Number=SeqID_110286
cccttccaccatcaggctctggccggtcgccatctcccccatccatccccctcgcccttcgtcttcgccttgctcttggcttcctcggggcaggcaggtgaaggggaaggaggaggcaagagcctgatttgatctgcttgcttttgggttgccgaggagagggagagggagaggggttggtgccgttggaggaggcgtgcctctgtgtctgtgtgcgcgcggagatggaccccaagttccccacgcccccaccgctaaacaaaacggagcccaccaccgcgacgaccaccaccaccacctccacgaccgcgcagcagcagcagcagctggatcccaaggactaccagcaccagcagccggcgcagcaccaggagcagcagcagcatcaccacctgcaaatccaaatccaccagccgcagcagcaggacgggggcggcggcgggaaggagcagcagcagctgctgcaggtggcg

SEQ ID NO: 44313 - DNA, 337 bp, Setaria italica
  Peptide Sequence Number=SeqID_110287
ggcggatgaagcggatatgggactttgagcgtacaggtcctgaatcgaacatgacagatgctgcgttattggtgccaagatcgtaagtgtgcttccatttgatttgcgtgccgatataatttggcgtgcttcgacttgatttgtgactattggcatttggcagtgacaatcatttgtctatatgtgcaattttctccacgccaagacgaagactagaccttagtcgccagccatttctatgcgctagctcgagttattctccttgcgaaatatttgagcacgcaagttcactccgataagaaaatatgcaagcgacggatttctattgggttttgtc

SEQ ID NO: 44314 - DNA, 436 bp, Setaria italica
  Peptide Sequence Number=SeqID_110288
gctgcttgtttcctgtagccatgcattaattaattttaggattatctcataagaaatagaatcgtacttttcatttcctgaactagctctagaaatgttggaaattattcctttttgacaatgttatatggagttttgagctccttcataacattggagattattcctgaactttgcactgctcttttatttttttggcaacaactgagacggaggtgggcttaattgcctagtaaagctagcatgttttataactttatgtccatatgaatgctactaatttccatgagctatacggcatgccagtgtattatcagctcatctttagctaatgttccaaatcaatgccatcaccgttgtttcttaaatgttgaaaatactcattagtgatttgcttaaataaaactcatggtattcaacatgtttacttttaggt

SEQ ID NO: 44315 - DNA, 918 bp, Setaria italica
  Peptide Sequence Number=SeqID_110289
aggctatatgcaattttgaggtcctttgtaacagtggagattattcctgaactttgcaatgctctttttttgggcaacaactgatgcagaggtgagcttaattgcctagtaaagctagcatgttttataacattatatccatacgaatgctactgatatatttcctagagcaagctatacggcatgctagtctgattcctgaagagtacctttagctatttctccatatcaatgccatcacagttgtttcttgaatgttgaaaatactcattagtgcagaaataatatttttcatttgaatcaggatgccactgtagctgcaggtgccaggaccgtgtagatgatgatgcgtaatggctggtgtatgaagcgcgtacggggacgagctctgtgaaaaaagagatcagtgacacttggatgctcttatggtcacaagtgacgatcctctcctaatcaaagatccagcctaccatctgagttgcttaatttttttgaatgttcctgaaatctggattactcactggtggattgcttgtagaatccctatgctgcgtctcctttctgttgtctctgctgggatgacagatgaccagatcaatcctgctgccaatggccattctaaccaacgtgctggaggtgactagcggatgacaacaattatttggcgtgaatccaactgctggctctgaccctgtacagatcatgagctccaggaccatcttgcaacacttccatgaccttaggtaagttcctgctacagctttgatttggtttcctattgttgccagtctgttcttcagcttccgttcattttgttatggctctttcatgagaggggtcctacaaactgctttctccttggtttatgataccctgggtgtttgcaagacaagctttttacattgacatatgtcactg

SEQ ID NO: 44316 - DNA, 742 bp, Setaria italica
  Peptide Sequence Number=SeqID_110290
gcagcagagcgccggcagcggatcacccaccgccaaccctagcttcgcctgagctgaggcagcagcgcccgccgtcgaggaggtcacctgatggtgtccatgagcacgacgccgcaccctctcgattcgtccgtcccgggcgtcggaggaggaggcggcggcggcggggagggcaaggaggcggcgcgccgggtgcgcctggtgcaggccgccgcgcccacggccgtgccgctaggggacgaggacgacgaggggcccaggagggtgcggaagccatacaccatcaccaagtcgcgcgagagctggaccgagcccgagcacgacaagttcctcgaggcgctgcagctgttcgatcgtgactggaaaaagatcgaagcttatgttggctccaagacagtaatacagatcaggagtcacgcccagaagtactttttgaaggttcaaaagaatggaacaggtgagcatttgcccccacctaggccaaaacggaaggctgcccatccatatccacacaaagcctcgaaaaaagcgcttcaagttgtcttaccgcaacaagcttctcatataatggaacaaggctgtggtacatctatggatacagctaccgttgctactgacttaagtgcaaatgatgcttttctttcttgggagaatgatcctgttcaacaattcagtccaaggcatacacaaggttcaggtgcaacgaataattgctctagtagcataggtagccaatctggaa

SEQ ID NO: 44317 - DNA, 739 bp, Setaria italica
  Peptide Sequence Number=SeqID_110291
taatttgaacttccattaactttgaagctgctgaagcttttcaaaaactgcggcgctagtttcctccccaagaagatatgagcagaaagattcctcaaattttagatctgtgctctcagatgcaactaaacattcacagatagttttagctttcttgatcaactcagtctggcgggttgaaaatccaaatgcaaggtgagcaagcattgccacatagaagcagttgaagtcaactaccactcgctggctttgggactccaatgatcttttatttttacgagttgtagccaaagtgtcccaagaaagtagatccacgatttcagtggctaataatttgttatcgcttgacctaagaagcaaggccagtcatggactctacaagaagattcaacatcaaggccctgctaagcaattcacagagagctgcaatagcacctcgcctgcgttcagaattttcaggtgtctgaggcaagcttaaaagctccaaagtgcaagcaggtgcaagctcctcaagtgattcttcaatctgttcaagaagcggcatcttctccaatgatggttttctcctcaaaagatattgagcacgtgctagagcctcaaagccaagggaaaccttacttttctcaaagctggcttttgctatagagcattctgctaatgccattgcaagaagtatgtcgtgaacataaggctttgtaattctagggtcgttcgtctagtagtcttgtctttgtaccgt

SEQ ID NO: 44318 - DNA, 278 bp, Setaria italica
  Peptide Sequence Number=SeqID_110292
caggagctcaagcttctgccttcttgtggccgcacccttctcatttccccctcgcctctccaaccccctcaagcttcggccttcctgtggccgcacccttctcatctccccctcacctctccaacccctggaatgggtcgtccatcttctcctctccctgctggtaccctcggctagcctcctaagggaccagaacctccttccctaaagctccagccacctccttgcttcctcccatggcgtgtcggcctgaggaggaagaatacgtgggggtacca

SEQ ID NO: 44319 - DNA, 252 bp, Setaria italica
  Peptide Sequence Number=SeqID_110293
gtgtgacttccaataatttttgttcttgcaattacatttctttttatctgtgttcactcttcacataattttcatttttcagcaaagtattctgtagtttgacatttaacctagtaatcttgaagccattacatagtatgagtaatattctgtacatcaatttgcatgcatgcaactagatgtttgatgctcaatctctttcacgtttctaggaatataatgtcgtatcttcaagtttaaaaagaataaaat

SEQ ID NO: 44320 - DNA, 640 bp, Setaria italica
  Peptide Sequence Number=SeqID_110294
tcccttcgtcgcgagagagtgagtgagggagatggagaaggcgtccccggtgaggagctcccacacctccacggccggcctgctcgcgtggcctcaccccgatggcgccggtccgctgccagcgcgccgccctaaccagccgacggaggagttgaggaaggtggtgttcgggggccagggcaccgaggatgccgacggcctcaacaagatgtgagatacctcccgcgcctccattggccggattccgctccgctcccattgattcggatcaggccgttcaatgcgatcggtaccccgcgtaagtgcctgcttactgattgcgcctgctgctaactctgatcgttccaggaggacgggctccgcgcccaagtggaaggagatgacagggagcagcatcttcaaggccgagagcgccgccgccccagctgcatctcgtgatcgtcaggcaagtcagatcacttttgctcaggaaggcagcattgctcacaggaaaccaactacagtagctgaggtggccaggcagcgtgagcttagccataccgttcagagtgagggggcgtaagatgaagaggcaggtctccactgtaaaatccaaggagctcagcggccacgacatcttcgccgaccaggacggatcccc

SEQ ID NO: 44321 - DNA, 1313 bp, Setaria italica
  misc_feature (1274)..(1274): n is a, c, g, or t
  Peptide Sequence Number=SeqID_110295
ccgccttcatctccattcccttcccttcccttcgtcgcgagagagtgagtgagggagatggagaaggcgtccccggtgaggagctcccacacctccacggccggcctgctcgcgtggcctcaccccgatggcgccggtccgctgccagcgcgccgccctaaccagccgacggaggagttgaggaaggtggtgttcgggggccagggcaccgaggatgccgacggcctcaacaagatgaggacgggctccgcgcccaagtggaaggagatgacagggagcagcatcttcaaggccgagagcgccgccgccccagctgcatctcgtgatcgtcaggcaagtcagatcacttttgctcaggaaggcagcattgctcacaggaaaccaactacagtagctgaggtggccaggcagcgtgagcttagccataccgttcagagtgaggggggcggtaagatgaagaggcaggtctccactgtaaaatccaaggagctcagcggccacgacatcttcgccgaccaggaggatcccaagcccaacaggtcaaggagatcaaactatggcagctctgcgttgctctcagcagtgaaaaatgcaaatgtgagcaccttctcgttcggagaggccgacactgacagcacggcgaagacagcaaagaagaaaggaaccagcaacaagcccgctgatctgaatggcaaggtcatctccgagaaggattcagcacctgcggtgaagcagcctctgaaccgcgcgaagctggaagaaacgactggcagcagcgtttttgcagacgggaaggccccagcgacaggagagcagtcaggccgccggacccggccgcctcccggcggcgagagcagcatctcgctggcgtagcgtcttggatgcatgcatcatgttcttgcattggggccgccgcacgggtggttggacggtcagtttgcggccttgttttggtgatgatcaggcgacgagtcccatctccagtccatacgacgatctggtttgcgtttggtttgtctatgtgttgtttgggttggttgtgacatacccaacggaacaaccccatggcgtgtggtgctcgttttgttgtgcgtacggtggatatatatgtttggtataaataagaaatcggttactggaaccatgagttcgaaccgagatcacgtgcaaagcgcgaagatgcaaactattgcactgcattgatctcatccaaggttgaatgacagcgcctcataacaaagtggtctactcattttgttaaaaaaaaaaaaaangacacgcacaagggaggtagcgagagcacagggaggtag

SEQ ID NO: 44322 - DNA, 628 bp, Setaria italica
  Peptide Sequence Number=SeqID_110296
tcggggtacgtcctagtctagtctagttggtcttccgtcctaccgtctcgcgccgtcgctctcactccacgcaaaaccacttccagcctcgggcggctccgcctctcgccctcgccaccgccgcgtccggtgcgcgcgcgctcgatcgccatggacgggcaggacggcgacagcaagcagaagacgaagccccacgggaacccgtaccccaagaggggctcgattaagaagcagatcatcaaggactggaccggcggcagcggcggcggcaacgacagcggcggggacgccagcagcagtggctccgccaccgctggtggctactacggcgccgactgacgcatggcgcgtgcgccggagcgagcccccgtgatggtttgttaactgttgctcaagtttggctgccgccggccggccggattaatgctaggccagtaggctagctacctgccggttgctaattaattaagccagcggatcgtgtaggggtggaggagaagcgtgcggatggtggtgtacaaattggccatgtgcttgcgttgcttggttgtgtaacttgtcttcaataaaatctgatggggccgcacctacttggatttaagaaaaaaaaaaaaaaacctaaaaagag

SEQ ID NO: 44323 - DNA, 449 bp, Setaria italica
  Peptide Sequence Number=SeqID_110297
catctgttaatatatcttgcattaattgttccttgaaatagcccacaaagaagcataatcttccttcaagttcagaaacacactgaagatagttaaaaaaaacccaatcagatattgccgtgataaatagtacttgaccgatatttggattctgtcattgtagattaaaattcctataggcttagttctaatgtgataccaacaattcatcggtctggtcatccgagcgggcgacatgggcggcccccccacctccccgccgcaagcctatcaccgctgctccctgcctccgccgccaccagagctgcaccccgaaagcccggcgagcgacgaggagggtggcggcggggccaactctcgcttccccctcctttcttcctccccaaatctcccctccctttcccgtcgtttttgcttgctccggcgaacttcgtgcttggcggccagtt

SEQ ID NO: 44324 - DNA, 434 bp, Setaria italica
  misc_feature (393)..(434): n is a, c, g, or t
  Peptide Sequence Number=SeqID_110298
gttcggtcggcgtgggcgtcgggatgggcgccggtgcgggcgccggggcaggcggcggcgccggtgcgggcgctggtggcagcgggcgttgagccgtcgtcgacgggaagaaggtgtgcatgcacgcatgcatgcggcatgcgcaatggacgagcttttccttccaaacctcagtatgtgccgcgctcgttacaacgtggttaaattaccgttggtttcgccgtctgggtgtttgcagtgtaactagtccgagctcaaaaaaaaagagctcgatattgtcggtgtcaagtgcttgtgataattcatgcaaaaaaaagagccaagtgaataataatactgctgatttttttgctatccatcactcggttgatttggatagacaaataaaacctnnnnnnnnnnnnnnnnnnnnnnnnnnnnnnnnnnnnnnnnnn

SEQ ID NO: 44325 - DNA, 1368 bp, Setaria italica
  Peptide Sequence Number=SeqID_110299
acccaccccgccccggaccccggtgctgcgctctgcaggcggaggagaccagggagagagacggacgtacttgattgatgaggaagctgccgtgaggaaacaactctgcgaggcgagagaactgctggtgagacaaagtgcgaagcaagctagaggcgaccaaatggcaactgactcctcggccctgcaagcttcccctgagtcgattgcgcaaaagatgggattcttcaaggtccctgacattcttatcaaactgagcaccagtttgagcgaattggatgtggtccgcagtccaacatcgcctttagacctcaagttcttcacaggccttggtaccaaatcacccagatcatcttcccttgatgcctgccagaaccagaagatcttgcttggtgacagggttgggcttggacttgtggattccctcgctgatgagaatcccactcccctgggcagtaggaaggtccttcttggatctgaaatgaggattactgataatccatccctcaagaacagctccactgctcctgttcaagctggggaggttgagcagaagaatgataatatgtctgatggactcgagggtagtatcatgtcccttgatgacattgtcaattcagaggattacacctgtgttgtctcccgtggccctaaccctaaaactacccacatttttggagatcgtgtttttgagcttcaagttgagcacctgatgcctgctgagagtaaggatgaggagaacatgtctcctcttgtgaaagagggtgccatgagcttctgtagattttgcagtgagaagctcaaagaagggaaagacatctacatctatcagggtgacaaagccttttgcagctcagagtgcagggagaatttcatggaagatgagatggaagaatactatcctgcacctccaagcagctcacccttggacaatggtcctattttccaactgatccgttgagtgaacaccagcagcaacttgatatggtcgtatctgaagtgctgtccgaggttaataagttgcagccatggatgtgatcatgtttgcggagttgttgcctggagattttgtttggtgcggcactgatgaatttacctcacctattgagttctttgttttgcgtacttggatcctcgaattttttggaggagtccgaagaatgactgtacctctggtcatattattatcttgatcggagatgggcgtgtgcgtgtgtgtctgaagtctgaacttgagtttggttgtttggacctcatttttcagtggctgtcgaatgtttcgacgctcctgttactcatgtatctgaacctatgttttcggcatgtatttctaaaggaatgaactataatatcaataaatgttctgtt

SEQ ID NO: 44326 - DNA, 454 bp, Setaria italica
  Peptide Sequence Number=SeqID_110300
gctctgtacttgaaacaggtgtcaatactcttcaaataggaactcaataaattagttctgaagctatgatatttaataataactatcagagccctaaataaaggaatggaacacattgtccgtattgccagaagcagatctagagtttattatggccttttagcattccagtttctattatttggtttagatatgtacaaatagttaggatggaaatctcaatacagaatacagaagtaggataaagaagcacccttaggtacccaaattaaatttcaagctgaaatttttaaagttaaaaaaaatctctatttcagatcatttattatatagctcaatattgggccacacatttctggcagcaatgataaaatacataccaacagaataaggtattcagttagactatagcatatagctactataaactagaaaagtaacgggtccaaaatgg

SEQ ID NO: 44327 - DNA, 499 bp, Setaria italica
  Peptide Sequence Number=SeqID_110301
cgctcgtcttgcgcttcctggacggggagaccgacccgccctccgacgtggacgacgggttgttggtcacgccggcggcgaccatccccgtgtactggctccgcagcgcctcgtacttggccgccaccgccgtgagcgcctcggccaggcgccggttctcctcgcccatccgctggagctccgtctcgagggccgcgacctctggttctttcttgagaggctgcaggaagttctcctcgacgagcaccttgggcttggccatggcgaccggcgcctggtggcggctgagcggcggcaggccgacgtgaaggtcaaggctcagggaaggctggctgccgatccatggatccatctgccgattactaatccccttcgatgtctcagagcaggtcaacaaggctgcagagcgctcgatgtagaaggagacaggagaacgagggaggagctggaggagtaggaaagaatgcctgagcggtgggagggcaatggcgtggggacg

SEQ ID NO: 44328 - DNA, 822 bp, Setaria italica
  Peptide Sequence Number=SeqID_110302
ctgctgcgggtggtcaggcgactgaggcgccgccgccggggcagcgggcctcggcggcgacggcggcttcgcggcggcgttcttggcgtcgtgcggctgctgctgcgacgacggcgccggcgggggctggccgtggttgtgctcgccctcgtacgtggccacgaggatggtattgtcgtcggcgctccgctgcaccttcttcttgacggggcacgccggcgcgaaggagcaccggaagtaggcccgcgggcaggggttgtccttggtcaccttctgcccgtacttgcgccactggtagccgtccttcaccaccaggctcaggtccgacgggtccgcgtgcacgtacagcttcgacaccttgggcttgcactcctcccggatgcgcttgcacggctcgccggaggtgcactccatctggtctgccaggcccggctgctgctggccgccgtgctgcaggccgtgctgcggcgggtgctgcgcctgcgcgcccggcgccgccgcggtgtcgaggctctcgctcgtcttgcgcttcctggacggggagaccgacccgccctccgacgtggacgacgggttgttggtcacgccggcggcgaccatccccgtgtactggctccgcagcgcctcgtacttggccgccaccgccgtgagcgcctcggccaggcgccggttctcctcgcccatccgctggagctccgtctcgagggccgcgacctgcgcgtttcaaggatccattagactcgtagctcatcaaacaccgagctgctactagaatcaatcgatcgatcgatcagccacgccatcgagtcgggggtctgttta

SEQ ID NO: 44329 - DNA, 455 bp, Setaria italica
  Peptide Sequence Number=SeqID_110303
ttttgttcttggttgtatttccttctattacttcttgtcttgtctattcctaggttctagttagatgtgcacctttgaagagcttgggaaggatgtactgcctgactggaaccagcagcatgatcataaggggaaaaagaaccccggctatcgggatccatgtgattccaaagcagaccagcaggtatgctgtctggaacagtgtgaacatggctatcgtcttgaatggcacagtctcgacgaacgtggtgtggtactcttctagcaccctggaagaatgtatggtatatggaaaaaattcagatgtgccaaactgatattttgagatgaactaaaacttacttgtatcttctgctgggagcagtgaacagcagcaagatcctttcccagaactggttaccaggcaagctctcaatggccatgaaggcaaaatagccctagtaggtactagtatt

SEQ ID NO: 44330 - DNA, 476 bp, Setaria italica
  Peptide Sequence Number=SeqID_110304
agaacgggctgcggatgtttttcagttctgccacaggtgtgccaccggagctagtgatctttgggctgttcaggcgcttgatctcgccccggcttcttgtgaacatgtcgtctaggatctctgcactctgggcacgtcccaatgcaacatcgatatcttgctgaaatacatggcatttgagtgtaaggaaaaagcaacatgacaacaaatgtcctagtctaaaaataccatgttgatgagcaagattaaagtatttgtcaggatatattaaatctttctgaacttaccgcagcaaggctgaatggtattgctggtgattcctcatactctgctgcatccaggtcagttagatgtgcacctttgaagagcttgggaaggatgtactgcctgactggaaccagcagcatgatcaagtaaaggggggaaaacgaaccccggccattgagagcttgcctggtaaccagttctgggaaagg

SEQ ID NO: 44331 - DNA, 514 bp, Setaria italica
  Peptide Sequence Number=SeqID_110305
ttgttacgggttctttgttcggttatttgttttttcttagtttcttgtcctactaggttgttgtccaccggtagctagtgatctttgggctgttcaggcgcttgatctcgccccggcttcttgtgaacatgtcgtctaggatctctgcactctgggcacgtcccaatgcaacatcgatatcttgcgcagcaaggctgaatggtattgctggtgattcctcatactctgctgcatccaggtcagttagatgtgcacctttgaagagcttgggaaggatgtactgcctgactggaaccagcagcatgatcataagggggaaaagaaccccggctatcgggatccatgtgattccaaagcagaccagcaggtatgctgtctggaacagtgtgaacatggctatcgtcttgaatggcacagtctcgacgaacgtggtgtggtactcttctagcaccttgtatcttctgctgggtagtctagttgtaactagtctagtctaagtatcttcccagaacta

SEQ ID NO: 44332 - DNA, 2728 bp, Setaria italica
  Peptide Sequence Number=SeqID_110306
tttttttttttttaattgaatgtaagtaatgaaagaatgataatctgctagtgaaacccagtattttccaagtagttactctaatattcctctagttcaggattacagatacggtactccgtaaatcaggagaacacgacaaagagaagagaggctagagatattcatatcatacttcatcagaggacatcttcatataaggatactaacactgaaaccactctttctttaaatggctactaataccgaaatcactaatatagctgacttccagtagcggcataacttatataagcaatgcatcattgctttattcacttcggtgttgagccttcacccaacttggatggcgtcctagggctgcttctccctcccagagggctgcgctcatgcctgagctcagtgaggcgagggctgtatgctttttcagatatggacgggctgcggatgtttttcagttctgccacaggtgtgccaccggagctagtgatctttgggctgttcaggcgcttgatctcgccccggcttcttgtgaacatgtcgtctaggatctctgcactctgggcacgtcccaatgcaacatcgatatcttgcgcagcaaggctgaatggtattgctggtgattcctcatactctgctgcatccaggtcagttagatgtgcacctttgaagagcttgggaaggatgtactgcctgactggaaccagcagcatgatcataagggggaaaagaaccccggctatcgggatccatgtgattccaaagcagaccagcaggtatgctgtctggaacagtgtgaacatggctatcgtcttgaatggcacagtctcgacgaacgtggtgtggtactcttctagcaccttgtatcttctgctgggagcagtgaacagcagcaagatcctttcccagaactggttaccaggcaagctctcaatggccatgaaggcaaaatagccccagaggacagatgttgggatcttcttgagtagtggcatagcagcgacacaaccccccaccatggcagcctgtagcaagttgctcaagcgctgctccttgacctccatgggcagcagatcatcaatctctttctctatgtcaaaaatggtctcatcaactggtgcgtcaatgttacccatgcttgaagctagctggactgtcgagtctttgagctcatttaagcctcttctgacagactgttgctgataaacaagcggtgtctgcatctgctgataagcatcctgcatgctgccatacagttggctcaagctagcgttctgactcatgctcttccgtgcagtggctactagccggttacgaagcagctgatgcttgagagtagccaagctctttgtatgcatgggtgactgtggaatgacaccatttgatggagggataccgataaggccacacagtaaggtcagaaagcctaagagaagcagatcatagtggaaggatggaggcttcctcaaattgaactctttctgctgagcaagctgagatgcaacactatgatcaaagtagtagagaacagcaatcatcgttgctggtatgaaggcaccaatgatatatagaagcggaacatgtgtcatatccttgacaacagtccaattgtcatatgcaccaggggaccatgggttagggctgaaaaggcgtcgtggaattccttttggtacacttccgtatggtatgtaagaaactccagtccatactagtaccatcaatggaacaccgtagtcagcaatgaagccacgcagccaacctgctccatagcgccatgatcgcgccttcctgctccgcagagcggtaagcaaaaggccaaatgacaagacgattgcaaacatcccattggcgaagcaccacgatggaacaaactcaagtgcctttcggttctctctctcaggaatgcggaactcatcaacaagccccttgatagcctgctgcatgaagagcatagcaatcagaagcccaaacagctcgccagcgatgcgggtgaaccggttgatgatcgagcatgcacctagtatcgccagcaagaacagcagaatggcagtccatacgcagacccaaccggtccaggcaaggaacagatttcggccgaggtcaggcctgtccttggcgaagttgaacatgaatgtgtacatgagcactgtcggttcggcgacaccgaggatcagcagaggttgccctcccacaatggagtggattatgccacacagggcagtggatgccaacgtctgaactgctgtgagaactccatcagtgttcctctccaattgctcaccgaacgatatcaccggtatcgcggacgcgaagaatatgtaggtggtcggcgccaggatcctgataccggcacggaaccctccggtccaatcctgcttgtagcaggcgagcctcccctggaggtcgttcttgatgccccgccaggggcgacgaagctctcctccattgcccggaccaaaaagggcgtcacttttactcagacaagaagatctgagggtatattctgaatggccactcggagtgtcaagtgagaccctgcttacatcttgcggcagatggaacaggaagaaatgctacaggattgcagactcgcaatgcatttagcgcggatccatggaggaagacgaagggccgaggctatgaagggaagacgagcatagagagcatagggagcagggccgagtgaaacggcaagtccgagagagttgcagagggtaggagaggtaag

SEQ ID NO: 44333 - DNA, 1171 bp, Setaria italica
  Peptide Sequence Number=SeqID_110307
aggcttccatttgatatcccaagcaactttgccgttgtgagctaaacacaagacaagccttggtagagcaatgtcttttgggattggagaagagtttgagttttctacactacaaaacatattgacatcttcccttggttccttgagtggtacgagttctgtagcttccacttcatcaataagcctatcactgttcttgaaattgggtgcaacttgatttgtttgtgcattttcgttacaatgagaagtaacattggctgcaatcctttcatttagtttcatgccttcacaattaacaattccattgttagcttgaatcaaaccagcctcatcagccatgtcttcacttctaggtggtccggttgtcataggtgtgagaaatctctccattgtgtgtgtttcatcaccaacagatgtgctagtactctcatttgaagcaggtatcctttgaggttgccccccacctttcctggggcatggtccattcatacaattttcaaccaagatcacaggatcgctcgacttttgagttggctctgttttttgtttctttgccactaaaatctgtaaaatgactgtgcacagttgaaacaagcttcttcctagaaccacttcctcttttggtacttgattcttccttaaaatttgcattatataagccatgccctggtgatgcagcatcagatggtacaacacccgcatgaacaccagatttctcaacaccaagcccacttgaaccaatcgaaccaagattacttgctataaattcaccatcactcttgaccaaagatgtgagattgttgtcactgggaagtacagatgttgtcactgggaagttggcatcagaagccactaaacaactagttccaacagaaagcagactcttcttaggccttcctcttcccttcctaccacttgactcccttgatttaggtgaaatcttgataggctgtaaagaatcacctgaaagagcgcctcggtgtacattgtcctcaaagtttaacatgctagcagaacgaaggccacttgtcactgataccatcttcagtaaagcactttcaacagaggctgttgcaccatttagttgtctggaacacatgctccgtgattcaacaccagaaacaactggggaacatagtgcatcagaaattgttttcttattttaatttta

SEQ ID NO: 44334 - DNA, 2065 bp, Setaria italica
  Peptide Sequence Number=SeqID_110308
ttttttttacctaccccgaaatagacaatacaagactacgacttaatttacaaaagaatcaggttcgcatggtggtcagaaccgggactttattttccatcccagtgtattcagaacaggtggcttctattcctacatagctcccccacgagttcctaggataggaagatctgttgtattggttctcttgcatagttgcatgattacattgaacagtttggagcaaccaagaaaaccaacctagacgaccaggttaaaagtagcggaaagaatgcaacagagcctacttccatcagttactaaggatgtgagcatattatcctgtttcgcggggagcattagccaactgggcctttgtctttagatcctctgacaccgcacgatgcctgcagcacctccgtagcacagccatctctcactacctttgttcatgttccatcgcactcgatgcaatgcgacggatttgggagggaagacctcaaagtctttaggggattcactgcccttgctgttcaatgtgccatcatcctcttgctctgtagggccaactaaaactatagcacctgcttcttgttcttcgctgtgtccatcttgatcgccaagttcaggattgacaacacctgctcctccttcattctgtccatcatcaaaattatcgccaggttctggattttcagcacctgctccttgttcttcgttgtgtccatcattttgatcatcgccaagtgctggattaccaatgacattgcctgcaggcagggcctgaactatattttggcacggttttggaccctttttgttcgccacaggaacatttggtaatggagatgtttgcggtctgctgccaatcttaatattttctccatcctctgataatgatccacagaggaaataaggaacacggttccgcccaggttccttctcccagaacctcggagtaagctggaagcacacagcagtaccatctgccccacagtaagcagcacaacctgtagtgtctgaggcgtggacactccaaatcaaatattctgataactgataagttgcaacgccctgattttttgttccaacaaaatggccttccagtggctgggacatcatttgcaatccggggcaagctcagaaacttcaatgtaccatcttccattgagatgacaatcccccttccatcctttaaccactgaagacttaatacagcccttggagcagtagttagctcccaaagaggacggtatggatctcttaaatcccagaactttagaccatctgctccagcagtaacaaaggtatttatgttttcgtcgcttatataaggtgcccaagaaagagctctaatgggaacagattcagcaatgacgcacataaaaggttttgaatcttgtgatgacaggttcattgagaagttccataaagcaaccgttccatcatgacaacccgccaatatcatatcatgaggaggagaaggtgaccaatcaactttgtctgttcccgcacttcactttgacacacctaaatacaggttgtagctttagaaaacgagggtcggaaccctctaccttagagggggaatatattttctggatcatgcatggtgatggaacttcccacacttcaagagagccattccccaacaatactgcaaggaaacccaggcgtgatttctgttcaggctgacttactacaggaggcttccatttgatatcccaagcaactttgccgttgtgagctaaacacaagacaagccttggtagagcaatgtcttttgggattggagaagagtttgagttttctacactacaaaacatattgacatcttcccttggttccttgagtggtacgagttctgtagcttccacttcatcaataagcctatcactgttcttgaaattgggtgcaacttgatttgtttgtgcattttcgttacaatgagaagtaacattggctgcaatcctttcatttagtttcatgccttcacaattaacaattccattgttagcttgaatcaaaccagcctcatcaagaccaattagttactttactaactttacttaaggttaggttacta

SEQ ID NO: 44335 - DNA, 342 bp, Setaria italica
  Peptide Sequence Number=SeqID_110309
ttttatttcatttatagtaccattcattgacttccaaatactaaacttcattaaactacgtgcatatatatgtggttttaaaataatatattttcctctgactaaagacttgcttttgaattttactttgattcatgtctttaaatgcaacatggcactccagttgaaagttctaataaattgttaaatgtcagatttcggagacttaacctgtgtctttttgataacatttttaaaatgctacaagtatataatcttgtgtatctgtaagcagtggcaatagtagatctttgctccactgacactcttaagggtctcagctgctgccgtgtgagccaatgt

SEQ ID NO: 44336 - DNA, 593 bp, Setaria italica
  Peptide Sequence Number=SeqID_110310
ttttttttttttttcccacactaaaaaaaatgcatgaattacaattctgcaacatttaccagagacaattttaacatcaactcagaaatatcggacaaactaatcaacttatacattccgcttcacttgtttgcaacaatcaatgacatttcttgattttttttttcataacttagcctttgtttcctatacacttctccgtagaacgcaaggtcagctccaacaattgacgaccatccagtaaaagagttaaccgtacactatgatccatggcgcctctgctaagttcgtttttttgagcaaaccaagcttcttcggttctggtccatctgtatacaaaactgcatgctcatcaaaatgggtaaatatgtagtggaagtaggtgcaaacctggaaactctcaccaccatgaaccgtcgattggacatgcacgggaaactcccaccaccataaaccgtcgaacgtcagattggacatgtacgggaaactcctaccaccatgaatcatcgaacgtcagactgggcatgtacagttcaagcagctaggtacagccctcagaccatttttcatataacccccgtgttgtactgtac

SEQ ID NO: 44337 - DNA, 845 bp, Setaria italica
  Peptide Sequence Number=SeqID_110311
ggggagggtggtctgattgcttgctcagctcgtcgacgttgagcaggtcgtcgatccgtgcgatgatgttggaggccaggctctccagaaccctcgagtagctctcaagaatcgatttccccacgtccttgttgtactggatcttgctcatgtccaggctcgtctgcgtgagcccggggaacctctgcttcagggatatcaggaggccctcggcgcgctcagcgagcaggtcccgcttctccgtgtccatgatcatgtccttgacgatgccccacgacaacttggtaccggcgcggctcgccggcttcccggcagcgccgcccctccggcgccacacgtagacagaggcctcgacgcggttggcgatctccagcgcctggtactccgacgacaggtcgaggcagtcgaggaggcagtccggggagaactggtccgaggtgatgtaccggtagatgacgtcgcccagcgtcgcgcgcccgttctttggcagggagtcgaggtaggagtcgggcacgtccatctcggccaaggcgttgctgttgatggccatggcggccttgaggatctggttggcgcagtcgcggcgatgctcgacctgccgccgcgtggcctcgcagaggccgccgtggggcacgcggggcaccgggagccaccacttgtcgtcgcggcggtggaacgtcctcctgaacgacgcggagccgtcgcagtccggcgcgcagatgccctggtccacgtaccagaattcggcgtccctgaatccctccaggatttcgaggagcatgttgtctagcttccggagcgctggcaggttgatgtacagatcagaccgtggcctgcttgtcatg

SEQ ID NO: 44338 - DNA, 476 bp, Setaria italica
  Peptide Sequence Number=SeqID_110312
ccgatgctaatgtgcagagtgcagctcatcttcttgacaggcttgttaaggatattgttactgagagtgatcagttcagcatagaagaattcataccactcttgagagagcgcatgaatgtgttgaacccttatgtgagacaatttttggtggggtggataacagtgttagacagtgttcctgatattgacatgcttggtttccttcctgattttctcgatggtaatccctcctttttctcaagtgcattacttatgttggctgttcagcaacctttctatcgttacccctgcaggtttattcaatatgctaagtgattccagtcatgagataaggcagcaagccgatgcagcactttcagagtttctgcaggagataaagaactcaccaaatgtagatttattggtcgttattggctgaaatacttgttcggagggcaggctctactgatgaattcactcgtttgacgtctatca

SEQ ID NO: 44339 - DNA, 569 bp, Setaria italica
  Peptide Sequence Number=SeqID_110313
aaatgactagagcgcgggtaacgagcttttcttcctaactaaataattgccattccatgacaaaatctaggaacgaaacaaaaagattacactctatgtaccctatgcacgtatagctgaagagcctcaccacttccatcatcttgtatcctacctaatccgcaccttccacaacaatcatgttctgctggagaagcgtggtgctttgatagtccgtcgactctgtgttcttctgggtgctgaaaaagtatatcgagagttctccgctattcttgagagtgaaattgaccttgattttgcatccgtcatggttcaggtttgtgctacttgtacaatattcttgtactgccaaaatgtgattgtgagatttgtgaattattttaaactgccggcaggctttgaatttgattttgctcacatcaactgaacttggtgagctccgctctcttcttaagaggtcattagtggattcctgtggcaaggacttgtttcagtctttgtatgcatcgtggcgccactctccaatggctacaattagcttgtgcttacttgctcaggtaatgattgat

SEQ ID NO: 44340 - DNA, 447 bp, Setaria italica
  misc_feature (7)..(7): n is a, c, g, or t
  misc_feature (21)..(21): n is a, c, g, or t
  Peptide Sequence Number=SeqID_110314
ttttttntttttttttttttntttttttttttttttttttttttttttttttttaagttcagaacagtagtaacatatctccaaatactagtttgctcatttggccttcaattgaaaaattacagaaaccagatgagcagtgaaacggctagaaaaaataagaatgactagagcgcgggaacgagctttctccaacaaataattgccattccatgacaaaagccaatcaatcattcaagaaaccaaccaaaccaagagccagcagcccagcactccaaccactgactccgtgagccttgtgctcctctgccacacttccctccccaccagctcagcaatcatgcctcgcccggcctgtgctcccctcctgctcctcgccgccgcggtcctggcggtggcggccgcgtcgccggcgaacagcaacgcggcgtcggccagcgacttcat

SEQ ID NO: 44341 - DNA, 583 bp, Setaria italica
  Peptide Sequence Number=SeqID_110315
accaaggttcaaagaaagctgcatttttttataaagtatatgccatgccaaaatgattagtaagaacagtgtaacagctaaattcttgtactaagagataaacaaaaagaaattgcacagcatacatgtcatcacagtttccatcacatgttgcaccacataaagcccaacatgtcagttttacagcaactacactgaatgtgaaggcatttctgatggcaaatattgtgagagaaccttgtaccaaaaggacagcaagcatacagtaaatgtacggatgaacattaggatacaaaattcgattcagaactatcatgtcatggatcatgtagaactagaaaccaaataaaaagtcatgtagaaagcccatgatttcagaattcaaaggtgcatgagaaacagaaacagaaacttgcaggaaggtgtcgtcagaacaagtacctgtaaacgcaagtaagcaaatactggagtctctaggagacggatcaatttatctaattgaaccaaaaatttcacatttatgtcttcttctcccagagactgaataacacagctcgcatattgtacttgttattgtccttgt

SEQ ID NO: 44342 - DNA, 1204 bp, Setaria italica
  Peptide Sequence Number=SeqID_110316
ttttttttgttaattacttaaaagggttaaaggttctaagtcttttcttttttagtttttaagaaccagaaagaggaatttacattgcatcgctaaaatttattggagatcgataagcagaacagtagtaacatatctccaaatactagtttgctcatttggccttcaattgaaaaattacagaaaccagatgagcagtgaaacggctagaaaaaataagaatgactagagcgcgggaacgagctttctccaacaaataattgccattccatgacaaaatctaggaacgaaacaaaaagattacactctatgtaccctatgcaacctcctttgaaaaaatcaaggagactaaccaaagccccaacagatttgtgatgatgcgtcctgcaaatatatcatacaccgtgagcaaccaaatgcatcatgaaacacctttggatgttcttgaaggaggcctgctaatctctgatagcgaagaggagtgtgcttcttcgtatctttggatctcctgcaataatgttgcagctgaagcagatttgcgagattgcagctgacccttcaaatggttccggtgctgctgctgcatgttctcaaattgctggagaagggatgggaaattgattgcactatagttctgtgtgtcttggtttcgattgccatcttctgtcacttgcagaatctgagagtacggatttgctgaagatgtgcgcttgagattttcactgaatggcacagtcttcagtcgagtcctcaagatcttgaaggccgcactttgctgaggcaacagcatcatgagaccataaagagttttcagaagccaggtgtgttttccaggttcaagaagctgtaaacgcaagtaagcaaatactggagtctctaggagacggatcaatttatctaattgaaccaaaaatttcacatttatgtcttcttctcccagagactgaataacacagctcgcatgactgtatgcctgagcaagtaagcacaagctaattgtagccattggagagtggcgccacgatgcatacaaagactgaaacaagtccttgccacaggaatccactaatgacctcttaagaagagagcggagctcaccaagttcagttgatgtgagcaaaatcaaattcaaagcctgaaccatgacggatgcaaaatcaaggtcaatttcactctcaagaatagcggagaactctcgatatac

SEQ ID NO: 44343 - DNA, 808 bp, Setaria italica
  Peptide Sequence Number=SeqID_110317
aagagataacttggcaactacttaattgcattgttcaatgtacagatgtcctctcaatccgagttcacgcctatgataacagctgacgagattgttcatacaaccatcatgtttaagcctctccacctgttccggggacgaggccggccacacaatgcaacatgacgaggacatcaactagcatgagtgcctcgtgggctccctattctctgtctgcaagctagtggtatccttatggtatccaatatgctaaattcacttcatggtcactccatcggcttgttccgttttggtggtctctcaccccaccggccgagcatcaccatcaccattaacatgaccatgaaaatgtagttacaaattctcagcttcaaaacgcatgccagcatctattttcttatcaggtacatgatggtagtaacaaaaaataaaagtttttccatgcctaagaaggcaaatgtatcgctgcgaaaccttttccttggtagtgtggatccaaactctggccatcgcagatgacatggtagctcttcacaagccgtcatcacccctcattttcctttagataatccaccagggccatcagcagcccagtacttcccacttctatgtggaatcagtacgcacaaaattataaccggctgaatatcggattcggattttctcttgtggtatgccagtggcattcaagaccttcaaaatttcgagtactatctcatcaacatctttacatttgatttcaacaatctgaagatggctagctgcaattgattgttctaatggcttgtaacttccatcatttttcatt

SEQ ID NO: 44344 - DNA, 526 bp, Setaria italica
  Peptide Sequence Number=SeqID_110318
ataattgacgtgccagacttaacagtgaaatggacagaatggtaaaacacttaataatagcatcagtttcatttagtggtactaaaaacaatgtttccaaaagtgaacaatataagaaagattgagatcaacaatgcaacttcaacaggatacgttatcttgcaaagctgttaataaaaatgtgatggaactagattgcggaacaaggtaaactacgctggaataacaggacatgatgtccctacagacaaaaggcagctaataattgttccatttacctttagataatccaccagggccatcagcagcccagtacttcccacttctatgtggaatcagtacgcacaaaattataaccggctgaatatcggattcggattttctcttgtggtatgccagtggcattcaagaccttcaaaatttcgagtactatctcatcaacatctttacatttgatttcaacaatctgaagatggctagctgcaattgattgttctaatggcttgtaacttccatcattttcatt

SEQ ID NO: 44345 - DNA, 1042 bp, Setaria italica
  Peptide Sequence Number=SeqID_110319
ggtagataccgcctacctagtagaaacaaaaggaaactgctatgatctctaccttagtagagatacttcctaaataccatcatcaggacagccaatttcctaactcttcaaccactgaagaaggtggtgggtttgtcagcagttgaagcagagcagcaaagaacatatgatcggtggcagtgatggctttgtgacatctgcggggagaagttgacacgatcccaatattgtacaccctgtcaccagtctatgtatcttggctgctttagataatccaccagggccatcagcagcccagtacttcccacttctatgtggaatcagtacgcacaaaattataaccggctgaatatcggattcggattttctcttgtggtatgccagtggcattcaagaccttcaaaatttcgagtactatctcatcaacatctttacatttgatttcaacaatctgaagatggctagctgcaattgattgttctaatggcttgtaacttccatcatttttcattaaattgtcgcgtacctttgaaggttttagagtgagtttctccagaagaggtgcatgacagagaaaccaaatgactgcactgaggtcagcagacacaaaccatttgctaagcaccaaagtctttaacttgctaaaggcagggcaccactccaaatccctgttgaaaacatacagatcaggataagctgacaatttcaagtctgtagcttctgtcaagccttcaagaaacacgcagttgtaatcatgaggaccataatagaaaaaacaaccatcacagccagtatctccacaatcatccaagcgaccattttcacatcgatcatcatagaagtgatcgtatcggactgttgcagtttctaaagatggcatactttcgagcagtggaacccttccagcatttgtaatgaactgaaacgtgacgaggttcgggaaagacatcctagtgcggtagttgcagtaaaagaggcagtatctgatcctcagatgtctcaaggatggggaatgaatttccagcgatccaacatcgcaatc

SEQ ID NO: 44346 - DNA, 1987 bp, Setaria italica
  Peptide Sequence Number=SeqID_110320
taagtagaaaataaggtaagaccgaccgcccggatcccctccccctcgcctccagatcacaccaccgtcgcctccgcctccaaatccattcctaggctcgtgctgttgctgcgagcgagctcgtgttgggctccggctctaggggtttcccctcccctctcccggtgctcatcgccgtggagcttgacctgtcggcttagggttgggtcgcggccgcgggggccgtggggtgggggtcgcggccgatgcggcgatcgccggcgatcgggaggcagtagcggcggcggggggaggggggatctcccgggcggattcttcggcgatggccgcagacgcgctctccatcatcccaggcgccgtgctgcggaacctctccgacaagctctacgagaagcggaagaacgccgcgctcgagattgaggggatcgtgaagcagctcgcaacggctggggagcatgagaagatatcagcggtcatctcgctgctcaccaacgatttcacctactcgccgcaggcgaaccatcggaagggtgggttgattggccttgcagcagttaccgtcggactcaccagtgaggcagctcagcacctcgagcaaatcgtgcctcctgtgcttagttctttcctggaccaagatagcagagtgcgctactatgcttgtgaagcactgtacaacatagcaaaggttgtaagaggggatttcatcatctacttcaacaagattttcgattcgttatgcaagctttctgcagattccgatgctaatgtgcagagtgcagctcatcttcttgacaggcttgttaaggatattgttactgagagtgatcagttcagcatagaagaattcataccactcttgagagagcgcatgaatgtgttgaacccttatgtgagacaatttttggtggggtggataacagtgttagacagtgttcctgatattgacatgcttggtttccttcctgattttctcgatggtttattcaatatgctaagtgattccagtcatgagataaggcagcaagccgatgcagcactttcagagtttctgcaggagataaagaactcaccaaatgtagattatggtcgtatggctgaaatacttgttcggagggcaggctctactgatgaattcactcgtttgacgtctatcacatggatcaacgagtttgtgaagcttggtggggaacaactcgttccttactatgcagatatattgggcgctatcttaccttgcatatctgacgaggaggagaaaatccgagtggttgcacgtgaaacaaatgaggaacttcgtggtataaaagctgatccaactgagggatttgatattggagcaattctttcaattgcaaaaagagaattgaatagtgaacatgaggccactcgaattgaagcattacattggttctccactctgctggttcgatatcgtgttgagtttttggcgtacctgaatgatattttcaatccacttctaaatgcactttctgatccttcagatgcggtcgtcctattagtattggaagttcatgcacgtatagctgaagagcctcaccacttccatcatcttgtatcctacctaatccgcaccttccacaacaatcatgttctgctggagaagcgtggtgctttgatagtccgtcgactctgtgttcttctgggtgctgaaaaagtatatcgagagttctccgctattcttgagagtgaaattgaccttgattttgcatccgtcatggttcaggctttgaatttgattttgctcacatcaactgaacttggtgagctccgctctcttcttaagaggtcattagtggattcctgtggcaaggacttgtttcagtctttgtatgcatcgtggcgccactctccaatggctacaattagcttgtgcttacttgctcaggcatacagtcatgcgagctgtgttattcagtctctgggagaagaagacataaatgtgaaaattttggttcaaatagataaa

SEQ ID NO: 44347 - DNA, 278 bp, Setaria italica
  Peptide Sequence Number=SeqID_110321
cgccaacctccccgtctccaggcgcggcgccaaagaggagcccgtcgccgtccccgtctccgggggcagcgaggagcaccggcacaggccaccgcggcgggcgtcggagatccgcgcacgagcggctgtacgaggcacggcgtgccgaggcggaggagatgcggcggcgcacgaacctgccgtaccggcagggcttcctcctcttcggctgcatcgggctcggccaccgcaactacggcgccgtccacggcctcgcccgcggcctacaaacgccgacc

SEQ ID NO: 44348 - DNA, 294 bp, Setaria italica
  misc_feature (240)..(240): n is a, c, g, or t
  misc_feature (248)..(248): n is a, c, g, or t
  Peptide Sequence Number=SeqID_110322
tcgtctttcctttcgccgtagcgcggccttccggtggtggtagagcgagggcgagttcgaggtcgtcggctcgcgccatggcgtcccagcagcagttcccgccgcagcagcaggggtcccagcccggtaaggagcacgccatggacccccgccaggagggcaggaggccatcatcaagagctacaaggcagcgggcaagctcaaggcaaggtggcgctggtgaccggcggcgactccggnatcgggcncgccgtgtgcctgtgcttcgcgctgggagggcgcgacggtggcctt

SEQ ID NO: 44349 - DNA, 297 bp, Setaria italica
  Peptide Sequence Number=SeqID_110323
ccacaccctcaggctccacagtgacaagaacataaaccgggttgctaccctcagccttgaaaattatcttctctgtgttgagcagcctcctgttcttgctgctccagtccgcaccgtcaggatcatctacaagccgaatcgaaaagctggacggtatggaggccgggtaggagatcttgacttcgtaccacgcggacggccgcagcccgttgatcctgtacacccgccggccgttgcgcaacggcatcgtctcgcccaccaggctcctcgcctacgctaagcaccctcgtcgattcc

SEQ ID NO: 44350 - DNA, 1003 bp, Setaria italica
  Peptide Sequence Number=SeqID_110324
aaggagttgccatccgtgcattgaaaagggtcatcaatgcttggttcacccaatggtttgataagagtgagtgagtgatggcaactccatatcttgtggatctttcgtaacggctttcacattcggttcttgatgggttcgatcaatcacctgggaatcgtgtatcaatggttgcccaacgcccagtgacttggtgaacataatctggccgtcgtccggaacgagaacaactttattacaggttgcatgtgtctctgacggcaccagaagagaagcaaccaaaattgagcattagcgtcctgcaaccctatttcacccatcatgacatcttagcagcgtcagcttggttcaaatctgagccttcatagttgtcaaggagcttgtgcagctggagaacaagtggtgccagcgacgccagcacgatgcagagtagcgccgcgattccaacccaccaggtaaaaactgggagcccaagcataagctcatcacaaacaatattaaaaagcgcatgttctctctctggcacattaggcttcgccaccacaccctcaggctccacagtgacaagaacataaaccgggttgctaccctcagccttgaaaattatcttctctgtgttgagcagcctcctgttcttgctgctccagtccgcaccgtcaggatcatctacaagccgaatcgaaaagctggacggtatgggaagggcacagatcatacggaggccgggtaggagatcttgacttcgtaccacgcggacggccgcagcccgtttgtattcctttacacccgccggccgtgcgcaacggcatcgtctcgcccaccagctcctcgcctacgctaagcaccctcgtcgattcctccgcgctgtgcgcggcggaggagagcagcagcagcgccgagagaaggacggcgacgacgatgcggccgcggcatggcgaggcgagcggccgccgcggagatggcatgccgatggttcggctctgtgcgacgacggccgtcggag

SEQ ID NO: 44351 - DNA, 292 bp, Setaria italica
  Peptide Sequence Number=SeqID_110325
cagtagctttcttaaacgtacccatctcctgttctggtccgtcatcatcaggctcaggattatccttgttgatttgggtacctgcaaccctcttcttagagcttggagctagttcatcatctgccatcttccaagttggcagcaccttccagagagctgtggctagctcgccgcgggtggagttgccggtggcgggtggcaactcgatggggccgcaggggaagggctggagacggaggcacggctcgccgtcgtcgcctgcggtgcggaggaggacagatgggggggccgg

SEQ ID NO: 44352 - DNA, 596 bp, Setaria italica
  Peptide Sequence Number=SeqID_110326
tttcttctcagtaccatccttactgtttctatcttcatctccaacctcatctgccccttccttttcttcagcatctccctcttttgttttgtcctcaacttcagatggcatgctgtcaccttccttgggttctccaactactactttgtctgcaccagatccgtcctttgcgtcttctgccttgtcaatggtttcaacaggttgaggtggcacttcagttgtggcaccggagccagttttcacagttgattcatccttctgaatctcagttacctcaccagagccagcatccttgtccggcacagacatagtatctttgccactaccattgctgccctcatcagctttgacatctgaaggttgaggttctgtgacaggggcacttgcttgaacactagaatcagtgggggtaaatctgattgcagagaaaggattagaagaaggagctgatgacggctgctggcgccgaacctttacaattcttcgggttgccatcacttcctcagtagctttcttaaatgtacccatctcttgctctggtccgtcattctattctaggtcttctaggtatttattcctttgtttgtattttgggt

SEQ ID NO: 44353 - DNA, 501 bp, Setaria italica
  Peptide Sequence Number=SeqID_110327
tttttttttttttttagtaccaaaagagtctcatctccaggttactaagattatgactttaatgtagttcacaggctacccactgttccaaaaaaacagcatcaggaaaccgtatgcagtcacaagtcacaactcaggacatcatggtgtgatacagacatctcatttaaaaactccgcaaataacagatagtatctctcggctccttttcctggagacgtactaagtatgcataagcgtgacccaacaggcttcagacctcggctgccttgggggagttctcgggtgtcttcagcggcacatcaggtgccttcagtgccttgtgagtctccaccgcgcccttgaactcctccctggtggcagtgtccttgaacttcagagcaaaagtcacgaggctgctctgagactcgccgatgctgttcatgcaagcgaatgtcacgcccttcttgtccatgtccttgagcgacatgtcatcatagaggctcgcgttcaggaccagcc

SEQ ID NO: 44354 - DNA, 814 bp, Setaria italica
  misc_feature (1)..(73): n is a, c, g, or t
  Peptide Sequence Number=SeqID_110328
nnnnnnnnnnnnnnnnnnnnnnnnnnnnnnnnnnnnnnnnnnnnnnnnnnnnnnnnnnnnnnnnnnnnnnnnnagtttcgtttactttatttgtttcgttcgttagttagctttcttcgtcttgtgagcctcgaccgtgcccttgaactcctccctggtagcggtgtccttgaacttcagagcgaacgtggtgaggccgctctgcgactcgccgatgctgttcacgcaggcaaacgtcgcgcccttcttgtccatgtccttgagcgacatgtcgtcgtagaggctcgcattcaggaccagccggtagttgcccttggtcctcatgacgagccggcccctctcaccaccagatacagggacgtttagcttcagttcgccttttcctctttctttccagcccccgcctaagtactcgtacaatgcggaatcagcagtgaatacagccttctcattttcttcaccagtttcaacagggccctctgtcatagcaaatttcttgggtgtctcagctgatgtagcgagcgctgagttgttgttagtaccaagattaaaggaaggcacagaagaaccatcggtcttcaacccaaatagggtaccagcgcttgagccatctttagagactgagccaaacgagaatgatgagcttgaaaatccagttccagacagacctgtgaaggcattttgactacttgacagattcttgaaggagaaaaggggcattgctgatgatgtctgccctttgttatcagcatctttctgctcgtcagacaacccatttttggtctctgattcacctccatctttcttctcagtg

SEQ ID NO: 44355 - DNA, 1967 bp, Setaria italica
  Peptide Sequence Number=SeqID_110329
tactaacctaagtaaaactaagggtaacgtttactaagtactttactaaccttattaacgaaacataccgaaagagactcatctccattctccaggttactaagaatgtaataatgcaagtttgacaggctaccccgctgttccagaaacagcatcagggaaccgtatgcaatcccaaatcaggacatcatggcatgatacgacacgaccgacgttcttactgacgttcttacttaaacactctgcagtaacagacagtatctctcagctcctttctggacagagaagtacaaaagaagcataagcgcaacctgggtgcagcttcagacctccgccgccttcggggagccctcgggcgtcttcagcggcgcgtcgggagctttctgtgccttgtgagtctcgaccgcgcccttgaactcctccctggtggcagtgtccttgaacttcagagcaaaagtcacgaggctgctctgagactcgccgatgctgttcatgcaagcgaatgtcacgcccttcttgtccatgtccttgagcgacatgtcatcatagaggctcgcgttcaggaccagccggtaattgcccttggtcctcatgacgagccgggctctctcaccaccagaaacagggacgttcagcttcacctcaccttttcctctttctttccagcccccatctaagtactcatacaaagcagagtcagcagtaaatacagccttctcgttttcttcaccagtttcaacagggccctctgccatagcaaatttcttgggcacctctcctgaagtagcgagcgctgtggaggaattcccgttgttggtagcaccaagattaaaagaagggaatgaagaaccatcagtcttcagcccaaataggggaccaggacttgatccatctttagaggccgagccaaatgagaatgatgtgcttgaaaatccagttccagccagacctgtgaaggcattttgaccacttgacagattcttaaaggagaaaagtggtgttgctgatgaggactgcccattgttatcagcatctttctgctcatcaggcaacccatccttggtctctgaattacctccatctttcttctcagtaccatccttactgtttctatcttcatctccaacctcatctgcccctcccttttcttcagcatctctgtctttcgttttgccctcaacttcagatgacatgttgttaccattgttgggttctccaaccaccactttgcctccaccagatccatcctttgtgtcttctgccttgtcactggtttcaacaggttgatgtggtgcttcagttgtggcaccagagtcggtatttacagctgattcaggtaactcaccagagcctgcattcttgtccggcacagacaaagtatctttcccactaccattgctgccctcatcagctttggcatttgaagcctgaggctctggaacaggggcacttgcttgagcactagaatccgtgggggtaaatctgattgcagagaaaggattagaagaaggagctgatgacggctgctggcgccgaacctttacaattcttcgggttgccatcacttcctcagtagctttcttaaatgtacccatctcttgctctggtccgtcatcatcaggctcaggattatccttgttgatttgggtacctgcaaccctcttcctagagcttggagcctgttcatcatctgccatctttcaaggttggtagcacctcgccgttgaactcgacagcctacttagggtttggcagcggaggcggcggcagggcagcaggcggcggtgcaggtgatggaaggacaggcggcggctgcaactgcgagtgctgcggcagtaacgaagagagggggcggcagcggtaacgaagggaggggccggaggcggcggtggtggcggcgctcctcagacgcgcgcacgcgagcagcgaggcaaggaggaggacgggcgaacgggagcgtatagcat

SEQ ID NO: 44356 - DNA, 646 bp, Setaria italica
  Peptide Sequence Number=SeqID_110330
gcctccttccctgcttctgcttccctcgtcctctcgaagcttcatcgccatggcggaccagctcagcgacgaccagattgcagagttcaaggaggccttcagcctcttcgacaaggatggcgacggctgcatcaccaccaaggagcttggagcggtgatgcgttccctgggtcagaacccgacggaggcggagctgcaggacatgatcacggaggtggactccgacggcaacggcaccgtggacttcccggagttcctggggctgatggcgcgaaagatgagggacagcgactcggaggaggagctcagggaggcgttccgcgtgttcgacaaggaccagaacggcttcatctcggcggcggagctccggcacgtgatggccaacctcggggagaggctggccgacgcggaggtcgacgagatggtccgcgaggccgacggcgacggcgacgggagcatcaactacgacgagttcgtcaaggtcatgatggccaaacggaggagcaagaggacggaggagaagccggtgcgcggcggcaagaagaagccggggacgtccgacgccggcaagcgcccccagaaatgcgtcatcctgtgaaacgcagcctcgatcgccttcttcgcgcgtctcgtgttccatgtcccg

SEQ ID NO: 44357 - DNA, 210 bp, Setaria italica
  Peptide Sequence Number=SeqID_110331
ttccttgtgctacttgtaaatgtagccattgtgtcaatcacggggactatatgtgctgatagtcagatggttgacgacaactgtagcggtcttacattgaattccacatctgtattactaaaggtcagtactgatgaaaacattgtgcagcatcagttgtaaactttatatagaagcatattaattacttagtgttggtctgtcttatat

SEQ ID NO: 44358 - DNA, 1697 bp, Setaria italica
  Peptide Sequence Number=SeqID_110332
gactcagtgtgagtagtggcggccgttgttggtgccagcggtggcggtgccggcgagatcgagatagagatggcggccgccgccacggcaggcggcgccgccggggcctcgtcgtcggggcagcaacacgacgatgatgcggaaggcagcctcctccggcagtgcagactgatttgcaggctggatcaagtcacagatacgagttgttatgggttctcttctttgggttcatttttgattgatcatacaatcattggcagcaaaattgggcatcattacaggaaagcatcttgctgagctgtgtatgcgtgaatacccaaagtatgtgaagtatggcctttggttgctcgttgaggttggtgtgattgctgccactgtaccaggagtgttaggaactgctttggcatacaagatattgctccacatccctttttgggctggtgttctaatatgtggagcaagcactttcctgatcctagctttacagagttgtggggttcggaaaatggagttcataggagttatttttattctcatcatggccgcttgcttctttgttgaagtgaacagtgccaatcctcctatgggtgaggtaattcagggcttgttcatcccaagattgagaggggcttacgctacatcagacgcaattgcactatttagtgccctcattgtaccacataatcttttcctacattcatcattggtgctatcaagaaaaataccatcttctcctaaaggagtcaaggacacatctacattcttcttgattgagaatgcatttgctttgttccttgtgctacttgtaaatgtagccattgtgtcaatcacggggactatatgtgctgatagtcagatggttgacgacaactgtagcggtcttacattgaattccacatctgtattactaaagaatatgtttgggaaatcaagttcaaaaatctatggcttggcgttattagcttcaggtcaaagttgcacagtggctaccagctattctggacaatacattatgcagggtttctccgggatgaggaaattcatcatttacatcattgctccctgtttcaccatcatacctagtttgataatttgcagtattggtggtgccgctcatgttcgacaacttatctacatatctgcaatcatattagcttttgtgctgccatttgccctggttcctctcctcaaattcagtagcagttgtgcaatgataggaccatacaagaactcgacttgtattgtccgagtcgcatggatcctctccatggtaattatgggagttaatatttatttcttttgcacaagcttcctcagttggcttgtgcatagtgaacttccaaggatagcgaacgcagtaattagcacccttgtcttccctttcatggcggcatatatcgcagctctaatctacttggttttcaaaaaagttagtgttcctctcccattcccttccatgccagtttccagtgagactgaagtagcagacgcacggaggcaagatgacaaggttgatgatatcactgtacattgatgacaagcatggttagaagatagcatataaatctaattcttttatgaacaaaattcagtttgttcatacagcatatattcaaggagggcatcaaccaatgaaagatgtatatagctgtatatatagcttgctgacagttgtagatttgttgtctattaatatt

SEQ ID NO: 44359 - DNA, 469 bp, Setaria italica
  Peptide Sequence Number=SeqID_110333
gcgattccatccctcccctcgtaaacccgacaagcgacagccccggccctaacggaatggcgtcgccggacgacgaggccgcgcagccaccgccgaagcggccccggcgcgaccccgaagcggaggaggacgccgcgcagccgccgcgcgtggcgctcaacccggcggactgcgatctcgacttcgatgtcggcgggggcggtctccagggcagcgcgctgcacgagggcgggttcgcctactgctggtccggcgcgcgcgcgacggtgggcacaaggggtggcgggaggtactgcttcgggtgcagaatcgtcgccgagcagcccgtggagatggacctcacggcccccgaggagcgccacctctgccgcattggggtctcgaggggcgacgatcccatcggggcgctcggggagtccgaccacagcttcgggttcgggggcacggggaagttatcccaccagcggag

SEQ ID NO: 44360 - DNA, 629 bp, Setaria italica
  Peptide Sequence Number=SeqID_110334
gtcgggaagcgcccttgggagactggtctagtcaggaggattatgctgtttcttgtccaggaggaggggatggaaatacgaaaggaaaacaaaaggaaaacaacacctcacagttttcccctgattgggacaaaatgatagaagaggaggtaacagaacttgagacctcgaagatgggggacaacaaagatagtacagtaaatgatgaaaattcaacaaaagtggatgaggcaaatcgagaagatggcgctgctacaactcaagaacaaggtgggcaagagatcaaagaccctggacaaaaaagcaaagtgagagattgaagaagcaaggactgggagcaatgaagatagctgacaagtccaagctagctactctgaagagaaacctggaaggtaagcacctgtaacccaagaactcctttgcagttctcaataatgttgaattggtgattagatctggtaaaacgggtgtagatattaataatatagaaatggaacaatttgatttgctaagagatttggaaaaagctagagctaatctaaaaagaaagaaataatgaatcttgctataggggaaaaagagattgggtctgaggtgctccccttggaggcgaccaaattagtagagtg

SEQ ID NO: 44361 - DNA, 2256 bp, Setaria italica
  Peptide Sequence Number=SeqID_110335
tacgttcccgagctcgaatagatccaacattgccatccatgcgacatgtacattgttctcggagaccaaaatcgaaaccatgggccacattgtcgattttgacctccttttcgtcatgaaagggggctacttctaatttctcgaggccgtttacaagcagacagtgcggctaagcacacctacatacatccccaagaagcttggggaggacaggaccttgcgtctaaagactagatcactcatgaaagaaacagcataagagctactgaacacctccgtatcgtctcatcgccttttcttcattgtcgtacttggagctggggcagagttctgctccgtgatcatcttcaccagattcacaagggaccgcaacctgtcccaaacactatagccatacagagtttgcacaaggagctcctggaactcaaatccatgcttcgagacaggatactggataggttttgggatcattgttttaatataaggccagaatctatcttctacgacagccttcacaaggcagcaagctcgcaagccttctatgccagcaaatctcccaaatccactgtctttaacaccaccgaatggcaaagactgacacatataacttgaagcaaaatcattgattgctgctacaccacagtgtaattgggatgctattctgatggcacgcttctggttgccagaaaaaacagcacaaccaaggccatattttgaatcgtttgcaagtttaatagcctcttcatcagaactgaatttcatgattggtagaattggtccaaatgcctcttcttgcataattttcattgtgtgattaacattcaccaggacagttggagggaaaaattgatcaactgcatcttcaccaagatggccaaagctccctctgacagcaatttcggcacctttgtcaagagcgtcattaacaagattctgaagtttctcagagtgctccatcatacagattgcacccatatcatacctgcctgataatggggggccaacacatatagatttgactatcttcactacttgagaaacaaaggcggaatagatatcgttgtggacataaaatctttcagcaccggcacaattctgcccactagattgcagagcagctctaacggcaacttgaacaacattgggtaaatctacatcttcacacacaataaatgaatctttgccaccaagctcaagagttacaggtattagagtctccgatgctctttgcatgatcatctttccaacgccaggtgatcccacaaatattattttgtcgactgaagatacaagagcttggcctgtttcggcaaaaccagttattatgtgcaccagattttcaggtgcaccaacagctgaaagagctgcttgtatgatacgaaaataaaagcagcctgaccaagtcgcatgttcagagacctttatcactgctgcattaccagagaatagtgcagccagcattggattaaagacattatggaagggataattccaagatacaatcgcaccaatcactccaagagggtaaaattcaacttttgctctcttgtgcagcattgatctcccagttgatctgtattcaggttttaaccacttctcaccctcatccaaaagccaggtaatcttctcgcatgtggtcattatctctcctaatgaagcatcaaccatagtctttccagtgtcccgagatgatacctcgcatatgagatcctgattttcaagtatatacttgagaaggatacgtagaaactggcgcctttgcttgaagctgctttttgcccatatcttttgagctttcctggcttgtgcaacatgttccttgacctcatcaggagtcaatgcagggaaataccccaagtatttcatggttgctggttcatagcattggaccttgtcggtctgagctgctttgccctttctcggtatgtagatgaagctgtcctccttggccaacacgtcggaagcgtcgacgtcgatggatgggacggtggcgggatgagaaagaggagcaggcggcagagcgcgtacgcggcggcgagcaccagcagcggccaccagaacgccatgggtgggcagcgaagcctccctccgtcccttgctagggttccggcggctcgccggcggagggcgagcggcggcgagtgatgaagcgtgggtttgttagcgacggcgacggcgagattgcatcggagggaagaagcgaacaaagaggagggaatcgaatcggatcggggagggggaggggaaatgccttga

SEQ ID NO: 44362 - DNA, 424 bp, Setaria italica
  Peptide Sequence Number=SeqID_110336
tggagcgggaggagcacgtcctcgtggaccgacgcgacggcggggtggccgcggagcgccgcgacgtgggacgggaggaggcgggcggcgaacgcggacggcgcggccgtggtgtacgagtagaggaggtggcgcgacgggtcgagggagagcgcgtcgaggtgggcgtggtgccagtgcaggtgcgtggcgtagggggaaggcttgagcgcggggttcaggtacacaatgtaggtcgccgcgtcgaggaggggcgaatcggtgttgtccacggtgtaggcggtggtcatgagcgcggacttgatggcgctggggctccagttcgggtgcgccgccttcacgaacgccgccaggccgctgatgtgcgggcacgacatggatgtccctgacagaatgttaaacgccgaccgccggtcgtcggcga

SEQ ID NO: 44363 - DNA, 521 bp, Setaria italica
  Peptide Sequence Number=SeqID_110337
cggccaaacacgacggagaaggacgggtagttgaggtccccctgggctggacagcttccgcgtgcacgtcacgttgggccccgccgccgcgacggcctggacctgccgcggcgacacgccgacggtgcagaggaaggcgacgtagtcgtcgacggtggcgtcgtagacgaggcccggcgagagcgcccggacggggtcgacgtggccggcgccgaaggcccacggcgtggccgtggcgttggtcgccgcgtcgaggaggggcgaatcggtgttgtccacggtgtaggcggtggtcatgagcgcggacttgatggcgctggggctccagttcgggtgcgccgccttcacgaacgccgccaggccgctgatgtgcgggcacgacatggatgtccctgacagaatgttaaacgccgaccgccggtcgtcggcgaccagcccggtcgggccgagggaacctgtccacccggccaggatgttcacacccgggccgatcacgtccggcttgagcagctgcggcacaa

SEQ ID NO: 44364 - DNA, 300 bp, Setaria italica
  Peptide Sequence Number=SeqID_110338
ctgtggagggtccagtatgctctgagcaggatccgtaatgctgcgaggcacttgctcacacttgatgagaagaaccccgccgtatctttgagggtgaggcgctgctccgccgcatgaaccgctatgggttgcttgctgagggtcagaacaagcttgattacgtccttgccctcactgctgagaacttcctcgcaaggcgccttcagactcttgtcttcaaggctggcatggccaagtcctgccaaccctgatgtgacgttgcttgatcaagacacgagcatggtggatggacttggccat

SEQ ID NO: 44365 - DNA, 565 bp, Setaria italica
  Peptide Sequence Number=SeqID_110339
cgtcttgatgctgaactgaagctcgtcggtgagtacgggctgaggtgcaagcgtgagctgtggagggtccagtatgctctgagcaggatccgtaatgctgcgaggcacttgctcacacttgatgagaagaacccccgccgtatctttgagggtgaggcgctgctccgccgcatgaaccgctatgggttgcttgctgagggtcagaacaagcttgattacgtccttgccctcactgctgagaacttcctcgcaaggcgccttcagactcttgtcttcaaggctggcatggccaagtccatccaccatgctcgtgtcttgatcaagcaacgtcacatcagggttggcaggcaaatcgtcaacgtcccatctttcatggtgagggtggagtctgagaagcacattgacttttcactgtcaagcccgttcggtggaggccccccacggcagggtgaagaggaagaaccagaacaaggcaactggtggtggcggcgatggtggtgatgaggatgaggagtgaagatgaaccacataaaaccgcaacataattaaacatctccaaacatag

SEQ ID NO: 44366 - DNA, 931 bp, Setaria italica
  Peptide Sequence Number=SeqID_110340
tccccctcgcaagtcacagcagacctcgcggcggcggcggcggcggcgctcgagaccggcggcgggcggcggaggcatcatcagccatggtgcacgtcagcttctaccgcaactatgggaagactttcaagaagccaaggcgtccgtatgagaaggagcgtcttgatgctgagctgaagctggtaggtgagtatggcctgaggtgcaagcgcgagctgtggcgtgtgcagtatgccctcagccgcatccgaaatgcagcaagggagttgctcaccctcgatgagaagaacccccgccgtatctttgagggcgaggcactcctgcgccgcatgaaccgctacggacttcttggcgagggccagaacaagcttgattacgtgcttgcgctcactgttgagaacttcctgcagcgtcgcctccagaccattgttttcaagaatggcatggcaaagtccattcatcatgctcgtgtgctcatcaggcaacgccacattagagttgggaggcagcttgtcaacattccctcattcatggttagagttgactctgagaagcacgtcgacttctcccttaccagccccgcttggtggtggtgagcctggaagagtgaagagaaagaaccagaacaaggcttctggtggaggtggtgatggtgatgaggatgaagagtgatcatgcaatgctagctcccggttttgttgttaggacctaattttgctggctttgttaggacctaatcttgttacatgaacggaagcaaaagttggtcaccatgggttgtctaaaattgctatttaaattattgaaaaccgtcattgctgagactcagtttcattgttgagtttttatctgatgaatatgcatgtgaattaagagagacttcagaaaattgtttctcctgttacttgaatgagcacataatcttttctgt

SEQ ID NO: 44367 - DNA, 974 bp, Setaria italica
  Peptide Sequence Number=SeqID_110341
cacacctcctccggcggcggcgagctccgacgaccaaccgcgcctacctgccgcggcagccatggtgcacgtcagcttctaccgcaactatgggaagaccttcaagaagccaaggcgtccgtacgagaaggagcgccttgatgctgagctgaagctggtgggtgagtacggcctgaggtgcaagcgtgagctgtggcgtgtgcagtatgccctgagccgtatcagaaatgcagccagggagctgctcaccctggatgagaagaacccccgccgtatctttgagggtgaggcgctcctccgccgcatgaaccgctatggtctccttggtgagggtcagaacaagctcgattacgtgcttgccctcactgttgagaacttcctccagcgccgcctccagaccattgtcttcaagaatggcatggccaagtccatccaccacgcccgtgtcctgatcaggcagcgccacatcagggtgggggaggcagctcgtcaacattccgtcattcatggtcagggttgaatccgagaagcacatcgacttctccctcaccagccctctgggtggtggccctgctggaagagtgaagagaaagaaccagaataaggccactggcggtggcggtgacgccgaggaggatgaagagtaagagctgcataggattttgcgacagcaattggttgaaatgtgaaatgaaccttgttggaatccttaggtgttattcctgagttttggtggtcttgaattcagaatccggctatggtagacaattttgtgatccactgacgctttaatttcaagccttgcatgtttcggacctcatcaaatgtatgttatgcgtggctattttctcgtttggcctctgggggagtctaggccagccgactcgctggttgaagttctggatcatttcggttgccaatgccaattgtacattttttaaatacatgaacgtaaaagcctttttgtttcaaaa

SEQ ID NO: 44368 - DNA, 1116 bp, Setaria italica
  misc_feature (3)..(3): n is a, c, g, or t
  Peptide Sequence Number=SeqID_110342
tgnacataggccactaactacaaggagagtgaagggagagaaaacaaaaaaaaaagaggaggattgaaaattttgtttgtttatgtcaacacttctacattgaggccgactgaatattatcatcaattgtaatttgtcctttgtcttctgctatcctgcatccctcctcttccaccaactgaatttgaattcctgctgcttcttcctcttctctcaacccagccaccgttaggccgggatgaagcacctgcagtaaaattagaactggcaccattgtcgtgatagaaagcaccactgccacccatcaccattccattggtgctcgagttatctgctgatggcctcgggcgactccggcggccatgtcgtcccctgttatgagggttcgcaccagggtagccaacttcttgctgatgatagatgccagcgttagtgccaacaatgttgttcctaatattgatcatatcggcatatgcctgtgagctgggattgccagcctcagccccagcagatgcaaacaccggaaaacccagccaattgtaggcgtagacctcatcaaagtcatcggtgtcgtactcataggcgtagtcatcaaagtcatccatgtcttcagcgctcggaggcatgaagctcatgacagcttctctgagtgaggtagctgtagctccaaaaccaaagttcatcatgcctggtaaatcaaaggggtcttcttcatcatcatcgaaacgcaaggtgggagggaaagatggcagctgctgctgcctggagctctcgactctggctccggtgggccttggcggtgcattgtccacagaggctgcagagccaccacgcccataaatgggaatgatcgcgtcctcagcaacctggcccttgcagacaggacactcacggtggtgggagtgaacatggagccactgataaaggcattcccagcagaagagatggccacacttggtgacgacaggttcagcggccatgtcgaagcaaacgttgcactcaaaattggcggcgctgcggctagccttgtcatcaggctccctggtgctgggtggagccgcggttccggatgcggatgacttgtctgtggttgaggttgaatgcgttcgctgtgcg

SEQ ID NO: 44369 - DNA, 851 bp, Setaria italica
  misc_feature (759)..(759): n is a, c, g, or t
  Peptide Sequence Number=SeqID_110343
ggaggactctgcatgttgggagcttccgagttttcggaggactgcctctgggcaggactctcggggcctcagctttgatgggctgaccctagagcacttggagcttcccctagaagcgagggatgccttcgccacggcagcgtcccagctgcatagcacctctccggaacacctggtcgcacagcttgaggatgcggcctggaagaaactcctccacgtcaaagcaatgcggcactctcatcgtcaggtcctcgctgcagctagggaagaggtgcgcgaggaaatggtggagctcgccgagttgaaggtctccgagttggaggccaagcggaagcaagaggagtgtagggagcgtgccgaggaggtggcacgggtcgcgaacgatgcccgggtgagcgcggaggcatctgctcgcagacttcagaaaatcctggactcgcgtcgggaaatcctggacttgcgtgaagtggagctcctaattctgcagtccgcgcaagtctctgcacgtatagagcgggatgtttgggcgaaggcggcgaccgaggctctccaggccttgttgaagatgaacgcccttggtgaccttggcttcaagggcattacagccacctcgcccgggccggtggactctttgggtttaacgttccattggcttcggaaggccgcgcaggcgacgcccaaggtggcagagaggtacgggtccatctgcgccagggcagctatgaacttagccctaatcctactccactccgggggttncactcatctcgggtccgttgctcggccggacatgtccttcctgaccgatgaacggttcacagcggaggttcgggaggcatccaagggcttct

SEQ ID NO: 44370 - DNA, 694 bp, Setaria italica
  misc_feature (641)..(694): n is a, c, g, or t
  Peptide Sequence Number=SeqID_110344
taattcgcggagaaccttatcaccagaggagataaagggattgaagcagatgttcaataacatggatacagacaagagtggcacaatcacagtcgaagaactgaaggaaggactgacaaaactaggatcaaagattagtgaagcagaggttcagaagcttatggaagcagttgacgtggacaagagtggcagcattgattacacagagttccttactgccatgatgaataaacattaaactggaaaaggaggaggacttgatccgtgcatttcaatactttgacaaagatgacagcgggtacataacaagagacgaactagaacaagctatggcagagtatggaatgggcgatgaagcaagcattaaacaagtactagatgaagttgataaagacaaggatgggaatatcgactatgaagagtttgtggaaatgatgaggaagggaagttatacctgaggcatctctgatctcatgatggaagaggttgtatatatatgtttcaacaagtactgcaagtacaaacaacaatgcaagtttaactcagaacaagttgtttctgcaattatggtctgatagtagtatgtacatttgttgataaccaaatatgctgcaagagagaaaattgtgcaagaaaacttnnnnnnnnnnnnnnnnnnnnnnnnnnnnnnnnnnnnnnnnnnnnnnnnnnnnnn

SEQ ID NO: 44371 - DNA, 575 bp, Setaria italica
  Peptide Sequence Number=SeqID_110345
aagacggtggtgctagaatggccgcaaccagcaagcaagtgaagtgaaagcttcttcctcattggcgcaccgcagacaaacaccaagaacagaacagcctgccagctagaggcagcaatggaggcagctgatttgctgaccctgggcttcgacttctgtttccaatcacctcctcgcttcttcgacgagccctacgagcacgacctcgccgtcgtcgacagcatcgtgctgcacgcgccggccgaggccgattcggtcaccggcctctacccatccaacaacagagaggcctcgagctcgtcggacggcgccaactcgtcatgcaacacgcaggtgccgccggcgtcgtcgccggccggtggcgcggcgaataagagcatggtcatggagaggcaccggcgcaggaggctcaacgagaagctctacgcgctccgcagtgtcgtccccaacatcaccaagatggacaaggcgtccatcgtcagggacgccatcgcctacacgcagcagctgcaggaggaggagcgccgggtgctcgccgaggtgtccgcgctcgaatcctccagcgacaccgccgc

SEQ ID NO: 44372 - DNA, 561 bp, Setaria italica
  Peptide Sequence Number=SeqID_110346
ccggcgtcctcggtccgtccccgtccactctggaggcgatcccggaggcgctcatcacggcggagctcggcaccatgttcccggagaacggcgggtacgtcgtgtgggtcgcctccgcgctcggcccctactgggggttccagcaggggtggatgaagtggctgagcggcgtcatcgacaacgcgctctaccccgtcctcttcctcgactacctcaagtccgccgtgccggcgctgggcggcggcccgccgcgggcgttcgcggtcctgggactgacggcggtgctgacgctgctgaactaccgggggctcaccgtcgtcggctgggtcgccatctgcctcggggtgttctccgtcctgccgttcttcgtcatggggctcatctctctccccaagattcggccggcgaggtggctggtcgtcgacctccacgacgtggactggaacctgtacctcaacacgctgttctggaacctcaactactgggactcgatcagcacgctgtccggcgaggtggagaaccccggcaagacgctgcccaaggcgctcttctacgcggtga

SEQ ID NO: 44373 - DNA, 324 bp, Setaria italica
  Peptide Sequence Number=SeqID_110347
tctccgactcagtgtgagtagtatttaaacttcttttatatttatttttgtccctttttgtttcggttgcagcagcttttggtttcttgagcattgatcaaaaaagaaataacaaaacagagaggaattctcatattaaaaagcgaagtcatcgagatggcaacgcactctcctctggttcacttggtcttgggttcgaagaaatgccacatagttgtttcatcttccgttgtcttaacatgttttgtttcatacatttctttaccttttaataaatttgttctggagaagattttattcctttatttgcatggccaagactgt

SEQ ID NO: 44374 - DNA, 444 bp, Setaria italica
  Peptide Sequence Number=SeqID_110348
cgagccgaacaccatcctgtctccggcgtccggggactcccagcgctcgatcacctcggccgcggcgtcccactcctcctcggcccgcgccgcggcgtcgtcgtcggggtcgggctcgtcctcctcgtgcccgtccccctgggaggtcccctcgtcctcctcgaggatggaatcggcggcggcggctgcggctgcgccagggggcggggggaagaggtcggacatgagggagaggcggttgtcgaagcccgagaggatgcggatcatgtcgtctgcggcgttcttggagctggcgagagacttgacgatgtgctgcgccgccgcgatcaccttctcctgcccgtccggcggcgccgccgccatccccggctgcctgctggctggatcgggagggagcgagagccggctcttccaactggggaggggaaggggatgggataggga

SEQ ID NO: 44375 - DNA, 385 bp, Setaria italica
  Peptide Sequence Number=SeqID_110349
tgcagccgcggaagactcctctgaccggcgagaacaaccactccgtccatgcgacgatgataagtacggtgaggcacgagaccggcgacggctctcataggaggaaacgcgggagctcctgtcctttggcatagttacctcaagtcagtgagatgcaatggcttgttcgaaattttttttctggaatccaaaggaaagcggcagagacagaacacagatgcaaggttggtttctttactccaaactcgtgtccgcgggagccggcggcggtggggtcggaggcagcgccgacggcggcggccggcgggcctaggattcggtccgggtcgcgccgggtagacgccaagccaccagagagggtagcgatgtggggagagggggaaag

SEQ ID NO: 44376 - DNA, 1670 bp, Setaria italica
  misc_feature (1)..(27): n is a, c, g, or t
  Peptide Sequence Number=SeqID_110350
nnnnnnnnnnnnnnnnnnnnnnnnnnnggctagttctctttttttagtttttttttttctttaatccgggaggaatctatttcattgtaatggtaagagaatttacaacgcagagaactggaaacccattcagacagaatagatacagccacccaattgttttctttttcttcattgccacagacctcagcaaatacattaaaaagacactacagaccgaactagcgatccaccacagtttcgaacccttccctgcgttgccgattcccttcaattcttctcccaagtaggcagaatatcctgactacaccttagaggcaccagcgtccatgtttcttcccccccagcacaccgcacagtaagcgctgcacggcgaaatcaacacataccgtgttgggatgccaggatcttcaggtcatgaggacgccatggaacaccttccagctgacatccgtcattgtgcggggtcaccatcggcttcttcagaagaagaggaagaggaagaatgcggcgaaccggcagatgcatctgctgatggcatagggtcattgccttccacgctgtctggagctgtggcttcagcttcaccaccactgctgcttgctcgccaccgactgaccacaatgagcgctctgctgcgctcagtcaagtaccgcatgatcgagccacctgacggcacgatgaagaccattgttattgaggctggagtcctctcagctgtgtcctcttctccttcttcagtggctccaagaccgctgctgtcatcctcaatactgctgctgaaccctgaacgcagcatgctcaacaaatccccaatgtcccgctgctgctccatccggcgccagtcccgctgccgctcggggtctacctccatcggcctcgctgtcggatgctccaccctggcgtgcttcctcagctcctggtaggcacccctgaactcacatgactccatagtgcacgaccggaccttggagttcatgtacatccttgcgtcgtagtccttgatgcaatcactgaccggcccacggcacagcgggcaggagagctgtacctgctgctgacactcgctgcactcggccgctgaatccttggaagaatccttagaggccttgcagtactggtcatagcaattggagtgccgcgagcttgtgtcgcacatgaaggggcggcaacccttctcatgcgacgagcagaccagcagcacagcattgtgcgggtggtccatacacacagggcaccggacctcctcccactctgcagcctgctttgctgcgaccgctgatgcagccgcggaagactcctctgaccggcgagaacaaccactccgtccatgcgacgatgataagtacggtgaggcacgagaccggcgacggctctcataggaggaaacgcgggagctcctgtcctttggcatagttacctcaagtcagtgagatgcaatggcttgttcgaaatttttttctggaatccaaaggaaagcggcagagacagaacacagatgcaaggttggtttctttactccaaactctgaaaaggaaatcacaataccaagaaaaaaaagctttaatcagataacaagcaacagctccccgtatcctccatcacgcatacacacacacacacacacacacacacacacacacacacacacacacacacacacacacaca

SEQ ID NO: 44377 - DNA, 497 bp, Setaria italica
  Peptide Sequence Number=SeqID_110351
tcgccgcgaaggcattgcaccaaggccgtcgccaggaaggcggccgtgaggaccggcgcgctcgccgtgctcgcggctgccgcgccgagaaggccgccgctggtggcggcgcccaggcccgacggcgtggccggcaacgttctggtcgttagttgaggggttcgtcggattggcttggcttcgcttcaaaatggtggggcggaggcacacagctacaggcctacaggctacagctacgcggcgccgcatccacctgcctgacagcctgaactacagccaagacaatggcgtgttcgttgtttgttgtttcctaatgcgttcgtgagcttttgcaatgcaaatccacggttgaattagaatggctactccaactggcaagaaacatttcagcatccagtgcattttcatcgtactcaaatagtagccaaatcattgactcgcatttttccaggaacattggagtgtaataacgaataaagaatacttggtttatcaaa

SEQ ID NO: 44378 - DNA, 993 bp, Setaria italica
  Peptide Sequence Number=SeqID_110352
taataatcagataaaaccttttgtcaaccatgttcaggattacacataaaaagaattaagcatgaattcttggaaagaaactataaggtgtgaacactcaaaagcattttacataaggggatcttaagcctttatgtacatctcttgcacaggtgatcttaattgtacattgccacctcctaagtgtgttgtttgaccacatacattgttaaattacagaggcatgtcaggaatcaatgcaagctctaattattgtactcacttgtttactttcggtgatgcaggtgattcatctattacttcgagttgatttctgaaggtagataaaattccgtaaacattgtatttattttctctctcatgaattagttttaaattttcagttatcacttagttttctcatttgggactcgaggctacagatctgaatgcttttgcttctaccatttagtccatcttgtttgttgtgtgtagtctgtatgtatggtagcactggtctgctgcaatgttagtggcttagtgccagtctactgtgatattagtgactccatgtcagtctgctgtgattgttagtgggttattgccttttactcaattacatccaggttgcacgatttgttcatttgttgttgttagcttggtataccctcagattcttcatatgttaattttgtagtagcatgaatgctcgtgttgctactgaatgcattaatgtgcttgagttgagcttctcttttctatactggatcatgacctcgtgctcctatttttgttaattctgaaaccctagaggaaattttgcatctgcttggaatgtgggttcttcgttttgtagatgctttataattgtgtttggcccaacgtgggcttttggattcatatatttgtcaatgcacggtcctttactcttttgttctgatctcttttcatttgatgacagatggtttagctgtcctactcttttcctcttgaactcttgatgggaatgcgtca

SEQ ID NO: 44379 - DNA, 950 bp, Setaria italica
  Peptide Sequence Number=SeqID_110353
gacccccaaccaaagtaatccttttttgtttttctttccagtacagaataaagagatgcattctgaaatcccatgccacacatttgaaaaagatacaatcaaattgtattccaacatcctgctatcgaataatcgatcgagctgcaacgtgaccttactaccagggaagcacctgcctgagcaacggcttcccagagaagaaggcttcaaggctaccgattgtggtgtcccacaagtcagacctggactctgatgtgaaaaccgcaacatgggacgtcattaccacattgtccatggagaagagctctgctggcaccttgggttcattctcaaagacatcaaggccagctcctgcaatccttccctctttcagcgccatgatcaactctgcctcgtcgacgtttgctcctcgaccgatgtttatgatgatcccatcctttcccagggcctctagaacatccttgttgacaatgtgccgtgtgtccttattcaatgcacatgccacaacaagcacatctgattctgaagcgagatcgtgaacgttaaagaagtatttgtaggggactgaatccctcgatcttctagagttgtagtggatgatacagccaaatgcttcaagcctctttgcaatcagggaaccgatgttccctaatccaatgatgccaacacgcttgccacctagcttggtgccgagggggtagtccccctgcgccggccagaggccgctgcggacgaagcgctcggccgccgagacgcgcctcagcacgtcgatgagcatgccgacggcgtggtcggcgacgtcggcggagtagaccgtgccggagttggcaacggcgacgctgcgccgcgcgcactcgcagaggtcgatgtggtcgacgcccgcgccggtgctgaagacgaagccaagggacgggacggcgtcgaggagcgcggcgtccacgcggacggcg

SEQ ID NO: 44380 - DNA, 298 bp, Setaria italica
  Peptide Sequence Number=SeqID_110354
tagtaaaaaatctgaggatcaagagtctgacgaaacatagctaggacagaagttaaaaagaaggattttagaggttgctgttttacttctgtcctaacaatgttgaggcagagttctagtaaaaatcacagatccagaggtctgaagctaaagaaggctctccagataactctcttggttctggtttctgtttggttgatctaccaagttaaacattcttatgagaagaaggcgtcatatagcgaagatgaagggatgatctgcataaagatgataagggaccaggggggaggtaatc

SEQ ID NO: 44381 - DNA, 425 bp, Setaria italica
  Peptide Sequence Number=SeqID_110355
ccgtttccagggggcggtcggctctaggggcctgcgtgtatttagatccggtctcctgccttgcgctatgggggagcggatttaggtgaacgagcatcttgatttttttggccaatctttttgctctaacccacctcgtggtgttcgtcgtataaatctttccgtgggggggtgggaagaggagaccaggccgacaagaaccgcggtttcaaggatcctctcaggtgagcttattcccggccccgttctgtccaaaagctggaatcatttctcgtgtacggtggccttgccctgcgggttcttgagctccttggagccctttgggtttccctgagttcaaacatccgctgtttcatgtctatgccgctgagattggggtttcttgtctattaaatcccagtagtggagtgaaaatttattgtgga

SEQ ID NO: 44382 - DNA, 1837 bp, Setaria italica
  Peptide Sequence Number=SeqID_110356
tggggagcggatttaggtgaacgagcatcttgatttttttggccaatctttttgctctaacccacctcgtggtgttcgtcgtataaatctttccttggggggtgggaagaggagaccaggccgaagcaagaaccgcggtttcaaggatcctctgaggaaccaccaactgttcaagtgcaagtattgggagtaaaaaagaaggattttagaggttgctgttttacttctgtcctaacaatgttgaggcagagttctagtaaaaatcacagatccagaggtctgaagctaaagaaggctctccagataactctcttggttctggtttctgtttggttgatctaccaagttaaacattcttatgagaagaaggcgtcatatagcgaagatgaagggaatgatctgcataaagatgataaggaccagggggaggtaatcagattgggcaggaaggacctgcctccaaagattgaggctgattcttcaacgttggatgagaaggttgaggatgaagagaatgacgaaatggagcaagaaatgaagcacgatgagaatgatgaagaccccatcgatgagcaagacctggagaaggatgatgatcttcctgagcctggtgaacattctgctgacaaggatggagatgatgtgggtgtgtttgaggatgaagagcggaaggagcggtctcaggaggatcaagagaagagcttccatggtgataatgtttctagcgctgttactcatgactccccatcatctgagcaagaggagctgtcccatcatgcccaagagaaggtcttatttgtggatgatgcttcaatggcagtgcctcatgaaaaccaggaggctggaagcaaggaggaggaagtgcgcaaggctagggagaagagtttcagaggcgatgatgtggctagctctgtggatcatgatgccaaggtgaaaaaacctctcccagaggagcaattgaacaccatggatcggatattcgaaggcaccacaaatttatctaatggagtttcatttcgaggccctggagtaaatggatcaaatgctaccagggaacatgcagctactccaactaatacatcttcccatcagaatgctgacattcctatcatggactcagaaagcaagaccaatccaactccagcaaatttgaccagagaccatgagcaaaataattcaactttgaatggtcagccagagcagcaagtgaattcaacggtggtgctgcagggccaagtacagcccttgactgaccagacaccatctgttgagttgcattctccaccaaatggcaccttggctctggtaacagatgggcaaaagtccgcatccagagctggagacgatgacaataacactggctcatcctccaccctggtggacaataaggtcgagggtgaagatgctcacaaagaagacgtggatgtctccaccaaaataatgaacagggcaatgagtgaagaagaagtcgtccctgaatgatagagatctcgtattaggctctggtgtaacatgcaagttcataggacttcatctcctagactcggagatgcaatgcaagcaggctatctctattgctcctctttttgcaaaagttcgatagatatctgcgttgtattgcctagtagtacatcgtaatgatctggggcaggtgatgaacaagtagcatgtacgctcaaagaaatatagcgattccgcagctcagaagctatgctgctggaaccatatccatatgccaactaggctatctatgaaatgtccatcccgcccaccttttgtgcctgaatatgcctacttgtgaattgtgatgtttgctagaaaacaaaaaaaaaaaaaa

SEQ ID NO: 44383 - DNA, 1513 bp, Setaria italica
  Peptide Sequence Number=SeqID_110357
gcaggccgtctcgtactctcgtgagagtcgccactgcgccaggccgcaagcgaaggagctctccaacagccacgactccatccctccggcggtcccgccgccgccgccgccatccctccctccctccggcggccacaaccctcgccgcagccacaaccctcgccttgttgcgagctgtgactccgaagctgccggtctccgtccacatcgcgtcataaatccctctccaccccatccccgacctggcacctaccccccgccattccaatcccccaatccgcctggtgcacaagccccgaatccaccgtcgcatttgttggttcgcgagctgcagctcccgctagtgcgttccgtttccgagggggcggtcggctctaggggcctgcgtgtatttagatccggtctcctgccttgcgctagtgggggagcggatttaggtgaacgagcatcttgatttttttggccaatctttttgctctaacccacctcgtggtgttcgtcgtataaatctttccgtgggggggtgggaagaggagaccaggccgacaagaaccgcggtttcaaggatcctctcaggacaaagttgcatctgaactgcatttgcctcagagacaatgagtgagtcttttcttgataggatggtttcccaacttcggtcgacatgcaagttctacactggatatcccaaggacctagggccatcaagaattataccattcacatctgagcgtcagtttgtgcagctattgcatgaaggaaggcctgtcgttgttgcctttactattaagtgtacttatacacagcatcttgataaagtactggaagaggctgctgccacattttatccgcatatcaagtttgtcagagtcgagtgcccaaagtatccagggttctgccttacaaggcaaaagaatgaatatccatttgttgaagtattttacaacccagaacaggctgcaggccacggaaagagcgtggatcctaacatcactaagtattctgtaaaagtgctacctttcaactatgatcagagcgtgtatggatttcgagaatatttcaagaagcatggtttcaagtactctgaaacaaactagggagttaacatggaggcatttgttgtttggagttaaaccattagactctactggtgtcctgcctagtccaaggaatacttgtcatgtactcatgtatatggggtacagtccatgccaatagcttagcactgccataccaaatgtgcactgacctatcgaccattgaattcggtgaattgaacatttccccgacgacaaccaggaatgggtatcgcacctctttttccgatgtgggtgttctgctatggcatgttgcactatagaaattcgatggtatcttgatttctgttgatgtatagcttgagctagcagtttttaaagggcaaagtacctgggcaaaactatcgaaaagacaagttgctgtatacggatccgattgggattccttcctagaaaatactttattcaatcatatcctg

SEQ ID NO: 44384 - DNA, 733 bp, Setaria italica
  Peptide Sequence Number=SeqID_110358
tttaactagtacttaaaaattaattagttaaataatgttaagtctcgtttcatgctgatagatctgtgcgctgttgcttcggtatgcattttttttggttgttgattcgttgctgctattgattccgcaaaaaaaaaaacctcagatccatcttgctctgttcatgaaagaacagattttgtagcgttttcctcccaaataagattttgtagcgtttttttgcctgatttgtttcatgagcaattgagcatgtagctgaggctaatctttcaaaattttgtttgaggatctggctcgagcagtttgttcagggtttcaagcttggaattttgactctgaatatctgggctgcgggagatctaactatatggagacgtttaaccaagtagccttatagatatgtggtttgcttaaccatgtggaactggaaattatttactaggattatctttggggatctgtggtttgcttaactatgtggaactggaaattatttgctagggttatctttgggctcaaccttgtgcttttggagatgatgaattttatcagaggctgtttctgaggtgagccaagagctctccgagtgctgcaaaagaactgatttgccgttctgatcaaaagcactatttgcctaatactagcataactatgagtccattacatctatgtgattggaaattatcattaatattttcttgtggcttctgctgtgcttttggacatgatgtta

SEQ ID NO: 44385 - DNA, 570 bp, Setaria italica
  Peptide Sequence Number=SeqID_110359
gtgtaccttgtttctatttatgctgattcaaatgagaaatcaaattaagatgataatgaagaaagtaataggtaattagagaatgtttctaacccgtaagagtaaatatctttatgtcatgatatataagatgactttctaatgacagcgattctctctcccaattttttatgagtgaaagctctcttggaacccaaattagacgctgtctctaatgttattgcctaccaatagagtgccgaggatgcctcttttcatataaatggtgactaaaactaagattgcctacatgcttagtaactttcaatgacaaattgacaatacattctttctggtgctatgagaatttcatctctggttcaaaatctgtaggttgactgactattcgtatatttatatgatgataggagtataggacacaagttatattacactagttaggaaggctatgtcagtatgtctaatcagctctgtaatgtcgtatccttatttctcttacctatttcttgcaaagcatgtattggattggaactgttacatattggtttctttcctttctttcttttgctg

SEQ ID NO: 44386 - DNA, 349 bp, Setaria italica
  misc_feature (343)..(343): n is a, c, g, or t
  Peptide Sequence Number=SeqID_110360
tgttgttgtagttagttgtcttattggtctattggttttctaattttgggtatgttgtagaagtacattggggtttaacagttgtaaagtgagcagcatgcttgtagtactgaaaattttccaacagattagtttccaagacctccagttacagttataagttgtttgaacattacaagtcataaaagttgtatagatataataagagagtacatttcatgaaatatctatatataccaatggtcaatacaaagaaaaagaaaaatccactggcatgaactcagagggagcattccttagcgcatgacatttactgagtcgctgttgatgaattcatataatntcagtt

SEQ ID NO: 44387 - DNA, 919 bp, Setaria italica
  Peptide Sequence Number=SeqID_110361
tctgtctggcagggggcccggtataaaagcgttcgcatcagttttagagagagaaagaaacctaaaaccctgctctcccgatggcggcggcgaacggcggcgcctcccggcgctcgcggccgaacgtgttggtgacggggactccgggcacggggaagacgacgacgtgctccctcctctctgaagctgcgggtctccgccacgtcaacatcggcgacctcgtccgcgagaagagcctccacgacggctgggacgacgacctcgagtgccacgtcatcaacgaggacctggtctgcgacgagcttgaggacatgatggaagaaggtggtatactggtagattaccatggatgcgatttctttccggagcgttggtttgacctagtagttgtgctccagactgacaactcaattctgcatgatcgcttgaccagcagagcttgaccagcagaggttatacgggttccaagctctcaaacaacatagagtgcgagatcttccaagtgctcctggaggaagcgagggagagctacaaagaggacattgtgatgcccttgcgaagcgacaatgtggaggatattagtaggaacgtgggtacattgacagactgggtaaacaactggagaccatcctgatgagttagttgacatgttaaacctatgtggtgcccttggggtagtgctgcctccgaaaagaaatgttattgacttcgagcatatcctctgtgtattgacttgtattgttttaacaaccggagaccatcctgatgagctagttgacctgttaaacctatatggtctgctaggggaagtgctgcctccgaaaagaattatatgctttatgttgacctgttagaatttatatgctttaaggtgaaccttccaaacctgtatgcttgctacaaaaaaaaaaaaaactaa

SEQ ID NO: 44388 - DNA, 233 bp, Setaria italica
  Peptide Sequence Number=SeqID_110362
ccgtcccgttccgtcgctggctgctgttgttggtggtgttgctcggctgcctccgctgcctgagacgagagcgaggcggagagggagggggacagggcggccggccggcggcggcggctgattctgctcgagatcgagcagcaggagctgctcctgaatttgctgctgctggtggtggtggtgccagatctgccttcctctcccgcggcagcgccatcttctgcgggcgggag

SEQ ID NO: 44389 - DNA, 349 bp, Setaria italica
  Peptide Sequence Number=SeqID_110363
gcccgctgcatcttccctgacggcgccgccgatccctcctcctcgccgagctccggcgccgcgccgcgccaccatcaccagatcgccgggcggcaaccctaggccctccgaaaccctagatccgcgggcctccgctgcgcgcgcatccggaacgcccgaattcgcgtccaatcggccgattcaggcggaccgcctcaccggcgggggctcgaatccggcggaatcggcgggctccggtcgggctcgattggggggatttggggattccggggcggggtcagcggagcgggctgggcgcggggggttggactcgatccgaggtggggtggaggaggaggagagagaaaat

SEQ ID NO: 44390 - DNA, 381 bp, Setaria italica
  misc_feature (1)..(58): n is a, c, g, or t
  Peptide Sequence Number=SeqID_110364
nnnnnnnnnnnnnnnnnnnnnnnnnnnnnnnnnnnnnnnnnnnnnnnnnnnnnnnnnnttgtttttcaaaggaggctggtgctcttgcttgcataaagaatgatacggttcaagttcatgggaagaacccggaactattgaaacaatgatatatgtggatggattaactgttcaccatccagcagttggcaaattctaaaattgtgaagggtaaagctgttggctgttgcagacatttttgcagctgtctaatgtgcaaaaatatggtaatcgaagcaacttcaagtacaacactggggggaggggggtttacgttggagaaaaggaggattaaccttaaactttcacagtatctaccttcctccgtcttgctgttgtcca

SEQ ID NO: 44391 - DNA, 1133 bp, Setaria italica
  misc_feature (1)..(40): n is a, c, g, or t
  Peptide Sequence Number=SeqID_110365
nnnnnnnnnnnnnnnnnnnnnnnnnnnnnnnnnnnnnnnngtttagaagaaaatcttgactttgcggataagccagaccaacacaaggctgttatttccaaacatatatctaaagttctcgtcacatcacgattacagaacaccgcacaaatgtttactcccagtctctgaatctgaagacgacacggccgcctgtcgcctcatcagcaagtcagcatatgggatctttctgtgcgtatcctaggcggcgacgctcctcttgaaatgcgcgatctggatgttctccacgctcagcttcttgaagttgctgttcttcctggtgctgaagaagttgccccagttgtaggcgtcgtaccggggcgggtcctcctcgctcaccagctcctccaccggctccaccatggtgtagcccgccgggttgaagaagtagggcctggagaacctctccttggccgagttcaccgtaacccggtgctccgcgctctcgtacctgtcgttgctccaaacctggatgaggtcgccgacgttgatgatgaaggagtcggggacaggcttgacgcggacccaatcgccgtcggaacggcgccggacgtcgagcccgccgacgtcgtcctggtagaggatggtcagtgctccggcgtccttgtgccggccgacgccgagggcgaggtcggggctcgggcagggagggtagtggttgagccggatgaaggtggtctggtccttgaagaagccgtgcagtctgtcaggcctcaggttcaggctccgggcgatcagctccagtatcttgaatgccagctcttccatcgcttgcatgtactcctccaacgcctctctgaatcccggcaggtcttcgggccacttgttttcgaacacgacctcgccgtcggccacggctatcggcggctgaagcccgcccgggacgaggtcgtacacctccttccagtccctgacgttcttggtgtgctccgactcgtagtacccgagcggctccgcctcgctcctccgcacggcggctttccgctccgccggcagggcgaagaacgcgcgctgcgcctccgtggcgcgcgccacggtctccgccggcacaccgtgccccaccaccacgaagaagccccagtcccggctcgccg

SEQ ID NO: 44392 - DNA, 315 bp, Setaria italica
  Peptide Sequence Number=SeqID_110366
ctgacggcagtaggcttcgtaagtggatggaagctcactctttactctaacatcccctacgtatacaaatttccaaccctttaaggtcgctcggacagccaagtccatgtcttcaaccgtagtccgatccttccaacctcccgcgtcattgatagcttctctacgccatacaccagcagtaccattgaaactaaagaaggcaaatgttgctgatcctgcttcctgctcaactttgaagtggtaatccaggaatgtcttctgtatccttgtacaaaaggcttgctctgtcattcacgaaaacccaccgagcttgaa

SEQ ID NO: 44393 - DNA, 1312 bp, Setaria italica
  Peptide Sequence Number=SeqID_110367
aaggaggttggtggcacccaggagggaccaattgggacagcagaatcggtgctaactgaagatggtgctgatgtcccagtttctgacaacatggttctgcggaagctccttcgcataccaagatactttgatcctggagaaacattgttggagacttgctttaattgtagcgaggaaggacatgtggctgcaaactgcccaatggaaaagcggaagaaaccttgctttgtctgtgggatgttcgggcacaatgcaaaacagtgcacgcagggtcaagactgtttcatctgcaaaaaaggaggtcatatggcgaaagactgccctgataagcacaagaggaatgatcatcaatccactttgtgtttaagatgcggagaaataggtcatgatatgtttggatgtaccaatgattacctggcagatgatattaagcaaataagatgctacatgtgtaatcagaatggtcatctatgctgtttcgacttctctgacaatagccccaaacaaattagctgttacaattgtgccaaatctggtcattctggtctggggtgtgccaagcaacgcagggaaactagtgctgtcataactccaacccaatgctacaaatgtggggaggaaggccacttcgcacgtggctgcacaaagaatgccaagtccgatcggtcgaaaggcaagtcatcatcgcacagtcagagaaaggaaaagtggaaaaaagattccagtgctagatcggctcctcatgatgcccgtaaaacaagtaaaaggaaaagcccccatttcgaggatagaatggacacacctcggcataaatccaaagctaggggtggttggactggtggtgacgatctcgaggatctaccgttcaagaagtacaaatccaaagagtggggttctccatctacacccaagaagccatacacgaatcaccagttctcatctggcggtgactacttcacgcctcagtcctcacgaaggcacaaccatggtttcgcatcaccaaactcgaattattcacccagcgcaaagaagcacgggttctcatcgtcaagattcgccaccagcaacacccatctccggttcgagagaagttagctggaccggttcgagagaagttagctggacggatgagtccaattttgttgttctttagcttaattgattattattgtcccctggggatgaactctgcctgttggttcattcccttcgatagctgtttgtcttttaagattatatatgtatcagggttccattttgttgactctaagcaagctcacttggcattgtgctaaccaaaaaaaaacaaaaa

SEQ ID NO: 44394 - DNA, 409 bp, Setaria italica
  Peptide Sequence Number=SeqID_110368
gagctttgggattgctggctagagacagcaggttgctgaagctgatgttgctgcggctgctgctggctattgttttgctgttgtaacagttgctgctgctgagcaagtttcttctactttataagtatatctatatcgccaccactttgactaggagagccaacatttggaataatatcagtgccactgtttgtctgcccatcccggccaagaacagcatttctgctgtttagcatcatcctcaatcttctattgtcaacatcactagatgttggcgaagacatattttgctgagcctgcagcataagctgctgctgctgctgcggagtcagcatctggatctgctggtgcaattgctgttgattctgaataaatgatttctgctgaagaattccagacctaagttgct

SEQ ID NO: 44395 - DNA, 1190 bp, Setaria italica
  Peptide Sequence Number=SeqID_110369
agatcaaggtcaactatattcaaagttgtttgtaacaaatccaaattataccaaaagtcaaaacaatatgtactatgttcattttgtacttttgttcatactgaaaggaattccacaatgttcattttgatcatattgatacaaagtgccatctaggcatagccaggagcccatgatccatcaaattttcctaaaaacttgagtttgtcccataaatataagaagctaagaagagatgacgagtatttaccaccaacagtgcaatcatacaactctgataaatgaaaagccacaaggcagaagtcaaaagatatacgttgctgctgctgagcaagtttcttctttataagtatatctatatcgccaccactttgactaggagagccaacatttggaataatatcagtgccactgtttgtctgcccatcccggccaagaacagcatttctgctgtttagcatcatcctcaatcttctattgtcaacatcactagatgttggcgaagacatattttgctgagcctgcagcataagctgctgctgctgctgcggagtcagcatctggatctgctggtgcaattgctgttgattctgaataaatgatttctgctgaagaattccagacctaagttgctcaagtcccgtgagtggccatcctttcaaagtcaaattgttcccagcttgattggatccttggacaccaataaatgatccttctgggcctgcagctctgggcgtcagaatgggattgatctctgtcttgatactctgagcaggcccaggaagttggggacttctggcctgaacttgttgcagagtgcctgacaagccaccaacagttccatgcaaaatttgccctgaagattgtccacttgaagctgctttcaacaatgatgcttcatttgaatcaagtagttgcccagcattctctccatatctttgcttcattgatgcatcttccaaagtgtctctctgggaaggtacctttaacctttcctcatacatttttgttgccattacatttgcagtactttggttctgccgcattaaaggattgtttccagaaattccatttgcagaaccattaagaagatgggaaccatctctacgctgttgttgcagctgctgctgctgctgctgctgctgctgatgctgctgctgttgtggttgttgctgctgctgctgctgctg

SEQ ID NO: 44396 - DNA, 468 bp, Setaria italica
  Peptide Sequence Number=SeqID_110370
tagggggttttatggtcgcaactccggtgcgctgggcctggctacacagggaaagcattaggtggcgggcacctccttgtcaccatccttcaagagaagaacccctaacgcctgagattcagctggaaattgcttctgaggtgattaatcgcctggctgtagcacaagaaaggaggatgctttcagccagcgagctctctctccttaagttcctgggggacaggatccccgatttggaggctgcagcctcagggatgcatggtggtgcaactccgtccccgtccaaggtggtttcctctcgtagtcgagcgcgggctaagacctgttgtcacgctgctgttctgagttcattgctggtggacaccctgctggagcaggtttctacgccggctgcaaatgtcaccgctggccggcaggtcgctaccaggcacttgggtgaggaagatgctcatgctaactctattgtgg

SEQ ID NO: 44397 - DNA, 558 bp, Setaria italica
  Peptide Sequence Number=SeqID_110371
aagtattttcattattatagtacaaggttttggcatggatcatgatcaaactggaaataagagccaagcaagtcacaaggaaccattttgcatgctccattctgttgacatgagtacacgcatagagcaaccatcaaagtacattgttacatgtctacaaatatctgcaaaaaaaatgcactttttttttaacttcagtgtcctcacttctctgctgctcagctcctagccatgatcagatgcgcttggcaaaaccttgagagagcgagctccagcaggaggagtcgacggcgatacaggacctaagcctcgccgccgccaccgcgctgtgcagcggcatgagcgtctccagccccgccgacgccgcggccgccgacctgcggaggatccgggcggaccgggcagcggaagtcgacgccagggaaggcagtggagcaccgaggacgcggcctgtgaggggtgaggcgcgggccgccgacctcacgacgacggcggcggcggcggcggcggtgcggaccagagatgccatttcttcccctgtcttcgcggaattcgagt

SEQ ID NO: 44398 - DNA, 1284 bp, Setaria italica
  misc_feature (1243)..(1243): n is a, c, g, or t
  misc_feature (1256)..(1284): n is a, c, g, or t
  Peptide Sequence Number=SeqID_110372
cgtccccagcgcagcaaagccggcacaatgccaggcgccgccgtggcctcgcctctcctcctctcgctctcctcgtcctcctcccccttcctctcctcctcatccacttccttccttccaccttcctcctccgctgctccgctcccggccagcaggaaggcggcggtctccgtcctccgcgctctgcgggccgaggcggccaccctccccgtcctctccttcaccggagataaggtcggggaggtcaccctcgacctcaagtccgcgccgccctccaccgcgcgcgccgtcgtgcaccgcgccatcatcaccgaccgccagaacgcgcgccggggcacggcctccacgctcacccgcggtgaggtcagaggcggagggaggaagccctaccagcagaagaagacgggaaaggcgcggcgcgggtcgcagcggaccccgctccgccccaggaggtggggtcgtgttcggccccaagccccgcgactggtccatcaagatcaaccggaaggagaagcgcctcgccatctccaccgcgctcgccagcgccgccgtggccgaggacgccttcgtcgtcgaggagttcgacgaggccttcgcgtcggggcccaagaccagggacttcgtggccgctctgcagcggtgggggctcgaccccaagcagaaggccatgttctttgccacggagttcgacgacaatgtgcggctcagcggcaggaacatcggttctctcaagatgctcacaccaaggacgctcaacctgtacgacatcctcgacgcccgcaagctcttcttcactcctgctgctgtagaatacctcaactccaggtatggagccagcgcttctgatgactacgatactgatgatgaggacgatgttggagaggaactggtggagcaagaagtagaagaaggcaccacagaggaggctgcacaagatgcgactgaagagagctgaggcagacagcagttgctaggtgagggaatgtagatcgacaaatttttattttcttatttgttatgttacccttttgggtgagaatgaattgtttggcaatcgcctccctaacgaggaagccttttgtctgctttttattgtaagttggtaatgttatctcaccaaaagcagtggagtatattagattttcaaacttcacataagtatatgttgtcaaatacattatcaggtgtcagccgctgcagataaagtgttgatcatctgtgcttgcaaaaataaaaaaaaaanaaaaaaaaaaaannnnnnnnnnnnnnnnnnnnnnnnnnnnn

SEQ ID NO: 44399 - DNA, 375 bp, Setaria italica
  Peptide Sequence Number=SeqID_110373
tcttgttgttgatgccttcaaacttttaaaatatatttctcccttctctttcaccaaaaactaggaaactgacaaaaatggtaggggggggggggggggcggggcagaaagctactcatatggccaaaacggatattattaattcattgggttggaagtgccaaaaatgcttcttacctgtaacatgcgtggattagcagaaaacagcctagaatgtgagaatgccaagctggaaaaatttaagctccataaaaattaccagaagaatagacgttcaaagaacttgtgagcctgtgacacctagagggtcttatccgcagttttcttttcactattccatttcagtcctttttttggaagttttacagttttatg

SEQ ID NO: 44400 - DNA, 381 bp, Setaria italica
  Peptide Sequence Number=SeqID_110374
cgcatgctaccttccccccggtgcgcacggcacctgccatcctcttgagcttttcaacatccatcttggctcgggggaggaggggaagccgcggcggcggctacggcggccacaaagtgtggctccctcctcactactctccatggccatgccttctcagctctctctccctctctcacccctctgtcctcctttctctctctggaattatcacggggccagaaaaggctaggctataaaggcctggagctggagatgggcgcacactgcgctgcagcacagacaacagcacagtgatatggtgtgaggctgtgagcttacacacggattgaaaaggaagctgcaagccaagccaaagcctgcaagaagctgttgcaaaca

SEQ ID NO: 44401 - DNA, 397 bp, Setaria italica
  Peptide Sequence Number=SeqID_110375
gtgctctgagcctttgtcatctgtggttgtagtcttgtggactgccttcttcttcctgcgcatgctaccttccccccggtgcgcacggcacctgccatcctcttgagcttttcaacatccatcttggctcgggggaagagggggaagccgcggcggcgtccaggtgcgcacggccggatgataccagccgttccgcgagcctatgtgatccatcggtggcagcacctccatatacgcctcgcgcatcatctccccttcttcttggccgcagctcagctcagatcactggataggcgcagcgcccctccttgatctctcgcgagcaggctagtccctggcaggaggacaaaaagcgatccgcctcggttcttgctccgcctctctgaaggaattgtta

SEQ ID NO: 44402 - DNA, 1145 bp, Setaria italica
  Peptide Sequence Number=SeqID_110376
tgtaattaatacactagacgtctgatccatggttcagagtggattgcacctaaaacagcatgctttggttgccaaccagctgatcatgtagagggccacactgcagaccttgatcttgcaaacccatcccataagttggcattccaggagtccggcttggtgaattgaacggcaaattcgcagcgccatgttgcttggtgtctgctgacaatgagaattggcctactgctgtggccggagctgatgcgttggactggttggtgatcagagaggactgtgatggcgagggaggctggtcatccgtcaggttaaccgtggtgatgtcgtggatgcttgatcttctcttatccttgcctccggagttgagcctgatgaagtacttctgcgcatgactggccacttgagtaggcgtcctcgtctgaacgaagttgcgggatatgttcctccaatcccctttgccatacttcttcaggcctaagagaaacaacttgtgctcatcctcggtccatggcacgcccttcttcctctcctgctccggcgtgcggccggggtgccgcttcccgcagcctccgccgaaccggtacgcgtgcctgaagtcccctgggccgccgccgccattgccgtcccactgcagggtgaacaagccgccgccgccgccgccgccgtagaacgggatgggcaccatgccgctctcgatctgctggacgtcgacctcgaggctcttgaagtggtggacgacctcgcggaccgttctgccggggatggcccgcgccacttgctcccagtccggacagcggaggtcgacgccggcgagcgcccgctcgaacagcttgttctcctgcggcgtccaggtgcgcacggccggatgataccagccgttccgcgagcctatgtgatccatcggtggcagcacctccatatacgcctcgcgcatcatctccccttcttcttggccgcagctcagctcagatcactggataggcgcagcgcccctccttgatctctcgcgagcaggctagtccctggcaggaggacaaaaagcgatccgcctcggttcttgctccgcctctctgaggatttgtttttccttctcccagctctcgagctagctttccctgagcactagaaaagggatagcgatccag

SEQ ID NO: 44403 - DNA, 932 bp, Setaria italica
  misc_feature (1)..(37): n is a, c, g, or t
  Peptide Sequence Number=SeqID_110377
nnnnnnnnnnnnnnnnnnnnnnnnnnnnnnnnnnnnnaatttttgctgaatgactcattgcaagctcagttttgtttatccgagaaaacataactcatccaaacataaatttgggcggcaccaataggtaattgattactgtggacaaatatgcctgaagtacaggcgtacagcatgatcagaatcctcaaaccccaatataaggcatcattctcaggaatttagaatcagatggtcatgaaggttaccgatacatcagctgaccagaagaatctagaattcagttctgctcatccatgtccagcaaaagcaggatccatgattgaatgcaagtccacttcatagcacgcatgatctgtgctcagcaagtcagcactaccactcaattaaccgtctgaagataccaaggcatcaaattctttgttgaagttcttttcgttacattctcggtatcaccaacaattatgcaccaccatggcacgaagatcccctttctgttatgctctgaagaattcccatgactaattacttcaatacaggtactgaagctacagcaagactgtattatacactagacgtctgatccatggttcagagtggattgcacctaaaacagcatgctttggttgccaaccagctgatcatgtagagggccacactgcagaccttgatcttgcaaacccatcccataagttggcattccaggagtccggcttggtgaattgaacggcaaattcgcagcgccatgttgcttggtgtctgctgacaatgagaattggcctactgctgtggccggagctgatgcgttggactggttggtgatcagagaggactgtgatggcgagggaggctggtcatccgtcaggttaaccgtggtgatgtcgtggatgcttgatcttctcttatccttgcctccgttaatttttacttta

SEQ ID NO: 44404 - DNA, 853 bp, Setaria italica
  Peptide Sequence Number=SeqID_110378
ttttttttttaattaccagggcaatggtacagaagcacacaaagcaacgaggatatgggtagaaaaaagaggcatacttcatgtaaaatcccaccgacacatccgaccaagttctcgtgcatgacaaaaccggaccacgggcacaaataaggtaggtcagagttctcaacaggatgtctttttctcatggtaatgcttgacacttataaacccttcacaacagcaggcacgcagcaaaattatgaggactcctttttctcttcagcggcctcctcaaatgtctctccagggacaagctcgggaacgtcgtcatcatcatcctgagcagcacctgcgctggcaccagcctcagcgcttgaagctccaggggcctgcttctggaattgctccgcaagcctcctcaggttgtccaagttgtcaggaccaagctgattgatgattgatggaagcagatcttgcagcttctttgtctgtggagttccactgaccacccatgtattagcaccaattgaagcttgcactttaggattcacaaactgaatgacaacatcatccttaaagatgttcacctcttcaataccagggatggtgttcactcctattcttttcagggtgctctgaagccttttgtcatctgtggttgtagtcttgtggactgccttcttcttcctgcgcatgctacccttccccccggtgcgcacggcacctgccatcctcttgagcttttcaacatccatcttggctcgggggaggaggggaagccgcggcggcggctacggcggcggcggcggcgcgggtgaggggaggagagaggagaggaggtggggggagaggcacccgggagaggagggaa

SEQ ID NO: 44405 - DNA, 464 bp, Setaria italica
  Peptide Sequence Number=SeqID_110379
actaagctcatcgagaaggccctcgtcgtcatgcaaaggcagctcatggcgcaggaatgcggagccttcgataggttcaaggacgcctacttcatggccatcgcaaagcaaggcatcctcgtcttgttcaagtttgcggacgggttcaccagcacccgatcaccggagaagctcatctatgtcctggaattgtacgaggcactaagcaactctgctcctgccctcctgcccctgtttaccgggcagcacgcggagctcatctcccggcagttgcccatcgtcctcgccaagctggcccgcgcgttgagggccgccatcgacgacctcatcaccaagatccgaacagactgctcccaagcagtgagcgagacgctcggcgtcggcgtccatccgctggcgcggcacgctatgacctgcgtagagctgctggcaccgcaccgcgccgcgctggacctgatcctgtg

SEQ ID NO: 44406 - DNA, 1167 bp, Setaria italica
  Peptide Sequence Number=SeqID_110380
cgcccggcgctgtcgctgggggccgcccggcgctcggcgccgggcccgcccacgccgtctacttctccgtgtacgagttcgccaagtcggccctcaccgaccgcctcggccccaacaaccccgccgcgcacgccgcatccggggtgctcgcgaccatcgccagcgacgcggtcttcacgcccatggacacggtcaagcagcggctgcagctcaccagcagcccctataccggcgtcgggcactgcatccgcaccgtgctgcgcgacgaggggcccggcgcgttcttcgtgtcctaccggaccaccgtcatcatgaacgcgccctacaccgcagtccacttcgccacctacgaggcggccaagcggatgcttggggacatggccgccgacgaggagtccctcgctgtgcacgccacggctggggccgcagctggagcacttgcggcggcggtcaccacgccgttcgacgttgtcaagacgcagctacagtgccagggtgtctgcggctgtgagcgcttctcaagcagctcaataggagatgtgtttagaacaatcataaaacgagacggatattctgggataatgaggggatggaagccaagaatgctgttccatgcacctgcagctgcgatttgttggtccacgtatgaggcctcaaagtcatttttcgaaaggttgaatgaggaaaggcggaaatagtccgagcatttcttggagtggcatgtatttttcttgaagtcaatgtacttctacacagaagcatactcgctcagctgacagaagatgcagcgccgggacacatttgttgtgctgttgtgtgccccagagctgtcctttgggggaattgagatgtgccgcgcgtcaaaatctgtctaacaaagatctgtccgtaccctgtatttcatttcagataagttgatgtattattttcctgcccggggtagaggcaacagtactagagtaatattttgcaaagtttgatccgaaccactcatcaaactatccatgtaattctgtatggcctcctgccttgtgctggtttttttgataatgcaacagtggttttggtttaaaaaccacatgctaatgtgattgtacactccattctccagaattgaaacgaatgaatgatttaacccgactagtgcgactactagtgcgactgagt

SEQ ID NO: 44407 - DNA, 696 bp, Setaria italica
  misc_feature (443)..(443): n is a, c, g, or t
  Peptide Sequence Number=SeqID_110381
ttaagtttcttttaccttttagtttaacgtttctttacgtttcccgtttaatttttattttcttttgtttcccccccgtttccttttcctaagcatttggctttgggatgtactcataatgcatgcctggattcaccgctttaattgcattaaaaagcactggcagctgctcgtacccagactcccaatcctcataaatcatcctccacgctcgctgcttagccctccaagctttaccataagttatcacatatcctccataaatctcctcaacagttcttataattgttctcactttcatgttgggttgttcccgtccttcttattcccatcaaccgcttcgcaatgagggtagatgttagctgcggatgtctcactgtaagctcatggtcagcacaattgtgtggactgacaacttttgtgatcttccacttcccggtganattttgctttcttgcacaaaccctccatggacaccgttccttgtcacacacaactgtgtaacggcgctccgcatatgaatgcaacactttgtacggtctcttccgtatcaccgcaaaagcttgcaaccatctcttcaatgcgggaaggtccttaaataccttaccctcctcaataaccaatactaaggaaccaagacttacaaggaagacttactaaggaagactacaatacaatacaacgtaccttactaga

SEQ ID NO: 44408 - DNA, 255 bp, Setaria italica
  Peptide Sequence Number=SeqID_110382
taaagttactaagtaactaattaagtcacattgtgcttcggggtcatagtactggaaattgtgaccgggcgaaagaacaacagcgcatacaacgacacttcagactccatatctgttctgggccatgtaagtgtatggacaataatgccgtaaggatattcccatgtcacatttgtttcacataaatgtacaacgatcgatcatctgtgcaggtatgggacaagtggagagctggttccatggtggatgtggtag

SEQ ID NO: 44409 - DNA, 387 bp, Setaria italica
  Peptide Sequence Number=SeqID_110383
gtgtgaaatagatctggggaaaggtggcctcctttcctcatcaaacctccttgccgccgctgccgccgccgtcggcggcccatcccagccagggattcgtagccttctttgtgatcgtggagttcttcggtgggattgcgagctcggctgcttctgctacctattgaaggaataccgaagatggcagccccaaattcttcggtggtattgcctgcttttgccaagcttcatggtgaaaattccgtgtactttatgcgaaaatattcaatcaccttgggacgcaatactgaaacatccaaagtagatttggatctttctgaacttggtgggggcagaggcccacgtgtctcccgtcatcatgcacgcatattctatgattttgaaaaa

SEQ ID NO: 44410 - DNA, 422 bp, Setaria italica
  Peptide Sequence Number=SeqID_110384
catgctgtgatcttatcctgcaaaaaccaatccacgggtcccggttacacgctctcttgaagatcctgatggacctgcagatgccgcacgcccaaaactcatctcatgttagtcctgatgacaacactgataccggcactccaggaggatcatcaggagctggcaaatcagccatgatcacgcatacggcttcagaaccaagactggaagacgataaacccttgactggaacacatgtattgttagtggaggacactctgactttgcagactattgggaagaagatactgtatcagctaggagcaactgttgaagtggcagaggatggagccaaagctgtcagcatgttgaagctgctcttgaacaagccgcagctggctcggaaaaggatgcaacatccactccctatgatgtcatcctca

SEQ ID NO: 44411 - DNA, 561 bp, Setaria italica
  Peptide Sequence Number=SeqID_110385
gagcacatcaacacacgctcgatctgtacgtgaccaaatcttgttacaaaagagcgtggaacctcaaataggtctctctgtcaataatttttgggaacaaattaaaagatattcacagttccaacaatatctcagatgatgacgatggagcgatgaacaattttccatggagtgaagagcgtgcaagcgacagaataactcggatctccgtgaaacagacaccgcatctgcactgcacacacaaaacatacgcgaaaccgagcagcaaaaattcaactgatggcagaagagattcggtacagccacctttgctatctccggaggagagtaatgctgaaggagctcgaaacacgccatgcgtcttcgcaaaccttcatcgtggcctctggtaatttctgttcagtagagatcagtttgcttttttgctatgtctcgtgaacatgtttgctgatggtcatctaacctttgcacgatcgagatgaggtcatggacatgatccgtgcactaaccgaagcatggttagtgaccacaacaaacagttcgagctgcactcgctagcta

SEQ ID NO: 44412 - DNA, 436 bp, Setaria italica
  Peptide Sequence Number=SeqID_110386
cctggattcagttgtccccgacggaagcagtcgagatttggcattggagcttgaactagagttgatgaaatggattgtcaattttcctcctgggtgaatgaacagagaagctttataaaggcgctgaatggatggctatcactttgccttaactacaaggctgaagagacagtcgatggagttcctccttattcgcctggaagagtgggtgctccccttgtgtttgtcatctgcaacagctggtctcaagccatggatcggttttctgagaaggaagtcattatctcaatacaagctcttgtgtccagtgtgcgcaagctgtcagagaaacaaaatgttgaacaaacagagcagatcattgctacccgggaaagagaaagatggaacaagatattggaaaggaagactgtggagatcaacaaggaggcaggtctca

SEQ ID NO: 44413 - DNA, 526 bp, Setaria italica
  Peptide Sequence Number=SeqID_110387
agttgagaactgtagatggttagtccatctacgctgctgttccagcgacatcatcaccatcatcatcgcaagctacctatgctaacgtcctatgtatgactgcatctccacacctttttccacccaagaaaccgcaaatcgcagcaagaatctgaccactggacaggcatcgcttcgctgcatctcatccccaagaaaagaaaccaccatgttctctaattcgacatcggaacatcagatccttaattcgacactgctgtcgctgtacatcacctagagagtggagatgaagaggttgcttctgtctacaaactcaacttcacaggttgccttgttgtggcctgtttgcttgcacctgctgcatagccttacaagagtgcttgtcttgttggggttagaccgcttccttcttggtttatccgatgcgcgttgcttgggaggcgggatttcattcgccccagcactaaaatcaaagctatccatgtcaggtatcgggaagattgtacctgagtaggtaagccggcca

SEQ ID NO: 44414 - DNA, 1117 bp, Setaria italica
  misc_feature (1070)..(1117): n is a, c, g, or t
  Peptide Sequence Number=SeqID_110388
tattgttgtctacttgttggttttcttactagcgacaatggtggcttcaaaatttctgacgaggatagaagatacatgagagcctgtaaagttgttgtgtctacctgcgcatttggtggtggggatgatctataccaacctattggaatggctaattcttctatcggcagggtttgctatgtggccttttgggatgaggtgacactatcaactcaggaagctgaaggaaaggtaattggtgatgatagcatgataggaaggtggcgtatcattgttgtcaagagccttccttttgtggatcaacgattaaatgggaagatcccaaagatgttgagtcatcgccttttcccagaggctaggtactccatatgggtcgactcaaaataccaatttcgaagggatccgatagcagtgcttgaagctcttctttggaggacaaactctacctttgctatctctgaacatggagcgcggagcaacatttatgatgaggggaaagctattgttcaaaagcacaaggctactcctgaagaagtagaggtgcaattgactcaatatcgtcaagatgggatgccggacaaacaaagattacacggattgaaagccctagctgaagcctctgttattgtgagggagctcacccctgcaccgaaccatttcatgtgtacttggttcaatgaagtggtgcgcttcacatctcgggatcagctcagttttccatatgttttgtggcgcctaaacatgcctggaatgagcatgtttcctgtatgcactcgcagggaccttgtgaacagtttgggtcacacaaggaaagtaaaacctcttacacagacgaatccagagtcgtctgcctcgtgatcttttcacccaactcgtctgctgatagttaactaaccattgattcatatctggttctaatggccgatatctcttggttcacaattttgttgtatattattatagtacctctccatttttcctctgaaggaatcatggttttgcttgtacacgggtctgaacctgatacacgatcacacgatctcacatgtaaaaatatttttctttaggtnnnnnnnnnnnnnnnnnnnnnnnnnnnnnnnnnnnnnnnnnnnnnnnn

SEQ ID NO: 44415 - DNA, 2745 bp, Setaria italica
  Peptide Sequence Number=SeqID_110389
atcgacgcccaccattaccacgccaccgtcttcccgtctccccccatcttcacctcctctcgctcggctgcttcttgcctagggtttcgcctgctcccgccctcgcctccggccgccacctcagatcccaccgccgctggcacccgatcctcctccgtcgcttaccgccgatcccgccgagctccgattcgcgccctccctccccgccggaacagcgtccggacgcgcgggggcagatctgggttttggtggtccgcttggtgcatgagaaggccgctagggtttgggagtaatggaggtggagcctgcgaggagggacgcggcggcgctggacccggagctgctgcagctcccggagcttgcgccgggcgcgctccgtgagaattccatcatagctgatgcgctctactcgcagtggctcgtgctacccgagacggccaagctggtaaagtctttgattgaggatgcaaaagctggtgctacgcttaatgttgctggaacctctgctagcacaaatgctgcttcaagtagttctctaccatcaatgtttcctgctggtagtgctcctccactttctcctaggagcacttctggttctccccgtgttatgagacgaggatctggtgctggaccatcgtccttgggttctccattaaaattagttagtgaaccagtgagagaagttatacctcagttttacttcaagcacgggcgtcctcctccgaaagacttgaaggagcagtgcttatctagaatagatcacctgttttttggtggggaggggcttcagattcaagaattcagatcggtcacaaaggacatatgcaaactcccttcattcttctccagtgttcttttcaagaaaattgatgttgcgtgcactggaaccgtctcaagggatgcatttgttgaatactggatcaatgataataagattacaatggatatggctagccaaatatttgaaatattaagaaagccaggttacaactatctcactcaggatgacttcaagcctgtcctaaaagaactcctggcaactcaccctggcttagagttcttacaagggaccccagagtttcaggagagatatgcggagactgtaatatacagaatcttttactccatcaatagatctggaaatggccatctgactctgagagagctcaaacgtggaaatttaattgccgcccttcagcaattagatgaggaagaagatatcaacaaagtgttgagatacttctcatatgagcacttctatgtgatctactgcaaattttgggagctggatacagatcatgatttcttgattgataaggaaaaccttatcagatatggaaatcattcattgacctatagaatagttgatagaatttttacacagatcccaaggaaattcacaagcatgacagaaggaaagatgggttatgaagactttgtttactttatattatcagaggaagacaaatcatctgagcctagccttgaatactggtttaagtgcattgatcttgatggtaatggtattttaacttccaatgaaatgcaatttttctatgaggagcaattgcaccgtatggagtgcatggcacaggagcctgtgctttttgaggacatattatgccagatgattgacatgattggaccagagaatgagagctattttacactacgggacttaaaacggtgtaaactctcaggaaatatattcaatattcttttcaatctgaacaagttcatggcatttgaaactcgtgatccgttcctcattcgccaggaacgtgaaaacccaactctaaccgagtgggatcggttcgcccatagagagtatattaggttgtccatggaagaagatggtgaagatgcttcaaatggaagtggggatgtgtgggatgaatcacttgaagctccattctgaattgcgtcttgctgctggaatttggttgaacatgggtgaatttggttgaacagcagaagaattgtaaagttggtggctaccctgtggatgccattggaggctcacagcagattcagtaacaccaaaaactacttacaggttttactgtgcaggtctgattcaatatttgtcagttgtcctgttgtgcaaacatttttgcttggctggaaaagtggggagggaggttgataggcgcgtcctgcagtgtcaaggcaacaacctcaacagtcgcaaatgatactaaaaggaaggacccttcctggtcgactagttccatttgtgttctgattggtccttaagggggggtgtatgttaattcaattgctgtgcgcaaattttggagctgaactgttaatgtttggctgccattttctttattaatctttggaagcgcgagctagcaattccatcagtgacttcgatcgtggtatgtagctttcaggttctgctttctcatcagcatgttgttttgtagttcttggtttattgccgttcgaacattttgggagaaagctcagagacctcagggcttggatactgttgtcatttgtaacattaccgagaagccgtggatttgggtgcatagtatttttttaacgaaaaggtagataacattggcaatccaattttttaaggtgtaaatttggagaatgttcgagattgcagtactgtctgtcaggttggttcgttttcttggcaattatttgccgtttgcatttcgagctaccttgctgtgttggaactttataccaatgtgcatgtgtactatttgctgtcactttactttt

SEQ ID NO: 44416 - DNA, 911 bp, Setaria italica
  Peptide Sequence Number=SeqID_110390
taattaggaaacaagaacacgaaccaccgccgccgccgcattccccgcagaggcagcagcatcaggcgccgccggcagccgtgcttcaccgccgcatcgtcttctcctcctcctcctcagcttctcgcgtcgtgtgctgatgggcgtggaaccggcgcagccaacccccgcggcggccgcggcgaccaccgctgagcaggctcaggatctcatcgacgccgctaggtacgatgacttggaggacgttgtcaccctgttctccgctggcgtttccctggactcaacagattcgcaaggccgtacagctcttcatatggcttctgccaatggccatcttgctgtggtggaatacttgattcaaaatggagcaaatgttaatgccacaaacttggagaagaacacacccctccactgggcatgcctcaatggacatatagaggtaatcaaggctttgatatctgctggcgctagtgtgagtgctctgaacagccatgagaaaacccctatggatgaagcggtgaccaaaggcaagatggatgtgatcgatgcaatcggtgcagcagtagcccaagccgagcttgatggtgttactgtatcctaaaaggacttgatgagtacctggagctatgaatgacttgcaaccttgctcttatctctcagtagttctgtccatttcacttttgattctgatgggccttttatctgggcaatatggtaacttagcctttgccatgagttgaaattatcatatgtgtcggcaatcgcctgttagtgtcagtgacatgagaccatggaaggcgaacctgtccttgtaaaccagatgtgcagatgtcaatgatgtattatttctacctttcttctaaaaaaaaaaaaaaacaaaaaaaaaaaaacctaaagaagaactagccaaa

SEQ ID NO: 44417 - DNA, 278 bp, Setaria italica
  misc_feature (276)..(276): n is a, c, g, or t
  Peptide Sequence Number=SeqID_110391
tatattgtggtttaccatgaataaagccatgtttgtttcttgaatgttgtttgactgctttcatgctacaatggcagcagaattcagctgtgacagacatagtatggcttgcaaagcctagaatatttcctacctaccatttacagagataagtttgactttagaacaatatgagagtgtttatagacaaagccattcatggaatatatatattctttattattttgaattttataaaaaacttatttaaaattttttctgatatataatatattnta

SEQ ID NO: 44418 - DNA, 288 bp, Setaria italica
  Peptide Sequence Number=SeqID_110392
tagtaaccctaccggcagtagacagtgcatcacaacaataaaaaagcatattaactactagctgcatcaaatattcagatatgcctaaccttagttttgccaggttcagcctttcattacagagtcggacatttgcctccaacaagaggtatctccagctctcaatcttgcatacttgacggttcccaagttcgcaaacagttgacaggaaaaacaaaaattactgtgatccacagataggactaaaccatccatacaaatttagaattgcataattccatgaacttt

SEQ ID NO: 44419 - DNA, 743 bp, Setaria italica
  Peptide Sequence Number=SeqID_110393
tctgaagttaacgaacaactttcaatgatgctggcaggaagtagtaaataggaagaagaataataactaaaaatagaagacaaatgccatgaagacctatggaaagaacatcttcttctcattgtgtgaatggggaagagaaaatcctgctacctgggcaggaagcatgggcaacagctggagaacaactgatgatatcgttgacaactggggcagcatgacatctcgtgcagaccagaatgacagatgggcttcctatgccggacctggtggatggaatgatcctgacatgcttgaagtgggcaatggtggtatgtctgaggcggagtaccgctctcacttcagcatctgggcacttgccaaggctcctcttctgatcgggtgcgatgtacgctcgatgagccagcagacaaaggacatactcagcaactgggaagtcattgctgtcaaaaaagatagtctaggcgtccaaggaaagaaagtgcaatccaacaatggcttggaggtagtattccacaacctctgcattagtgccttccatgaagctctttgttccacagcaaaaccacaaagagctttagcaagattctgaagttaacagcgctgtgttcttttataggtttgggccgggccactcagcaacaacaggaaggctgtggttctctggaaccggcagggctaccaggcaaccatcaccgcgcaatggtcaagcatcgggcttgcttcatccactgctgtcactg

SEQ ID NO: 44420 - DNA, 1613 bp, Setaria italica
  Peptide Sequence Number=SeqID_110394
acgccccaacccctcctccacagtccccttcccgtattaactgacgctcgctgctctgcattagcagcagagcttgcctgccgtgccggccatggcgcgcggcccgagctcttcgtcgtcgatactgctggcgctcctcgtggcggcggccgcggccgccaccgcgaccgaggcggctaggctccccggcaactggacggaggagctgcgcggggccgcgaggcgtgcccggcacgggcacgggtacgtgtggcgccaccggcggcgcgccttcgagaacggcctcggccggacgccgcagatggggtggaatagctggaaccacttcggctgcgggatcaacgagaacctcatcaagcagacagctgatgcattggtcaacactggtctggcgaagttgggctacgaatatgttaatatagatgattgctgggcggaatctgacagggactaccagggtaactttgttgcaaatagacaaaccttcccctctggcatcaaggcacttgcagattatgtgcacgcaaaagggctgaagcttggcatctacagtgacgcaggaacacggacatgcagtcaaaaaatgccaggatcacttgatcatgaagagcaggatgtgaaaacattttcgtcttggggtattgattatctgaagtacgacaactgcaatgatgctggcaggagtgtaatggagagatatactaaaatgagcaatgccatgaagacctatggaaagaacatcttcttctcattgtgtgaatggggaagagaaaatcctgctacctgggcaggaagcatgggcaacagctggagaacaactgatgatatcgttgacaactggggcagcatgacatctcgtgcagaccagaatgacagatgggcttcctatgccggacctggtggatggaatgatcctgacatgcttgaagtgggcaatggtggtatgtctgaggcggagtaccgctctcacttcagcatctgggcacttgccaaggctcctcttctgatcgggtgcgatgtacgctcgatgagccagcagacaaaggacatactcagcaactgggaagtcattgctgtcaaccaagatagtctaggcgtccaaggaaagaaagtgcaatccaacaatggcttggaggtttgggccgggccactcagcaacaacaggaaggctgtggttctctggaaccggcagggctaccaggcaaccatcaccgcgcaatggtcaagcatcgggcttgcttcatccactgctgtcactgctcgtgatctatgggcgcactcgtccttctcggctcagggccaattatcagcttcagtggcacctcatgactgcaagatgtatgttctgacaccaaagtaacttatacaagagctagtccgtagtgtgggatgcagccattcaatcaggattcaggaaaagggtatgcatggaaggatccgtagagaaggaaatgagatcccatttggttatacaagacaagagtaatatgcagatataagatataatctctaagtgtatttaaggcgttgtcaaatgtcagcgcattactaaatgcttgtaacggaagttgcagcaataataaattggcttgcccacaaaaaaaacaaaaaaa

SEQ ID NO: 44421 - DNA, 605 bp, Setaria italica
  Peptide Sequence Number=SeqID_110395
ggccctagcccagcctggttaggcgacgtaggaggcctttttctcctgcatggcctccgcgatcttggaccacttggtgcgggctgtgatcaccagcagcgagaaggtttggcaagccagcccgcagatcaggcccacccacaatcccttggcgtagaacttgagcttgaaggcgaagaggagggccagcggcatggcgacgaagtagtaagccaccaggttggtgagcgccgcgagatgctgccacccacagcccctcgacacgcctgacaggacgctctgcatcgtctcgaacgcgatggagacgatcatgagcggcgtgatgccgccgaacgccgacacgatcaccgcgctccggctgaagaggctcgcccacacgtcgtgcccgaacgccagcagcaggacgaaggcgatgcagaggagcaccgccagcttcatcgtcaccagcacggcgttcttggccttgtccacgttcccggccccgacctcattcgacacccgggtgctcacagcggcgctgaacccgtacgtggtcatgtagccgatggcctcggtgctagtgcacatggcgatcagcgacgtgctcaccggtggaagttggggga

SEQ ID NO: 44422 - DNA, 664 bp, Setaria italica
  Peptide Sequence Number=SeqID_110396
ttttttatttccaacaatacatttccctgttgacattctgcgtatgccgtgctgttcaagaatgtaggacctcctaaaatttctatcacatcaaatgtttagatactaattagaagtattcaacatagactaattataaaaccaattacacagatggagactaatttgcgagatgaattagcctctatctgtgtaattatagttttataattcgctcatgttcggttctcctaattaacatccgaatattcgatatgacatgaataaagtccggactaaattaccaaacaccccatgttatacgacttggaaagaaaatgggcgcccaaagcccatgaattatttggccctagcccagcctggttaggcgacgtaggaggcctttttctcctgcatggcctccgcgatcttggaccacttggtgcgggctgtgatcaccagcagcgagaaggtttggcaagccagcccgcagatcaggcccacccacaatcccttggcgtagaacttgagcttgaaggcgaagaggagggccagcggcatggcgacgaagtagtaagccaccaggttggtgagcgccgcgagatgctgccacccacagcccctcgacatcgtagtattgtcttgtccttacccttactttagtttccccttttcgtttacttta

SEQ ID NO: 44423 - DNA, 454 bp, Setaria italica
  Peptide Sequence Number=SeqID_110397
cacgccaccccaccccaccccacccctcgtccacggccgcctccacgcatcacccacgccgccgccacgccaatcccagcctcctacacgaccggtggcggcggtccgagctctccaagaagcaggacgaatcatatgcgaacccggcggccgagctctccaagaatacggcggtgtcggcgccgacatgggcgccctatcggcgtcgacttcgtcggtgaactggctagtcgaggacgacatcctcctcaagaacgctgtcgagactggtgcctcattggagtccttagcaaaaggagctgtatgtttttcccgtaaattcacacttcaagaaatacaggatcgatggaattcattgctatatgacccagaggtctcaacacaagcttctttccggatggctgagtatgaaaatgaactctccacatctgacccagccaaggcactaaaggtt

SEQ ID NO: 44424 - DNA, 932 bp, Setaria italica
  Peptide Sequence Number=SeqID_110398
cctgatcagatgcaacacagctcatttgatggtcaaccagaattaggtgatgaggctgctctacagaactgtatgccatcaaatgcactatcggatttgggtattcaagaccctatttcaacagtgccaacaccagctcaagcagaagaatgccctgacaatgaaaacgatgttccaaattactatgatatagaagctttgattcttgaccaggatctcatcccgtgggatcaggactctgatttgatgcatcctgaagttaccagatttcatcacccggaaagcaggaaggcattgataagattagaacagggtgctcggtcttatatgaacagagctatcatgtcacatggtgcctttgcagttatctatggattgcacttgaaatactacataaaggatcctgaggttactcttggaagagagacagaagatgttaaagttgacattgatttgggaaaagaagggagggcaaataaaatatctcgccgacaggctgttatcaagatggatgaagctgggtcttttcatatcaagaacattgggaaatgtccaatctttgttaatagcaaggaaataccaagctgcaaacgcatcaacttaagctctgactcattaattgaggtaaaggatatgaggtttattttccatgtaaaccaggatgctgtgagacagtacatcgatcgtgaactgaagccagaacgctaatttcgtttcgtttgcacgctgcgagtgcattaactaggatagtagcagtaaatgttgttcatttaggatgttctccatgtgaccatgtaagttagtctcacttgtgtccaacctgggtcagttgtctgtaaatggttgtagtttcatgtcgttttctgtcgttctgcgctgttggacgagcgagctcaaatccttcatgccctgcaccgtttctcgaaaaaaaa

SEQ ID NO: 44425 - DNA, 2208 bp, Setaria italica
  Peptide Sequence Number=SeqID_110399
cagcgctgctggatttggcgaaggatctccttgtagtttaggacaatattagcagtagtcaaaaggcctccagttgttgaaggaccttctaacagcttagctcctaggacaccacctttatcatgtgccactgaatcttctttcaatgaattccaacgatcctgtatttcttgctatatgacccagaggtctcaacacaagcttcttcccggatggctgagtatgaaaatgaactctccacatctgacccagccaaggcacataaattttcaattcaaaagcaaaggatttttcatttcagaacggaaaattgacagtgtgaagaacctatattatgcaatgagaaagagagtatgcaacgatccatgctacactgcagaccttggatttctgttgccccctgttcatgtgtagcaaatggtagtgagtgtgtctgtggaggcttacctaataatattgagctagggctgagttcagtgagccgctataggcaagtgggtgcaagctacaatggtggacatacatatcctggaatgaatgggcattcttttcacacaaagcaagctgagagcatggtaagagatggggatgacaccaataacgttgcgtatggctactcagatgtaggtcaaatgtatgagcatcatgcctacactgccaataatcatgggagtggtggcaggaataatgtttctctaaagagtatcacggattttcaggattctatgcagttccagcgattggacagcaatcaatgtggtaatggagtggtagactccaaggcattgttgatccctaaccatttcagtggaaatgtgcaggaacctatcccactccaagtgattggtcaacctgagggtcctgaggcacctggtggtgcaatttggagcggggttcagcgaagaggcacgctcactcttgctgatgataagaatgtaaagttagaaaacagggaccctcacccatttgaagcaaatttagatggtgggatttgcacgtctggtttagaacacgaggcagatttcatggacttcccatttttcagtaatagtgaagaatttgatatcctgaatggtgaaaactttttgaattctccgagcgagggaaaccaggaggatttagatgattctgccttcaaagttgttcctggggttagatcaaccatgcaaagtctggcgcattccaatgaagccaatacgtcatgtgatcaaatagatcctggccatgtggaaagtaatgtagacgtttctggtataatgttggctcctacttcattagtggtgccatgtcctggcgtgtatgttgagtgcaaattgaacacagaagatcctgaaatcccttgcaatgatgatgttgctacacctcctgagtatcctcttgaatgctgtaccttgggccagaaatcggagaacactatctatccagtctcccctgcaaccagccctgcatcgaatgctgaacattccaaagcaaatgacttggccctgataaaggtggaggatatggcaaatgcccaacctttacaaacagtgaagattgacccatccacttcagaacaaaaagaagattcagtggcacatgataaaggtggtgtcctaggagctaagctgttagaaggtccttcaacaactggaggccttttgactactgctaatattgtcacaaatgatgcaaacacatgcatgctagctctgccctcgttcagcgctgctggatttggcgaaggatctccttgtagtttaggacaacacgagaattttaataactctcatggcttgactgtacaaaattcagttcaagctcctgatcagatgcaacacagctcatttgatggtcaaccagaattaggtgatgaggctgctctacagaactgtatgccatcaaatgcactatcggatttgggtattcaagaccctatttcaacagtgccaacaccagctcaagcagaagaatgccctgacaatgaaaacgatgttccaaattactatgatatagaagctttgattcttgaccaggatctcatcccgtgggatcaggactctgatttgatgcatcctgaagttaccagatttcatcacccggaaaagacaaggaaaggacaattagaataaagaattaagaaacaagggttagactacgacttactttaattaattagtaaactaagtaagtactttaatttacttaatttagtttacttaacttaaa

SEQ ID NO: 44426 - DNA, 360 bp, Setaria italica
  Peptide Sequence Number=SeqID_110400
aacctggccagagatgcaaaagcttggtataggattatggcataccaatgtgtcccagctaagaacaaggatggttaagttagcaaggttgcaatatcttaaaagcaaggaccccaaggattgtgctctgctctacatagcattgaacagaataaaagtgttggttggtctcttcaagattagcagagatgaaaaagataaacgtctatatgagtttctctccagaaacttccaggaagaaagacacaaagctgctgctctaaaaaatgcatatgtactaatgggaaggcatcaatgggagcttgctatagcatttttcctgcttggtgatgatttttcatcagcagtcaatgttcatcc

SEQ ID NO: 44427 - DNA, 363 bp, Setaria italica
  Peptide Sequence Number=SeqID_110401
taatacaatacaataaacaataacatggtagtcacatgaaaataacatatccacacaatcttaacagaatgttaaaaatcatacaagtgttaaaaattgaagatatggcaacctatgtataacactgaccaactacttatttgcagctaacttgagctgcacaaacaggtacaattataaacactgatattagaagaaaacaatagaatagatgcccctaaattgtcttgcagaaacaaatccaacatgtacttcatacatctctatgcgtctgtgcaagcctaaatgttctaaataatagggaaacctggtagaattcaacttgggttcaactttacaatgccatccaatgtaatagaagca

SEQ ID NO: 44428 - DNA, 421 bp, Setaria italica
  Peptide Sequence Number=SeqID_110402
cacagggtacacagcacatgttcaacatagccttgtgttggtttgctgcttatcttctgaaatacaccaagttggatcatcaagaatcacttgcccttgctgcagaaggcttgaactatgaatgcaatgaggagctcacacgatttttctataaaaattacggttacataaaccaggtgggagaaggaacataatacagactgatagattttcaccccatgagagctcatctgctaatttgagaagtgaccacattttcccgaagcacgcaatagattgtcatgataacttcacaaatggcactcaagagagctcatctgcttctgagaagatggtttcagatgggcaagagttggtatcttctccagaagctgatagagaatggcatttgtcaagtgaagaaccccctggttaggtacct

SEQ ID NO: 44429 - DNA, 453 bp, Setaria italica
  Peptide Sequence Number=SeqID_110403
gaggaaggaggcctaccgtaagacggccgccgaccggcccgccgtcgacgcgcttctcgtggccaggaaggagcacgtcgtcagcaagaaggtgttctccgccaaggcccagttctctcaccatggccggtgccatgacattgtgatagagtgcgacaccgccggggcgaacgacgacccttgtctcgtgattcacatcgacaggcggccggtcatgcgggtgcggcggttggcgtggaagttcagagggaaccagacggtcctggtggacgggctgcctgtggaggtgttctgggatgtccatggctggctctttggctctgcggcgagcagtgcggtgttcatgttccagacgtgccaggcacctgagaagtcggtgccatgggcgtatctgcagatttttagggagcctcaggttcaatgacatggttctccttgataatacatgcgtgg

SEQ ID NO: 44430 - DNA, 473 bp, Setaria italica
  Peptide Sequence Number=SeqID_110404
gctaacaatatcaaatcaacacagttcacttttcataggtgcttgctttagcatggacattaagtgtaaatatatttctacatgctgcatatcataaactaaaagacatgttgtgacctccctgacagagaaagccaggcatcataaggtatacctctacggtatgccattgtatttcacggtgtagctgaaaattggtattcccattgtgagttgtttctttagtagtcactaaaatgacgcctaaagtcagttgatgggtctcatccttgtgaacccatgcatcttccactgttcgaagttcttggtcagggtatgtcacatgccgaagagcttttgggccttccatacttctggttgaaatttgacctggggatctcggtctggatggatcaatctcagattgaatatgttgccccaatatgcaatatggatacagaaacaccaaagcacatgctctgtgtagtaaaatt

SEQ ID NO: 44431 - DNA, 731 bp, Setaria italica
  Peptide Sequence Number=SeqID_110405
gccggccccacgaccggaccgccaccgcgccgccgcctctcgccttccaccgccgctcaccgctcaccggagccctcttattcctcagtctcggcggcgtcgcggggtaagaagttttagctctgctcaaatggagtctgcttcaaccactgtgccttccattgtcgtgtatgtgaccgttccaaatagggaagcaggcaagaagctagctggaagcattatcagtgagaagcttgctgcctgtgttaacatagtgcctggtgttgaatccgtttactggtgggagggaaaggtgcaaagtgatgctgaagagttgctcatcatcaagacaagggaatctcttctagatgccttaactgaacatgtgaaagccaaccatgaatatgatgttcctgaagtcatcgcgctgcccataaaaggaggcaacctgaagtaccttgagtggctcaagaacagcactagggaaaactgatgtctccaacatgcctggtagtagagtgacttgcccctgaggtggtgcttgtgctgtcagatgtggcaagatgctacgcatttgtcacatcctcctcgctgcctcccaagttgaatgaattgcactgctgagtatgggagggagccttgtacatgagatcctctcctttgcgtttgtgaccatactgtttctttcagtttaattgttcagtggcacatcttcccattgtagtgccaataagcgcgttcagactttcagc

SEQ ID NO: 44432 - DNA, 363 bp, Setaria italica
  Peptide Sequence Number=SeqID_110406
ctctgctggagataaggttccggattaccagaagaggctcgaggtgaaccaagaacaaggtacagcgatcgaagctacgctctgtactcgcgttaataagctcatccatccatcaacagccatttctcgcgtccgtcgctgctgcgttgcagaggtcgtagctaggatcaacaatgcctccccctccgccgcctccgacgcccgcgctgaacaagtgctgccgctgctgctcgtcgccgtcgccgccgacaccgccgaagctgcagcgagctgcggagaccaggaagaagccaatctagcaggcggcggagcagcgaggctgccgatcaccaggagagcccacgccgcctccctcctcctcgg

SEQ ID NO: 44433 - DNA, 528 bp, Setaria italica
  Peptide Sequence Number=SeqID_110407
gaagagacgaccatccttcaaaatcagcctgatcccacaaatgttcaagatctgaagtgctattctcactatcactatcttgaaaaatctttaaaattccatcaaacgatgatagcgtgctggtagctaagtgtaaagctaggcaagttacccgtaacgccattcttgtggaaggatatagaggactctccaactggatctgctgaagcttcaaagcaatcccacacttgtcaattactggcaacaagttgattccatcagatgtttcattccaatggtaatcaccatccaccagaaatgcagatacatcactaagcaccaaattgaagtttagatatatatcctgctcttctgaagaataggaatcccattatttcctctgtccgaagaactaaatttccaaggtcaagcaaaagcttagtctcatgtacatcatctggtcggaacttggtcggaacagtaattttaggagcagcaatataccaattcagtgcaaagatggactgatcttttagcacccgagtcatt

SEQ ID NO: 44434 - DNA, 425 bp, Setaria italica
  misc_feature (328)..(328): n is a, c, g, or t
  Peptide Sequence Number=SeqID_110408
tagccaactaaccaaaagtgaaagcccgaaaccagaaaagctgagagccgatagtgtgagtgacttgagtgacaagggaggccatatggggtgcttccagaaatgtgcttctctggtggtggtttccagcctgctgctgctgctcataactgctgcagctgctgcgtcttcccgtggccgtgatgcatcgtcttcctccacattgcacgcgcgcaagctgctcaacagcactggctcgtcgtcgtcgtcgctcggtgctgagcgccattactcgacggagcggatggggccggacgactgctcggaggaggatggtggtggtgtaccngagcagcgccaacccgttgccgagcggcatcccggcctacaccgtgcagatcgtcaacgtctgcggcggctgcaccgtgtccgacgtccacgtctcc

SEQ ID NO: 44435 - DNA, 287 bp, Setaria italica
  Peptide Sequence Number=SeqID_110409
gtaagcatggtattcctcttgttgagagctgcgccactccaactgtagcagtatgcacaactttaaagcgggtagctgagaaagttgtgtcagagctagttggaagtgaaaggttggaagcaccaatagtgctgagttactggagagtatggaaaaagatgttcttgctgaaaatgtgcattttggtgggaatggagtcgcacaaggtggccttcctgaagagttagagccaaaccataggattgaagtcggttttttaagatgatgcaggtatgaactctggattg

SEQ ID NO: 44436 - DNA, 126 bp, Setaria italica
  Peptide Sequence Number=SeqID_110410
gctgcttcttaaggagcacagcatcacaacttgtttgattctcggagataccttgcccctcccgtgctttaggcctagaatagaactagttgtgatgctgtgctccttaagaagcagccccctttg

SEQ ID NO: 44437 - DNA, 189 bp, Setaria italica
  Peptide Sequence Number=SeqID_110411
ccagttatgctttgttccattgaggaggatgaacttggtttccccgtttgggatccacgcaaaaatccagttatgctttgttccattgaggaggatgaacttggtttccccgtttgggatccacgcaaaaatcctcggagataaatgtcatcatatgcccattataacccatgcacgggtatgcagggg

SEQ ID NO: 44438 - DNA, 459 bp, Setaria italica
  Peptide Sequence Number=SeqID_110412
aaccctcagcgtgcttgtcgaaacattatagctagagttcatgcacgggtatgcaggggcaatttcagtttggtaataaaatttgccaggaaattgaaatgaataaggcaagctggtcagctctttttgagccttttcaatttttcgtaagcatacaagaattatctacaggttgacatcattgctgaagatgatgaagaccttagactttggaagggatgggtggaatctcgactgcggcaactaactctaaagattgaacgtgatacatatggaatgctgcagtgtcatccttacccacatgagtatgcagacccttctagacagtctgcccattgtgctttcttcatgggcttatcaaggaagaaggtgtgaaaatacaggaaggtcaacagtttgatattcgtggaacggtagaggagtttaggcatgaaattaactcttatatgttctggaagc

SEQ ID NO: 44439 - DNA, 434 bp, Setaria italica
  Peptide Sequence Number=SeqID_110413
gttaaagactgggtgaagcaattgactagtcagagaggatatactgatcaaatggttgaagaggcaaatgctgttcttttcaccttttggctcataccgtctaggggttcatggacctggggccgatattgatactctttgtgtaggaccttcatatgtgaatcgtgaggaagattttttcatcatactgcatgagatattagcacaaacagaggatgtgaccgagctgcaacctgtaccggatgcacatgtccctgttatgaaatttaagttccatggaatatcaattgaccttctttatgctagtgtctccctcttagtagtaccagctgtaagtttcttacgacatgttttccacatttgatcaattatttatctgttcaacttggatttgccttatttcatgaggtaccataaaggtattttcattcaag

SEQ ID NO: 44440 - DNA, 788 bp, Setaria italica
  Peptide Sequence Number=SeqID_110414
acattttcagcaagaacatctttttccatactctccagtaactcagcactattggtgcttcccaacctttcacttccaactagctctgacacaactttctcagctacccgctttaaagttgtgcatactgcaactagtaagcatggtattcctcttgttgagagctgcgccactccaactgtagcagtatgcacaactttaaagcgggtagctgagaaagttgtgtcagagctagttggaagtgaaaggttgggaagcaccaatagtgctgagttactggagagtatggaaaaagatgttcttgctgaaaatgtgcattttggtgggaatggagtcgcacaaggtggccttcctgaagagttagaggtatgaactctggatgcatcgtggaagtcatcaatgagatctgcaagccatgggggtttgaagcggaggcgtggatgctcatgtcgagcaacgacatggcaaaaaaaacaaaacaaaaacaaaaacaagcaaaccatctccttggtggaagggcacaagatgcttgctggtaccctggatctgcatggaccttcagtttttacttttttgtagcagctggctcttgtgtatgaactgagctgtagcggtcttctctgagttgacttgtttgattctcggagataccttgcccctcccgtgctttaggcctagaatagaactagttgtgatgctgtgctccttaagaagcagccccctttgtacctttcctcccccttataatataagattttactgaaattttaaaaaaaaaaaaaaaaaaa

SEQ ID NO: 44441 - DNA, 970 bp, Setaria italica
  Peptide Sequence Number=SeqID_110415
attagaagggcttcaagcgatgcgagtggtggtagccaggcatcaccacaggcatctgagagaagcccagaacctgttgcgtctggccccaggtgtgcgtcaatgggggcagtgtgttctggtgatgcaactagtaagcatggtattcctcttgttgagagctgcgccactccaactgtagcagtatgcacaactttaaagcgggtagctgagaaagttgtgtcagagctagttggaagtgaaaggttgggaagcaccaatagtgctgagttactggagagtatggaaaaagatgttcttgctgaaaatgtgcattttggtgggaatggagtcgcacaaggtggccttcctgaagagttagaggtgatgatgcttgtgcacctgcttcctttttttgtgcctagatatgatctgaacattcttgtttatttcttatgcataaagccaaaccataggattgaagtcggtttttaagatgatgcaggtatgaactctggatgcatcgtggaagtcatcaatgagggctagtgtggcatcaactgcatgagtttggaaaaaatggtgtagagatggacaagttctaccccccactggagggaatggtaagttgctcaactcacaagtttccttctggacacagatctgcaagccatgggggtttgaagcggaggcgtggatgctcatgtcgagcaacgacatggcaaaaaaaacaaaacaaaaacaaaaacaagcaaaccatctccttggtggaagggcacaagatgcttgctggtaccctggatctgcatggaccttcagtttttacttttgagcagctggctcttgtgtatgaactgagctgtagcggtcttctctgagttgacttgtttgattctcggagataccttgcccctccgtgctttaggcctagaatgaactgttgtgatgctgtgctccttaagaagcagccccctttgtacctttcctcccc

SEQ ID NO: 44442 - DNA, 1152 bp, Setaria italica
  Peptide Sequence Number=SeqID_110416
ttaagtagtaccttcgccctttcgtagacattgtcaaccatcagcagcagtctaataaaaatgattctgaagatggcacagcgacgagatctccggacagtcagctgaagagaaagcatgattctgctggaactgatgatgctgaacctgtcaggtctgccaagaggtcatcagtcagcccagttcatcctaaaacttttccagaatctggaatgctggtttgagacaacatgtaacaaccaaattagaagggcttcaagcgatgcgagtggtggtagccaggcatcaccacaggcatctgagagaagcccagaacctgttgcgtctggccccaggtgtgcgtcaatgggggcagtgtgttctggtgatgcaactagtaagcatggtattcctcttgttgagagctgcgccactccaactgtagcagtatgcacaactttaagcgggtagctgagaaagttgtgtcagagctagttggaagtgaaaggttgggaagcaccaatagtgctgagttactggagagtatggaaaagatgttcttgctgaaaatgtgcattttggtgggaatggagtcgcacaaggtggccttcctgaagagttagaggtgatgatgcttgtgcacctgcttccttttttttgttgcctagatatgatctgaacattcttgtttatttcttatgcataaagccaaaccataggattgaagtcggtttttaagatgatgcaggtatgaactctggatgcatcgtggaagtcatcaatgaggcatggtcttgaactcaactcatgtgtattcagtatctacattgctctgttttctttatactcggctgtttggtatttgtttgttactttatggcagggctagtgtggcatcaactgcatgagtttggaaaaaaatggtgtagagatggacaagttctacccccactggagggaatggtaagttgctcaactcacaagtttccttctggacacagatctgcaagccatgggggtttgaagcggaggcgtggatgctcatgtcgagcaacgacatggacaaaaaacaaaaacaaaaacaaaaaacaagcaaaccatctccttggtggaagggcacaagatgcttgctggtaccctggatctgcatggaccttacaagtttttaactta

SEQ ID NO: 44443 - DNA, 1337 bp, Setaria italica
  Peptide Sequence Number=SeqID_110417
ttaagtaaaccaaaataaagtaacgttaagaactacgaacaatagaagacaataccaacgcctccgcttcaaacccccatggcttgcagatctcattgatgacttccacgatgcatccagagttcatacctgcatcatctctaactctttcaggaaggccaccttgtgcgactccattcccaccaaaatgcacattttcagcaagaacatcttttttccatactctccagtaactcagcactattggtgctccaaccttcacttccaactagctctgacacaactttctcagctacccgctttaaagttgtgcatactgctacagttggagtggcgcagctctcaactaagaggaataccatgcttacagttgcatcaccagaacacactgcccccattgacgcacacctggggccagacgcaacatgtaacaaccaaattagaagggcttcaagcgatgcgagtggtggtagccaggcatcaccacaggcatctgagagaagcccagaacctgttgcgtctggccccaggtgtgcgtcaatgggggcagtgtgttctggtgatgcaactagtaagcatggtattcctcttgttgagagctgcgccactccaactgtagcagtatgcacaactttaaagcgggtagctgagaaagttgtgtcagagctagttggaagtgaaaggttgggaagcaccaatagtgctgagttactggagagtatggaaaaagatgttcttgctgaaaatgtgcattttggtgggaatggagtcgcacaaggtggccttcctgaagagttagaggtatgaactctggatgcatcgtggaagtcatcaatgaggcatggtcttgaactcaactcatgtgtattcagtatctacattgctctgttttctttatactcggctgtttggtatttgtttgttactttatggcagggctagtgtggcatcaactgcatgagtttggaaaaaaatggtgtagagatggacaagttctacccccactggagggaatggtaagttgctcaactcacaagtttccttctggacacagatctgcaagccatgggggtttgaagcggaggcgtggatgctcatgtcgagcaacgacatggcaaaaaaaaacaaaaacaaaaaacaaaaaacaagcaaaccatctccttggtggaagggcacaagatgcttgctggtaccctggatctgcatggaccttcagtttttacttttgagcagctggctcttgtgtatgaactgagctgtagcggtcttctctgagttgacttgtttgattctcggagataccttgcccctccgtgctttaggcctagaatagaact

SEQ ID NO: 44444 - DNA, 1093 bp, Setaria italica
  Peptide Sequence Number=SeqID_110418
aaaaagaattaagaaatagattagtttacaggcagcactgcagaacttcctctgctctttattccaccaaattgttagcttattttgcttcgtggccttaaattatgaacaaaggattgctgttttgtccttctgtctcatgctatgccattttattccaagagatgcatatttggctaacatgctactgcaggacttggatatctctcaaggatcagtacttcatgatattgatgaagcaactgtccgtagccttaatgggtgcagagtagcggaccaaattcttagacttgttccaaatattgagaatttctgcacggcattaagatgtttaaaatactgggcaaaaagaagaggtgtttactcaaatgttactggttttcttggtggtgtcaactgggctttgctggttgcacgtgtctgccagctctatcctaatgctgtgccaagtatgttggtctcgcgattctttagggtttttacccagtggcggtggccaaatccagttatgctttgttccattgaggaggatgaacttggtttccccgtttgggatccacgcaaaaatcctcgagataaatgtcatcatatgcccattataacccctgcatacccgtgcatgaactctagctataatgtttcgacaagcacgctgagggttatgatggagcaatttcagtttggtaataaaatttgccaggaaattgaaatgaataaggcaagctggtcagctctttttgagccttttcaatttttcgaagcatacaagaattatctacaggttgacatcattgctgaagatgatgaagaccttagactttggaagggatgggtggaatctcgactgcggcaactaactctaaagattgaacgtgatacatatggaatgctgcagtgtcatccttacccacatgagtatgcagacccttctagacagtctgcccattgtgctttcttcatgggcttatcaaggaaagaaggtgtgaaaatacaggaaggtcaacagtttgatattcgtggaacggtagaggagtttaggatgaactgggctgactgatgacctcttggcagacctgacaggttcagcatcatc

SEQ ID NO: 44445 - DNA, 1504 bp, Setaria italica
  Peptide Sequence Number=SeqID_110419
ctattcgccgcccctctctcctccatctccccgcccaccgccgcccgcacctagggttccgccgccccggcggtccgcccccgccgcgccacctccctccccctccctcccacccgccgcgggtggcggatcgccggatccgccccgatctggattggatggtcctccccggccgcgccgctccgatctgatccgggggcgcgccatccgcggagctcccgcgggggtttcagattcgggcggcgagggggaggtttcggggatccgtgcgccaggcggttacctccgcgcaatcctactcggagtcgccgcgctcgcgtcgcgcaagatataagggggtcggggcgctccggattgagccccctcccccgggaagagaccgtgccgcgctggatctccgcggaaagctcgttattttggtggcggcgcggccgtgagttgccgggatttttcgggtttcccaggcggccgatcgtcgccagttactttttgcggcgtgaaggggcctgaggagggttttgtgttctcgtgcggttggttccatggcgggcggctccgatgccccgaagcagtacggaataacgaagccgttatcgctgcttgggccggtggaggcggatctccagaggacggcggagttagagaagttcttggttgaggcgggcctatatgagagccccgaggagtctgctaagcgggaggaggtgctggggaagcttgaccagattgttaaagactgggtgaagcaattgactagtcagagaggatatactgatcaaatggttgaagaggcaaatgctgttcttttcacctttggctcataccgtctaggggttcatggacctggggccgatattgatactctttgtgtaggaccttcatatgtgaatcgtgaggaagattttttcatcatactgcatgagatattagcacaaacagaggatgtgaccgagctgcaacctgtaccggatgcacatgtccctgttatgaaatttaagttccatggaatatcaattgaccttctttatgctagtgtctccctcttagtagtaccagctgacttggatatctctcaaggatcagtacttcatgatattgatgaagcaactgtccgtagccttaatgggtgcagagtagcggaccaaattcttagacttgttccaaatattgagaatttctgcacggcattaagatgtttaaaatactgggcaaaaagaagaggtgtttactcaaatgttactggttttcttggtggtgtcaactgggctttgctggttgcacgtgtctgccagctctatcctaatgctgtgccaagtatgttggtctcgcgattctttagggtttttacccagtggcggtggccaaatccagttatgctttgttccattgaggaggatgaacttggtttccccgtttgggatccacgcaaaaatcctcgagataaatgtcatcatatgcccattactaacccctgcatacccgtgcatgaactctagctataatg

SEQ ID NO: 44446 - DNA, 2406 bp, Setaria italica
  Peptide Sequence Number=SeqID_110420
ccaatgaagactaaaaagaattagaaatgattagtttacaggcagcactgcagaacttcctctgctctttattccaccaaattgttagcttattttgcttcgtggccttaaattatgaacaaaggattgctgttttgtccttctgtctcatgctatgccattttattccaagagatgcatatttggctaacatgctactgcaggacttggatatctctcaaggatcagtacttcatgatattgatgaagcaactgtccgtagccttaatgggtgcagagtagcggaccaaattcttagacttgttccaaatattgaggttgactcaaggaatcagctatgctcgttttgtcttctcaagtgtttctttgttttggctacaatttcagaatgttctgattcaatgcatcttgcagaatttctgcacggcattaagatgtttaaaatactgggcaaaaaagagaggtgtttactcaaatgttactggttttcttggtggtgtcaactgggctttgctggttgcacgtgtctgccagctctatcctaatgctgtgccaagtatgttggtctcgcgattcttagggttttacctagtggcggtggccaaatccagttatgctttgttccattgaggaggatgaacttggtttccccgtttgggatccacgcaaaaatcctcgagataaatgtcatcatatgcccattataacccctgcatacccgtgcatgaactctagctataatgtttcgacaagcacgctgagggttatgatggagcaatttcagtttggtaataaaatttgccaggaaattgaaatgaataaggcaagctggtcagctctttttgagccttttcaatttttcgaagcatacaagaattatctacaggttgacatcattgctgaagatgatgaagaccttagactttggaagggatgggtggaatctcgactgcggcaactaactctaaagattgaacgtgatacatatggaatgctgcagtgtcatccttacccacatgagtatgcagacccttctagacagtctgcccattgtgctttcttcatgggcttatcaaggaaagaaggtgtgaaaatacaggaaggtcaacagtttgatattcgtggaacggtagaggagtttaggcatgaaattaactcttatatgttctggaagcctgggatggagttagctgtttctcatgttcggaggaagcagatcccagcttatgtatttccagagggttataagagacctcgcccttcgagacatgtcaaccatcagcagcagtctaataaaaatgattctgaagatggcacagcgacgagatctccggacagtcagctgaagagaaagcatgattctgctggaactgatgatgctgaacctgtcaggtctgccaagaggtcatcagtcagcccagttcatcctaaaacttttccagaatctgggaatgctggttttgagacaacatgtaacaaccaaattagaagggcttcaagcgatgcgagtggtggtagccaggcatcaccacaggcatctgagagaagcccagaacctgttgcgtctggccccaggtgtgcgtcaatgggggcagtgtgttctggtgatgcaactagtaagcatggtattcctcttgttgagagctgcgccactccaactgtagcagtatgcacaactttaaagcgggtagctgagaaagttgtgtcagagctagttggaagtgaaaggttgggaagcaccaatagtgctgagttactggagagtatggaaaaagatgttcttgctgaaaatgtgcattttggtgggaatggagtcgcacaaggtggccttcctgaagagttagaggattgaagcggtttttaaaatgatgcaggtatgaactctggatgcatcgtggaagtcatcaatgagggctagtgtggcatcaactgcatgagtttggaaaaaaatggtgtagagatggacaagttctaccccccactggagggaatggtaagttgctcaactcacaagtttccttctggacacagatctgcaagccatgggggtttgaagcggaggcgtggatgctcatgtcgagcaacgacatggcaaaaaaaacaaaaacaaaaaacaaaaaacaagcaaaccatctccttggtggaagggcacaagatgcttgctggtaccctggatctgcatggaccttcagtttttactttttgagcagctggctcttgtgtatgaactgagctgtagcggtcttctctgagttgacttgtttgattctcggagataccttgcccctcccgtgctttaggcctagaatagaactagttgtgatgctgtgctccttaagaagcagccccctttgtacctttcctcccccttataatataagattttactgattttatgtgttgaaa

SEQ ID NO: 44447 - DNA, 640 bp, Setaria italica
  Peptide Sequence Number=SeqID_110421
agcagcaagacatgcacgaggtcgccagcttcagtgaagccataggccttgaatcgctcagaggggtcaaaagagtaggccttgacgctggtgccattgagcgcttcagcaaggccctcacaaggcgtctcccggacggacatggagcggaggtcgagggaggcagctccatcctcggtgaggaagaggaggcgctgcttcacaaaggcgagaggggtcgacgaggagatggcggtgccgtagagcgtaccgttctccgtgaagacgcggatgcgaccgccggcgtcgcaggagagcacgtagcgcgcgcggccggcgtggtgggcctcgaggtgggcgacgggggcggcatcgatgccgcggacgaggaggcgggaggacgctgcggcgagggtgagccagtcgtcgccgtgcggggacgactcgatgaggcggtgcgcggcgatggagccgtcggcgtggccggtgaagaggaggcagtcggtgcggcgcggcgagaggtaggcgaggagcgcggtgacccgggactcgccggaggcggcggcctcgagctcgagcagcgcgtccccggcggcggagaagacgaagacgcggccgcgggagtcccccacggcgaagtacttggtgagaccgtcggcgt

SEQ ID NO: 44448 - DNA, 1042 bp, Setaria italica
  Peptide Sequence Number=SeqID_110422
atgccgtgcttcttcttccaggctgagttggttccctccttgccctgttgtttcttccaagttgagtagtgctactctcctgtgtgccgactccaccccctggatttgatgtgcctgcaaccgatgtcagctcctcacttctcttccttttcctagcatctctcttgatgtaggaattcttctttttgcctgcttctggatttctttgacaagtccttgaattgtgtgtagttttctgacacatcctacacctcatcttgattcccaccttacttaactttgttcccttaggtgcttctcctggctcccttgttctttgtgtcttgggcctccctggcatcctaatataagcaggaggaagtggccttggcatgttagaaattggccaattgtgttgcccttcaactggatgcaaacaatgttgataggttttcttgtactctaatattgagaaacatggtgctatgaaatcatccaagtgcttggatgcctttgtatattgcactgatagcatgacaacatggcaaacttgagagttgccaatacctgcagctacatgctttctgctccaaattgacagtatacctccacttgttattctcagtcagttcaaacccatcttgtccattccatataacacttgacagttgctggatctcacaatgttgagcttcaactttctgaatatgtttgggatattgttccctgccacctatttgtcttgtccctgttctcttggattctgaccataaccttgcatcttatagcctcatgcataaaaatgattggcttgaacctagaatccataagagtagtcatcacttgaatcatagtagggactagctacatcttgtaagtcatctacttcagctaatagagtaggtacccatttgcattttccccttctatttggcttccatggactcctagcttatctgcccttatgtttctctttatgtccttggcaaatttcttaagctgttctgcttcatcatcatctgcagagctgttgtcctctacaagctgctcataatcttcatct

SEQ ID NO: 44449 - DNA, 225 bp, Setaria italica
  Peptide Sequence Number=SeqID_110423
ataatatagccatataggcccctccaaaagaaatcgcaaggcaacagagtgcttgctttgccttgcctgatacacacagtccccctcaacagctgaccgctgagcactgcttgagatcttcagccgcagttttacagtcaggaaggaatcaggcatggcagcaaggagggctgcttcctccatcctctctcgctgtctcatcgcaaggtcttctcctgcttctgt

SEQ ID NO: 44450 - DNA, 255 bp, Setaria italica
  Peptide Sequence Number=SeqID_110424
gtccaggcaacaaacccctaggagcaatccaaccgtgtcgaagattgagatctaagcaatcaaggagcaaacactctggtgtcatcgtaaaaccatctggtgaagacaacgtccacatcaaatccggtggccagtgtctgcaccacatcccatatctttctttgtatttcagaacaatgggcctgcattttcacactttctttaagaaaagagacgacaaggttcagtagatattctattgataccacagtttca

SEQ ID NO: 44451 - DNA, 608 bp, Setaria italica
  Peptide Sequence Number=SeqID_110425
agacatctaagtcatagtgactttttttattttgaagaatggcagctaaacattcaagattaatccctgttacgacatgcttagcttgcaaaggccccaagacgccatttgcttgcctatcgaactcgacaaacacaagacggcatatttcaacaaatttgtcatccgttatgttcattacggaaccaacaccatcttggctgtccgaacaatcaaagaaaaatccaatacatggcccacagggaccagtttcaccggtcatccaaaaatcagcctattcaagcactcagtcgataaatgtccacataaattcaaagtaaaattgataagacattacaggtaccttggacatggaaggcacgattctttcttcccctatatatttctgcaatgtattttttgactcgctgtctgaactcaaacaagaggacatatcaccactaaagtatgtggcatatattctacattgaggtaacttgtatttctgcatattaaagaacgagccatcaataggtaataagaaggtggccttaaatcgaacatcagacaattctggacactaatttttccatgcagtagcttacaggagcaactcgcgagcacacaca

SEQ ID NO: 44452 - DNA, 600 bp, Setaria italica
  Peptide Sequence Number=SeqID_110426
aagaacccgaaggagcagcatcaagcccgtataaattggtgtgaagttgctgtccaaatatactccgtcaccattgacctcatgaagcatctgccaaactgcactagttcttaaatagtttgaatcagtgactaaagaaagtaatactccattaatcttaactatagtattgtaatgattgttccagtacagaatgtatggaacattttcaacaaggtcttcttgtagggaaaccaagccaatgagagtaagttgaggtccccttagaaacttcttgatcgcctccgctaaaaacattgaaaaaaagcaataagagcgatggaaaaggttgtgcaaacaatgtgtagctgaaaaataaaactaacaatgtggaaaaccaggttcatttgccaccagtgtaagactttcaaatgaaacttcgggtccaggcaacaaatccgtaggagcaatccaaccgtgtcgaagattgagatctaagcaatcaaggagcaaacactctggtgtcatcgtaaaaccatctgttctggtgaagacaacgtccacatcaaatccggtggccagtgtctgcaccacatcccatatctttctttgttattttct

SEQ ID NO: 44453 - DNA, 450 bp, Setaria italica
  Peptide Sequence Number=SeqID_110427
catgaccatggttctgaaaaaacggcggcggaggttccaggttccacgaccaaggacttctggtcgggtgtaatcctccaggacctctttcaaccattcccacaatttagctgtcataagatgatcagagcatagcaatttttccaagataataggaagtcggtcttcgagataatgagaggttagaagatccaactctgaaagtttgttaaaaggttctttcccctcttgttgccattcctgtcccagaccccccttcacagcaataattctggtatcaaaatcagtgaaacaaacagaaaacagaaaaaaaacaaatattcaccttagactttccatgttcgtttacttgtcttggaaaaacagacaagctaacatcatcagattgataaatcccaaacttcctatgatcatcttcattctcctgaagcttttcattgcttccatcta

SEQ ID NO: 44454 - DNA, 1453 bp, Setaria italica
  misc_feature (11)..(11): n is a, c, g, or t
  Peptide Sequence Number=SeqID_110428
gtttttttttntttttttttttttagttttaaatctgaacagtacaaattttcacatatattttcaattgaattaaaccacatgctccaccgcttgtgcggggcccatcaatttctttgagttccagtcttgcgaacgtgactaatggtaaacaaagaggacataagaaatctgaacagggtagattttacacagattttcagcgattgggaattcatacacgaggagaatttgcatcagggtcaggacagctcacctgtctcagtgatagtgatcaccacagttcgccggttacatacactatgaatatatgcggacgatcacactccatatctcgtgctaacaatgctatataacacgtctacaatcgatacttcacaggagctgctccgaaaccacgggcacgaccacgaccacggtgtccgaaaccacgggcacgaccacgaccacgaccacgtccgaaatcacggcagcggacacggcggtggaggttccaggtttcatgaccatggtttctgaaaacacggcggcggaggtcccaggttccacgaccaaggacttctggtcgggtgtaatcctccaggacctctttcaaccattcccacaatttagctgtcataagatgatcagagcatagcaatttttccaagatactaggaagtcggtcttcgagataatgagaggttagaagatccaactctgaaagtttgttaaaaggttctttcccctcttgttgccattcctgtcccagaccccccttagactttccatgttcgtttacttgtcttggaaaaacagacaagctaacatcatcagattgataaatcccaaacttcctacgatcatcttcattctcctgaagcttttcattgcttccatctaaaacaccaggtatgtaccgtaaaacctttttgaggactggatgtccttctaaagcaattcgctgtctccaatcttctccaagggtctgacgacttgtcaatacaacttttagagcttgtctcactttctttggcgcgaagcggcgtatcttatgtattccagaaaataatccagctctcgccaatgaggacctcagcgccagagtggtcaatacacaatcccagaaaccatgcagtcgatgtcggaacccctccagttgagatggggtacacactgaaggtctgacaggagggtttgacagcttaccggtcaaatgggtaaaaaatgctggcagaccaaatccttttatccgaaatagctcaacaatcgtataaatgtaactgctgtagtcattcaatcttgccttttcacagaatttgctacaatacggtgcacgtatttctgcacggactccatcagtgataaaaatggtgctcaagtcaaagttcccgtttcctaactttaaccccgtctattcatgagaaaaaacaagttcttccagttaaatcctaattccaattaacttcttccc

SEQ ID NO: 44455 - DNA, 2764 bp, Setaria italica
  Peptide Sequence Number=SeqID_110429
gctatataacacgtctacaatcgatacttcacaggagctgctccgaaaccacgggcacgaccacgaccacggtgtccgaaaccacgggcacgaccacgaccacgaccacgtccgaaatcacggcagcggacacggcggtggaggttccaggtttcatgaccatggtttctgaaaacacggcggcggaggttccaggttccacgaccaaggacttctggtcgggtgtaatcctccaggacctctttcaaccattcccacaatttagctgtcataagatgatcagagcatagcaatttttccaagataataggaagtcggtcttcgagataatgagaggttagaagatccaactctgaaagtttgttaaaaggttctttcccctcttgttgccattcctgtcccagaccccccttagactttccatgttcgtttacttgtcttggaaaaacagacaagctaacatcatcagattgataaatcccaaacttcctatgatcatcttcattctcctgaagcttttcattgcttccatctaaaacaccaggtatgtaccgtaaaacctttttgaggactggatgtccttctaaagcaattcgctgtctccaatcttctccaagggtcggaggacttgtcaatacaacttttagaggttgtctcactttctttggcgcgaagcggcgtatcttatgtattccagaaaataatccagctctcgccaatgaggacctcagcgccagagtggtcaatacacaatcccagaaaccatgaagtcgatgtcggaacccctccagttgagatggggtacacactgaaggtctgacaggagggtttgacagcttaccggtcaaatgggtaaaaaatgctggcagaccaaatccttttatccgaaatagctcaacaatcgtataaatgtaactgccgtagtcattcaatcttgccttttcacagaatttgctacaatacggtgcacgtatttctgcacagactccatcagtgataaaaatggtgctcaagtcaaagttcccgttccaacttaaccccgcatcatgagaaaaaacaagttcttccagtaaatccaatccaataactctcccaatcttcgtggtatcagcaacatctaaggaagtgccaccagcaaatatagtttttaactcagagaactcattaccaggtatttgaacaaactcctcgagtgatatttcccttgtttcaggaacaatttgacaaccaggcacagacttttcatgtgatatatcctcttctgtatatggtctcatggaataggtacatgatcttggagtccatgttttaggaacaaagtgagagccatgaagattctctctcaaaagagctgcatcgggtcctgaatacaatcctgtaaagctgcagtccaaatataatccatcaccatgtgatgtaatgccttccgaatctggcttcatgaatgaggtagatgcttcggaggtacttgtttcaggaacaaagtaagaacccgaaggagcagcatcaagccccgtataaattggtgtgaagttgctgtccaaatatactccgtcaccattgacctcatgaagcatctgccaaactgcactagttcttaaatagtttgaatcagtgactaaagaaagtaatactccattaatcttaactatagtattgtaatgattgttccagtacagaatgtatggaacattttcaacaaggtcttcttgtagggaaaccaagccaatgagagtaagttgaggtccccttagaaacttcttgatcgcctccgaatgtggaaaaccaggttcatttgccaccagtgtaagactttcaaatgaaacttcgggtccaggcaacaaatccgtaggagcaatccaaccgtgtcgaagattgagatctaagcaatcaaggagcaaacactctggtgtcatcgtaaaaccatctgttctggtgaagacaacgtccacatcaaatccggtggccagtgtctgcaccacatcccatatctttctttgtatttcagaacaatgggcctgcattttcacactttctttaagaaaagagacgacaaggttcagtagatattctattgataccacagtttcatgtggttcaaaaaagatgctccccttgagcagtagaacattgcagactgcaataagggcgcatgggccatcatttatctggtggataacatgggtagatcgtccgaaaaaatcaataggccttatattcaagttgccatgcatgccagatatatttgctttctcctcgatactccaatcatctttctcctcagtcttctcataatctctgtcctcgttcctatcctcctctctgtcttcgttcctatcctcctctttctccttgggtactaagagccccttcagacccatcttctcttttttattcctcttctttctttcgcttttcgttagtggcagtattgattgaatctttgaatctgtaggcacaaagtcacaatcaacaaacaatccatcaccattttcctgtgttaacctttcccacaccgcattggtttcagtacttaacaaagacaaatcgttcagcaacacatatattttctcttcaaacttagatattgtaattaacttttcattccaaagcaggacagtgggctgtctcgctttgaggtcatcatgtaatgaagagaatccatatggggttagctgagggccccgcaaaaaggttgagatcattgcacaagaagtagattcaagttcttctgattcagttaaagagaacgcaagtgctgaat

SEQ ID NO: 44456 - DNA, 1287 bp, Setaria italica
  Peptide Sequence Number=SeqID_110430
tggtggagcagcgtgtatccttattcttgaggataatgggtgtgctccgacctagaaattcaatgacccttgttgcataccacacaacagcagtgacatctttcttctttttcttctttttccccatatcatatggctgttcctgatcctgtaactccgctatggtttttttgtagatcaacacttcatcttcgactattctctccattattgtcccttcaagctcggtacataaatcaggttcattttgaagaattccataaagaataacatcgtaattctcttgctttgtcttgagtacttcgtggccatattgcacagcctgtttatcggcacacttcaggaaatactcgcgaccttcatttcctaacccaagctgagaaccaggagcattagtaacagcgatcattcttatgtgatctgcaaggaggcggtatgccgtatcaactccatctgtatcagctgcaccaattttaccagagtagtcctcaattccttgaccagcacaatagtagattttagaaagtacgtcagcgtagacatctaagtcatagtgactttttttattttgaagaatggcagctaaacattcaagattaatccctgttacgacatgcttagcttgcaaaggccccaagacgccatttgcttgcctatcgaactcgacaaacacaagacggcatatttcaacaaatttgtcatccgttatgttcattacggaaccaacaccatcttggctgtccgaacaatcaaagaaaaatccaatacatggcccacagggaccagtttcaccggtcatccaaaaatcagccttggacatggaaggcacgattctttcttcccctatatatttctgcaatgtattttttgactcgctgtctgaactcaaacaagaggacatatcaccactaaagtatgtggcatatattctacattgaggtaacttgtatttcttgctgagaagactgaatgacaacccgatagcttcctccttgaagtagtccccaaaagaccaactcccaaggatttccgtgaatcgatggtaagtcgtgtcgcttctgaagtgatcaatcacgtcatcgtcaccactggcaataatgcacctcagcgaaaagcaggtgcgatgcctccctctgccattaagggtccccttgaaccggttcaggcacatatgaatgaggggcaacttggggtcatcgacggggatcaccggggtcgatgacaaccgcgcgtgctgattttccccgaaataggagaaaaacgtctcacgaaccgttcttcctacct

SEQ ID NO: 44457 - DNA, 1192 bp, Setaria italica
  Peptide Sequence Number=SeqID_110431
tttctcttttttattcctcttctttctttcgcttttcgttagtggctaaaatctaaatgcatgacagcattgattgaatctttgaatctgtaggcacaaagtcacaatcaacaaacaatccatcaccattttcctgtgttaacctttcccacaccgcattggtttcagtacttaacaaagacaaatcgttcagcaacacatatagtttctcttcaaacttagatattgtaattaacttttcattccaaagcaggacagtgggctgtctcgctttgaggtcatcatgtaatgaagagaatccatatggggttagctgagggccccgcaaaaaggttgagatcattgcacaagaagtagattcaagttcttctgattcagttaaagagaacgcaagtgctgaatagaacatgtcatctttacatccaccatgcttttgaagccctgaatttgtgttggatagaatcgattcatacatagcaagattatatgaaagtttggagtaggagcttctaggtattgaggagcccaattcaacatcctggggatcaaccaaccagccatggtgtagagggacaccaagaaaaccaaatagtgcagtttctgagctctgctcaaagccacaagagctagcaaatgtcacatcaaagtataaactgcctggaagcttcggcaatacaccaagaacttgtttattgaactctgatagttccaagttctgttccaactgcatttgtgtattgccatacaaaagataacgctggacaagatagatgagatggccctctgacaccttcttgatatctaaattgagagttatcttctctgcaagcaggagaacattgcatagtgctactagggagcagcgtgtatccttattcttgaggataatgggtgtgctccgacctagaaattcaatgaccctcgttgcataccacacaacagcagtgacatctttcttctttttcttctttttccccatatcatatggctgttcctgatcccgtaactccgctatggtttttttgtagatcaacacttcatcttcgactattctctccattattgtcccttcaagcttggtacataaataatgttcattttgaagaattccataaagaataacatcgtaattctcttgctttgtcttgggttaggaaatgaaggtcgcgagtatttcctgaagtgtgccgat

SEQ ID NO: 44458 - DNA, 865 bp, Setaria italica
  Peptide Sequence Number=SeqID_110432
ccgcgacgccacgatcaaaccgaggaaggcaaagagggtgccctgccgtgagacggggccggtgaggaagaccaggaccgccgcgccgaggagcgtgctctgagcgatcagccccgcagctccggccttgaggatgcccagctccttgacaaggtttgggaccatgaacgtcgcgaggatccccatcaccgccgacgacccgccgaacgcgccgagcaccgacgcgctcacaccgtggtggatgaggaacgtggtcatgagagcgccgggggcgagcgcgacgttgaagcagacgagcacgtaggcgaggctcgccgggaggaccggctgtcgtaggtactccgtccagccgtgcctgatggtcgcccaggcatcttcaactttgttcctgatgctgagagcagaagctgcgtgcgtgctcccatgttcagagcgctcgagcgggcccagactagcagagtgatcgaagatgccatcagcgagtcgattcattgcaccacctagaaataacagaaggggcagagcacagagcgagatggcgcaggagagcctgatgcaggtcagggggtcgctcctggagagcaagacagcgaagatggacgcccctgccgtctcgcagaggaggtcgactctgctgagcgtcgcgttcgcccgcgccagcgcgatcggcctgccttcccctgcacgacgaagtcgcgctctgcgattacgccgagggagacgcaggagagccggtcgacggcggtggacgccaccagcaccgcgaaccacggctgcaggagcagcgccggcgccgtggaagcccggggaagcgtgaacgcgtacgtgatcatcgcggccgaaacccaatgcgctgcggtctgga

SEQ ID NO: 44459 - DNA, 440 bp, Setaria italica
  Peptide Sequence Number=SeqID_110433
ttgtttgttctagtattcatacatcatgatagagtactgaatacaacaaggtagctgctacaaaagagatccgtaaaattatggaactgatcagtcgatgacctgggtaaacaactcttcctctctaaagtacatttgttgtctctaggcactgatctgatgcacgatgcatctactagagcaaccaatttcacccatgaccaattgcagagctgtgactttgcacacctggtgcgatacgcaacaatttgccagtatactttggtactgtgatgtgggtatgtcagaacaatcaacaaaccaatacagaactgttcatttaggcagtctgttgcaaaacccgttatcaattcccaaatataaccaagtgttaactagctagacattttatagaacaaatttgttggcactattagtcctatttcttggtaaattgttta

SEQ ID NO: 44460 - DNA, 503 bp, Setaria italica
  Peptide Sequence Number=SeqID_110434
tattgttgggttattgttctagtaactaattctaactaaacctaattactagtaacttgtttctattttaggtcagttcttgttgcaaacccgttatcaattccaatataaccaagtgttaactagctagacattttatagaacaaatttgttggcactattagccattctggaaatgttaagagcaatggagtacaatctgttcgctcttcaacagaaaggataaaatagggatgctgacatatttacttgaaaaccatatatttgtccaggagaccgtcacacttagttcaaatttgcttgagacaaagggatgccttaggtaagcatatgacaacatgttggttcataacgaactcatgcaaaaggaatgacaacaatactaccaatggggacaaacctgcacaggaagcttagatggaaatacatgcacaggaagcagcatcagagaactttgaagaccatgtatgtatcaacatcagatacttcaggtcataaaacct

SEQ ID NO: 44461 - DNA, 398 bp, Setaria italica
  Peptide Sequence Number=SeqID_110435
aggtggattccgctgaagttggcctctttgcatagagctatactttcagagttgttatatgagcgcccagtggttggtattattcggatactgaaacggtcgtgtaaaagggtttgtgtttctgtacgatgtctacaactgttatatctagtggtatatttctgtggtcaaggccccttcgaaactaccgtccaaattaccaaggaatgtcgatttgttgaaactgtaatttacacagcttcctcgcatattctttattggtttcattggttttgtagccagccttaccgaaatttgccgtagtggatattctggtaaccattgtgtgctggtacgctccatgaactggatatactattctctgatcggtgtctttacttggggccagtatcgtgtga

SEQ ID NO: 44462 - DNA, 441 bp, Setaria italica
  Peptide Sequence Number=SeqID_110436
atgcattcagtccagatgagattggtggaggagaagacgatgttggtagaggagaagagatggcacagtttatctctagatgatgatgacagtgttgaagatgagacatgaaaatactggtttggatgaaactgatgatgactcatctgatgtagagcttgtcccagaacatgagcttgaaaacagggctgtggatgcaggtggttatacatttgatggtgatattggggatgatgaattgtataatttgaagaagcaacaacctgctattcaaattaaaggaaaagatgatggtaaatgtaaggttagtggtagggcaaagaaggtggctacttcaaattcaacaaagaacaatcctggggtgtcatctatctgatgacccaaatgatggaaaccacactccagatgatgttgatgatcagactccattgtttgttcaca

SEQ ID NO: 44463 - DNA, 609 bp, Setaria italica
  Peptide Sequence Number=SeqID_110437
ttctgaaagatggtgctgttatctttactgcttatgcagaaagacatcatgtttgcacaattgttatgtagctatcattgccttgaattttgcttttggtatgagcagatagactatttctctgccaattttccaaaaactttactttgccagttggtgcttttcttctcattttatttatgggaatcaaagttcttggggttagcaattaattcatcctttacttagaaggataaaactcttaactttgttctaaacctggagtagtgttcaaatctcgatctttcctttcctcgaaagaggaccttagagcgatatatagatgtgcatgtttgctgaaaaggtgaaaagtgacagagaagaacagtattactgattggagacatcagagcaccgctgtctatagaacaacggtctggcttttataattcctctggtgtagtctcaaactaggctactgttgagtccagactatatactgccggagaagtctgagtcactgtgataaggggtgcttggttgctttgcataggtctagtctaatacatgcacgagcttaccaaaagttgatctctgatctagttaccagtcatattgctgatcaactag

SEQ ID NO: 44464 - DNA, 336 bp, Setaria italica
  misc_feature (245)..(245): n is a, c, g, or t
  misc_feature (250)..(250): n is a, c, g, or t
  Peptide Sequence Number=SeqID_110438
ttactttatcttgtaagggaacctcagcaccaacaacctagatggtaccttacatgagggacatttgtcaggcctagtaaacttggagagattatctctgtctgacaattccatagccatcagactgaattcgacgtggttcctccctttagtctcacagaggttgaacttcggtcatgcattctggggcctaaatttccaatgtggcttaaatggcaaacaaatatatataaccttgacatctnaaacncaagcatatatgacatggttccagattggttctggacaatggcttcctcggtgaacactctgaacataagaagtaatcaaattagc

SEQ ID NO: 44465 - DNA, 227 bp, Setaria italica
  Peptide Sequence Number=SeqID_110439
gtggaatggatcatagatccggcggtcgtttagctcaccctggagcagtcggtggaggtgctgatggagtatgggatgcttcatgccatgcgtattaaagatggaaaagctacctatgtatcaagatatgtgaagactgctcgcctcaagcaaggagagtattttggtggagcgaagtttatgaagattggagacctgaagggattcttggattgttatggtcaatg

SEQ ID NO: 44466 - DNA, 337 bp, Setaria italica
  Peptide Sequence Number=SeqID_110440
gcggcgacggagacggatacggcgaggtgggaggccatcgcggcggatggggacgggagtgaggagggaggaggcgaggggaatcggtgtggcacgctgaaccggagagtggtaagaagggagttgaagtggaaggaaacatacaaggcatatatgacctgggacccggaagatttggttcagaggcgatttttgttcccaagcagccaggtgtatctggagaagaagacgatggctatttgatattctttgtgcatgacgaaaatacagggaaatctgcagttgctatatattaccgcccctctgctgcttgttgcgccagttgttcctcagttac

SEQ ID NO: 44467 - DNA, 399 bp, Setaria italica
  Peptide Sequence Number=SeqID_110441
ctctctccccgccatttccaaccactccctagttcgtcagcacagcagccgcagccatgggggcggaggaggcggagcagcacaacggcctcgtggtggtgccggcgccacgccccagcaaggggctggcctcctgggcgctcgacctgctcgagtccgtcgccgtgcgcctcggccacgacaagaccaagcccctccactggctctccggcaacttcgcccccgtcgttaacgagaccccgccggcacccgacctcctcgtccgcggacacctcccggagtgcttgaatggtgagttcgtcagggtcggccctaatcccaagttcattccagtcgctgggtatcactggtttgatggagatgggatgattcatgccatgcgtattaaagatggaaaag

SEQ ID NO: 44468 - DNA, 656 bp, Setaria italica
  Peptide Sequence Number=SeqID_110442
gcagcgttatgtctactgcaccatacttgacagcatcgcgaaggtgactggcatcataaagtttgatctgcacgctgaaccggagagtggtaagaaagaacttgaagtgggaggaaacatacaaggcatatatgacctgggacccggaagatttggttcagaggcgatttttgttcccaagcagccaggtgtatctggagaagaagacgatggctatttgatattctttgtgcatgacgaaaatacagggaaatctgaagtaaatgttatagatgcgaagacaatgtctgctgatccagttgctgtggttgagcttcctaacagagttccttatggattccatgccttctttgtaactgaggaacaactggcgcaacaagcagcagaggggcggtaatatatagcaactgcagattctgcgcacccccgtgtatacaagagcggatggaaatgctgtaggtgtatacttggcaggtctgaaacaattcatatgcaattattattataagtcgccattaccattcattagacatggatataattaagcatgtttattactgccctgcaaattctgttattgtggcagcaaagacatgacagtataattcataatagtaataactggagtattagtaaattaaaaaaaaaaaaaaaaa

SEQ ID NO: 44469 - DNA, 1683 bp, Setaria italica
  Peptide Sequence Number=SeqID_110443
tttacgtttaacctttttagtttacttttacgtttaagttttaccgttttacgttaccgtttagttacgtaccttacggaccaacgacaagaccaagcccctccactggctctccggcaacttcgcccccgtcgttaacgagaccccgccggcacccgacctcctcgtccgcggacacctcccggagtgcttgaatggtgagttcgtcagggtcggccctaatcccaagttcgttccagtcgctgggtatcactggtttgatggagatgggatgattcatgccatgcgtattaaagatggaaaagctacctatgtatcaagatatgtgaagactgctcgcctcaagcaagaagagtattttggtggagcgaagtttatgaagattggagacctgaagggattctttggattgtttatggtccaaatgcaactacttcggaaaaaattcaaagtcttggattttacctatggatatgggacagctaatactgcacttatatatcatcacggtaaactcatggccttgtcagaagcagataagccatatgtagttaaggtcctggaagatggagacttgcagactcttggtttgttggattatgacaaaaggttgaaacattctttcactgcccatccaaaagtcgacccatttacagatgaaatgttcacctttggatactcacatgagcctccttactgtacttatcgtgtgattaccaaagatggggctatgcttgatcctgtgccaataacaataccagaatctgtaatgatgcatgactttgccataacagagaattattctattttcatggacctccctttgttgttccgaccaaaggaaatggtgaagaacggtgagtttatttacaagtttgatcctacaaagaaagctcgttttggtattctcccacgctatgccaaggatgacaaactcataagatggtttgaactccccaattgcttcatattccacaatgctaatgcttgggaagagggtgatgaagttgttctcattacctgccgccttgagaatcctgatttggataaggtgaatgggcatcaaagtgacaagctcgagaactttgggaatgagttgtacgagatgagattcaacatgaaaactggagctgcttcacagaagaaactgtcagtgtctgctgtagattttcctcgtgtcaatgagagctatactggcaggaagcagcgttatgtctactgcaccatacttgacagcatcgcgaaggtgactggcatcataaagtttgatctgcacgctgaaccggagagtggtaagaaagaacttgaagtgggaggaaacatacaaggcatatatgacctgggacccggaagatttggttcagaggcgatttttgttcccaagcagccaggtgtatctggagaagaagacgatggctatttgatattctttgtgcatgacgaaaatacagggaaatctgaagtaaatgttatagatgcgaagacaatgtctgctgatccagttgctgtggttgagcttcctaacagagttccttatggattccatgccttctttgtaactgaggaacaaccggcgcaacaagcaaactaggacgaaactacaataggaccttagtacaagaaagacaagaataaagaccaataataagtaaagttaaaaggtaacctaaggaaaagaaataa

SEQ ID NO: 44470 - DNA, 541 bp, Setaria italica
  Peptide Sequence Number=SeqID_110444
aagggaagaagattggtgccgccgctgcggagtcggaggtgaggctgatggccaccgccgggctgcgactgctcgaggagcacgcccaggaggcgatcttggcgtcctgcagggaggtgctccgggcctctggattccggttcgaggacgcgtgggccaaggtgatcccaggctctgatgaaggcatctatgcttgggttgcggcaaattatgctcttggcagacttggaggggatcctaacaaaactgttggaataattgaacttgggggcgcttcagctcagctgacctttgtttctgatgaagtacttcctcctgaactgtcaaataattttattttcggtgaaacaacatacactctatataccaacagctttttaaactttggtcaaaatgcagctcaagactcgttccatgaaatactgcggtcaagaggctcttccaaaaataatacacttgttgacccatgtgctcctagaggatattcacgcaatgaagaagtaatggtgaggacaagcggttcttcaagatcaacactaga

SEQ ID NO: 44471 - DNA, 512 bp, Setaria italica
  Peptide Sequence Number=SeqID_110445
caactagagttgtattagtttgatagtgggaatggaaactttacagaatgtagatcctcttccctgcttttactgcaaaaaggaaagggtaagaactatatgcaaaactgcaaactctgttcagttgacattaaaatcgcttgaagccagatgttcttaactggtgcattaagccaatatcttttgcaaatcttatacactcaaaataattttgctgaactatttcttaattctgactgaacaagctcaactgagcatgatgtcttagagattagtgccacatgtatctcgtaaatgcagaaaagtgccagtatgaacaatgccacctgggatctacgttcgtacctgagctgcgtggatacttcctggcaactgaaaatttctattttacttcaaagttctttggacttaagaagtcttcatctctatccgatttcgtgcttgctggagaacaagtttgcaaccaggatttgtccactcttaggaaaaagtaccctaataggtcagatgaa

SEQ ID NO: 44472 - DNA, 926 bp, Setaria italica
  Peptide Sequence Number=SeqID_110446
ttatatccacatactcttgtactttgtataatcttgtgatcctacaatagattaaccagctgatcaaatcatttccttccacagaatgcagctcaagactcgttccatgaaatactgcggtcaagaggctcttccaaaaataatacacttgttgacccatgtgctcctagaggatattcacgcaatgaagaagtaatggtgaggacaagcggttcttcaagatcaacactagagaaccaatatgttgatagtgggaatggaaactttacagaatgtagatcctcttccctgcttttactgcaaaaaggaaaggaaaagtgccagtatgaacaatgccacctgggatctacgttcgtacctgagctgcgtggatacttcctggcaactgaaaatttctattttacttcaaagttctttggacttaagaagtcttcatctctatccgatttcgtgcttgctggagaacaagtttgcaaccaggatttgtccactcttaggaaaaagtaccctaataggtcagatgaagatttctcacggtattgcttctcatcggcatacattgtggctctactgcatgacagtcttggtgtaccactggatgacaagaggattgagtattccaaccaggttggagacattcaggtggaatgggccctaggagctttcattacattgatgcaacatttaagtttaaagccatcacacactgctgcagcatcaacccatagcaatagaccattgtttgctgtggtggggatgtttcttttgtgtggagcatttttggtgtcaagatggaggaagcccaagacaaaaattatatacgacttagagaaaggccgatacatcataacacgcatcagctgacgctgacccttgtgcagaggaagtatatttatacgacaggaatagatttttgtgttgtacaa

SEQ ID NO: 44473 - DNA, 573 bp, Setaria italica
  Peptide Sequence Number=SeqID_110447
ttaaaccttaaaaaactttaagtttaaaatttttttttttttttagccaaactgtaattacgttttcatttcaattgggcatgtaacttttcccccaataggcaggcacatataatttccttgatacagcagtgttcaattaaccacaattttcagtcggcaagatcttatttagacgctggcctgctactatataatacgttctgggggttctccttcctcctcgatcgtgctccatggcggcggcgcctcagttgcagctgcagcaggagcagccgcagctggtgccgcaattgcaggtgttgcagtcacagccgccgctctccatggcggcctcgaacccgccggagctcgccttgttggtggcggcggcgatgaccatggtggtggtggtggtggaggtggcctccacgtcagggaacatgttgcagccgccgcatccattgccgcacttgcagccggagccgcacccgcagttgccgttgcagcaagacatgctgatgatcttgttgatcacgagaagggaagcaggaactggtgctgaggaaggtgtagtgcttcttgcgctctgct

SEQ ID NO: 44474 - DNA, 592 bp, Setaria italica
  Peptide Sequence Number=SeqID_110448
tgagagcttcggctcagctgccgccgccaaccgaggagagatcagcgccgccgcgcgaactggttcaccggggaggacccgagccgtgctgaacggtccgtgcgccgcaacttcaccctccttgggcgttcccgtagcggggccgtgccgtcttcgagcgcgcgcgcgacgccgacgcggtggcagctcgctgcccatgcggagcaccggcggcattgcgcggctcgccggggcactgatttgtggcgagcgagagctcgcgtttcttcgctgcccttgccaacctgatccagtacatcgccgtgagcaatctccgtgcaatcgagacgtcgccggaggaacgccggtatgctctgaagaattggatctagtgaggttcaattgagctcaaggaggaagacgcgcgcttgccgaggaaatgaggaagaattgggggttcggctccggccccgcgcggccgttcggtgaccgccggtggctgctccccttcctcgcgagcctgctcgtcacggccacgctcctactcgccgccgcctgcggcctcttcgcaccgccctaccccggcggcggcggcgacgccgtcctgttcgat

SEQ ID NO: 44475 - DNA, 504 bp, Setaria italica
  Peptide Sequence Number=SeqID_110449
accacgtaggactgaccaccgtagtccgctgcaagccatgtagctacgagggcttctccaccatgccgctgtcatcctcaggtcacatacatggtcgtcgatctcccagtccatggcttattataagcagaagtcaaaggaggagcacactgcaccataccaaaaaggccaccgctctacaagacccaacgccgaagcaccgctgccacactgtacacaccaaacaatcaaaacactcaccggattctagcccttcaagacaactcgaaacgctgggggcctcgccacatccaccgccgcacaccactcctcggacacatcaccttaaagcgaacgggggcatcgccacttccgtcgcgggactccacaccaaggatccggacttgttttgccgtcaggggtgacatggtaccaccgagctactccaattacttcacctccaccttgccgccgtcggaatctcagttgtaccatgtgtgcagacacaaagcttcccttacccga

SEQ ID NO: 44476 - DNA, 462 bp, Setaria italica
  Peptide Sequence Number=SeqID_110450
caacggccggcgcgcccgcgagcgtgagcgcctcgtcgtcgggctccagatcctggtgcaccaccagcatcaccaccaccaccacaaccagcatcacagccatggccggcacgcgcacgcggcgaacatcgtcttgaagcaggtggtgcgtccccgctccgccgccgcctcgcgccacggcgccgtgtcgtgcagcttcctcaaggcttgctccctctgccggcgggacctcagccctagcaaggacgtctacatgtatagaggagaccagggcttctgcagcgaggagtgccggtgggagcagatcctggtggacgaggcgcgcgagcgccaggcggcgggcagcaaggagcggcagcggcgaggccaggctcaccaccacagcccccaccgcacgcccaaccggggcaggccgccgccgaggaagacacttgccgtagcctagatgaggaaggcaggacc

SEQ ID NO: 44477 - DNA, 259 bp, Setaria italica
  Peptide Sequence Number=SeqID_110451
tagagcaaatattttaataatatatctgacaaagaaaggagctcatttgccagattgtctgtctatttgtatctaaatgtaagtatgtaactgcaagtgaaacattttgtgacatgggcagtaaaggttgtaacaattgtcattcaatgcggggcaaactctaattctataaacctcagctggagatatcacattacttggggcaaggggctgcctttaaactccatgtgtcactatcagatacctactagacatagat

SEQ ID NO: 44478 - DNA, 372 bp, Setaria italica
  misc_feature (337)..(337): n is a, c, g, or t
  Peptide Sequence Number=SeqID_110452
ttcttatttgttctaggttcaagttctgaagctgagtataaggctgtagcagatgcaactgctgaagtaatgtggatacagacattgttatatgagttgggagtgcaagcgccaaaggcagcgaagttgtggtgtgataacattggagctaagtatctttttgccaatccggtttttcatgcacgtaccaaacatacagaggtaggttatcattttgtacgagaaagggtagcaaggagatttacttgatattaaatatatatctaccaaagatcaggttgcagatggctttacaaaaccactcacagttcggcaactggagatgttcaagaccaanctcaacttggagatgttcaagaccaatctcaacct

SEQ ID NO: 44479 - DNA, 409 bp, Setaria italica
  Peptide Sequence Number=SeqID_110453
ggagccgctccggcggcgggctcgccggggacacgtcgagttcgggccagaacggcagcgcactcgccggatacagcccggactcgagctgcacgggggactggacgccgccgcggctcggcgtcagcacgcgcccgagcagggtggcctatacttgagctcgacttgagcctggccttcaagacaaaacccattgcgtcgtcatgagtctttgggacgtgttcgcgactcatttttgaatgtttttgttgttcgcgacgtatgtaactactatgtatagcttgatgtgtttgcgccggtgcctcgtgcctctgtaaacgcctgagcctgaatacttggctaaaggattgcgaacaaaaactcgagaattctaaatgagtggttattatggatgaattgagatcgaagc

SEQ ID NO: 44480 - DNA, 451 bp, Setaria italica
  Peptide Sequence Number=SeqID_110454
tgtagctgtttcgtggagtttgctggcagtgccgacgcggtttcttcctccctctcttccgcgttcagccgttcaaccgtgttggaatttggattggattccagtcgaaattcaggaagggatgaactgagctcgtttaggtttccaaatcccaaatcaatcccctgaaaccctcacggcctcaccctccacccccaacaaatatacggagggggaggcagagagaacaccgggagattgattgttgcaagagcagatctgattccggaaggactagggaggtatgcttgcttgatttatcgtctcgtttctgcccccttgacctaagacaggcatcggcctcctggatctcatccgccacatgtccatggagcggcagccagaccgctggcgtcggcaagtccaagcccctgatgggttgatgacttcacgggctaaaagtaagggctca

SEQ ID NO: 44481 - DNA, 292 bp, Setaria italica
  Peptide Sequence Number=SeqID_110455
gtttatgcatgaggttttccagtgggcatgctagaatatgcacatttagagtttatcagatgatccatattgccacatctttttgctttaccttatcatgtcaggatgcttgtcaatgaatatatatctgtccaagctaactatgcaggttcgattcccgctacctgctccattttgtagaaaaagctaagtaaaaagctggttgttctgatagtagagaactgccatatgactgtctcactgtgtgaatgtaagagcatgtgtgaaagagattggtttgtcttaccaagtt

SEQ ID NO: 44482 - DNA, 458 bp, Setaria italica
  Peptide Sequence Number=SeqID_110456
aatctccaactagttttgattaccctgatccagagttttgcaacttcactagtttgagatcatttgacaaattcaagaaaggtcaggtttgggcactgtattctgatactgacaagttcccgaagtactatggtttcataaagggcgtcgatccagatgatcacacaatccacataaaatggcttgagcactgtccatgtgctcaaatggaaaagtgtttagtgcaagacggtttgcctattggctgtggagcattccgggtcagcaggcaaagtgacatctatgattgtacaagtgtcttctcccacaatatggaagtgacgctgatgcgtaaaggaaaaaagtatgaaattcttccacgtgttggccaggtatgggctatatacaagaactggagccatgcatggaaatttgaagattactgcagatgtgaatacttctaggctgaggtcctggag

SEQ ID NO: 44483 - DNA, 273 bp, Setaria italica
  Peptide Sequence Number=SeqID_110457
tcttctaccttgtctaattttaccgttgggttcgtctacgttattgtatgctattccaatattgcacaccatgcttttgttcgaatgaaggaacatcattgaatgtcctttgccgacgatgtggaactgatgctggagcacagagtagctagatcgaaccaaactcaaggatgaaggaccgaatgaaagatggatggataaagtggaaaagcaaaagattgaaccaaactcaaggagaaaggaccgaatgaaagataggaatagtaataaaag

SEQ ID NO: 44484 - DNA, 224 bp, Setaria italica
  Peptide Sequence Number=SeqID_110458
gcttggactgctctgctcacacccatctgcaagctcaaggccaaacatgcaaaatgtcttggattaccttgatggacatgcaccggttccagaattggcatcaacacaactgagcttcaacatactagcccttttgcaaaacaagggattggatccatatattgtgtcatgccctccatcatcaatgatgagcttcggaactatatctgatctatcaggaggga

SEQ ID NO: 44485 - DNA, 941 bp, Setaria italica
  misc_feature (893)..(893): n is a, c, g, or t
  Peptide Sequence Number=SeqID_110459
actacgcctccgccgccgccggcatcctcgacgacagcggcggcaacttcgccggacggatcccgttcaaccagcagatccggaacttcgagtcgacggtggcgcagatcgccgccgcggccggtcgatgcggcggcggcggacagggtggcgcggtcccatccctgttcgtggggtatggggagcaacgactacctcaacaactacctggcgcccaactacgacaccaggcgccgctacgacccgcaccagttcgccggactcctcgcccgccagttcgctcccagctcaccaggctgtacaaggccggagccaggaagttcgtggtggccggcgtgggttcgatgggttgcatcccgacggtgctggcgcagagcctcgccggccggtgctcgccggaggtggacggcctcgtgctgccgttcaacgccaacgtcagggcgatgctcgacggcctcaacgccgacctccccggagcccggttcacgtacctcgacaacttccgtatcttcaaggccatcctcgccaacccggccgccttcgggttcagcgtggttgacaggggatgctgcggcatcgggaggaacggcgggcagatcacgtgcctgccgttcatgccgccgtgcgcggacagggagcgctacttgttctgggacgcctaccacccgacggcggcggtgaacgtcatgatcgccagggaggcgttccacggcggcgccgacgtgatggcgcccatcaacgttgggcagctcgccaggctctgatcaagatgatcagaacttgattccgcgcttatattagttgtgaaccgtacatataatcgtaccaataaaatctggaggccatctccatgcgcatgatgtgaaccgtacctatagtcgatgttgaaaacntgtactacgtactagctgctggcgcaacggcaccgcgcaacacgcgcc

SEQ ID NO: 44486 - DNA, 287 bp, Setaria italica
  misc_feature (1)..(1): n is a, c, g, or t
  Peptide Sequence Number=SeqID_110460
ncggagctatgactcatgataagaagtcatgcatggaacggcctcgaacagtgggagctaaatggactaatatgcaaatagctcctgatgagaaggtggagtcatttgaactagattatgatgggaaacgtgaccggtggaatggttatgatccatcgacctacacccgtgttattgcggagtatgaagctagagaagagaagggcaaaggatacctataagaacagcagctacaagaccttgctacagaatggtaaccaggatgacaatgatgtgggcagtgaatg

SEQ ID NO: 44487 - DNA, 706 bp, Setaria italica
  Peptide Sequence Number=SeqID_110461
ttcgtcctaccgcgcgcgcacctcgctccgtagttggtactggccggcggcgtcaccccgtccccgtctcgtctccccacggttcaagcctcctcccgcccggacaggagcagcgatggccagtcgagtcgggatggtgggcgacgtccgggacgcgccggcggggcgcgagaacgacctcggggccatcgagctcgcgcgcttcgccgtcgccgagcacaacaccaagaccaacgcgatgctggagttcgagaggctggtgaaggtgaggcagcaggtggtggccgggaccatgcaccacttcaccgtcgaggtgagggaggccggcggcgccaagaagatgtacgaggccaaggtctgggagaagctctgggagaacttcaagcagctccagagcttcgagcccgtcggggacgccgcggccgcatgaggcagaaggtaccatcttccagtgtgatatgcttttccctgaaggcgcaagcttgtcgctgggggctggagcacagcagtcgaagaatttagctgcatacacatcactggaaaagtattgtatgatgaataaaccagctccttaccagatgtatttcacatattgactcctgtaaaatgcaatgcgctgcgctacaagaaatatgaaagccttgtaccttttcttgccaaaattgcttcaattgtcaccaaattcggataacaaaaaaaaaaaaaa

SEQ ID NO: 44488 - DNA, 787 bp, Setaria italica
  misc_feature (625)..(625): n is a, c, g, or t
  Peptide Sequence Number=SeqID_110462
ggctaaattattggattattctattatgcacagaaatgtttcgatactcagtattctattacaccgactctctgtgacgtactccgattcctcctgattcttgatcatcccgtcccgtcccgtgccggtgttaattactgggggttgtagtacggcagcacggtgtagacggtctgcacgacggtgaggacgagaaggaagacggcggcggcggcggacatgctggtccacgggttgctgaagtagtcgtgcaccagcacggcgcggtgccggttccagctgcggccgcagtgctcccggacgtcgcggaacaggtcggcgtagcagttgttgacgaactccggcggcgggcacagctccccggccaggtgcgcgtagaacgccgccgtgtcctcgcccccttcaccagcaccccggcccgctgcaggatctccacgtcgtgggccgcggacaccaccgactccataagcagcacgtagctcaccagccgctgcagctcccaccggccccggctctgctcgtacgcgaggaggttcgcgaagaccacgtggttcgtgtagctctccaccgccgggatctccagcacgccgccgcgcgggtcgaaggtcacgtccacgaggctccncggggatttcttggcgcggatcgtgaccccggcgttcttcagatccgacgccgacgggagcgtcaacggcacgcgctcctccatcggcttcgatatccattcatcgaacgcgtcctcctcggacttgccgctgccgctgccggcggcggcggggtcgctccc

SEQ ID NO: 44489 - DNA, 611 bp, Setaria italica
  Peptide Sequence Number=SeqID_110463
cttcctcatcaagaatggaagatatagttgcttgcaatctctgaatctcagaaacatcaccagtaaagctgacattctccatcaattgaggctgcgctttatacgcaatgagacacaatactgataatgctctagcggcagctacttgtatatcagaattacggaaggacaataatgatgttagagctgttatcaaagtaaatggcttcaacgatgatgacaaaaccatggtaacaaatggtggataaggcagtaaatcctctggtaatttggacaggatgtaatatataatatcaagtccattgcaaaggacaagctcgatatcttcaatatccttaaggccatgataattgcgtctatatgaatgttccagtagttgtgttgccaaagataatatgctccaaagtacactgtggacagaagaatcatataacagaatttcccaaatgatgccaccaagctttgatgagaatggtttcacatgaatacaggttttcaccaattcaacaccgaagggttgtcttccaacgactatatttcttgtatttccagttcatatgattaaccatgatgtactgaattgagaaaacaattaaaggcgatattatatc

SEQ ID NO: 44490 - DNA, 1562 bp, Setaria italica
  Peptide Sequence Number=SeqID_110464
tttcatcagtagcatcggctttggattcttttcggatcggtagcaccggcttggattcttttattgttgaggatttgaatacagatattcactgtccaaactgcagctaccgattcgtcatcgcctaagtatcctagaaatatatttacaggctcggcaacgctattgcctcgcgctttcagctgtttcacacactcagcaataatggcgtcactaacattgctgctgcattacgaacttggcgcagcaaaatctatggatgggctgggcggcgatccgttcgtcaagcggcgctgcagttcacgtcctcgggctcagccacgttgtagtacagcgtggacgtccggtcgtcgaacttggagacgacgtggtgcggcgtcaggccgcagtagcacttccgcaggcgctgtatgcagatgtccattatcttctggaacatgtggtcttcctggatgaagggctgcttcacgaactcctccagcggcatccactttgctgcctgaatctctgtctcatcaatcttgatctcacttgaaacgggcctcagcatgcagatgaagaacaggtcggacttctggaacgccacgttgtgggcatgcctgaaagcaacgacatcgacgaattcggtgtcgaccccagtttcctccttcacctctctgctagctcctgtatagatttcctccgacgcaagaatgaaacctgtggggagtttccacacaccatccagcgatgaaccgtgatacttctcttgaaccactaggacctccatttgatcattgatcacaaagcccccaactccaacctgatgagaagcatttgctgggagcatgtttggctcgtcggggatccagtacgtcatcatcaagtacgattcctcagcgtggtggtacttgaaaccttcctttactgccaagggcacgaactcggcaagatccactggtaatttcagccacacccctttcttccccacggacttccagtaggacagcgacgccgcgagcgagcgcgcgaaggcggccttgtcggccggcagcctgtcggcgtcgacgacgaccccgccgtactcgtcgtcggtggcctccagcacgaagttgtgctccagcgccgtccaccagtgctgctggtggccgccgcccgtctccggccagttggcgacgcccagcaggtcggccgggtcggccctgaacagcttcttgcgcgccgccgaccgcaccccgctcagcatccggctgatggagtgggagtaggacgcgctcaccctgcagtctctggaggagcaggaggagcagctgaggaagctcgccgtgctcccggcgcggcggcgcctggccgccgccgggtagaggctggcggcagccacggcggtgtcgagcaggctgctctccatcctcggctgtacactccacgatagctcgaggcacccccaaactgctttggaacggagatgatgctacggcgatactgctacaaccgttgcgcgcgcgttgcctgcctactgggcgctactgaactgaactactgtacctgcttgctcgctcggataccgccgtggtcgacgcgtc

SEQ ID NO: 44491 - DNA, 436 bp, Setaria italica
  Peptide Sequence Number=SeqID_110465
ttagtaacttgtaagttttaaatcttagtgattatgagaaacatcaaataatggaagaaaattctggactaaaaattcaagtccagaaaatagcaggcctccaggatgaacttttgaaactgcaaagttcccttgatgagtctaagtttgaaaagggaaaactcgaagagctacttaggttgttgtctgaagaatgtgatggactaaaggtacaaaaggccatgttaacggacaaagttgcacacatgcaggatacttccaacaacatcggtgacgaaaagcaaagtaaaacagccattcaagcaaagcatgagagcagcataaaacaggggaacaatgatctagctactgacagcggaggttcttctccagttaatgaggaaccagacctgcaaacaaagatcaaatcactggaaagtagacttgccgaggttct

SEQ ID NO: 44492 - DNA, 1470 bp, Setaria italica
  Peptide Sequence Number=SeqID_110466
gcgcccggtgcacggccaattccgtgccccgctcgcccggggacgccgccagggaggacggcgagagggatcagggtctgcacctactgcttccagcgctggctggaggaggaggccgccgcgaggggggacatggcggcgcagcagccgtgcagcccgtccgctagcgttgggagcgacaagtccagcttcacggggacgaacgggcagatgtcgtcctatgcgaatgttagctacgctgactttgcgtcgatgccggtccacggtgagggcaactgcggtgaggatgaaggctaccctgagaagcagctgcctgggatggagcccgctccaaccatggagcctgcagcttatgtggacaactcgtcagatccattcaacttttgtgtgcagaggagtgacgatgaagatgatgactacacagttttccgttcagatttggaagggcagcacttgcaaaattctgatgaatattatggacctatgtactttgatggccatcaagttgattgcagtgatggtgcaaaagaatcgacatccccaaggaaagatgtgacatccttagttgattccttgggcgcagataagaatgaagatcatagtgtcgatgagtgctgcaatgctcggtcttcttccatgtacagcatggaagtgctggataatgaacctgtggactttgaaaacaatagctcactttgggtacctccggaacctgaggacgaagaggatgatcttgatggtgaacgtgatgatgatgagggggtggatgccacaggagagtggggatatcagcgctcaaccagctttggcagtgggcactgtcgaagtagagataaatcggccgaggaacacaagaaagccatgaaagacatagttgatggacattttcgtgcattagtttctcaacttcttcaggctgaaaaggtaccattaattgataaaactggcaaagagagttggctagatatagttacctctctgtcttgggaagctgcatctcttttgaagccagataccaccagcaaaggtggtcagatggatcctggtggctatgttaaggtgaaatgcttggcttgtgggcacccaagtgaaagtttcgtagtaaaaggagttgtttgtaagaagaatgttgctcaccggcgtatgtcatcaaaaaaagaaaagccgcaaatcctaattcttggtggtgcactcgaatatcagcgtgtatcaaatttgcttccaaggtatgatactttacggcagcaggaaaccgattatttgaaaatggctgttgcgaagatcaaagcacaccaaccgagtgttgtattggtggagaaatctgtgtctcgttatgctcaggatttatttctagagaaaaacatttcactagttctcaatatcaaaaggccactgctggaaaggatatctcgctgcactggtgctcaaatagttccctcgattgattatttgtcgtctcagaagctaggg

SEQ ID NO: 44493 - DNA, 371 bp, Setaria italica
  Peptide Sequence Number=SeqID_110467
aaccttcttaatgcatcattgttgtctgaaagtggccctcctttacttgatttcgaggagcttactgttatcttagttacgcttcttccgttagtatctgtcaataacagcaaagatgagcattatgtttcaaagggattgaagacatacaatgaactccagcattgctttttggtaattggtttagcatatcctgaggatctttgcatgttccttttgaataaatgcaagtcaaaagatgaagcatctattgttggggcgcttagcacaataaacacctattgcccagattgttggaatcatggcatactaaacaagcaccactggttgaaatcatgaaatctcttttagagcaccagagcttggccata

SEQ ID NO: 44494 - DNA, 1401 bp, Setaria italica
  Peptide Sequence Number=SeqID_110468
tatgggatgacatgataataaattttttatcagaatctttggatgttgtgaatgacagtgagtgggtcatttctttgggtgatgcatttgcacgacagtatgatctgtatggtatatctgatggacacgctgctttgctgcacagatgcttaggaatgcttcttcagaaggttgatgataggatctatgtcagcgagaagattgattggatgtgtagacactcaagcatgtctattcctattaatcgccttggactttcacaaggcatcgggctggttgcagcttctcatttggatacagtgttggaaaaactgaagaacatactagataacgcagggcaaagtgctctccagaggttcctctcattttttctcatttggtgcaaaggtggatgatgtggatgacacgtatgcagcattggctttgatgtatggctatgctgcgagatatgctccatcaactgttattgaagccagaatcaatgcacttgtggggactaatatgcttggaaggttgcttcatgttcagcatcctactgcaaagcaagctgtgattactgcaatcgaccttttaggccgagctgttattagcgctgctgaaatgggaatctcattcccactgaaacgaagagatcagttgctggagtacgttttaactctaatgggtagggatcaaagtgatgatctcactgatttcaactctgagcttttgcacactcagagtgttgctttaagtgcctgtactactctggtttcactagaaccaagattacctatggaaacaagaaaccgtgtcatgaaggcaacattaggtttttttgcattgccaacagagccctcaagcattgttgagagtctcataacaaacctcattattctgttaggtgccattttgcttacaagtggtgaagatggtcgaagtcgagcagagcagttgttgcatattcttaggcagcttgatccatatgtatcgtcatctttggaacaccaaagaagaagaggatgcgttgctgtacaggaggtgctaataaagttccgcaatctttgttctggtggattcggtgcattgggctcctatccaactttcacaatgaacaaacaaattgatcaaggagggactaggagcttatcaagtttgccgtctgcatttgtgttgcctagtcgagattctttaagcttgggagagaggacaatggcataccttcctcgttgtgcagatacagatgctgaagttaggaaagctgcaattcagatcattgcacttttcttcaacatttcattgtcacttccgaagcagaaggcatatgctaatgatattgatctggaatcctcgtatagtgctttgtcctcccttgaggagttagtctctgtcgtcagaagggaggcatctgttgaccagact

SEQ ID NO: 44495 - DNA, 607 bp, Setaria italica
  Peptide Sequence Number=SeqID_110469
ggttctttgagcgtcctgaaccccctagaagagagcgcagcttaccctggtgggatgatatgagaaactatattcatggcaaatttaacttgagttttactgagacagaatggcatctcccagcttcgacaaacccttatgaaaagatggatcaaatgctaatcacatctgattatatggaaatatgttatgtggatggttatgtcagtctatcttcgaagtatctaaaggcgtacataactagcttagagagtctagcaaagaagacaagtttagaaatcccacatcatccagctatacctttccttgaaacccctcctttttcatggatatttcaatacagtggggatgtgattcaggtaaccctatggatcattttatattttgctcttcctgctgaaggaaaaccgagggataaagtttttgatccattccgctcgacttctctgtcactgaaatggagtttttcacttaagccttcaactaccgaacccacagaacatcaacgaaagagtgatgtgtatacaaatgattctccgactgtgaatgtgggggctcatgatttggtctggctagcgaggtggtggaacttgcttttcttcctccc

SEQ ID NO: 44496 - DNA, 408 bp, Setaria italica
  Peptide Sequence Number=SeqID_110470
gtggtgtacttgttatgttcagagacacaaatttagaaattgtaaacatacgtaggtacatactacatatggttgtggctgactaatctcagaaaaagaagacagataaaactgccacataagggtggtgctaaattttcaagagcggtgctacaactaagtacacagagcttatatggcagccactgtttattccaatgtcatgatggcttttatatatataatttctgtatttaagtagatagagcattactcaattttcaaatctattcatgtaacagcttctctttgtctaaggtagccccccacaacttagtaataaaaatcctgcaacaactttggtacttaattcctgcagagtgatctactagctgatgttttttcccttatgtgtgtgcgcacgcgatt

SEQ ID NO: 44497 - DNA, 281 bp, Setaria italica
  Peptide Sequence Number=SeqID_110471
ggcggcggcggtgccaccgagggcggccgggccgaggaggtacaaggtgctcgtgccctggcgcttccagcgcggcttcgtcagggagccgctcaagcacgccgccgccgcagcgcccagcgacggcggcggggagaccgtcggcgacccggatgcggaaaactgcggatcgggtggggcgccgaacgccggcggtgagagcgtcagcgtccgggacgcggaaaattgcggatcgggtggggcgccgagcggcggcaagagcgggggagttggtggaggag

SEQ ID NO: 44498 - DNA, 282 bp, Setaria italica
  Peptide Sequence Number=SeqID_110472
gtcgtcgagtcgcgcacggcgcaggcacgccgcccgtaggagccctccaccacgaacgccgaggtgctggaggccacgggcgtgacgtgcgccagcgtcttgctggaggcgcggaggctgacgtggcgccggacggagaggagcggcttggatgatttgtgttccgcggcgtcgccgtcgtagatgacccagtgctccccgaggaggctgagcctcttgcggcggacggtgaggagcggcttccccgcgacgtccatgaggacgacctcggcgcggcggcgg

SEQ ID NO: 44499 - DNA, 261 bp, Setaria italica
  Peptide Sequence Number=SeqID_110473
caattattttgaactgattttcagaatccttatcgatttaggaaattgggatactcttgaagttaaagcaaaggagaaaggattggacacaaggcatgagcttattaaattctatgatgcacactactcagccaacttgatgcaacttgttgtgtatggaaaagatagtcttgataatttgcagaaccttgttgaaaataagttctgtgacattagagatgttgggaggaaaccattttcttttcctggtcatccatgtac

SEQ ID NO: 44500 - DNA, 3390 bp, Setaria italica
  Peptide Sequence Number=SeqID_110474
gtttcccactcctagagccgtgaagcgaccgggccacggccagccaacctgacccgcgcggccgcgccgctcaggtcgtcgtcagccccctcacttcttcccctcaaaatccaacagcggcgagccaagccaagccaaacccaacccggctgctctgctgccaagtgccaacttcctctccaagcctcgcgctcgcgtactctcaccggtgatccggcggcggctaggacgctgcgatggattcgaggccccgtgagactgacgcccccggcgacccggccaacggcgccgcccctccgccgccgacgggggacgtcgagatcaccaagccccgcaatgacaagcgcgggtaccgccgcgtggtgctccccaacgcgctcgagtgcctgctcatcagcgaccccgaaaccgacaaggcggcggcgtcgatgaatgtttcggtgggctacttctgcgatcccgatggtctggaggggctcgcgcacttcctcgagcatatgcttttctatgctagtgaaaaatatccagtagaagatagttactcaaagtacattgcagagcatggtggttcaaccaatgccttcacatcttccgaacacacaaacttttattttgatgtgaacagtgatagcctgcatgatgctttagataggtttgcacaattttttatcaagccattgatgtctccagatgctacccttagggaaataaaagctgttgactctgaaaatcagaaaaaccttttatcagatccttggcgaatgagtcagcttcagaagcatctttgcgcagataatcacccttatcataagttcagcactggaaattgggatactcttgaagttaaagcaaaggagaaaggattggacacaaggcatgagcttattaaattctatgatgcacactactcagccaacttgatgcaacttgttgtgtatggaaaagatagtcttgataatttgcagaaccttgttgaaaataagttctgtgacattagagatgttgggaggaaaccattttcttttcctggtcatccatgtacaagtgaacatctccagattcttgtcaaagcagttcccataaaacaaggtcacactttgagaatcctgtggccaatcactcccaatgttcggcattacaaagaaggcccttgcaagtatattagccatttaattggccatgaaggagaagggtctcttttttacatactgaaaaagttaggatgggctataagtttggaagctggcgaaggggattggagttatgatttttctttcttctctgttgttatacagctcacagatgaagggcaggagcacatggaggatactgttggactattattcagatatataacacttctgcagacatctgggactccaaagtggatcttcgatgagcttcaagctatctgtgagacaggattccactaccgagacaagagtcctcctatcaattatgttgtaaatatttcttcaaacatgcagatttttccaccagaagattggttgattgcatcatctgtgccatcaaaattttcaccagatgctattcagaatattttaaatgaattgactcctgagaatgtaagaatattctgggaatcgaaaaagttcgaagggcaaacgaacttaacagagccatggtatggtacatcgtattctgtcgaagttatccctccatccattatacagagatggatagagaaagcccctgaggaagatttacatctgccaaaacataacatcttcattccaagtgatctttcattaaaaagtgtagaggaaaagataagttttccttccatgctgaggaagacaccattctccagattgtggttcaagcctgatacaatgtttttcacacccaaagcttatatcaagatggattttcactgtccactgtcccaaagcttgcccgagtcagcagttcttactgatgtattcacaaggttgctaatggattatttgaatgactatgcttatgacgctcaagttgctggcctttattacgttgttaagccaaatgataccggttttcaggtaactatggtcggctacaatgacaaaatgaaaacccttttggagactgttattggcaagattgcacagtttgaagttaaggttgaccgtttttctgtgataaaggaagctatgacaaaggagtatgagaatttcaaatttcggcagccataccagcaagtcttatattattgttcgctgatactagatgaccaagcatggccatgggatgaggaattttctgcgctttctcaccttgaagctagtgatcttgagaaatttttgcctcatttgctagcaaagactttcatcgagtgttattttgcaggtaacattgaacccaatgaagcaaaaggtgtcatccagcatgttgaagatgtcttgttcaatgcacccattagcgtttgcaagccattatccccatcacagcatcttgcaaagagaattgtaaagcttgaaaagggtttgagatactattatccagcaatgtgctcaaataaccaagatgaaaattctgctcttctgcactatattcagactcatcaggataatgtcaaacaaaacgttctacttcagctacttgctcttgttggcaagcagccagctttccatcaattgcgatcagttgagcaacttggctacatagcgctgcttaggcaaagaaatgattcaggtgtccgtgggttgcaatttataatccagtcaactgcgaaggatcctgccaatctggatgctagagttgaaaattttcttaagatgtttgaagacatcctttaccagatgtctgatgcagaattcaagagtaatgtcagcgctcttattgatatgaaactggagaaataacaaaaatctacgcgaggaatcagcgttcttctggggagagattgctgaaggaaccctcaaatttgatagaaaagaagcagaggttgctgcactgagggagctcaagaaggaagagttgatagacttcttcaatgaccatgtgaaagtcaatgcaccacaaaagaaggtacttagcatacaagtgtacggtggtctccatactgcagagtaccaaacgatagtgcaaaatgctccaccaccacagtcgtgtgagataactgatatatacagcttcaagaggtcaaggcctttgtatgggtcgttcaggggaggtgttggtcagatgaagttataggtcaaccttttgttttgcaaaaatctaaaatataatatttgtataacactatagctgctttgttcttagaagaatgtttttcacttggactaggttggatggcatgtattttgaccgtttatttgattaaggacacctgactaattatgcctcactctgctaagattttgtgagttttcgcaccgaaaaaaa

SEQ ID NO: 44501 - DNA, 524 bp, Setaria italica
  Peptide Sequence Number=SeqID_110475
gatgcggcccaaatggctgctgttgaagccatgcaagaagcttcagcggcagagagtcttcttcgctgtttaagctcgtatgcggaggtgagctcgtcggcagaggagcaaaatccacaaccagccgtcgagcagttccttgctctgcatggagctctctcccgggccaccgtcgtcaccgagtcgctaaccaaggccaccgccacgtcctccaccgcgacgtcaccagaccgatcggcagccggcgacgcttccaccgccgacgaggagaccctggctgtcgccgcggagcgccgccgccgggcagcttcctgggtgggcgccgggctcgccaccgacctctcggcattctccctctataacctcaaaccagcccccgccaacgtcgtctccccgctcgccgtcgtgcttgtcgacgagtcagcgaagccagcggtggcggcggcgaaggcgtcgccgcccgcgaagtcgcgactgtcaccggcaaaggggaaggtgaggtcggcttccgcagccgccgccgc

SEQ ID NO: 44502 - DNA, 930 bp, Setaria italica
  Peptide Sequence Number=SeqID_110476
cgccgcacctgcattggagtggtcctcttttttaccccctgttcttcaaaataagtcaagccaccactcaaaaataatcaatgtatcgactcattctggtggtctgattagaagcagcctctcagagtttgatagaaagcttccatctgttctacaatccagggcagttccccagggaacgcctgcattcaatatgagatctgcagggggcatattccccttctgtgggccagaatggcgagagtccattttttaggggggctaaagatatcagttctaggaaaggagaggcaggttttagaaaagggattaaacctgttgatgatgcgctttctatgtttttgaacttgagttctgatgatacacctatgaaagactaccgaacaagtttgttgaagactgaggttaataaaaccactccttttcaaggaaaagattctgttggaaaaggagagtttcgctttggttcacgtgctgagaagcctttcatcttaaatggaactggtgttagtcaaaatggcctccctaaggtatctgggagtgctggttttcgtgaagattataaattaccaactgagaacattttgagcaacaagaaatcttcagttgatgaagcagcagccagcaaaggtgtgtcaaggtggagatccgacgagtctagtgaagatgaaggtgagagaagaacaaaccgggagagtggagattctcttgttactagaaggcgaccgagattttcaagaagatgatacatccacaggtattttaattgttcgtacgggaggatttcttttaattatctccacagtcgtcccccaatgtaagagtaatttgtttcgaggaaagagtattgtctcgtatgtttttttgcgaaaaatctgggtggtgacttgcaaaatttggattgccatgcccgggatgtagttcaagtgt

SEQ ID NO: 44503 - DNA, 875 bp, Setaria italica
  Peptide Sequence Number=SeqID_110477
caaagaaccccgcgctggagaagtacgacctgagctccatcaggatcgtgctctccggcgccgcgccgctgggaaaggagctcgtcgacgcgctccgcgcgcgcgtgccgcaggccatcttcgggcaggggtacgggatgacggaggccggtccggtgctgtccatgtgcccggcgttcgccagggagccgtcgccggccaagccggggtcgtgcggcacggtggtgcgcaacgcggagctcaaggtggtggacccggacacgggcctctcgctcggccgcaacctccccggcgagatctgcatccggggcccgcagatcatgaaagggtacctgaacgacccggaggccaccgcgaggaccgtcgacgtcgacggctggctccacaccggcgacatcgggtttgtcgacgacgacgacgaggtcttcatcgtcgaccgcgtcaaggagctcatcaagttcaagggattccaggtgccaccggccgagctcgaggcgctgctcctcgcccacccttccatcgccgacgcggccgtcgtcccgcaaaagaatgacgccgccggtgaggtcccggtcgccttcgtggtccgcgccgccgactccgacatcgccgaggatgccatcaaggagttcgtatccaagcaggtggtgttctacaagaggctgcacaaggtatacttcacccactccatccccaagtcggcgtcggggaaaatactgaggagagagctgcgggccaagctcgccgcagctgagacagcctgagcagttaggctcagagccttggcttgctacgtgcaattcatttggtagtggcatcgtggtaccattcagatagtttttgtgtgtgaccgtgaaacaacatgacgtaccgag

SEQ ID NO: 44504 - DNA, 526 bp, Setaria italica
  Peptide Sequence Number=SeqID_110478
ccactccaaccgcctctctctcgtgcgcccgcgcgtgtccctcgccactcgccagccgctcctcctcgccccttgtgcgtgcccggcgtcgctccctcgtgcgcctccggatccgcggctctcggagagagagaggcggtggctggtcgcttgcggtaggaggagaattcgctgcgggtcgtcgtcggcgcgatggtttccttcgagatgaacgaccgcaagaagattgggctaggcttgactggatttggagttctcttctcattccttgggatcattatgctgtttgacaagggattcctggcaatggggaatattctcttcgtttctggcgtcttactgaccattgggctgaagccaaccgtgcaattcttcaccaagcctaagaatcacaagggttcaatctctttcgggtttggctttttcctggtcctcattggatggcctgccttaggaatgatggtggagtcatacggtttcatcatgctcttcagcggtttctggccaactgctgctgtttacctgc

SEQ ID NO: 44505 - DNA, 597 bp, Setaria italica
  misc_feature (479)..(479): n is a, c, g, or t
  Peptide Sequence Number=SeqID_110479
tagacctaaatagactgtgaccatttccgtcttcagtttttgtaatttggctgcatgatcagtactatatatagtttgcagtaccgtgtacatgtggacatgcatcacatgcgttttacaacttgtgaagttgacgccagctaaaacagtcatgagaatataaatcctgtatggactgatcttgctttacttcttttgcatgcacagacataatctccaacagtaaacttgtgacattagggatctacataagactgcagcattacctgtcccttcttcaaaaagggcaccactgctagtcaacagtgcacgtgaatttgttcaactcaaacctcaaacgtactcagtcctgacctgtaaaaaatagttaaccagctggttgtgccttgcaagttacaagaagttacctgcatatattaaaatccgcctcctttgtgcattaacctgcatcagccagctgcatataattaaaaaaagtntatatactgccttcctttgtgaattaacataccagtcatgtgcatatgtacccacatgtgtaagcacagctgcacaacaatagtaactgttcagatatatacatagaataagagtaaa

SEQ ID NO: 44506 - DNA, 312 bp, Setaria italica
  Peptide Sequence Number=SeqID_110480
gttcttctcaatataaactgaatttatttttgcactaagctctgcagatctctcagatcccaacttcttttcttctgcacttgcagtgggttctcttccgcaaatgatcggtgcttcataatatcggcggaaatatgaagcgtcccccaaaacccctggatttgtgaaattcaccattgaatagaattcttccaaatcattctgcattggggtaccggacaagaggatgcgccgtttacaaggaagggcagccaacgccttattgtcagtgtctgatcatttttcagtcctgtgggcctcatcgcatatcag

SEQ ID NO: 44507 - DNA, 1804 bp, Setaria italica
  misc_feature (1353)..(1353): n is a, c, g, or t
  Peptide Sequence Number=SeqID_110481
tagtgggagattgggacacaaacaagagacagtgtctctcatcctaaatcatcgactctctttcctccataccggtgaaggctatcgcatttggggcaaagcacacctgtgcagtttcagtttcaggagaactttatgaatgggggtgaagggattcatagcctagggctgtggaatgatcagtgtcgaagaagccagtggttcccgcataaactgatcagtacttcagatggcatctctgtgtcgaagattgcatgtggtcagtggcatacggctatcatatcctccaccggtcagctgttcacttatggagatggtacatttggtgttcttggacatggtgacacatgttgtgttgctcagcctaaagaagtggagtccttgagagggttaagaaccaagtctgttgcatgtgggccgtggcacacagctgctattgtggaaacatcaggaactcccaagagcaatgctcctggtgggaagctattcacatggggtgatgcaggtgaagggaagctgggccatactgacaaaaaatcgaagcttgtaccaactcgtgtcgaaacactcgttgactgtgattttattcaggtatcctgtggtatgtcaataacagttgtgctaacaataacaggtgttgtatttaccatcggaagcaagaagcatggacaatcagggaatcctcgacctgaggacacatctatttgcatggttgaagggccacttaagactgagtttatcaaagatatatcctgcggcacttcccatgtcgcagtcttggcaatgaatgggaaagtctttacatggggcaaaggcacagaagggcaacttggtttaggtgattatgttgacaggacctccccaactctggtggaggccctggaagataaacaggtggaaagtataacttgttgttccaatttcactgttgtaatttgtgtgcataaggcaatctcgtgcaaggaacaatctgtatgcagtggttgccggttggcatttcggtttacaaggaagaaacacaactgctacaactgtggttccatgttctgcaattcctgcagcagcaacaaggttccaagggcagcccttgcaccagataagagcaaaaggtgtcgtgtttgtgatgcttgttttaatgagctgaataacactgcagagcacagcaaaatgagttctggatcaaagatccaaaaagaagaaacgtctttaacagaaataagaacatacacaccaaagttatcacgcatgcttaaggaagcaaatttcatcatggaaaaaatgggcacggcaaacaacaagaccccaaaccagagaaatcaggacttggccactctgaatcaagtgcaaaaaacngaggtggggacaagtagactgtcccaatcaattcaaaatgtgcacgagacagcattccataccggtcgacatcaaagaacagacagtcgatgtttgttgtatagggagaatgattgatccagtatcacaaaagactgctacccttttgccacaagccacaaatgataggagaaaagaacaagatttgatggaaaagatactgctggaggaagtgaaacagcttcaagcacaggtaaccactctagcagaagaatgccggcataagagcttaaaagttcagttgtataaacgagaacttgaggaaacctggttgatagtcagggatgaggccacaaagtgcaaagctgcgaaagatattataaagattttaacaaatcagaggaacgctttatcaaagaaacttttaggtggtctggaactagataattccagtatcatacctgacccgccc

SEQ ID NO: 44508 - DNA, 1586 bp, Setaria italica
  Peptide Sequence Number=SeqID_110482
attcggggtctcgtcttcgtgcggccccattcgcttcgtacctctcggcttctcggggcagcggcggcggcggcggcggcggcagagagcaggagggggatggcgcaccggctgctgcgggacgcgcaggcggacgggtgggagcggtcggacttccccatcatctgcgagtcatgcctcggggacaacccctacgtccggatgttaagggcagaatatgacaaggagtgcaaaatatgtgcacgtccatttactgtcttccgatggcgacctggtcgggatgcaaggtacaagaagacagagatctgccagacatgttgcaagctgaaaaatgtctgccaggtctgcctgctggatcttgaatatggtctaccagttcaggtcagggatacagcgctcgctatcaattcgaatgatgcaattccaaggagtgatgtcaatcgtgagtattttgcagaagagcatgatcgaagggccagagctggcatagactatgattcttcctatggaaaggcccaaccaaatgataccattctgaagcttcagagaacagcaccatattacaagaggaacagagcccatgtgtgcagtttctatgtgcgtggtgaatgtactagaggtgctgagtgcccatatcgacatgagatgcctgaaactggggagttatctcagcagaacatcaaagatcgttactatggagttaatgatccagttgcaatgaaacttttgagtaaggcaggtgagatgccatccctgacaccgccagatgatgagactataaggacactatacattggtggactcgatagcagagtaactgaacaggatttgagggatcagttttatgcccatggtgagatcgagtccataaggatggtgcttcagcgtgcatgtgcatttgtgacatacactacaagagaaggcgctgagaaggctgcagaggagcttgctaacaagctagtcatcaagggtgtgcgactgaaactcatgtggggcaagcctcaggctccaaagcccgaagaggatgagtctgggaggcaggggcaggtttcccatggaggactgctccctagggctgtcatatctcagcagcagagcggcgaccagcctcaaccccctgggatggagggccagcagcaaccaccagcatcatactactttaacattccagcaccaccagcagcagagcggactctgtacccatccatggatccccagaggatgggtgctgtagttaagtcacaggatggcgaaggcaaaccagggctgcagcctggacatgctcagccatcaagtagctcagcacagggcggctatcctgcaccaccaccatactaccatggtcagtatccgccatactatgctcctccaccatacgttggctacatgcctccacctcgcatgccctacccacccctgtacccaccataccagccgatgctagcaccaccagcacaagctcacgctagttcatctcagcaaccagcacaagcaggacagcagccgcctcatggccctccggctcagcagcagcagccggctcctggcccttcagcgcaacagcagccaactcagaactgaatcta

SEQ ID NO: 44509 - DNA, 417 bp, Setaria italica
  Peptide Sequence Number=SeqID_110483
acaagtatacctcgaaccaatgatgtacaaaacctttctttgtgggaccacccggcacctcaatttcctctcctatttatgctacttttgctaccacgctaatctgtaatcctatcaatccgctaaatctgtgaccgctactcctacctccaaactttgcaactcgtattaagttactccttctccgaattcaagtgccgcaaaccttgaagccaaccagacacacacaccctgggtaagaagtcagtacattctagatgcacaacccaatcgtacagagtcagtccatttctaagatcttgatgttgccgctggagttagcggaagaagagttgtagactgcctctccaacagacacatgaaatgaactgtgtcggatcatcaatctcctggcctgattattagggttcttgttct

SEQ ID NO: 44510 - DNA, 530 bp, Setaria italica
  Peptide Sequence Number=SeqID_110484
gacaccagcctcgtgatcagcctgtccatgtccttctcctgctccggcgtcaggtacttgaacggcgggaggtaccgaccgctggcatccttgatcagatacagcgggtccagtatgaatgccgccgaccacgccgggtggtagctcttcctgaacctcctctccagcacgtccatggcgatcccttcgtcgacgttgaacttgcggcaccagcctctgaccttgccacggaggtcttcccagagcgggaggcactgcccgacgagcggccgctcggtctccatctccttcaccatgtccgtgatcaacttcacgagcgaatgcgccgcctccacctcggcccagaacgccgcgctgtgcaccatgtcgacgatctcccgcgcagcagggtcgtcgatgcagaggagcttgaagggctcctcgaggacggagaactggagcggccgcgcagaggtcaggacgtcatcgagcatcgccaatgccgcgctggaattcgctgtcgcctgatggcggagcggcgacgcggagga

SEQ ID NO: 44511 - DNA, 283 bp, Setaria italica
  Peptide Sequence Number=SeqID_110485
ctcgcgcgcgcctcgcctcggccccggaggcgtagtattccccatcctcccccgtgcttatccgcggcggaatccaatcccctaccccacgtccttctgcccagcaaagggcgccaccgcttttggcgtattccacggctgccgcgcgcatgattcccgcggattcctctgcccatttgctcctgttcccctcgcagctgcagcgccgccgcggctagtccggtagcggggaaggaggaggaggaagggggggattggggttggggggcggcggagatgtcgt

SEQ ID NO: 44512 - DNA, 548 bp, Setaria italica
  Peptide Sequence Number=SeqID_110486
ctctcctctcgtctcctttcatcctccttctttaaagactcagcaagcttcttttttgtcaagaacaagatcatcagggacatcagttccccaagtggcaagccgtctctcttcatgttgtacaggctcctcttctgcagcctccttccgtgccatgtttgctttcatcaaatctgctgaagcttcagcagcctcaattccagccaaacctgtgcagtaactgttcttgatagtctgcttgcagcatttatagccccactgatgatccttccaccatgaaccccaaacactcgtgtggttattaatgtagacatcttcttcatacttgctcttaggaacagatgtatcctgccctttaattatacgaccagtccgatcatattcaatctctctctcgctttgtccaagaagaagctcccggggtagtggttcttcagaagcagcattcccatacttatccataattttctcctttgtttcagacttcaatttctctttcttaatcttgaaactcttgtacagttttgtaaacttctttgttactagtt

SEQ ID NO: 44513 - DNA, 526 bp, Setaria italica
  Peptide Sequence Number=SeqID_110487
taagttgttctggcaacaacagaatgtgtactctggagtcgacatacccccttgcagctttcctctttgctgatttagaagcatctattgcaaggcaattgcatgaaaatgcatcaagaaagagtagttgataataaagtgataacaatacataaaaataaacaaatgaagtgcaagattaatgtattgagaaattgcgacatacattttagcatcatcatatgatgtctgaaagcttgtcatgtgatcattaaaacaaattgtagctagcatatatattgtacatctggagatacacgtaagcttgcaaaaatacaagctcgggcaagtctaacagaaatatagtacagtaggtttgtttgacaatttcgctaagcttggttgctcgggttgcatttcgtcttctagtggagcgtacatatgtatctcattttaatcttgattatgatatttcttcttgtacttggctaagccatcagattctaccaatatacatttagtcttgtagtaacttgtaaggtaattt

SEQ ID NO: 44514 - DNA, 254 bp, Setaria italica
  Peptide Sequence Number=SeqID_110488
ctcgccgtcgccaccggcggcggtggctgccggcgactcagccgaggggtggcgtgcgcctccttcctcctcgacaagggatgcgcgtacatggtgttcgcgacgacggtggcggcgctgcaggcgtgcttcgtggggctcatcggcgtcgaggcgctgcagtggagcaagctctgcaacatctacacgcgcttctgcgagcaggccgccgcggggatgctctgcagcatgctcgccgccggcggcatggccgt

SEQ ID NO: 44515 - DNA, 466 bp, Setaria italica
  Peptide Sequence Number=SeqID_110489
gccatgcttatggtcgcggtgatggtgtacccgaccatggtgccccacaggttgacgtactgggcgatcccgcacatgaacacctctctgggactgaggtatgatctgacggcgtccatgtaggtgcggttcctgtcgccggtgacggggtgcggcgcgcggtaggcgttggcgagcagcgtggaggtgtagtaggtgacgcacgcgaagccggcgagcgcgaggggccccgcgacccagcccagctgcgccacgctccaggccagcgccagcacgccggagccgatcaccgccgtcacaatgtgcgccgtcgccgtccataccgtccctgtccgctcgtgaccctgctcgtagtcgcccctctcgacgtcgtctgctgccgccgcgctcttgtccatcgtcctccctgccgtcgcgttcgcgtcccgtgcgcgcgcccgcccgggtgtcccgtgaccgcgagaag

SEQ ID NO: 44516 - DNA, 268 bp, Setaria italica
  Peptide Sequence Number=SeqID_110490
ggtgaaacctgctttcgactatgatcatgaagaatcctatccccctggtcgtggaagaggccgtggtggtgggagaagaggcaggggaagaggtatgttctttcttgtgtcttttataagcagcaaagttccggtaatagtcattgtttcctgaacagtatctcatgttttagcatggtaaattatgatcacaccacgcttagtcttgtactccctccattccaaattgtaggtcgttttggcatatctagattcttagattttgtta

SEQ ID NO: 44517 - DNA, 639 bp, Setaria italica
  Peptide Sequence Number=SeqID_110491
ttcacggtctcatcttctaggtccaacgccagtgctcccatcggcccacttctttacggtctcatattcttctaggtttcctctaccgtctaccccgcttgccaagttgccaacgccgctgaggacagagcaatggtctcgaggtctaaactccgactccctcctccctctagatcccggatccgaaacgagtaaaggggagggagcttctcgtggatcccgagtcgccggatccaggaggagcgaaggagatgccgctcttcatgaacctcgatttttaatcgaagcttctgctcatagatctgaagagggatctgaagaacacaggcggggaagaggaagatggaagaaagggggcagattgccccggcagaggtgtcggtcgtgtcccagcagaacaatcagcccggaaaggcgtcggctgcaacagcaggcgaaggttccaggcctcagctgctgcacgccttcctcgatacccgccatacccgacgagtggcaagtctaaggaagcacatctacaagatgagaaagcctttgaagttaattacttttttttgttatggctgatattgaaattaggtcaataaaaactagatttgaggaagtccactctcgttcaagagtatatttgggttttga

SEQ ID NO: 44518 - DNA, 497 bp, Setaria italica
  Peptide Sequence Number=SeqID_110492
ggtggtaagatgcatgttgtcttctttcaacgccagacccattgcatccacagttacaacattgggcaggttaacactaaattgagcacttctcactcccacaatgttaggttcatgcctggaggttaaatccatctgaataaaaggcaactgcggcatctcaagatctgccctgacattggtgatgagcctctcgatgttcccgttgtaagccgccgttgcggcgtcggactccgcatcgctctccccctggtaccacagcacggcctcgatctcgccgtacccggccgcgacgcgcgcccggcacaccatctgctcgtacaggaactccccgcgagcccactcccggatggccgtcccgccgacggcgcacggcacgaggccgatgccggtccgggccccctttccgggattgtcctcctgcaggcacgggagcacggtgcgggcgaagaccatccccgggcccgacgccgcaggtcttggcggtgtcgatgtcg

SEQ ID NO: 44519 - DNA, 1117 bp, Setaria italica
  Peptide Sequence Number=SeqID_110493
tccttggctagttctcttttagtttttttttttttgcttgaaaacggcttttgcctttcccattcacttgaaactcaacgggtagcaattatcattacatagggagggaaacgttctgaacttaacttgaaatgttatacacttcatacaggactgacttcatacatgaatttgaggcttagggtgaattcccgaatataagatgccacaatgcctttgatcaagtgctcgagcacatgaccctcttgtaacgcagtgcccttgtcaaacatatttactgtggaaagaagatgggaacagcctaattgtattcacctaacaagttggtgttaagaagttctcaatgtaggcttctgcaagcattttaccaagctttacttgtgactcggtggtaagatgcatgttgtcttctttcaacgccagacccattgcatccacagttacaacattgggcaggttaacactaaattgagcacttctcactttgtcaatgttccttttatcaccggatgcaagagcaacctgttgacatcatatacaatcttgataaaattggtagcagatactgcaggtgatatctaggagcataaaggatgatttcttaatatgaaaagactgagatatcaactgtgaaatcaacttctgcattttatacttaaacaatacaagcaataatgtcaagcgtttaaatattataagtaccaagtaacatattactttaccagtcagaattaagagtttttctttattgatgacggatgaaacaaaatttgatggcacactacaaaatatggggaaaatcgtgtcttgatttaaaatgaccaggaaattattattttaaaaatattgaatagctactaaaatccagagatgaactctgacaccgtacaagctgcttggatcctgcacaactgatgtgcactgttgcatttttaccaatttcaatgttttgagtgaaattctattaagggtgccatccttttaagaggaattttatcaattttgctaataactattatgtggttgggaacaggttcacttgttattactccctcaactcacaaaaggcattggtacaacctcaaaacacgatattgactactaattcccagtttcc

SEQ ID NO: 44520 - DNA, 231 bp, Setaria italica
  Peptide Sequence Number=SeqID_110494
agtccattgcataacatcccattttatggtgatgttgccgtttggatctaaggaatcataagcctctgtggcgtccggtgcggagagcagcagcgccgcggcgagcagcacggcgccgcagcaacaggtgactggtctgcctcccgccgccattattctccctttcctttcctcactccgatctcgctccagactgctcagtttatagctgcgagctcggccacagggggt

SEQ ID NO: 44521 - DNA, 277 bp, Setaria italica
  Peptide Sequence Number=SeqID_110495
gtttgtccatttggatccaaggaatcataagcctctgtgccagtcggtgcggagaggagcagcgcggccgcgagcagcacggcggcgcagtacgctacggatctgccgcccgctgccatccttcctaccttcacttccttcccacccgcctcctcaccgacaccgcgggtctctcccaccgacagatacaagcgccgcgcccgtctgccccgccgatctcgctcctgacagcggcggcggttgcggccgcggcggggaggggggcgccgggaatggg

SEQ ID NO: 44522 - DNA, 520 bp, Setaria italica
  misc_feature (349)..(349): n is a, c, g, or t
  Peptide Sequence Number=SeqID_110496
gcaggagttataaatacatttaaccaggacccggcaaatggcaatctgcatgttgtatggagtgcctggaagtaaatcgacgatcgtgggatctttttgcagcagtgggagtgttgcccttgaacttcgaacagtcaccctgttcggtagtctgtgccccaaccatcgaccatatgacctccttctttgcccatgtccacccaagctgccacccaggtgccccaatgtgccggaattgttggtagttgaacattgtgacaacagcgacatatccatcaggagtccactgcataatatcccattttatagtgatgttgccatttggatccaaggaatcagcatcaaatcngttccactccccccattcatcctcgcatcccaccaaccatggccgccgcctccgactccgacgccggcgcccacccgcgtcgaggaccccagcctcctccccttcgcatccttctcgctctccctcaatatccgcgcgccgaccgcccccacactcgcctccatcccgtac

SEQ ID NO: 44523 - DNA, 2457 bp, Setaria italica
  Peptide Sequence Number=SeqID_110497
ttgaagttggtgatagtgattttcactctccagtattccttgtagttgagcttcacatgccagtggattcttatcgggcacatgtgggaagtgcattgtacaagaggctgaccagtccattttccagggccatcaattgcagattgtagattaggtgaatcctcactgtgaaaatgaaaccatactcattagacatttataaagacaaaatagaaccttagtatgaagtgtattaagagtaaaaagtacgtaaactcacttcacacagtttgacccatttggattttggcagccacaagagcatgttgggcagttcacaattgtgtcattgtaaaatgatgaaagagagacacagcaggatggagtcttttgagcaagaaattgggaatatgtgcaagtcacattccatgtcactgcagatagagaatgtctttattaagaaccatcaagtgaaataaaaacctctacaataaaattttggcagaacagcaacttgtatggaatcggaaactttcctacaactatctgcaattttaatttattattttgtgaagaacaaaaaaaagactacattttattgggcctagcagcagcttattgtccaaagatatcagttagcattccttctttgagaataaatccctcctgttaaaacgttttcatttttttactaatctggcaagtacttcttaatatatagatacgcagctctcctgcatgttcgagaaaaaaactaatctggcaagtaacgtaacctgaaattctgattaaggaataggaacgcgctgaacaatacgatgatttagctgtacctcatttccacaaagtacacaagcaactgatagcaagtaaaatgtagagtccaatagatgagcaacttactaagagcttgggttgccctgcgcccatccgaggtgaaaaactttgtcggcctgccaacaatggcacgcccacatgtgtacccaggacctggagtcttaagagtgaagttcttcggcaccttaacagtcttattggtagtcccagcaagacctacactaatctggaaggaggcagcagcatttgccgggtcctggttaaatgtatttataactcctgctttgcagcaattggcaatctgcatgttgtatggagtgcctggaagtaaatcgacgatcgtgggatctttttgcagcagtggggagtgttgcccttgaacttcgaacagtcaccctgttcggtagtctgtgccccaaccatcgaccatatgacctccttctttgcccatgtccacccaagctgccacccaggtgccccaatgtgccggaattgttggtagttgaacattgtgctacttacgacatatccatcaggagtccactgcataatatcccattttatagtgatgttgccatttggatccaaggaatcataagcctctgcaggagcaacaaagggtccacatcaaacacagatcccaattacagaagcaagaacaatgaattggcacagtagatgaagtctatgttacatcccattccaagttggaagatccacacacctaagtttgccactggatccctttaaagtgaactagaattaactaagatcttgactaatttgatcacttcttcaacagatctatcatcaaggtgctcagtatggagcagctcaggacaagattcagctgacagtggccctggttaagtggttagcctgagagggcagctccatctccatgtgtgctactctcccgatcccgagaagctaagccaacttaatttcgaatcataattggagcaaccgagaaagctcgaaggatcgagctgaattggagaacggtgggatcaaaattagaagacaccgacactgcactggagccaccgacactgaccgtaccagccaaacggggccgcatttgtcagcgcgcaacggacaccgggagcggaatcatcatcgcagctctccgagctcccgttgcatcagacgcgacggcgatcgggcgccggatctacctagctcgcgaattcgcggcacaagcaggacgacatacacagagaggaagaggaggagccgaggtgccgaacctgtgccagtcggtgcggagaggagcagcgcggccgcgagcagcacggcggcgcagtacgctacggatctgccgcccgctgccatccttcctaccttcacttccttcccacccgcctcctcaccgacaccgcgggtctctcccaccgacagatacaagcgccgcgcccgtctgccccgccgatctcgctcctgacagcggcggcggttgcggccgcgccggggagggggcgccggggaatgtggggaggtgggaagagaggcggagatctggggcggtggggagtgggacttaaagcatgtgcggcaggcagcggccgcgtcctcgtctcccctcccctgtttttactgcgacggcagccagcacgacacactctgctccgcagctactag

SEQ ID NO: 44524 - DNA, 470 bp, Setaria italica
  Peptide Sequence Number=SeqID_110498
aggaaacggagacaatccgtggaacctagcagtaacctgtcgtaaaaaaactcctcgtgaacctttgcccatttcagagcaatgcctcttgcattttcacttgtatacaacagtgctgtgacgccaattttctcgcaatcatgattaaaacttaaagaagggctactatggtttaccttgtaactaatttctacaattttagaagcaactgatggcaagcaaaatgtaaagtccaatagatgagcaacttactaagagcttgggttgccctgcgcccatccggggtgaaaaaccttgtcggcctgccaacaatggcacgcccacatgtgtacccaggacctggagtcttaagagtgaagttccttggcaccctaaggccttattggtagtcccagcaagacctacactaatctggaaggaggcagcagcatttgccgggtcctggttaaatgtatttataactcctgctt

SEQ ID NO: 44525 - DNA, 1768 bp, Setaria italica
  misc_feature (1617)..(1617): n is a, c, g, or t
  Peptide Sequence Number=SeqID_110499
agccacaagctcttatgacatggaatgtgacttgcacatattcccaatatcaacttgaagctcactaaacctcctgatcccactcatcatgcatatgccaacagagtagccaacacaacccagaatactaaaagtgggagggtcagcggttgttttgttagagggcttgcgttgggcaaccatggatagttttcaggagatggcatgacacagttgtcaccattgaagtacactcggcgtgggaaggcccatcccttttcgaaggtgaaagtctgggagtccttgcggagaagtagttctgattgcacattcccaagtttaccagcttgcatcagcaaatcattgtagaattttacaccccagaacatagccgtatcatttatgccactgccatatggggtaagtggtttgtagttgaagctgaacagctgagtgatattatcaaagtttggatgctgagcgactaagttccactgcgtgtaattcatgcggaagttgaagttggtgatagtgattttcactctccagtattccttgtagttgagcttcacatgccagtggattcttatcgggcacatgtgggaagtgcattgtacaagaggctgaccagtccattttccagggccatcaattgcagattgtagattaggtgaatcctcattcacacagtttgacccatttggattttggcagccacaagagcatgttgggcagttcacaattgtgtcattgtaaaatgatgaaagagagacacagcaggatggagtcttttgagcaagaaattgggaatatgtgcaagtcacattccatgtcataagagcttgggttgccctgcgcccatccgaggtgaaaaactttgtcggcctgccaacaatggcacgcccacatgtgtacccaggacctggagtcttaagagtgaagttcttcggcaccttaacagtcttattggtagtcccagcaagacctacactaatctggaaggaggcagcagcatttgccgggtcctggttaaatgtatttataactcctgctttgcagcaattggcaatctgcatgttgtatggagtgcctggaagtaaatcgacgatcgtgggatcttttttgcagcagtggggagtgttgcccttgaacttcgaacagtcaccctgttcggtagtctgtgccccaaccatcgaccatatgacctccttctttgcccatgtccacccaagctgccacccaggtgccccaatgtgccggaattgttggtagttgaacattgtgacaacagcgacatatccatcaggagtccactgcataatatcccattttatagtgatgttgccatttggatccaaggaatcataagcctctgtgccagtcggtgcggagaggagcagcgcggccgcgagcagcacggcggcgcagtacgctacggatctgccgcccgctgccatccttcctaccttcacttccttcccacccgcctcctcaccgacaccgcgggtctctcccaccgacacaccctctcggggggcgccgccggtgtcgctggcctcctcagcctccgccgccgtgcagccgcgccaccaccaccctctgcgctcgcctcctcgtcgcacctcccgggagggggcnccggggaatgtggggaggtgggaagagaggcggagatctggggcggtggggagtgggacttaaagcatgtgcggcaggcagcggccgcgtcctcgtctcccctccctgttttactgcgacggcagccagcacgacacactctgctccgcag

SEQ ID NO: 44526 - DNA, 948 bp, Setaria italica
  Peptide Sequence Number=SeqID_110500
attttacgtattcacagtcatagatcatcttaattgatgctgcaaattaacatgagcgccaattcatgattgcggtttgcagtttctgtagtaaataaacccagtgttgcaattattcttgttctgtgttcttgctcttttggttcagtgaaaatgaccattagtagatgttatctatttagctcaaaaagctcagtgagcagcaggaatgaattaagatgccagaacttagtgatctcaatcatcattgtcttttctgttcaacaaatcttacaaaacgaaaaccgcgcatttactacaagaagaggtcatataatccaatgaaaaattctgagtttgctataaaatacaaaaggtgcaactgtaattacctagtttgcagtaactaagtgttgtggggccagtatatacgaaacaagaaatacatttcggccctttaacttacaaaaacacacacacataaactttttttctctgcgtggtgtcatctcttctgtgcaaccatgtaattgaatgaacaaatgacccgttgcagtgcacctcatggaatctgacatcaacttgaagctcactaaacctcctgatcccactcatcatgcatatgccaacagagtagccaacacaacccagaatactaaaagtgggagggtcagcggttgttttgttagagggcttgcgttgggcaaccatggatagttttcaggagatggcatgacacagttgtcaccattgaagtacactcggcgtgggaaggcccatcccttttcgaaggtgaaagtctgggagtccttgcggagaagtagttctgattgcacattcccaagtttaccagcttgcatcagcaaatcattgtagaattttacaccccagaacatagccgtatcatctgaaaatgggacaagcaaacaacatcaggggaggaaaggagatttattttgattttttacg

SEQ ID NO: 44527 - DNA, 316 bp, Setaria italica
  Peptide Sequence Number=SeqID_110501
catgaaggggtacactaactgttcatgactattgaagtgtgtgttcagaaagttatctgatctatgtttcatgtgtgcaggctgttccacctgttattcacagagacttaaagtctgataatatacttttggaccattcaatgagggccaaggttgcacaatttatgatgtagtttttaagtattatcttgtcactttgaagtattgatcattcaactgctccatatgcacttttaagtatcatcctgtcagtttgttttaactgaaccaatactactcctgattagtataaagttgaatgattcaactcaacctg

SEQ ID NO: 44528 - DNA, 1415 bp, Setaria italica
  Peptide Sequence Number=SeqID_110502
ggttcggttcgtttgttcgttgtctcctggccatctggctgtaccgccggcgggccagcgtcgcggcccggacgcggtccctggagtcgccctcggcgacgctgcgggccgacggctcccgctgcgccagcctcgactccagcgtctccgtctcggtggtctccgagagcgtcgccgactggggccacccgccgacggccaagcgcgccgcgttctgggcctggagaggcggcgccggccacaacggcagggagccgccgcagctgaccgtttccgggatcccaaaatatcattacaaggatctgcagaaggctaccagcaactttaccacaattctggggcaaggatcgtttggtcctgtgtacaaggctgtaatggccaccggtgaagtggtagctgtaaaggttcttgcgagtgattcaaggcaaggggaaagagagttccagactgaggtagcattgcttagcaggttgcatcataggaaccttgttaatttggtcggatattgcgtcgaaaaaggtcagcgcattctgatttacgagtacatgagcaatgggagtttggcaagacttttgtatggtgacaataaacggagtttgagctggcaagaaaggctgcaaattgctcacgatatttctcatgggattgagtatctgcatgaaggggctgttccacctgttattcacagagacttaaagtctgataatatacttttggaccattcaatgagggccaaggttgcagactttggtctatcaaaggaggaagtttatgatggaaggaaatcgggtctcaagggcacctatggatatatggatcctgactacatgtccacaaataagttgacaaagaagagtgacgtgtatagttttggcattatactttttgaattgataacagccataaatccacaacaaggtctaatggattacattaatctggcagcaattggaggggagggaagggttgattgggatgagatactggacaaggacctcctagtagggaacatccctgaagaggttaggatgcttgctgatgttgcctaccgatgcgttaacaagagtccgaggaagcgcccttggatatcagaggtcacgcaggccatctcaaggctcaggcagcgccagctgacaaagcatgatgctctgactttgccaaggagcgagaccaggacagtcctgaggaggatagagtaccagcatgtcgagctgagcgacattaccagcatgaaagaactgacgccgataagggcatgagcttgttctagtatgtaggttccttgtagagttagattttaacttgatcaaaaagtaaatcaaaatgtaaaaagggttgaacttggttcgaggaagctgtagctgtttgatgaaagcatcaagtagttgaggtccttgaagatctcttggatgaaa

SEQ ID NO: 44529 - DNA, 488 bp, Setaria italica
  misc_feature (477)..(477): n is a, c, g, or t
  Peptide Sequence Number=SeqID_110503
aaacaaagtttaatagtttaacaaggaagaacaacaaaatcgcacatgtttgatagcttgatgcactacttgccgctcgaattgactgcataaccgagcttttgctgatgttgatgcactacttactgttgaatgtgttcaggcagtcatgctcatcattagataagatcttatcttgtaacgggctattcatgaaaaagtgggctcaatggtcccatatggtatgaacatgtcgagctgttttcagtcaccaggatagttatgggccaccatacatatgcttgttgcgtcctcctctggtccacaagttatgggaggcatcttgtttctttatcaaacattaaagtctgattttgtcacctccaaaaaatccctaccacgtgcttttggtttgcataattgtagagaagtagaagtctgtatttgtagctaaactagctatgcagtaaaattttcagcatttccaagctgctgatntgtatctgtaa

SEQ ID NO: 44530 - DNA, 1000 bp, Setaria italica
  Peptide Sequence Number=SeqID_110504
acttagatatattcttgtcacatgattggcctctgggcattactgagtatgggaactggcaggagctcattagggcgaagaaccactttgaagctgaggttaacaatagaacgctaggcagcaaacctgcagctgaattactgaacaaactaaaaccaccctactggttttcagcgcatttacactgcaggtttcctgccatcatccaacatggagagaatggacctacgacaaagtttcttgcccttgataagtgctttcgtgggcgcaattttctgcaggttatagacattccatccaatccaggaccatatgaaatccactatgatgaagaatggcttgcaataacccgaaggttcaatagcgttttccccttaactcgaaggcgatttaccatgagggatgagcagcttgacactcaagatgaccgacaatgggttcggagcaagttgaacactagggggtttaagccatttgattttgtccagaccgcaccagctttcaatccttccaatccagtctccaattcctccgttataggaagttgcaggaatccgcaaactgagtcttttctccagcttctggaactcccatatctgctggattcatctaactctgaaggggttgaaagaaacgagtcaagctctcagccaggaaacacgcttggtgatgaagatatagaactaccagatgaagatgaggatgccgcagacgatgatgagtgagacggagtagttgtagaagttccatcgcaccatccagttgcaggttttgccttgatggatggctttgtctctgtagagagaggaactaaaatgtacttgattgtagtgacatagctgcttgtttatgggagaatgtctgtggactcactggctagggctaagcacaatgcaaactttcttcggtgttaaattgttggtgtccttcaaactacatccactagtcaacaggtgtgtttggtggaaatgttaaccaatgacatctactagcaaaattg

SEQ ID NO: 44531 - DNA, 249 bp, Setaria italica
  Peptide Sequence Number=SeqID_110505
tttttttttttttttaagctaagaaacttttgctgaattttgcatttgcatgttgaaatcatcaaccttcacttcacatatgtatagcctttgtaatatagaattcgtctgtgtttaaacctgaatttgttctattttgttgcgtttatggcctctctatatacacacgaacttggaatacgccctcagatgacatcgtcacctcttggccgatggcggcgtcctgccgtcccctcccttcttggcggc

SEQ ID NO: 44532 - DNA, 523 bp, Setaria italica
  Peptide Sequence Number=SeqID_110506
gtcttgtagaggttgatggtgccgacgaggttgttgtcgtagtacatgtccgggtgcgcgacgctctcccccacggccttcagcccggcgaagtggatgacggcgtcgtacctcctggccgcgaacaccttctccaggtcatcgatgttcctcagatccccgaggacgaagtcgaggcgggcggagagcgcgggtccggcgatgaggcggacccggtcgagcgcctcggggacggagttgtggaagttgtcgacgacggtgacgccgtagccccgctccagcaggcgcagcaccgtgtgcgtgccgatgaaccccgcgccgcccgtcaccagcacgctcctcttgtccccgaccgcgccgccgcctgcccctcccccgccgccgttgccggcctccgccccgccgatcgccatggggccgatcgatcgatcgatctgtgctctgggtatgtatgtgcggcgccgcctctgccccgcgcgtggcgtgaggttcggtgttgctgcacctgcacttgcactggcgg

SEQ ID NO: 44533 - DNA, 520 bp, Setaria italica
  Peptide Sequence Number=SeqID_110507
ttgttgtttggtacgtacctgtcttggttttgcaatgcactttaactcccatggtccgtgctgtgttttgctgatttattatgtgatgtgcatcaggagaagaagccctacccatgacaaggctgccgagctcaaggctcacgctgagaatggcgagggcagtggtgagaacaatgtggctgccgagaaacccaaggcagatgacaccgaggggggccaggaggtggatcagccggcaaagagactccgccgcaaggttgatgatgaggatgaggcgtgcgacgaggaagatttagatggaagagcccatttcttctctgtaaatggcagatgtgtgcgtcttgctagcttgtcacttgtttggagaggaggggactgggattgtagtcagtagcatcattagtgaagatggcgttttcattttggtagcttgcagtcggtgatttgatcctgggagttgaagggcggtggtagctaatggggctaaatgaatgaatcatgatgcactctatctagtgct

SEQ ID NO: 44534 - DNA, 966 bp, Setaria italica
  Peptide Sequence Number=SeqID_110508
acttaggacggaccaaggacctactcctctctaccaatactaccaaaccaaagacaaccttacaagacaagaatacccaaagtaccttggcggccaggcctctcctctctccatctccaaccaagcaccttcagcagatcccaagtccatggcggggggcaacaagtccaccggcaacgccgcgcgcagcaggaagcgcgtcgaggccaccatcctcaagcgctccagggacggcagcgcgttcaccagatgcgaggcctgcaacaaggacgtccccgtcgtcctcatcgacatgcacagctgcagcctcgacgccaagatcagggagacgctcgaggcgcaggtggtagagaggaccgtcgaggtcaccaagcccgctgaccgcaagaagcctgccaaggccggagccgccaacaaggacggcaagcgcaagcgcacgcccaccgccttcttcctcttcatggacgacttcaggaaggagttcaaggctgccaatcctgacaacaagaatgtcgccactgttgcaaaggaaggaggggagaggtggaagtccatgaccgacgaagagaagaagccctaccatgacaaggctgccgagctcaaggctcacgctgagaatggcgagggcagtggtgagaacaatgtggctgccgagaaacccaaggcagatgacaccgaggggggccaggaggtggatcagccggcaaagagactccgccgcaaggttgatgatgaggatgaggcgtgcgacgaggaagatgaggatgagaagaatgtgttggacgacgacctggatgatgacatgtagatggaagagcccatttcttctctgtaaatggcagatgtgtgcgtcttgctagcttgtcacttgtttggagaggaggggactgggattgtagtcagtatagtctattctatttagttgttaagttattttggtttcgtttttttcttttatttttttta

SEQ ID NO: 44535 - DNA, 260 bp, Setaria italica
  misc_feature (255)..(255): n is a, c, g, or t
  Peptide Sequence Number=SeqID_110509
agcccaatcattctgaggtgctgacaagaaagaggaagagaggcactgaagggaggttgtcagcaaagaggcgaagttaccaggaagtctaaatcattgcctgcatattgccaagaaaatgtacctagcaaagaacctaaaaaagccatccacaaaaagactggaaaggacccttctattgtggtgaagcataaagttggtcatgaaagatcgacaatagatgaaaacatcaatgagccaagtgggactaaaagngaagg

SEQ ID NO: 44536 - DNA, 1080 bp, Setaria italica
  Peptide Sequence Number=SeqID_110510
agaagcaactcgatcttgacctgcagctgcaggtagcagcaggacgagactggttctttagagctgcggccatggcgatgaattcgctgagcatggtggaggcgaggctgccgccggggttcaggttccatccgcgggacgacgagctcgtgctggactacctggccaagaagctcggcggcggcggcgacgggggcgcggcggtggtgagcatctacggctgccccacgatggtcgacgtcgatctgaacaagtgcgagccctgggaccttccagatattgcgtgcattggtggaaaagagtggtatttctatagccttagagatagaaagtatgccaccggccagcgaacaaatagagcaactgattcaggctactggaaggctaccgggaaagaccgtccaataagccggaaagggttgcttgttggtatgcgcaaaacccttgtgttttatcaaggtagagccccaaagggaaagaagaccgagtgggttatgcatgaatttcgcatggaagggcaaggtgatccaatgaagttacctttcaaggaggactgggtcttgtgtagggttttctacaagagtagggcaacaattgcaaagccgcccacagagagtagcagctacaatattgacgccgccacaacttcactgccacccctcattgacaactacaatatttcctttgaccagcctggctcagtgcaaaacctagagggttatgagcaagtgccctgcttctccaataacccctctcatcagccatcgtcatcgatgaacgctccgctgtcgtcatcagccatggctgatcaggcggagcagcacatggccgggaagtcaatcaaggatgtgctcatgagccagttcagcaggttcgaaggcaacgtagtgaagagggagacgcctcaaagtaatttctcccaggatgggtttgagtacttagctgagagtggcttcacgcagatgtggaactcgttcagttaattattggttttataggaagattattgcgatggaggatgatacggaattaattccacgtccgaaacaaggaggatgagaaaagactaaagattacttg

SEQ ID NO: 44537 - DNA, 348 bp, Setaria italica
  misc_feature (1)..(23): n is a, c, g, or t
  Peptide Sequence Number=SeqID_110511
nnnnnnnnnnnnnnnnnnnnnnnaacttaacaaacgaaaaaataaccttacgttagacaaaacaaatcccctgttacaatcttttttagatgattgtaacagggattgtcctagcaacgaaggattttcgtgagaatttacaaccgaagggaacagaaactggcatctttaatccctattacagtcctggagtactctttgatccttaattggcatcttctgctaccttcacatttgtacaaactgaagtgactttatttaggtgtgaatcgtatcactgtcgatcacactagctcgcatggaaactacctatacgtgcacgatcaattgcatcacgccgctgcccgg

SEQ ID NO: 44538 - DNA, 318 bp, Setaria italica
  Peptide Sequence Number=SeqID_110512
tttttttttttttttagttaggatatttggtgttcgatcaaccacttttcttgtaatattggttgcaaacagagatattaatgtgatttaaatatccattccatccgcaggtccaacaaaactttcagctccattctacaaccacaaccattttagagaattttttataaatcccaaagaaatgccaagttgccaactgagtcgtgcgacaagaggcgtgtaccacagcgccgcaaaagaaagatctccagctacacaatccacaggaatagtgtcatggtgccccctctgacaaaaaccctgggctcagcacatggg

SEQ ID NO: 44539 - DNA, 2373 bp, Setaria italica
  Peptide Sequence Number=SeqID_110513
ggaaccttaacaaatatcataagactcacccttagttaaccctatatatgatatacctactgatatttacaaaacttacattcccataggtctgtcttatacatccatcttcattattccttaaccccggtagggctttcactaagcctttttaggcagactactagacacacattaattgactgtcatcttctttaaaccaaactaaagacacattatcaaacctttttttcccttcatttctgcaaacctatgttacatcaattcttcctcaaaatgcatgagaagaaagaactgacgccagcaaccaatctgttgcgtcatcaagacaagctagccatcacgtttcaatgtttcagctacaaccatcttccgcccccagcaaaacgagatgcttcatcatcaatagtgaaaggctccaaataaaagtccaccttccatccctgccctcccttctaaaaatcggtcttcacatcctgctccaagaaaggatccatgtcgctctcatcttcaatgggatggatcacaatcttcctcaccgtctggcaaaacttaagccaaggaacatcgccgacttccatcgtgtcaccctcatcattcgtgaaagccaccttccatttctctttggagctcagatcttttatctcgaacatctcatcaagctcgctgatcaactgcggatacccatgcaggttcactaaatctatagctcttcccacagcatttccttgcatttgaaccttaattcgagttcttccagtgcaattctgatggctttggatttctcgggggctttcgttcacattctgtgtatgatctttagtgactttagagagtgctgataattgaccagagtcttccaaagaaccagcagttcgggtcgatatctccctaactcctacagtcatcttttcactagtagcagcgttccttgtatggttaatcaaattgacaccaaacagacgaaacatgccgggttccttcttttcttcaacagcattggaaaaatttggagcaacctcctcggtctggtagctgcacagagcagtgttggaagacaacttggaagagggttcctcagcttgataagcagaaagcccaggccaaggaggaaccctcgcgtcattactggtaacctgaaacagcttctgagaaatctctgacaaggaaggggaggcccccttgcttgaggagttgaagtccttgaaccaattccctagtactacagaattctgacaaactgaactactcatggcactgtatcctgcacgttcacttgtccaaacaacttgatgtccagagatacaattgggttcactggagccaatacctgccttctcatgctgttcaggcattccagagagccaaaattcttgagtaggttccattgcctgaatatccaggctttcagctgtctccctgggccttttgttttttgttgattgttgcacaggtatgtttatggtaggtgtagaggcatcgaatggctcgatttcccatgaggaaaccctctcagggccattcaaatttgtggcttcatcccattggaccttcaatgttttccattcagaaccttgccattgtggagaaagatctcctttatcaactacagttccagaaaacttcttcacagggacgtcttccccttcaaaactcatcttaaacctcatgcccacattaaacccgattttactagcttcaaggtacttgttcagactgacgatgtattggctttggcttaaccttggcctataatacactaggaaaatggaattagtcttaatagcatgtgatgcgcttgcaagcaccccaagatgcatgctttggctcgatataacagatgctggcattgcgctctgcttctgcacaaggcgtctcactccgacgcgctgctgtcctgtctcactcctcaggtagacgaacgcatcacccgcaatcagcttctttgatgtgacaaaagtactccatccagtagtcagaaggtgccgacggggttggcccctgtagatgtgcttgaacctccattcagatccatgtaggtccttcgtgatgagctcttgggtcggggtcggcatcgacatatccagtggcgggaggcattcgtttgcgtggcgtcggagaacagagaaaccgccatgggtgctggtgtcggatggtgtgagaatcttgcagaaggagtgcaccactggcctcggcgtctccggcaggggagggtcaggtaatgtgggcagattcacctgatccgggtcgggctgcagagtgatctgggcgaacatctcgtccgtttccgtctcggccttgagctcgacgttgacgaccttgcagaggatcttgttggcacctggaacatcttgatctgctcggccagcagcg

SEQ ID NO: 44540 - DNA, 265 bp, Setaria italica
  Peptide Sequence Number=SeqID_110514
acgacctttagtcagccgccgcctgtcctcccctgacgccgccggcgccgcacaagcctaactagcaaggccggagccatggcgagcccgggacggatcgaactggacaagctgagcgtggagcagctcaaggggctcaaggagcagacggatctggaggtcaacctcctccaggacagcctcaccaagatccgcaccgccatcacccgcctcgagaacgcctccgccgctctgcaggacctatctctccgccccaaggaagaag

SEQ ID NO: 44541 - DNA, 476 bp, Setaria italica
  Peptide Sequence Number=SeqID_110515
ttgaatcggcacacttgagtgccaaccttccgatatcctcaaggacagtgatatccccttcaacagttatgtccttgtgaaacattgccttcccactgttatcttccttgtaagcattggcgaactggaggataatgtcaagattctcctcgccgtacctcttcttccttccaatgagtttcaagagaagaaagccgaattcatacacatctcattgggcttttgacaagacaaatacacattatcaaattgtctgtcgttgacaggaagtcccgtttgctgggccagcctccatacccatgaaaagcttgtgagcttgggcatgaaattatcatccacaagtaaattgcgtggttcaacagaatcatgtgcggtgatacccattgctgatgaatggaggtattctaatgcacctgcagtctcaactgcaatcttcatgcgcagatctagtggaaatcttcatcgccactcaggta

SEQ ID NO: 44542 - DNA, 759 bp, Setaria italica
  Peptide Sequence Number=SeqID_110516
ccaaaaagagaaacaaaaactgagtacagtacgttgtatgagtatttgtttctctttttggtccataattgcatttggtatttgtcaacaaaagttggttaagttcagacttaatatattacaatcgtatacccactttgaacatttgagtcatcacctacaaccacctccaactttatacaatggagctatactctatcttcaatcaaatcaatttaaaatggttatctaaagtacaatacataatgctgttgttgcttcattatgtgtttacaataattatagctccctgtttttctgcagcaccgaacaccacatgccctgcaaaatctccaaatacagtatgccctacaaaagctcttgaagttgaggacccaagctggcttgttgacaacaatagactaaggtctttagcggaactgaaagagatcaaagatgctctgagagatcctgagctgcagaaaatgatacttaaaatcgatgggtcttcagaaccagaaaaggtaagtcttcatagttcattcacttgtaaaaattgctaagtttgaaatgtgttggctgcccaaatagcacttgacatacctatcatagtgcatctgattcaaaacaaaacactcaggatgaatatgggtgtaggattctttcctttttccatcagaacagtatacatcagctctatttctcattcttcaccatgactttgatatctatatgaatggttgagaaatccaaataggccatgctactcacatatatttc

SEQ ID NO: 44543 - DNA, 1111 bp, Setaria italica
  misc_feature (1100)..(1100): n is a, c, g, or t
  Peptide Sequence Number=SeqID_110517
ccagtgcgtgacggtgtgagcgagagcactggctactttgataccccgccgccggtcgagcccagtcaacacactacagcggcggccgtcaccatcccttctccgccgcggcagccacctcacctgcggcacggtggtgctggtcgccgcttcccctggggtacaagctcttgcggagtttggtcaggagatgggaggcgggagctgcagcgtctgcaaggaggcgccgtcaaagtacaagtgcccctcgtgccgcacgccctattgctctgtcacatgctttaaaaagcacaaagaggaatcttgccaaaagatattgcttcaggaagatgttagcaagtcaccactgcaggaggaagttacacggagctctgggttggtgggagatggaacaaagtgccctaatgacaaggatcaacatccctctttatcaccgaacaccacatgccctgcaaaatctccaaatacagtatgccctacaaaagctcttgaagttgaggacccaagctggcttgttgacaacaatagactaaggtctttagcggaactgaaagagatcaaagatgctctgagagatcctgagctgcagaaaatgatacttaaaatcgatgggtcttcagaaccagaaaaggaattggagaaagtgatggaaggtcaagcttttcgccagttcaccgataagattcttgacattgtcagtccacaagaatgatcacctatcctgtttggtggaactctgatgcaggagaaaatagaggcatccgggcaaacaaggaaaagcagagcagctcatctctgtttttcagttccaggatggggttacctggtgtctggtgaaaggaatttatggttactgcaaaaaatctcagttaccaaagatatttcctagttggtagcatcctgcatttcggttcagcggcttatccgagatagtgtcgtatggacaacaactccatactgattgtctgactctgtggaaaggatgctgggaaaaaaatataggtggatgatgcttccgttgaccgatttaggcgaccgtatttctcatgcgtgctcttgacagatgtgagctaagtggaacgatcaatgcgtgagaaagntcttgcgtaat

SEQ ID NO: 44544 - DNA, 257 bp, Setaria italica
  Peptide Sequence Number=SeqID_110518
ttttgtgcatcgcttgtagagaagttactgagcttccagagggtatcggagacctgaggtatctccagacactggatataggggggagtggaattagaaattgccaccgtccataggccgtttgcaaaaattggtgcgtcttcttgtatccaatactgtaaagttgcctgatgaggttggagatctacaagccttgcaggagttgacgactatatatcagtactccataaaattggtggaagcgcttagacacttcg

SEQ ID NO: 44545 - DNA, 348 bp, Setaria italica
  Peptide Sequence Number=SeqID_110519
aacaaagggaactaacaaagaacctttaagtaaccttaagaagttagaatagaaagacaaatcaatagctacctccccttcagccttgcggcatagagcagtaagcagagtgttgtacgacacgatatccgggtaacagcccctggacaccatcagatccacgaacgccattgctttatccatcttcttttgcttgcagaacacatgaagaagtgggttataactcaatgaattaggcgtgcatccatacttggggatctgctcaagaacttccattgcgggctcaaccaatcctctacggcacaagaaactgatgagcatattaaatgttaccacgttcggagggca

SEQ ID NO: 44546 - DNA, 617 bp, Setaria italica
  Peptide Sequence Number=SeqID_110520
tccaaatggaacaagggttgccacttgtaccaaaatcactggccttcaatagagttaaatgtgcagtttcaaaaggcatcaagttgggcccgacatttttggttactagtctgacaggtgggtccattgtggggggacatggcaccatatcaagcttttgccataggtggacttggtagtgtcaggggctatggtgagggcgcggttggttccggaagactatgtctagttgctaactgtgaatatacgattcccttggcgaagcatcttgagggctctatttttatggactgtggcagtgacttgggatctgctcgtcatgttcctggcaatccagctctacggcaggggaaaccaggatttggtgctggatttggatatggacttcacttcaacacggacctaggtcagatccgcgttgactatgctatgaatgcattcaatcgcaaaaccatctactttggcatcaacactagtggtggctcgtaggttatgagaaacaaatctctctcacttaacatagacttgcaattaaaattgattcttgacatagaagggttcccccagtttctttcttgaggtgcgttccggcatgccagcagaatcatcttgtttgt

SEQ ID NO: 44547 - DNA, 511 bp, Setaria italica
  Peptide Sequence Number=SeqID_110521
tcgcgcggcctcaagaggaagcttttcgcggctcgattggtagatagggacgccatggagctgcttcctctgcttcttgcctgctccctcctgttcacggtcgcaactcctgcccgggacatccccagcgtctgcgcttcgcaaatcagcggtacgtataaatcaccactaagattgattgtcatggtaattaccgtaactctctgtaagtgactttgcaccattgtattagatgaactgcctgcttccagctgtagtaaattgagaggtagaactagattttaccataagttatatacggtccatggtacgttgagattgcagatagtgcttctgaacatcgacgacagtagtttaagagatgcgaaaccaagttttgttcttcatttgattaagtataaagatgcatatctagttctctgcaataacatgtttttatttacttagagcattcacaaggactatatactgatatacagtaagtagtcttcttcatcttcaatgattaagt

SEQ ID NO: 44548 - DNA, 500 bp, Setaria italica
  Peptide Sequence Number=SeqID_110522
caacgcgcggcctcaagaggaagctttcgcggctcgattggtagatagggacgccatggagctgcttcctctgcttcttgcctgctccctcctgttcacggtcgcaactcctgcccgggacatccccagcgtctgcgcttcgcaaatcagcgatttcccgcaccggaacagctccggcctccacctgacgctgcaccacccgcagagcgcctgctcaccggcgccgctaccctccgacctccccttctccaccgtcctcacccacgacgatgcgcgcgctgcccacctcgcctcccgcctcgacaccaataatgacgcgccgccccgccgcccgacgtcgctccgcagcaagaagaaggccgccggccacctcgacgactccctggcctccgtgccgctctcgccgggcgcgtccataggcgtggggaactacgtcacccagctgggcctcggcacgccggccacttcctacgccatggtacgtacgaacaacggggtac

SEQ ID NO: 44549 - DNA, 1969 bp, Setaria italica
  Peptide Sequence Number=SeqID_110523
cacccccaccgcccccatctcctccgcctccggcaaccgcaaccacaagctgggccacgtcgaggacgccgcggtactgcctttcctcttcgacgagcagtacaacaccttccacaggttcggctacgcatccgacccctccggcctccacatcgtcggcgacgcgcagtcgcaggcgcccgagcccgacaccgtctacaacctcgccccctccgagcacaagcgccgccgcctcctggccaaggcggacaaccaggaggaaccactgcccccggatgccagaaatccggcctccgaggagtggatcctccacaacaagcagagcccctgggctggcaagaaggaagcgccgcccgcggagctcactgaagagcagaagcagtatgccgaggcgcacgcggccaagaaggcagagaaggaggctcgcggtgaagggaagggcgagagggcagaggtggtggtcaagagcaccttccacgggaaggaggagagagactaccaggggaggtcctggatcacaccacccaaggatgccaaggccagcaacgaccactgctacatccctaagaggtgtgtgcatgagtgggtcggccacaccaaaggggtttcagccatcagatttttccccaagtatgggcatctcttactgtctgcgagtatggattgtaagattaagatctgggatgtgctcgggtcgcggacatgtatgcgcacatatatgggtcactcaaaggcagtgagggatatttcgttctccaatgatgggaccaaattcttgagtgctgggtatgacaggaacatacagtactgggatactgagacagggcaggtgatctcgaccttctcaaccgggaaggtcccatatgttgtgaagctgaatcctgatgaggataagcagcatattctccttgccggaatgagcgacaagaagattgtgcaatgggatatgaaatcagggcagataacacaagagtacgatcagcatttaggggctgtgaacaccataacatttgtcgataataacaggaggtttgtgacatcgagtgatgacaagtctcttcgtgtttgggagtttggcatccctgtggtgattaagtatatcagtgagccgcacatgcactcaatgccatcaattgcgctgcacccaaactctaactggctggcagcacagagcttggacaatcaaatactgatatacagcaccaaggagaggttccaactcaataagaagaagcgatttgctggccacattgtagcaggttatgcttgtcaggtgaacttctcacctgatgggagatttgtgatgtcaggtgacggtgaaggtagctgctggttctgggattggaaaagctgcaggaggtttaagacattgaagtgccacaatggggtctgcattggatgtgagtggcatccgttggaaactagcaaggttgcaacatgtggatgggatggtgtaattaaatactgggattgagcctcgggacacaaaatgtgcttgagaattgagatgctgggaaggatttcataccaatgcaatcctcaagggctgaacttcatgatatactgtaagttgacatgtgggaagaaaaaagagaaggaaatgtcatgtttttcagctgctgtctagttaattgtgcccttgcaaggatgtaatgtaccatacgtgtggcagcaactcaattttgaactgtaccttggctgctagtaacttgtttccatttccccttcatcttgtcgaatctacctttttgtagtacctgaggagcaggcttgtatactttaaatgagtattgatacacttgggaggtgtttcccccttgggttgcgcagttcgtgtgctgtgttcatattaggttttggacatctcaataatcatggtagattggaaattaaatgttctgttccttaggttgaactttgaagtgaattcatcagactttcattttgcaacatggagagatgcattcaa

SEQ ID NO: 44550 - DNA, 477 bp, Setaria italica
  misc_feature (65)..(65): n is a, c, g, or t
  Peptide Sequence Number=SeqID_110524
actctttagtaatatggtggcttacagaatgcttgtagttgaagagctttacaaggaagcagttnttgggaccaaccggaattaataatattcaatggagaactagatcgaataagaagtggatgtatccttttctgtatatacgaagattctctaatgcattagttaatggttgctgtctatgttaaccacattgttctacattgtccattatgggaacatcttgcattgagaagcacctttctcaacagaagacatcttatgctgactacactaaaaagtgtatgcttgtgaactctaattccttgactagcaaagactatccatcattcttctacccgaagcttgctgagctttccaaaacatttctcccaaacctggacacagtttactatattcacaatttcaagggagtcaaagggggaacacttttcaggtttgcattctaatcctacgcctgttccaatgagttctcaa

SEQ ID NO: 44551 - DNA, 468 bp, Setaria italica
  misc_feature (441)..(441): n is a, c, g, or t
  Peptide Sequence Number=SeqID_110525
tagaacgaaggaggaaatgagatgactggaagcatgcttctcattagagaattttgtgatcgctttgtacctgcagagaaagctactcgaaccagagtattctttcctgaggcaaatgaggtttcttttgcaagacaatcagcctttgaaggatgtttactgaagctagattatctaacgaaaccatccttatttgaagattttggttttacaacaaaagtcaaaatggcagaccgtgtcaaaccagaagacgagacattccttgtggcttatccttacttcaatgtcaatgaaatgcttgtagttgaagagctttacaaggaagcagttgttgggaccaaccggaaattaataatattcaatggagaactagatcgaataagaagtggatactatccatcattcttctaccccgaagccttgctgagctttccaaaaacntttctcccaaacctggacacagtttac

SEQ ID NO: 44552 - DNA, 173 bp, Setaria italica
  Peptide Sequence Number=SeqID_110526
cggcaataatcaactagtcagcaccatccattctcttagtgcagactagttgattattgccgctattcaaaagatgcccatggatcactgtgctttgtttagggagattgaaaactacagaaaacatcatcctgagacacgcaacaggggatacaaggcacacaggggatagg

SEQ ID NO: 44553 - DNA, 1753 bp, Setaria italica
  misc_feature (1630)..(1753): n is a, c, g, or t
  Peptide Sequence Number=SeqID_110527
aacataattcattttagacttaagcacctgaactagaaaatgttgaagtgaccttaatgcccttcgcttattacacattgcataagatacctcatgagaggtgatatcattcagttagaaaggcataagggtaaaactaattttagacaggtgcctggaagctctatggtgatttacattaaagaatatggaagtctaaaatgacttatattgatttggagggagtactttggtttacttcaggtggaaatgctctagtttgtttctattcttgcttttaggtgatgacgaaggaggaaatgagatgactggaagcatgcttctcattagagaattttgtgatcgctttgtacctgcagagaaagctactcgaaccagagtagtatgtccttatctggaatactggattttttagtcattaatgtgcatatttgcgaatgattactgcattgtttagaaatgccgaaatagcaaaagagcagagttatgcatggtttgcccttggcaacttttatgagagatagtgcaagtatatgtactagttatgccccagcctttatcaactgaaaagtgaaaacccctggttgactccattgttcctatctcacgtgtttcagttctttcctgaggcaaatgaggtttcttttgcaagacaatcagcctttgaaggatgtttactgaagctagattatctaacgaaaccatccttatttgaagattttggttttacaacaaaagtcaaaatggcagaccgtgtcaaaccagaagacgagacattccttgtggcttatccttacttcaatgtcaatggttttgcattatctcttttgcttgaatttgcgatatcccctccattagtactgatctattaaacttgagcttacctctttagtaatatggtggcttacagaaatgcttgtagttgaagagctttacaaggaagcagttgttgggaccaaccggaaattaataatattcaatggagaactagatcgaataagaagtggatactatccatcattcttctacccgaagcttgctgagctttccaaaacatttctcccaaacctggacacagtttactatattcacaatttcaagggagtcaaagggggaacacttttcaggtgctaccctggaccttggacggtcctgagaaaagcaacgtctggcagctacatctgcttgcatcaacaagaggaaatgccctcgttgaaggaagtggccctcgacatccttccttctgtatagctggaactttccagagttgcatgtcaatcaaaatgtttacagaagaaggcatgtgctgctacctggacaatgcttcatggctcttttttctttggttgtacgaaggaaggtagaaaagatgccgaaacaaccagatctacatttctcaactttggttttacttctgcactaagagaatggatggtgctgactagttgattattgccgctattcaaaagatgcccatggatcactgtgctttgtttagggagattgaaaactacagaaaacatcatcattccttgtaatattactgtatattaacgttttcgcgtggacggatatgatgaattcagcgtgccatcaggaccaaaaaaaaaaaataaatacttaaaaaaannnnnnnnnnnnnnnnnnnnnnnnnnnnnnnnnnnnnnnnnnnnnnnnnnnnnnnnnnnnnnnnnnnnnnnnnnnnnnnnnnnnnnnnnnnnnnnnnnnnnnnnnnnnnnnnnnnnnnnnnnnn

SEQ ID NO: 44554 - DNA, 343 bp, Setaria italica
  Peptide Sequence Number=SeqID_110528
ggactggttgttaacgggccgtacttttaaggaggcatgtgggctggactaacgttggcccaaccaagtcgcaaatatctgacttttcttcagaggaagtacttgtagaatcaaacatacatatggatatgggacatcttttacctgcttttcactgaataaatatgtatacagagataattatctaaatttttgcatgtgtatcttcagatcttgcagcgcataatttgcttgaaatttatgccagtttgacgattagaagcatgattactgaagctgctcaatgtacaatgccacactcggatagaaacctgcgtctccaatggtcatccccagctgctga

SEQ ID NO: 44555 - DNA, 339 bp, Setaria italica
  Peptide Sequence Number=SeqID_110529
gatccacggatccaccacctcctctcctcccaagccgacggcagtatcacctcccttccccaaaagaacggtgcaggcgcctctcccctctgtcccatgtcccatccggctatccgcatgctgagcgcctgagccaactcgtcctcccgcgggccgcagacggtcctccactaaatccggcggtggcgattctgacttcctcccaagtcccggtgccgacgtcgctcctcctgctctccacctctctggcccaggcgcgcgaggccctggctgcaggtgcacaaggcgcgtcctccggccttgccctccgtgaacagcaacatcgattgggtgcttgtg

SEQ ID NO: 44556 - DNA, 268 bp, Setaria italica
  Peptide Sequence Number=SeqID_110530
ggcttgtggaggagcttggaattggggtcgacaggcgacaggaaggacgtggtggaacgcagcgtgagcgccatggttctgccttttggatcagggacgaaccgaccaacaaatcagcaaggctgcaagagaggaagagaggtgcttgcgcttggcgagagaggaagaggaaggggaggatttgaacaagatgatttgatttcaactcgtttgcaaaggctgggcaaatggtgataaggtgttaaagaagaaggataaggaagtacca

SEQ ID NO: 44557 - DNA, 511 bp, Setaria italica
  Peptide Sequence Number=SeqID_110531
tagtaaaattaattacaaccccacgagaccaggaagcgatcgtcgagcatggcgtcatcgtccggagccacgtcatcggtcttcgcactgatcctcttcacatgctgcctcgcattgctcgccgcctcttcggcggcggccgcggcggcaggccgcggcgttgatgacgaagtcgacgccggcggtgacaagctgatgatggggcggttcctgcggtggcaggccgcgtacaaccgctcgtacccgaccgcggaggagcgggagcggcggttccaggtgtaccgccggaacatggaacacatcgaggccaccaaccgggcgggcaacctgacgtacacgctcggcgagaaccagttcgccgacctcaccgaggaggagttcctgggcctgtacaccatgaagggcatgccgtccggacgcggcggcgtccgccgcgacgccggcaggaagcaggccaacatctccgccgtcgacggcccgaccagcgtcgactggaggtccaagggcgccg

SEQ ID NO: 44558 - DNA, 334 bp, Setaria italica
  Peptide Sequence Number=SeqID_110532
gctacatgcaccacgagtccgcgcagcccatcatgcaccgcgacgtcaagtccagcaacatcctcctcgacccgggcttccgcgccaagatcgccgacttcgggctcgcccggatcctcgtcaagtccggcgagcccgagtccgtgtccatcgcgggcggcaccttcggctacatggccccagagtgtggacgtggcgcgaaggtgaacgagaaagtggacgtgtacagcttcggcgtggtgctactggagctcgtcactggcctggcggcgaacgacggcgccgccgagtggtgcctggtggaatgggcgtggcggcgctacaagggcggggg

SEQ ID NO: 44559 - DNA, 930 bp, Setaria italica
  Peptide Sequence Number=SeqID_110533
tagtaagtaaacgttagtaattacggtctagtcggtcgggtccgggaaggtgtaccgcatccacctcggcgccgccggaggccgcgacgaggaggccggcggcatgggaggcgccggcaggatggtggccgtcaagaagatatggaactcgaggaaggtggacgagaagctggacaaggagttcgagtcggaggtgaaggtgctgggcagcatccggcacaacaacatcgtgaagctgctctgctgcatctccagccaggaagccaagctgctggtctacgagtacatggagaacggcagcctcgaccggtggctgcaccaccgggaccgagagggcgcgccggcgccgctggactggccgataaggctggccatcgccatcgacgccgccaaggggctcagttacatgcaccacgactgtgctcagtcgatcgtgcaccgcgacgtcaagtccagcaacatcctcctcgacccggacttccaggccaagatcgccgacttcgggctcgctcggatccttgccaagtccggcgagccggagtccgtgtcagccatcggcgggacattcgggtacatggctccagagtacgggtacaggccaaaggtgaacgagaaggtggacgtctacagcttcggcgtcgtcctcctggagctgacgacgggcaaggtcgccaacgacagcggcgccgacatgtgcctggcggaatgggcgtggcggcggtaccagaaaggtgcgccgttcgacgacatagtcgacgaggccatccgggagccggcgtatatgcaggacatcctgtcggtgttcaccatgggcgtgatctgcacgggcgagaacccgctgacgaggccgtcgatgaaggaggtgctgcaccagctcatcaggtgcgaacagattgccgcggaggcgtgccaggtggactacgacggcgg

SEQ ID NO: 44560 - DNA, 380 bp, Setaria italica
  Peptide Sequence Number=SeqID_110534
ttagaattcaacatatgccatccttgtatgatcaggcaactgcgactgcatgcacacagaacacccacaaatgtgatctcatcaggatgaagccccaatgattccatttcatcaaaaagtgaaatagctttctcgccataaccgtggtgagcaagtccatgtatcatagcattaaacaactccacggtcttgaattcatcaacgactccatgaaacacatccatagctgtttgtatgtacccttgctttgcatatatgtgcacgaaactggtggcaactcttgcatttctgctaatcactccattctgtttcacacgacaatgaagccttttttgccagatcaattgcaccatgctggacacaagctgtaaagtctacct

SEQ ID NO: 44561 - DNA, 806 bp, Setaria italica
  Peptide Sequence Number=SeqID_110535
cccataaatactctcctcctccacttgcaattttcccttagcccattttcttccgtcttcgtcttcgcaccaagccttcttggaagcgagagaggaggggagggaggagagggaggcatcggtgagctcgggaaggccccacccttcccccgatcactcaccaacgctcccctctcaccaactctctctcttatctccttccaagatcccaccctttttttttgtcccacccattcttgctaggatcattccttgatctttcgctcgctccaatacgcccatttccagctccggagatcccatctcgggcgcctcctgcggttttccaagctcaaagacgcccaattcagctcgaatttgagctgtttttggccgctgagctcgaatcaatccaagaacaagcggctcggcaacaagtgtccttggctcccccgatccccgggcttcgattcggtcgaatccggcctaattttattgttttttgttctcccgccgcgcttttcttttctccttcctgtcgcaaagtgggttccatcgcgtcacccgcacggctcttcctccgatcgggcggcgaaagaaagcggcacaaaagggataaaaggcgagttcttgatgcggttttggtcgtagcagcaacagcaaccccactgcttgtggctccgcctgctgtttatccactcggagcagcgggcgccccggcagcggcagcgcgcttctccgccggcgcgtgctgatgcttgccctgctcaccgccttcgtcgtcgcctgcctgctcttcctgtccaagccatgcgcgcgtgacatga

SEQ ID NO: 44562 - DNA, 725 bp, Setaria italica
  Peptide Sequence Number=SeqID_110536
gcctttcgaatgggagacttttcccataaaaaatagatgacaaaggtcttacactttcttatccgatctgagaaagtcttacacagaagagaagaaccacaccaaaatcgactactgaagaaacacatcctaatcataagtacattgcctaatctactgaaggatagtatactcaatcactgagttgcagtagctcaaacagactaaacactgaaacttcagagtacagaacaccatattgtgccatgactccaaagcttgaaaacccagtactagagaactctttcagtgagccagcaatcgctttaacaatcttggctaaaactaagatctgttgactaccctccaggctctggcgacgagcaggaggtcatccatgatccgaagcgggacgacgcatcctacaccaggctctcctccaggctccagcaaggagaagctgatccctgatcggacactggacaacgccttctccacctcgaacacttctactcctagccttgtacctgcagcaaaaatagatagacgaacaatcaaaagcaactaaaagaaataataagcgaattgaaggcgaaaacttcaaattgaaaacaaatcctaattggacaagacggcaggtggcggcaggcgagctcggacgcggcggcgctcatcctctccgaccgtggcggcaggcgagctcggacgcggcggcgctcatcctctccgaccgtggcgtccgcctg

SEQ ID NO: 44563 - DNA, 912 bp, Setaria italica
  Peptide Sequence Number=SeqID_110537
tttttttttttttttcttatgacaaaagtctgacactttattatcccttttattgatctgagaaagtcttacacagaagagaagaatcacaccaaaatcgagcactgaagaaacacatcctaatcacaagtaaattgcctaatctactgcaataatacaaaaggcaatgagacctattaactgataacatctggcagaactgaaggatagtatactcattcactgagttgcagtagctcaaacagactaaacactgaaacttcagagtacagaacaccatattgtgccctttttattgactccaaagcttgaaaacccagtactagataactctttcagtgacccagcaatcgcttttaacaaccctccaggctctagcgacgagcaggaggtcatccatgatccgaagcgggacgacgcatcctacaccaggctctcctccaggctccagcaaggagaagctgatccctgatcggacactggacaacgccttctccacctcgaacacttctactcctagccttgtacctgcagcaaaaatagatagacgaacaatcaaaagcaactaaaagaaataataagcgaattgaaggcgaaacttcaaattgaaaacaaatcctaattggacaagacggcaggtggcggcaggcgagctcggacgcggcggcgctcatcctctccgaccgtggcgtccgcctgcctcttcttgctggcgcagccaacgctaccgctgccgccccttggtgcccgaggcccccgctccagcacaaggcagaaggaatcgaactcccaggtctctacgaacaggcgaaagtcgattgcacgcaggaagcggccctcgaggcccaccatctcgccggcacggatcgcgccttccgagctggcctggaaaaccccaatccacttccttgt

SEQ ID NO: 44564 - DNA, 808 bp, Setaria italica
  Peptide Sequence Number=SeqID_110538
tttttttaactttttttaaaagttttttaaatttttttaatttttttaagttttttcgtaaaagaaataataagcgaattgaaggcgaaacttcaaattgaaaacaaatcctaattggacaagacggcaggtggcggcaggcgagctcggacgcggcggcgctcatcctctccgaccgtggcgtccgcctgcctcttcttgctggcgcagccaacgctaccgctgccgccccttggtgcccgaggcccccgctccagcacaaggcagaaggaatcgaattcccaggtctctacgaacaggcgaaagtcgattgcacgcaggaagcggccctcgaggcccaccatctcgccggcacggatcgcgccttccgagctggcctggaacaccccaatccacttcctgggcgggtggccgccgaacttggcgccaaggaagagcgcgacggcaaccaggcggtgcgcggtggctggctccaccaggatccccgcctccctgccggcggggctacggatgaagcgagtcaagtagatcccggcgagcacgaagctggtgccgtcgatcctggtcatgccccgggaggtcggcaccgaccgggtcagcaggtggatccgctccatgaagatgcggatcgggaccttcggggcggcgccgccgcggaaggcgcggacgaggccggtctcggcgggacgggaggcggcggcggcgaaacggcgggactccgcctctacgagcgccgcgaggagggggagggatcgtgggactcccccggtcgtcctcgcgcaggacgggggcggcgacggcggcggac

SEQ ID NO: 44565 - DNA, 499 bp, Setaria italica
  Peptide Sequence Number=SeqID_110539
ttggttaaagttctttatccttgtgttaattacaccaactgataacgaaatgaaacatacgcagtagtactcaaattcttttgtgggtgaatttatgacattactctgtcacatttgcaggaaggcatggccatgcccaagataacagcagccacaagaagaacatgcgaatgaaaggtgagccttaacagagagaagcagcaagaggcaacttgttgcctgccgggaaggttgtattgttgtgattaccaattgctctgtaccgattgcaatagagatgaaccatggaagaacttgctaataaccttatggcaccacggagtgacgcagacatcttctacaaatgtgaaacaatagaacacaaccaccaaaaagctgttataatatgcagatttgagcagagagcccatgaagcaataagcatatggagatgctatagtaaattaacctactagttattgcaacgaatcgcggttcaagtactaccctagttggtcgg

SEQ ID NO: 44566 - DNA, 673 bp, Setaria italica
  Peptide Sequence Number=SeqID_110540
ttttttttttttttttaactttttaagaacctttagacctaacctagacaaagtgacaaataatcatatttatcaagattacacatacaaatagtacttaaaaacatttcctccattcatttatagtaaccagcatgcaaaactttctagcacatgaattgaattcctaacacctaacaacagtactccccaatccccagattatgttttcctccaccgatgaaaaaagaaatctgtagtatgtacatcagaatgattccaagcctttgctcaatatagaattacctaaccccccaaaaaaactagtaacgggacaaaaaataactagctagactcaaaactctgcaagctgaagaacgagctctgtcagaagcttgtcaaacacaaagtctgccaccttgttccccatatcatcagcatctttctcaaaattcatccagtggtcgctctttgctaggtccttcgacaaaatactgtcgactttgatgcttgaccatggtcgttcatctatacgacagctcactctagaccacaactccttgaggccacggtgtcccacgggttttggtctaccggaagatgagaaccaggagaatctggacttggaaacagaatatttcttgtagatgtcgagcaacgcttcgtttgtcaaatcaaacagaagcaactgatc

SEQ ID NO: 44567 - DNA, 405 bp, Setaria italica
  Peptide Sequence Number=SeqID_110541
cggcatgacggagctgcagaagcacgtggcgttcttcgaccgcgaccacgacggcatcgtcaccttcgacgagacgtaccaaggtctgaaggacgtcgggcttggagctgtcgcggccaaggccagcgccgcgctcatcaacgccgccctcggccccaagaccagacctgataatgcaaactcgtcctcgagcatggatatctacatccagaacattcagaaagggaagcacgggagcgacacaggcgcgtatgacgctcaaggaaggtttgttcctgcgaagctggacgagatgttcaccaagcacgccaagaccgtgccaaacgccctgacacaagacgaggtggaggagatgctcaaggccaaccgacagagcaatgacgttctacgggtattggtctttgt

SEQ ID NO: 44568 - DNA, 396 bp, Setaria italica
  Peptide Sequence Number=SeqID_110542
ttaagtacttactaagtttagtactttacggtttagttttagtaactaattttttagtaacgtaattcaaatttttctgcagctgctagctttcgatcctctctgtttttcttctgcaggtgcaggtggacagtaggggaagttcggttctttgcaggtaattaagcagcttaggaggtcattagcaagatgcactgtcactttcatgctacagtgatacagctattgattcaattgtttaatcattgtttgctttggctggtcggttgagtactttcatgagatgatctttgagctcctgtgtgtgacctatagcatgtttatttgaacagtgaagtaaagctttgctctgagcatttagcaatttgtcaagttcttttcatggatgcatgttgt

SEQ ID NO: 44569 - DNA, 742 bp, Setaria italica
  Peptide Sequence Number=SeqID_110543
atactttgctcttttgtgggtctgttgtagaacttataaactggttccgtgttgtccatatcataggcatcattgcgaaggacaaaacagcaggttggccatgagtttctttcagtcaacttgtccttagaccagtagtggctgtactctggaactggaaggtcccgccagggcttgtaatcccgattgtaatgagctgctgctgcttctaaatactagaaatgtcaacagctgtatcatagccaatgtcccaaggaatggcaagcacgattaatggacatgtcaggttgtagaaagtaacaggacaagctgcccaatttccacacttgtgatcctcattctgcaaatatatcttgtctaagtaagcagaaccaacagaaggaacttaggcagagataataatgcgccatagaaccaaacagatttgacagaggggccacttaaaattttgtcaatgctatccacatgggcagtagaaggccaggaggatgactgataaaccacattgtcgtagctgcaaaataaatctaccactgacgaatggaactttgcttttgtggctcgacggcatgtgttgcagttgatctaacaactgcccaggctgcaaggacactatttgaagaaagacagtgcatagtggcctagtggttgagtgaccaatccccatgctttactcaatcttcttcctttaaagcagcccaacgaaaacacagaacattccccattgccttttctacctcct

SEQ ID NO: 44570 - DNA, 410 bp, Setaria italica
  Peptide Sequence Number=SeqID_110544
ttacggttaatcgctaactgcacacaccgccgccggcatcttccctgcccctctcggccgtcacgccgcgccggagccggatcctcgctccacccgccgcgccccactccgccgtgagcccgctcaaccctcgctccagtggggtggagttgagcggagcggagatccgttcgggcgtgcactgatttcgtcattcgccgcaggacattggtgaatactctgaagagcgctttggacagacttgcaaaaaatggcaaatttaaacataaccaacatcttggagaagatgacagggaaggataaagactacagatatatggcaacatcagatctgcttagcgaattgaataaagatagctttaaagctgatcaagaccttgagccgaagttaacgagtactgttcttctag

SEQ ID NO: 44571 - DNA, 516 bp, Setaria italica
  Peptide Sequence Number=SeqID_110545
gccgccgaggtcggcgtccaccatcctgtgcatggagccggcgaacccgggctcctgcacccaccgcacgagctcgccgtcgccgccgggggactgccccgtcaccagctccagcaccagcacgccgtactggaacaccagccccgcccgcctactcctcaacctggtcttggaaggattctgttgttgggagcttcatgtcgtggctgatcacactcacgtcggatagcttggcgacgaagttggcgtccatgagcacgttgccggagttgacggccacatggaacaccgggggatcgcagaagtagtagaggtattccagtgctgctgcaatatcaatggcgacctgcaaccttgtccgccagtccaacggcgtcctgagaggatcgtggaggcactctttcaggctcctgttctccatgtgatcgaagaccaggaacctggcgtggtgggcctcggcgaagccgcggagcctgacgacgtggcggtgggtttgtaggtccagctgctgcagct

SEQ ID NO: 44572 - DNA, 546 bp, Setaria italica
  Peptide Sequence Number=SeqID_110546
cgccgccgaggtcggcgtccaccatcctgtgcatggagccggcgaacccgggctcctgcacccaccgcacgagctcgccgtcgccgccgggggactgccccgtcaccagctccagcaccagcacgccgtactggaacaccagccccgcccgcctctcctcaacctggtctgaacaagaacaattttcaagaaggtgagagcagtgcaaaattgggaggaatttggagggttttgcgtggattgcagttgaactgttgaagtttgcgccgcggaaaccttggaaggattctgttgttgggagcttcatgtcgtggctgatcacactcacgtcggatagcttggcgacgaagttggcgtccatgagcacgttgccggagttgacggccacatggaacaccgggggatcgcagaagtagtagaggtattcctgaaaccaggtcaggttcagaaaccgaatctgtcagtatcactgatcaggaggattcagtgtggttaatcccaatcccaagttttctgtcagcttaatctgaggaatttcgaagtgtt

SEQ ID NO: 44573 - DNA, 466 bp, Setaria italica
  Peptide Sequence Number=SeqID_110547
ctatctggattctggagtataattgagcgggctggtgtaattgcaaggtatcaatattccattaaatgaatggaagggaaggaaaagtaacaggaaaaaacaaaacaagaattagagaacaatgtacgtaatgtgcaaatctaaaaataaaacctgaacccaagtaaataactaagcagttaagaataagagtgactaaacagtaaacatggagaacatggtcattccatggagataaataccctctcaagactgaacaaaagaatcaaaacattatacaactgaaaattttcatactgcttcaagcttggccctaacatacaagacattaactacttgttgtcctagaactgaacaaatttcatattgcttcaagcttggccctaacatgaaagacattaactgcttgttgtcttaaaaattttactttacgcgttctgaaataactcatgcgttgccaataaat

SEQ ID NO: 44574 - DNA, 717 bp, Setaria italica
  Peptide Sequence Number=SeqID_110548
cattcttacatatacgccatgcaaattacttggttcctgacatgatcagtaccatcggtcgttgtccattgccctgcacctattgattttacccttgctaccattgtgaatactgcttttcctagttttggaataggcccttttgcttgtggagtagtatctgatctgttaacaaagatagaaatgtgactaagcttgagtttataggttatctttgcagttcatattattttcttctatgtaagctgtcaactgtaacatggcttatcatgattgccaaaagtctttcagatcactgaatgaaaaataacagtgtactaatatgatgcttagtcaagacaagctatgccatgtggaggttgccatgcaagtaatacttcaggcaatactggaatgtcactttgaagtacaaaatggttctataaaagccaaatagtatactttcttggctacccgttatgaacaacacatgctggctttatcttactctactgcataaacttgttggaagggttaatatttaatccaggcgtggactgtaataactatttagtgatgtgtgtgtgggcattattacagttacagagaatttttgttatgctgttgtcttgttttcctacctatgccatggaatacctagaattgagtactaactaaccatgattacatgtatgagttatttatcactagccttcttttatttttttttctttagag

SEQ ID NO: 44575 - DNA, 356 bp, Setaria italica
  Peptide Sequence Number=SeqID_110549
gcgctgtggggaagaaagcagcacacaggaacacccaaaaccaaatcccatccgcgagataacaaaccgggccaacggatttttttggccgtggcggtggcggtaccctgtcgctgtactaccaccgtgctcgcgcccgccgccgcggcggccccctggctaaaccctaagccggagacgggggacgcgcaccccgcttgctgcgaaggcggcgtcgctcgctgctccctcggccagtgcggtgcgggcgctcgactgcgccgcgggattcgctcgaggggcgagctccggatcgccggatttcgagctccggcgcgaggggggaacgagctccgcgccgaggagtgggggggttg

SEQ ID NO: 44576 - DNA, 754 bp, Setaria italica
  Peptide Sequence Number=SeqID_110550
tccttcagtgatactgccggagaaaccactgactgcttcagaggcttcaaatctgtagcatctttcagatgcgagcttttagcggaagtatcttcttggacatctaacttccaaggcttttggaaatctgtatcatttcttgttatcacaacagatgtggaatcatcactgttgtcaaacttccataacatatcactaacaaggacggatggaatggctgtctcagggcagcgctggaggaccagatgtcgatcctcgccttcaccaaccgattcatgtgcgaacccgtagatttcagcaaggcgatgcaagaggaggcggtggtaggccccggcgggctggagctctatggtgtccgccgcatcgtccacctcttcacggccaccgtcgtcgctgcagcgcagctgctggagggcggcgatgagtgcctcctcagtggagaggatgaggtgcttgctgtgcaggttgtccttgacgagcgaggccagctcctcgaccatggcgaactgggtggtggccatctcgactggattggatcggattgctaacggaagcggcgagccaatccaatttcaatctgccgagagcaaacggccgcggaggaaaccctagcctagccccgccgcaactgcaattggagagggaaagcaattgccaaattgcgtaggggaaactgagattccgcgagggatcggaggaaaaccctggcctgaagcaaaagcagcaaccagctagggcatggacgccgtggagg

SEQ ID NO: 44577 - DNA, 949 bp, Setaria italica
  Peptide Sequence Number=SeqID_110551
tgcagagaggcaggcgagagcaggggaggggagggagggatggggcagcagcaggtggtgatagtgggggaggagcactgcggcggggaggaccggaagctgacggtgcggaagacgacgctcttcaagccgggggacgggctggaggcgtacgaccaccggacgggggcgctggcgttccgcgtcgagacatacgggcgcggcggggagtgcgggggcggggccgcggcgggggacctcgcgctgctggacgccgagggggagcccgtgctcacggtgcgccgccaccgccccagcctgcacaaccgatgggacggcttcctcggggacggcggcgccggccacggccaccagaagcccctcttctccgcgcgccgctcctccatcctcgggcacgggacgggcgccgccgccgtcctcgtcgacctcctcgccccgggcgccacgggcgagttccacgtcgacgggtcgttcccgcgccggtgctgccgcgtcgtggcctccaaggcctggggcgcgagcgagggaggcggcaaggaggaggaggaggacgtggtggtggcggaggtgaggcggaaggtggacgaggacgcgcacgtggtgatggggcgggacgtgttcgtgctctgggtgcgcgccggcttcgacgccgccttcgccatggggatcgtgctcgtgctcgaccggatcaccggggacgaggtcgacggcgacctcggagaggacctcttcgaggccacctcgccggcgtagcctcgccggagctcccgctcgcgtgctctgcgtgatgtagtggtagcacaatttacaaatacttctgtgatgcttcttcttcatcatcatcgaagtttggatctctggcttgtgaattgagcttgttgtacctttgagcacgatgtgaattatcttgacaatttggtgcctcaaaaaaaaaaaaaaaaaaaaaaaa

SEQ ID NO: 44578 - DNA, 273 bp, Setaria italica
  misc_feature (250)..(250): n is a, c, g, or t
  Peptide Sequence Number=SeqID_110552
tgaagccagaagttggtgatgcagagttgctgcgaggatggctgattctgtaagttcagaagtgatacaatcgcttgccaaacctgagcggtgaatgagcactgcgcgaataagttatccgaagtctcagtgtcttgttcacaaagagcacatgcaacatggtcttgcaatccccggcggtgccggcgttcagccatccacaaacggtccttcactgctaaccacataaagaacttcactttcaggggcncccatgctctccaaacgagttta

SEQ ID NO: 44579 - DNA, 413 bp, Setaria italica
  Peptide Sequence Number=SeqID_110553
catgcgctgtatgttgtcgtggccgtgtgccaggctgccgaggacccacccgcggccagctactccatacctccgcctgctcacccgattgcttctccagcagtctctctcgtccgatgctgcttggtggcggcacggggcagtgctgggagaagggggcgatacggagtgagaaactggggagtaggccgctaggactgctgctgcaacaggcggcggtgcaagcgccagccgcgatgagccgtgagcgcgaatcggccgggcgccaatgcctcccagcgcagctagccacgttggcccgtagcgcggtccgcattgccatgcgtgctgcgacggtctaatccgcatcgttccccgtaccttctgcgccaccatcgaactcgcgcgctgcgttagctccttgctgctgtggt

SEQ ID NO: 44580 - DNA, 1343 bp, Setaria italica
  Peptide Sequence Number=SeqID_110554
gatcgctggcaacaatgtacagcacaagccgcagacggctctagtcggcgccaagactcttgagtcaagacacaacaatgcaatggtctccttcccgaacccatgtcgtcacatcacgggatcttcacatccgtggcgaccgttggcagcgaggaatcacagtccagggcgctctgcagcggtggtggcggtagaggccgacgagccagagggccggttgcccgaccggctgtgcagcaaggggctcagggccttgacgacgatactcatgttggggcggaagtcaccctcatactgaacgcacagggcagccacagcagccatcttggcaacagcctttggagggtattcgccatcaagccttggatcaacgcattgcctcaccttgtcttcactaagccttggtgtagcccatgtcacaaggctctgctggccacgtggcagagtatgatccactggcttgcggccagttaaaagctctagaagcacgactccaaaactgtagacgtcactcttcgtgctaagctgtccagtcatggcatactccggtgcatggtaaccaaaggtgccaagaacacgagtggagtgaagtcgcgcagccatgtcaggggcctggttggagacatcaaagtctccgatcttggcgacgtcattgtcaaagagcagtatgttgctggactttatgtcgcggtggaccacgcgaggttctgccttctcgtggaggaactccagcccacgagctgcgctcacggcaattctcacccgctgcatccatgacagggctggccctggctgggctcccttgacaccctttttaccatggaggatatcatgcaatgaaccccttgttgcgtactcgtaagcaagaactcggatgttcccttcagcacagaatccaacaagttgaagaacattctcatgcttcaatcttgagacagctgaaacctgcacaaggaattcttgatcaggctgtttgctggagtcaagcttcttcaccgcagatttcattccatctttcagcacaccaaagtagactctagcatatgagccctctccgataagagcatcattgctgaagttctttgtgatttccttcatctcttccaggggaatgactggcactgcaattggctgagctcttcctgtgggggtgacataggttggggctgggggacggctaggtccatagttattgacttgagcagggagagggacatagtcatcgtcgtgcttcttcctcttgccaacatcgtcgtccaccacggagcagcatgaaaagcatcccatggatccctatcctttcttcttctcctccaaccttgtgtcgtccttcgggaatctgg

SEQ ID NO: 44581 - DNA, 1126 bp, Setaria italica
  Peptide Sequence Number=SeqID_110555
gtgcggcacccgttgaagcactgccggttcttcgcggcggtccagatgatggcgaatgccagggtgagggaggcgggggaggcgaccctggtggccgcccttgcggcggcccaaaaggagagcgagagggagagcgaggaggtgcccgacgtgcatggcgggtggaagagtgaggatgggagtttaaattgtggatattcaagcattagaggtagaagagcaagcatggaagacttctatgacataagatcatctagaattgatgataaacaaataaacttatttggagtatttgacggtcatggaggtacccgtgctgctgagtatctgaagaagcatttatttgaaaacctcatgaaacatccagcttttgttgctgatactaaatctgctataagtgaggtctataaaaaaactgatgcagatttcttggatgctgaaggcaatattcaggttgggtcaactgcatcaactgcagttttggtcggtaaccatctatatgtggcaaatgttggtgattcacgggctgtaatatcaaatgcaggcaaagctattgcactctccgatgaccacaaaccaaacagaagtgatgagcagaaacggattgaggatgctggaggaattgttacatggtctggaacatggagggtaggtggtattcttgcaatgtcccgggcatttggcaatcatttgttgaagcgattcgttgttgcagaccctgagattcaggatcaagaaattgatggtgaattggagtttctgattttggctagtgatgggctgtgggatgtggtgtcaaatgagcatgctgttgcatttgttaaggatgaggatggccctgaagctgcagcccggaagctgacggagatcgccttcaggcgtgggagcactgacaacattacctgcattgttgtagaatttcgccatgataatatgactgatggttctcccccatcagccgatcaaagttgatttcatcattcttttctaattattccagatttgctggcattgtcaccacatgatgtagcggctcgaatggtttcttcattggctttgccctgtgaaaaaaggggggcatttttccaagattttccttgctgtttttgtttctctgttccccccc

SEQ ID NO: 44582 - DNA, 228 bp, Setaria italica
  Peptide Sequence Number=SeqID_110556
aagaggtcggtggcggcaatttactgcggcaagcactaggtgtgtcgtggagtgtctacctagagtgacctcgctgatgaatcaattcagatcagtgtggaccatgtacaaaccaccgctacactggatctccatgcttaaattaagctacagcaaagggccggcctaaacaaatgtaggcttcagtgtggcattccgttactgttatagtatatcagttgcactatt

SEQ ID NO: 44583 - DNA, 240 bp, Setaria italica
  Peptide Sequence Number=SeqID_110557
gattgaagcagttacaatacaagagcagaaatcagaacatcagcaaagctcaggcacaacagctatgacacaaagatgatcaattcatgggcgaacaaagctcaggcacctggacttctcattttttctcaaacattagatctcggaaaacaaatatcatgtcttgaatgaattatggattttagtttcaatgttattttgttaaacgtttctgcatacttccatagagttttagattat

SEQ ID NO: 44584 - DNA, 1599 bp, Setaria italica
  Peptide Sequence Number=SeqID_110558
cccgtgtcaccccgttctcctacggcgtggacgaggacgcggatgaccacccgcgcgaggagtgcggcctggtgggggtcgtcggcgacccggacgcgtcgtcgctgtgctacctggggctgcagaagctgcagcaccgcggggaggagggggctggcatcgtcgccgtgggcggcgacggcaagctcaagtccgtgacggggctgggcctcgtggccgacgtgttcggggacccgtcccgcctcgcctcgctcccgggccccgccgccatcgggcacgtgcgctactccacggccggcgccgctgcgtcgctgcggaacgtgcagccgttcctggcgggataccggttcgggcaggtcgccgtcgcgcacaacggcaacctcgtcaactaccaagcactccggaacaagctcgaggcccggggttccatcttcaacacctcctcggacacagaggtcatcctccacctcatcgcgacgtcgctgtcgcggcccctgctcgcgcgcgtctgtgacgcgtgcgagcgcctcgcgggggcctactcgctcctgttcctcacggccgacaagatgttcgccgtgcgcgacccgcacgggttccgcccgctggtgatgggccgccgccggaacggcgccgtcgtgttcgcgtcggagacctgcgcgctggacctcatcgacgccacctacgagcgcgaggtgcagcccggggaggtggtcgtggtcgaccgccgcgacatgtcggtggcctcggcctgcctcgtcccgcaacgcccgcgccgcgcctgcgtcttcgagcacatctacttctcgctccccaactcggtcgtcttctcccacgccgtccacgagcgccgcaccgcattcggccgcgccctcgccgaggagtccccggccccgggcgccgacgtggtcatcccggtgcccgattctggcttctacgccgcgctcgggttcgcgcgcgcgtcggggctcgagttccagcagggcctgatccggtggcactacagcggccgcagcttcatccagcccacgcaggcgatccgcgacctcgccgtgaagctcaagctcgcccccgtgcgcggcgtcatcgccggcaagagcgtggtggtcgtggacgactcgctggtgcgcggcaccacctcgagcaagatcgtgcggctgctgcgcgacgccggcgcgcgcgaggtgcacatgaggatcgcgagcccgcccgtggtggggtcctgcctctacggcatcgacacgccgagcgagggcgagctcatctccaaccggatggacctggagggcgtgcgcagggagatcggcagtgactcgctcgccttcctgtcgctcggcaagctgcacggcatctacggcgaagaagcgggggactactgcgacgcgtgcttctcgcgcaagtaccccgtgttgcccacgctggccgacccggccgctgagctcgaggagtgaggcggtgagcaggtgagctctgctgctcctctgctctgcatcgcctgtacttgtaggttgttagattcagttctggttggataattttgtgcgcctcaaggctgtagctttaatttggtgaagcattctagtatcattgttgaccgaa

SEQ ID NO: 44585 - DNA, 213 bp, Setaria italica
  Peptide Sequence Number=SeqID_110559
tgactgccatgcgttgcaagttccaatgctatcgccagcttctcactgtgatatttcagcagatcttccttctgctcgattgcgagatcctgcagcacaaattctgtctgtggaacataacccagtgcgctgatcctcccgatcaaccggttcagctcctgaactatggaatccgagattgggtgtgataagtcaccagcaatgaacacatgg

SEQ ID NO: 44586 - DNA, 519 bp, Setaria italica
  Peptide Sequence Number=SeqID_110560
aactgtttgcaaggaagaattggtaactgagatctaatccaagtctacccatatcaatttgggaaggttgggatgggccttcattgctctctccagaggagcctacactgtctggaatacctctgcatcccacagatggatgcagaggtattccagacagggtaggcttctaagggtctccacatcttcctcgctgacactttcatccgcacagaagagtaacttctggaggttcacaagtaaacccaccaagctgcaaggcctgatacggcatccccctcgatgacaagttcccgaaggcccaatggatcagggtgttctttgcttagattgtccagcaactctggtggctcatttaaggtatagatatgcagagaatcaaggtttgctttggtaagcttgtagatcgaagagacaatctcttcatatttctcctcccattcttcatcagcataactattgacaaatatcatgcccagcttcctcagatctgttagttcaccaagccggcgaatgaag

SEQ ID NO: 44587 - DNA, 234 bp, Setaria italica
  Peptide Sequence Number=SeqID_110561
acttccttcacttcgcccattcgaactgtttctgactggagtgttgaaggaatcattgcttatgcaagatcaagacccacggaagacaagggacaggaatctgatgatgatagcaacattcagcagaatttacgcgatgaaagtgcggtcaaggaggatgctggtgcatcaagggcctgcaccaaggataaattaagtgatgaagatagaaaggctcagctgaaattacatggt

SEQ ID NO: 44588 - DNA, 442 bp, Setaria italica
  Peptide Sequence Number=SeqID_110562
ttgccgcgtcctcggcagaggtgatggcagtgtaaggctgtaagctccatatctgtgtaagctccgccatctctgcactttcttcatttctttagttcttacgtgcacttcctcaattcatctcaacaactttatctttgattctggactttacatgtttcaatgtttggttgcctcatatagtcatattatcagatgaattgttcccaatcctgaaatagaaggcctgatgcaatatttcgtctttgtactttcctttccttggtcatttcccccaatttaattgactgcttcttcagtgctgcttcagctacttggcttcagatgagcatgtaatttatttttcttctttgagcaccaaaataccagcagatgttcttcttaactaccatgtcttttttcgaatatcatgacctgatagttcgtacagttcgtgaaaaaa

SEQ ID NO: 44589 - DNA, 330 bp, Setaria italica
  Peptide Sequence Number=SeqID_110563
cggcgtcacgccttgaggagctgcaggagccatggcgacgtcggctcgtgcagggtgcatggcgttcgcgtgcatgtgtttgtggttcgcgagtggggcatgatgtaacgtgtcccaagttcctttcggtgttgtagctgtgtgtgaagcatgtccgtgtgcgcgtgtggctgcagggcagagaggtcggagtctgtaaaagtttgggcttggtgtttgttgagttgggaggctcgagtaggtgtcctttgtgtgtggttcggatccagtgacgtgtactcgtgtaccagttccttgctagctagttcaatgctatgcgcgttcgtgctc

SEQ ID NO: 44590 - DNA, 305 bp, Setaria italica
  Peptide Sequence Number=SeqID_110564
tatcatgaatgccgccttggagcggcatttgtaccagagctggaagggaaattttggcaacggaaattttaccatacttcaaagttctttggtctgcattcaaagtccttcctttctgatctgatggtggctggggagaagttttgccatggggattggtcaaagattaagaagaagtacagttctttcgatgagggagagctgcttctcttttgtttctcgtcagcatatattattgctttactacatgattctctaaaaatgccgctggatcataagaggtgaagcctttttctacagttttt

SEQ ID NO: 44591 - DNA, 994 bp, Setaria italica
  Peptide Sequence Number=SeqID_110565
taaatagtggtgcctctccaaggatggtctcatgaatattaagccttggtgcactctcattctcagtttgtttcatggcataatagaagtgactgagtggctttgcagacggatgtgcatatcatgaatgccgccttggagcggcatttgtaccagagctggaagggaaatttttggcaacggaaaatttttaccatacttcaaaggtgtgatcctttctctttggttggagtcttcttaaaaagttatattttaaacttaatgcaggaaaaacagcggaagcaacgtttctgtcacgattctccattttctttcattttcaatactcagtcacagatggtacaccattcatttctgatatttgatcgcttgacagttctttggtctgcattcaaagtccttcctttctgatctgatggtggctggggagaagttttgccatggggattggtcaaagattaagaagaagtacagttctttcgatgagggagagctgcttctcttttgtttctcgtcagcatatattattgctttactacatgattctctaaaaatgccgctggatcataagaggattgatgttgtaaatcaaatccacggtgtgcctgttgactgggcattaggtgctttcattgtgcaaacagcgttgaaccggacagagtactcagactcatcagtttcatatctaaacagctatgactcttctggcttggcaccacttttcttgattacagctgtggttgtatttacagcattctccatcctgaggtggagaaggcctcagctgaagacgatctacgacatggagaaaggccggtacatcataaccagggtcagccgatgagcttcgcacgtcggcgctgggaatggttggactttctgcagcggagcaccagcaaccgtgtatgtagatttcgtaaattgatttacttacccggttggccaaccatgcatcgtcgcacggccttgcagaattaaccggagttcaagcagc

SEQ ID NO: 44592 - DNA, 1561 bp, Setaria italica
  Peptide Sequence Number=SeqID_110566
cagctggactgggcgcgcacggcctcgctgaaggcgaacccggggctgtcgtccttcgcggcggatcccgacggcgcggggctgtcgctggccccgctggtggattttgcgcggcgccgcgtgccgcgggagaggtgggcggacaccgaggtgcggctcatggccactgcagggctccggcttctcgatgccgcggtggcggagtccgttctggagtcatgcaggggcgtgcttcgccaatcagggttcctgtttcaggacaaatgggccaccgtgatctcaggggctgaggaagggatatacgcgtgggttgcagcaaattatgcattggggacactaggcggtgatccacacgacaccactgggataattgagcttggtggggcttctgttcaggtgacttttgttacgggtgagcctttgcctccggaattctctcatgtgcttaagtttggtgatgtctcatataatctgtacagcaacagctttttgcaacttggtctgaatgtagcatacgagtcactccatgacttgctcagctcacctggccttaaatcaatggccacacatttaattactcaaacgaaatacaaagatccttgcacaccaagggggtttacgagtatggtgggatcagttaaacttcctgttagtgttcttgatccaaaggttgggtacagaccttttgctcatgctgtggggaacttctctgagtgcagatctgcagcactaacactattgcaaaaaggaaaagacggatgtgcatatcatgaatgccgccttggagcggcatttgtaccagagctggaagggaaatttttggcaacggaaaatttttaccatacttcaaagttctttggtctgcattcaaagtccttcctttctgatctgatggtggctggggagaagttttgccatggggattggtcaaagattaagaagaagtacagttctttcgatgagggagagctgcttctcttttgtttctcgtcagcatatattattgctttactacatgattctctaaaaatgccgctggatcataagaggattgatgttgtaaatcaaatccacggtgtgcctgttgactgggcattaggtgctttcattgtgcaaacagcgttgaaccggacagacattctccatcctgaggtggagaaggcctcagctgaagacgatctacgacatggagaaaggccggtacatcataaccagggtcagccgatgagcttcgcacgtcggcgctgggaatggttggactttctgcagcggagcaccagcaaccgtgtatgtagattttcgtaaattgattttttacccgttggccaaccatgcatcgtcgcacggccttgcagaattaaccggagttcaagcagcagcccttgtgtatgataggacgatctgggttgcggcagcattattgctcgctctgggacgtgttattcctgaactgctgttgatgtaattacagttttgtgcatgggcagtcatgatacagagccggcaaaacggttttccttcttgtgatgtaatcctgagatctcaatgatcaatagaagtt

SEQ ID NO: 44593 - DNA, 840 bp, Setaria italica
  Peptide Sequence Number=SeqID_110567
ttgcaggatatcatcatcaccaagctgtgttccagaatgatcattaatctcaaagccttcataaaactgcagcaagtcaaccaactgtgcaaaaaggcgtcccttttcatgagtatagagtgcacttaagtggcacttagcaacgacagcaacatcagcaactaggggcctcaaaaaccttctagtaggaagctggctcaacatgtcaatcagaaattccataaatctctcacaatataggacgcaagaatcatcgacctgcccaccgagtggctcattcaatacagattcttcaccaccatcttggctggataatatgacctttgaatcgagaatctccaagaattcttcaattagattcctaagggatttattctcgagcgtttcagaaggattggtaggttggtcagccttttttgcttcctttgcttcccttcttttgattttggtccacttcttaatcaattcagggttaaggcagagttccatctgaagtcgtccaaaagaaagagtattccacagctttaggctaactaactgaagtatagtttcccggacaagctcatcctccaaactctgaaatgcatttatcatgaacaggaggtaatttgttttctctgccatattaagggccctttcctcttccttgagcttgagaacccgccacaggaaccccttgaaagcatccttacggtcatggaaacacgtccacgctgccacattctcccgaaacttctcgttaaccatgaggatgatggacatgacatgctcgaaggaggcgttcgccgggtcgaagtgcggccacaggtagttctcgaggtactggctgacctcgaggat

SEQ ID NO: 44594 - DNA, 431 bp, Setaria italica
  Peptide Sequence Number=SeqID_110568
cactgcacttctacacaattagatattttcccaaagaataaagactgactgctactaataatcaggggtgttttaatttcctaaagaataagttggacacataccactgttcatggtctgcactttgtaacctcccatccagaacagaaattagttcttccagtcaacccaaaagaactaataaaatgtcaagtttaatcactgtactacccagcagttaacatctacacaatagcatacaaaacatctattgtatctttgttcaaaaacctagctattagatattttctcaaaggatggctactaatgcgtagtctgttaataataattactaagcgaaacttacctgaatgtaagtcatattttctgaggtcctttaatttgtacggtgatattcccctagctagtagtatagctagctagggatgttc

SEQ ID NO: 44595 - DNA, 205 bp, Setaria italica
  Peptide Sequence Number=SeqID_110569
agcacagagctttgaggagaatctcctggcgattggcctggggagataggaagcgccctagagcggctttgccgtgcaaagggattggcgagctgcggcactgttgggtcatgtccaaggtgccggttggcggagggagctcggcccatggccagcgatgtcatggtgggcgatggcatccgcgggcaagtgtgggcaaggcacg

SEQ ID NO: 44596 - DNA, 454 bp, Setaria italica
  Peptide Sequence Number=SeqID_110570
gtcccgcggcggcgcgcgcgggggtggacgccgcgggccttcgcggagatccaacaaccatggcgtccgtcaggaaaatgcgaatttcttctactgtgggattctctggagtctggacaaagttttaaggcgaatgtggggaatcactgaaccagttcttggagatgaaacccttctggtgctggatgtgaatagctatctgattggaatttggaattttaagaaatacctgcatctaggaccgggcccttccaaaagatcaaggccatgcggaaaggacactgttgcaaacaatctcccccctttttcctgctcaccttttcccatgagcatgactgcatgagccgttctctgatgctaaaatgcgctcacttgactgtagctgtaccgtagctaattttatacgttgtgctttatttcttgtataggtaggttaatggtattgtactaatgg

SEQ ID NO: 44597 - DNA, 191 bp, Setaria italica
  misc_feature (160)..(160): n is a, c, g, or t
  misc_feature (164)..(164): n is a, c, g, or t
  Peptide Sequence Number=SeqID_110571
tattggtgtgacctgggaagaagagatcagggagcgatgtaataatcaaactttatttcaaaatttagagatgagaattggtgttattttattgtattctgatgagtttatgaagattgaaataatatttcaggaaaatggctaattattgaaccaaaanaaanaaaactaaaaagaagaactacgaaccg

SEQ ID NO: 44598 - DNA, 365 bp, Setaria italica
  Peptide Sequence Number=SeqID_110572
gccgcctcctccgcctccgctgccgaaacagccgccgtgcaagtacccgacgtggtcgtcgtcgtgctactgcggcggctacccaccgtgcgtgccgccgaccatgccgtgcccgatggtcgtctgcgatgacagcccgccctacgggacctgcaccgtcatgtaactgcgaactgctggtgatgctgctgcgtgctgcctgatgcaaattcaagctgatgacgtatgtgcctacgtccgtgtgcgtgcctaataactgtgtgctgatggtgtgctattaacttgcaaagttgcctgcgcgactgctgtcaaaatccaagtgtgttttgtattatcccgactttatcgtaaatttgaactttacc

SEQ ID NO: 44599 - DNA, 434 bp, Setaria italica
  Peptide Sequence Number=SeqID_110573
ggcgtgaggaagaaggctagggaggaagcggtagcggggagggcgaaggcgaagtatgtggagaaggttagcccgggggcggaggagaagacgattggggtcctgtactggacacgggcacccggggagggcatggagacggcggcggcggtggcattggctccaccggagagggcgagctgggcggcggcgccggcggcggggaagaagtcgagggagaaggaagaagaagaggcggcggagggaggtggagctagcagcagcgggaggaggaagagggggaaattcagcagcggcatttgagccaccttgagcttgagcaccggcagcagcagcagcagttgcaagattgcaaatttgcaatgcatgaaaatcaagtccaaaagggattgttcagtagatcggccggcattgcagatttgcaggggaaaggg

SEQ ID NO: 44600 - DNA, 279 bp, Setaria italica
  Peptide Sequence Number=SeqID_110574
ggggcggggtgggggtttggggcgtttggctggggaacggggcggcgcggcggggtcggtgtgggctggctggccggccggctccgctggggtttagattttctgggaagggaagcggcgcgtggcggtgacggtgtgcgcagctcgtgccggtgaagggacgcacgcgctcgcgcacgcacacgcacacgcaggcgcggggggagagagagagagagaaaaggggcggaggaagacgcttgctttgttggtgacttcgcctccaagtgagcaagcaga

SEQ ID NO: 44601 - DNA, 827 bp, Setaria italica
  Peptide Sequence Number=SeqID_110575
tgcacccgcatcagtcaccacgatggccccacccaagcttcagcttcccctcctcctctccctcctggcctccgtcgccgtcgtccacgtcgccggcgacgccggccacgacggcctcacgcacatccacctctacgtgcacgagacgtacacgggcgcgaacgcgacggccgccgcggtgctgcagtccccgctcggcgccaactcctcgttcgggagcatcggcgtggtggacgacgagatccgcgtcggcccggaccgctcctcccagctcgtcggccggtaccaggccgtcttcttcggcacgagcctgcagctcggcgcgggttacctgtcgtccgtcacgctcgtgttcaccgccggcgagcacgctgggagcacgctgtccgtgcagggccccatactcgggttcaccggcaccatcgagcgcgccgtcgtcggcggcaccggcaagttcaggctcgcccgcgggtacatgctcttcaagatgatcagcaagcccacgccggagaccgacgtcaacgaggtcgatctcttcgtgctcatgcaccatggcaagtactagatcgatggatagcgcacaccgtgagtggctagcgagagcgcgcgcgttggcactctctcgacgtcgtctacctccatcgttttcgtgatttgttcttgtcaaattatccagaaaaaagaggtcacattttatctgtaatgctggtttcttcgtcttctttggtagaaaaaataaaatctctcgcctcacgaactcacggttctcattcatatccggaaaaagggggaaaacaaataaacaattgttgaccaaaaaaaaaaaa

SEQ ID NO: 44602 - DNA, 300 bp, Setaria italica
  Peptide Sequence Number=SeqID_110576
agaagagagagaacagccatgaggttgcaaccatgcctactcctggttacgagaatggaaattggaacaacggcgattatcatgtcctaaatgatgcgtgcaaggtcgagctcacatatgatcaggttcctgtcagctcagctgaagcgtgcttgtcttcatttgagctcacatatgatcaggttcctgtcagctcagctgaagcgtgcttgtcttcatttgttcccatgtcggaaatctgccccagcatgagcaaggttaggattaccctggtggttctcctccatgctgctaccattg

SEQ ID NO: 44603 - DNA, 1315 bp, Setaria italica
  Peptide Sequence Number=SeqID_110577
gcctccgccgccttcctctgctccaactgcgacttcgggaggcaccgggacggcggcggcgagccggcgctccaagaccgctgcgcggtgcagccctactcgggttgccccccggcgaccgagctcgccgcgctcctcggggtgcccctcttcgacaagccggccgccgaggacggtggctggtggaacatctgggaggagccgcaggtgctcagcttggaggatctgatcgtgcccaccactccctgccatggcttccagcctctcctcacgccatcatctcccaagaaccggagcatctgcacggacgaaaagatgaacgaggagatcctccggcagctgggtgagcttgcagagtcagacggaggggtgcaggcagcagcaggtcatgaggaggcagagcaagctggagttcagttcccttcttgggcaccaccaccacagtataccactggccatggcaattttggagcagagaacagccatgaggttgcaaccatgcctactcctggttacgagaatggaaattggaacaacggcgattatcatgtcctaaatgatgcgtgcaaggtcgagctcacatatgatcaggttcctgtcagctcagctgaagcgtgcttgtcttcatttgttcccatgtcggaaatctgccccagcatgagcaatggtagcagcatggaggagaaccaccagggtaatcctaaccttgccacgcctttgcaagcccccaaaagaaccggctttgatgttgtaccctgccctgaccgggactcagtcatctcacgctataaagagaagaggaagacaagaagatttgacaggcaggttcggtatgaatcacgcaaagttcgtgctgatggcaggcaaaggatcaaggggcgttttgcaaaggcacaccagacataaacctagcatcttccagcacaaaaaaaaggaaactgattaggagcaaagataatataatacaaaaaatgtgccagaattttgtttgccttcagttccatagctgatagctcatatcttcaaatacagttcgaattatgtatgtatattgccgtcatgtggctacacttcttcgaggagagatccatctcctgtaaatagtcctacacctatgaactctgattttgtcatactggagatattatgcacacaggaatagcatcgctatgtttgttttggtattgttatcaagcaatttgtacttccacaaatgcaaaagcttcctttcaccgaggagcaatgcacaatttaacatcgcaacaactcagaatgaagagattgtttaattattgatgattacaaaaaaaaaaaa

SEQ ID NO: 44604 - DNA, 1462 bp, Setaria italica
  Peptide Sequence Number=SeqID_110578
tcggttggctgaaatgcaaatgtttccaaagcggtggttagattggtccagaaattgatgatgatgccagtcatgccaccataagtgaattccccaagaccccaacaatactgtgacccctcaagtgatccccaagaaccacttgctcagaccaagcaggaaccagaagcagcagcacagcgaaagcagaggaagaagagccccgtgcccgaggtgtgtgggtggcaatggctggcgcctgggtgaagttggagcagaagggagccgggccaggagcaagaagctcccacgccatcaccctcgtcggcgacatggcctacgcgttcggcggcgagttcaccccacgcgtgccggtggacaagaccatgtacgccttcgacctcaagagccacacctggtcggcggtcggcgccacgggtgacgtgccgccgccgcgcgtcggcgtgaccatggcggccgtcggcggcacggtgtatatgttcggcgggcgcgatcaggagcacaaggagctcaacgagctctactccttcgacacgtcgacgggcacgtgggccctcctgtcctccggcgccgacggcccgccgcaccggagctaccactccatggtggctgacgccgtcggcggccgggtgtacgtcttcggtgggtgcggcgacgccggccgcctgaacgacctgtggggctacgacgtggctgccgggcggtgggaacggctgccgtcgcccggggaggcttgtcgcccccgcggcgggcccggactggccgttgccggcgggaagctgtgggtggtgtatggcttcggcggggaggagctcgacgacgtgcactgctacgacccggccacaggacggtggtccgcggtcgagacctccggcgacaagccgagcccgcggagcgtgttctgcgtcaccgggatcgggaggcacgtcctcgtgttcggcggcgaggtggaccccagcgacctgggccacctcggcgccggcaagttctcggccgaggcgttcgctctggacacggagaccggcgcgtggacacgcctggacgacgacgccgaggccgagcccgagcaccacccggggcctcgcgggtggtgcgcgttcgcagcaggggagaaggaggggcgacgagggctgctggtgtacggcggcaactcgccgacgaacgaccggctcgacgacatctacttcttcgcgcctgtccttgaggccgcacgctaggcatgggctgcgtgctctctccgtgtgtgcatccgcaatgtattgcagtgcaatctacaggcttgttgcgatggttgttgtttttttttgtctggttgtttttctttcgttcattttctgtgctacatcatgctgtgtgagtagagaataatgatgctggacggatgtacttgtgtttgaccatcgctttgcattgcagctgtagtagtgtcatgtttgctttggatcaagttctagcttggcat

SEQ ID NO: 44605 - DNA, 303 bp, Setaria italica
  Peptide Sequence Number=SeqID_110579
cggccagaaaccaacgcatgcagccgctctgaggacaagcctgtgtcacaaaggcagtaacctgaaccctccatgggagcaagtgataacattgattctctggtagcaaattcaataggcaggctcatctttgaggctggacttgagcctggttttgttcacttgccgtcttttaatggggtgattgatttgctcacccgtggggttcggatcgcaatgccttcttatgaatatattcttcaggtgcaaataaaggaagttcaacagcgtgacagggctttgaggcaacactgggaaaaaagt

SEQ ID NO: 44606 - DNA, 479 bp, Setaria italica
  Peptide Sequence Number=SeqID_110580
cgctgtgggtggtgagttaggtttcttaggggtgcggactgtggacctccggttttcagtgaatcctgatcgaagttttacttccagcctgatcaacccgaagcatttcaaggacatcggtgttccagctgatttaaaatacattgatccaacatatatggttcgggcctgccgggcaaatgcgtccgatgctattctctgcaccgtgctcgggcaaaatgctgtacatggagcatttgctggtttcagtggcatcacttcttgcatctgcaacacccactacgtctaccttcccatcacggaggtcatcaaggcgccgaagcgcgtgaaccccaacagcaggatgtggcatcggtgcctcacgtccactggtcaacccgacttccactgacctgccgatggcatcgtgtatttgtgttaccaaagctgctgaagttccagcattagatgattcaccattctttttgctgatagacccc

SEQ ID NO: 44607 - DNA, 269 bp, Setaria italica
  Peptide Sequence Number=SeqID_110581
caggaaatgtgatacttagtgacattggtgttcacatgcagcagaagatcaagacgcatttcaaggacattggtatcggtctggtcaaattaatgggaagaagcagtgggtttattgcaatgcatgcttccctttcaagtgggcaggttgatgtttgtttgataccagaggtatgattcactctagatggagaaactggtaacagccgcctttttttccgcgtgcatggtgtaccaacagaagcttacaatatgaatgaaggtcccatt

SEQ ID NO: 44608 - DNA, 438 bp, Setaria italica
  Peptide Sequence Number=SeqID_110582
actgatatatatgatttgaaaccaaggccaactacattctcactcaagaaaaacaggactcctacaggtgatgaaaatgtggatatgtggaatggctatgttaacaatgatgatagggcacttttgaaggtgataaaatattcatcgcctacatctgctggagcagagtgcattgatcccgagtgtagctgggtggagcaatgggtgcatcggggcaggaccaaacgacaaaaggaagatatactatgagccagaggaagttaaagctgccatagttacctgtggaggactctgccctggtttgaatgatgtcatcagacaggttcttatcttgagaattgtccatacatttctgcatttcccacatttcaaacaaactcttgacattcacagaaaacatcaatttgaataagataaaatcagccacggtcatttcac

SEQ ID NO: 44609 - DNA, 1964 bp, Setaria italica
  Peptide Sequence Number=SeqID_110583
cgaagcccggagcagaacgcggtcgaatcgaatcccgcagcttctctcgccgcccccgagccgcagattagtgggcgcactgcaatcttgatgtccttatctgggatggctgttgcgttaaaagcaagcactagttctgctacacagcaacagtggtggcatccaacaagggaccaatgccaatatggtttcacctccttaagcaagcgaaagtgcagaaaaagatctgtgctactgcatgtcagagctatttctgggaagttagacctagatttcagtgatccttcttggaagcaaaagtatcaggaagactgggataggcgttttagtttgccacacattactgatatatatgatatggagccaaggaccactacattctctctgaagaaaaacagaactccactgggtgatggtgatgtctcatcaactgatatgcggaatggttatgtaaataaggatgaccgagcacttctcaaggtgataaagtatgcgtctcctacttctgctggagctgagtgcattgatcctgattgtagctgggtggaacactgggttcatcgtgcaggccctcgtaaggagatatactatgaacctgaagaagtaaaggctgccatagttacctgtggaggactctgccctggtttgaatgatgtcatcagacagatagtattcaccctagagacctatggtgttaagaatattgttggaattccatttggttatcgtggattttttgagaaaggcttaaaagaaatgccgctttcacgtgatgtggtggaaaacataaatctttctggaggaagtttcctaggagtttctcgtggaggagctaaaactagtgagattgtagatagtatacaggccagaagaattgatatgttctttgtaattggtggaaatggtagccatgcaggagccaatgctattcatgaggagtgtcgtaagagaaaactaaaagtttcagttgttgctgtcccaaagacaatcgataatgatatactttttatggataagacgtttggttttgatacagctgtggaagaagcccagcgtgctatcaattctgcttatatagaggcacgtagtgcgtaccatggaattgggttagtcaaactaatgggaagaagcagtgggttcattgccatgcatgcttctctttccagtggacaaatcgatgtttgcctaatccctgaggtatctttcacacttgatggagaacttggtgttctgcaacatcttgagcatttgttaaagacaaagggattctgtgtggtttgtgttgctgaagctgcaggacaagatctactgcaaaattcaggtgcaactgatgcttcaggaaatgtgatacttagtgactttggtgtccacatgcaacagaagatcaagaagcatttcaaggacatcggtgttccagctgatttaaaatacattgatccaacatatatggttcgggcctgccgggcaaatgcgtccgatgctattctctgcaccgtgctcgggcaaaatgctgtacatggagcctttgctgggttcagtggcatcacgtcaggtgtttgcaatacacactacgtctaccttcccattccagaggtcatcacaacgccaaagcatgtgaaccctaatagcaggatgtggcaccgctgcctgacgtccactgggcagcccgacttccactgactctaccttgccatcacaacagtgcacggtaccaagagaatcgtccatcatgtattgctaacaggaaactagaataaattcttgtggcactggattttcttactggaaactagaataaatccttctggcaccaaattttgcctgtgaagttggaggagctcatagtaaactactcacactactgtcagttgatcattctgacatagaaaaacatactcgttcttttcatttgccccagaagggatttttttcttttgtaaaattgctatcactgcaaatgattt

SEQ ID NO: 44610 - DNA, 536 bp, Setaria italica
  misc_feature (1)..(57): n is a, c, g, or t
  Peptide Sequence Number=SeqID_110584
nnnnnnnnnnnnnnnnnnnnnnnnnnnnnnnnnnnnnnnnnnnnnnnnnnnnnnnnncttttttgttttttttttaaaatagcataaaacttagctgatgtgtatacatatgctgtgtgtaccatagaagatacatttcagtacatcatgcgtccatttatagaactactattaggcatttgatgttatggtttgtgcccagcaacgagacacatgtatagcatttcttatatccttactagcagcagcaattaattcggactccgcactgcgtatacatttatacgacgacgtataccatgggacctctacttgatcgcacgcatgtacgtatatacgtcaagcacggcgagttattcttgctggcagtggcggatccatcctatcagttgtagttgtcgttggcgttcacggtttcgctgccggggggacacggcggcttcttcggcggcggcggcgccttgggcgcgggtggcttcggcgttggcgttggtggcgttggcggcctcggcttcggtggtgctggagttggtggt

SEQ ID NO: 44611 - DNA, 485 bp, Setaria italica
  misc_feature (451)..(451): n is a, c, g, or t
  misc_feature (457)..(457): n is a, c, g, or t
  misc_feature (461)..(461): n is a, c, g, or t
  Peptide Sequence Number=SeqID_110585
tgaagaagatgttcacacagtcacccatggaagataatcaagactgtgtaatggatactgttggcgttatttgtgtagatagctatggaaacgtagcatcaggtgcatctagtggtggtattgccctgaaggtagatggccgggttgggttggcagctatgtatggctctgggtgctgggcttcttccaaaggaccctttggcacaccattcatggttgcctgttgtgcgactggagctggagaacatttgattagaggatttgctgcccgtgaatgttgcatctcatcatcattgtcacaatctggtccagcttctgcttgtactaaagttctccgcactgtagttcaaagcagcagcaagatgtctcatgatacaggtgctgggttgttgctagttcaggttgatgctcaaaggagggatttgtctgaacctgaagctgagaaactaanaataanaaanaataagttaataataataacttaa

SEQ ID NO: 44612 - DNA, 172 bp, Setaria italica
  Peptide Sequence Number=SeqID_110586
gttgtcgaacatggtatatgctgatgacgacgagtcacttgctgatgctgaggaagatgaatcgtttccagacagggaccaggttggttatgatcttttgagcaatattcgtaactgataaaggcctattttatgaatggctccatttgtggccatccatcatagtggttac

SEQ ID NO: 44613 - DNA, 712 bp, Setaria italica
  Peptide Sequence Number=SeqID_110587
gctggaggttgatctcttattcattctactaacagatacacgttagtgacatcagactatactcagcactctattgctagatggagaaagggattggctgtacatgttgtcaagtttgccaataacaatgaagggtcacgggagcatagatggtattgtcagcatatacattctttctccaaaatatagttaatggcatcttcaacagtatcaacaaccgtatctgcaggaaactgtggatcattatcctttcccctaaaaaaacctgtccttgtaagaacagacgaccatgggtggccagccttcgaagctccattaatatcaactctaggattgtcaccgaccatgtagatagttgaaaatttgacaatcttttacttcctttgatgtctgtgaattaggatacatactcataacaagcttttcaagtatgtttgctgcgttcttgaacacaaatggattcggtttcccataagatgtatatttcagtggacggtcatttatttgattgaagatgctttccaatgctatcctgaaggcacccatcccaagccgttcggaaggaaatgcagcctggtattcaagatcatcagctgcaaaatacaaaggaggttgatccccttttccactcccaggaagcccaccagtggacaagatgtcacaaagtacctgtagatctcttccccagtcaacaggatcgctgacaacaaac

SEQ ID NO: 44614 - DNA, 534 bp, Setaria italica
  misc_feature (451)..(534): n is a, c, g, or t
  Peptide Sequence Number=SeqID_110588
aggtgtttttaggggaaggataatgatccacagtttcctgcagatacggttgttgatactgttgaagatgccattaactatattttggagaaagaatgtatatgctgacaataccatctatgctcccgtgacccttcattgttattggcaaacttgacaacatgtacagccaattccctttctccatctagcaaattgggaataatcgttggctggaggttgatctcttattcattctactaacagatacacgttagtgacatcagactatactcagcactctattgctagtctttttggtgactgaagaagctaattcatctgtaaaaggatcaaaggctcgatgctgtggggctgaaattgaaatgcaactcgattgtaatagatgttcttgtttacatgcagattatttgcttacctctaactggtcgttacttgtttgaagttatgnnnnnnnnnnnnnnnnnnnnnnnnnnnnnnnnnnnnnnnnnnnnnnnnnnnnnnnnnnnnnnnnnnnnnnnnnnnnnnnnnnnn

SEQ ID NO: 44615 - DNA, 327 bp, Setaria italica
  Peptide Sequence Number=SeqID_110589
tagtcatagaaacaaattcaatgaaatacaactaagctcgttaaacatctgtcggcacttatgttttagaatccaaaataccacggttccatgggccaaggacacatggagtttcttacagactcaagataaagtggtgcatccattgcactgaatacaatgtttcaatgagccagaacaaccatcaaagcagaacatcaaagtaatgctttacagaacatcaaactatacttctagggaaactagaaatatgctacaaagtgcaagccaaaagaagatatatgcaagactctctccttgttgaaagtgcaaccaagcaacgaattt

SEQ ID NO: 44616 - DNA, 316 bp, Setaria italica
  Peptide Sequence Number=SeqID_110590
tcttcttaaggccccaagcggcctcgccccgcctccgcccaaccggggtcgccggctcgccgccccacccgccgtccccaccggttgctgcccccagcacgccatctgccgtccacgccctctcacccttctgcaaccgcaattccactagaaatccatggccaagttttccttcgacgacgccgacgacgaccctccggccgccgcttccggaggcgagaagagaaagcgcgaggacggcccagcggaggccgccggcggctgggaacccccgaagcctcgaatcttggtggcccggggcggaaagccggagggg

SEQ ID NO: 44617 - DNA, 120 bp, Setaria italica
  Peptide Sequence Number=SeqID_110591
gtttctccttgcagtagttctgttcggagctacatgtacgtctgaaacgaaggcctaaagaacatcatttccagaattccagacatcgtggcatgaatctgaattcttaactgagcagct

SEQ ID NO: 44618 - DNA, 307 bp, Setaria italica
  Peptide Sequence Number=SeqID_110592
acatcctgtgtataattgggtagctgtagctcctccgtgagaccatgagacaggccaggtactgggtgtgatttgaggtttcatgcatattctgcaaggtaccatcttttctccctttacacaaccaaagatctactgattgcacccttcaagcaaacaaggcaacagtgtacagaacgacatgtcaatcatatccttcttttattcctgagcaatatgccaactttttctttaacaaaaaagtgataaacaattacatatatatgccaaactgtgtgagatatatagtatacatggagaaaaacgt

SEQ ID NO: 44619 - DNA, 1217 bp, Setaria italica
  Peptide Sequence Number=SeqID_110593
cgcccaccacctccggagtcttccccacctcctcctcccctgccgtgctctgcgctgccggccgcccctgcggacgccgtgagccgtccgcggcccctggttgtcctcgatttgtagtttattgacagaagtgcatcattgatcaacaagacttagtccagcacttcttttcaaatcagtatgattaccctttcctacaggtgggcaagcatagaacatcagtcatgatgttggactcaaagaaggaaaggaatctcagcacatgtttccaattaggccagaaatcttctgctcatttttgtttgttttcgaaagtccgatctgccagcccaccacctggaaatacaccagtttatctaaatgtttatgatttgacaccagtaaatggctatttttactgggctggtctagggatatttcattctggcattgaagttcatggtgtggagtatgcatttggagcacatgactattcgattagtggagtttttgaggtggaacctcggcagtgtcctggtttcaaatttaggaaatcaatatacatgggaactacctgcctggatcctctccaagtcagagagttcatggagattcagtcagtaaattacaatggggatacctatcatttgataagtaaaaactgcaaccatttctgtgaggatatctgcaaaaggttgacagggaatttaattccaaaatgggttaatcggcttgccagaatgggcgctgtttgcaactgcattctaccagagtccctcaagatcaatgcagtccgtcacgacccggatggccaagctgaagatagcgagaaaagaaggctgacaggtgccttcagttgcttctcttcaatctctctatgccaaagacatttctcaacgtcttccctcttcctacgttcccccgcgaaaggaacttcttggcatacgaaacagtcgagttctgcccgattaaagaagagctgagaattgaggtaccctgtacattgcatttccctcattgaagcaccaggattttttttatcagcaaccccttctacaacagtcatgaaaggatacaaaggtatttacaaggtggtgttcatgtctgagcattggctccagctgtgccttgaaatctgtacagagtatgtgtagaagttattcttaaacttgagttcacaatacaatgagctcaaacaaactcctaaaatatttcagttatggttgctctctatgccg

SEQ ID NO: 44620 - DNA, 498 bp, Setaria italica
  Peptide Sequence Number=SeqID_110594
gggctattcactgttttgaacttcaaatatctaagaaaattcaagttcctctacaagatgtagagttgcaggtgtttcagaatacgagggggatttgcttccacgaattgggttgggtgtagaaaagggagatgttgaaaagataactgagaatattgaaaagataactgagaatatcagcatcagtgcaaattctgtaactacaattggcactaaaagtcctgattctccagatccataacaagaggctcaggctctcagcatgaaatgccttcaattaacaaaaaggcaggaatttccttacagtagatggtaacctttaactgtttggagtatctaggagaccaagacaccactaattaactgacctcataaaatgtttcaaacagctcacacaaaatatcaatgcacaagtgaaaactagtcagattcccagcttcaaccaaatattacttttccctgggcacagggccttttgaaagttggcatgacataaac

SEQ ID NO: 44621 - DNA, 383 bp, Setaria italica
  Peptide Sequence Number=SeqID_110595
caagtttatctggaaacagtcggcgggttcatccaaggttccggtttagctatgaggaaggaggataaatttctcatgggtcgctgattctggagtctcgttcagatgagctcattgagcatgaagctacatttcttcttctaccaaaggatcaagatgggaagggagctgcagagagaatattccaaagcactcataaagtgaaaggttctgctgcaatagctagtgctcatctaattgctgaatgtgaagagctagatacatggatcgtctgctacgaaaaactcgaatgccttttgcaacataaggacttgccaccattttatgaacagaataacgagatttcaggcttatttggtaaaaattctaacttaagggtctta

SEQ ID NO: 44622 - DNA, 320 bp, Setaria italica
  misc_feature (308)..(320): n is a, c, g, or t
  Peptide Sequence Number=SeqID_110596
ctgtggaaaaagactgagcctgaaaccgacgggatggggacaaatgttgcggctgctgagattaacagattaaagttgatagacggtagaatcacaggatttacacaaaccatgggttatcatttttcttccaatttattcttttacttacgattcagctaatatgtcctcggctgcagattaggtccaataagttttgtatgacaagttgtatattctagggggtagcagatttgttgatatatgagtcactgaattgggaactactggaactcggaactgacaaaaaaaaactaaaaactaaaaannnnnnnnnnnnn

SEQ ID NO: 44623 - DNA, 430 bp, Setaria italica
  Peptide Sequence Number=SeqID_110597
ttgtcttcggaaccccaccaatattgagattggatttgaaattttcatctacatctagtaaattcaatacttgttatgcttgttttgctagttcttcgattgcttacaggacgagtgccctagtggccgggtgacacgccccacaagatcgcggtagccactgaaggtggtgtatcagttactaaggcacagcttggaaggctgtagtcagaccgtgaacgtcgtctccatccaacaatcgagttatcccacgccctctcatcgaaagatcgggaaccaaccgtagcgggttcctatcaaaacctagttaccagttctgatacaggtcaagtagttctttagtgactcgtgttttgaatacctagttaccagttctgatacaggtcaagtagttctttagtgactcgtgttttgaatacatgatttagac

SEQ ID NO: 44624 - DNA, 366 bp, Setaria italica
  Peptide Sequence Number=SeqID_110598
gtcgccatagcacaaagcaaacatgtttatcagtaacaatgaagggccagtaatggaaagaaccagtttcaagacataaccgatgctttccatcgtttaagtgtccaagcaacggttcgctgcaacatgccatgcatcatgccgccatgcagagcttaagtccaggaattgtaattgaaagtgcatggaaattgagccaaaaacttatgaagaacaaaacatctcagccttctgctgctattactacgagtaccaaacaaattagtgtcagcatagcacaaaatacacatgtagcaacttaaaaggcatccatcaaaggaccataaaaattgctgcccagtccaacaaagtctgaggattgtgagg

SEQ ID NO: 44625 - DNA, 154 bp, Setaria italica
  Peptide Sequence Number=SeqID_110599
acaggtgaatcagacgtatattaatcaatgatgaggctactttggtgagatggaagatttatgcgatcagagttgtatcaacctatatgtgaaggaggtaaccgtgtgctgaataatcatatgatctgactctgatttagggaattgctcggaa

SEQ ID NO: 44626 - DNA, 884 bp, Setaria italica
  Peptide Sequence Number=SeqID_110600
tgatggttccaaggaggccaatttgatagtgaaggagtatttgcacaaactgatgctgaagtggagtgatggcacctgcaaggatgagcagcagctggacatagagaaaagtgagagagtcattgaggcactatgtccacataccaatctcaagcatttacgcattcacaattaccctggaagaagacttccttcttgggtagagcagctctcatttctggagtctcttgagatagtttcttgccccaggcatgctcaattttccatggagacattgcagtcccgcagaaatttaaggatttcagtaatgtgatgatcttgcagcttattcaacctggattcccttcatcgtctggaaattcatgatgcttcgaatctgaaaataagtgcaggtacatattgccaaggaacatctctcgattgactgtaaatggaagcgatgccctggaggaatggtactgacaagaaggtgctgagagagtgcaacggattcgtgatccaaggattcaatttatcaattgatgtgacatatgatggtcatcaattttctctccaattggttgttgctggttctcttttgagctagtactaatttcgtgtccttagtttgcctgtcctagcagttgccgttacaattttcatttttgttctctaaataatttgtcgttatcctttgtggatttgcatgcctcctgtaccctttgatgtgtctctgaatcctgatgtcaatgttcgtagaagctcagttgctgaattagcattgactgttgcagcttccgatctgttgctgtgagatgcatggatatatctgaacatttaagtgggctcttggaataacatgaataatctaacctttaaaaaaacaaaactaaaaaagagaacta

SEQ ID NO: 44627 - DNA, 260 bp, Setaria italica
  Peptide Sequence Number=SeqID_110601
caaaaataactctctcgtctctcagcctagtccagcctattgccggcggggcaggccggccacgggccacgcccagcaggctccttgtccttttccccccggtggacttcgcccacgtttccatcttcctcggtagtcaccgccggcacttcagacagcagctaaatccaaggcaagaattcttcgtccattgttggcctctctccgcatccacctggtgctgtcttagcaggagccaaaaggaggcgctgggccggcca

SEQ ID NO: 44628 - DNA, 202 bp, Setaria italica
  Peptide Sequence Number=SeqID_110602
cgaccgtgcgccgcaccctgctctacttccacggctgctccgcgatcttcacggcgatcggcctcgccaaggacgccgccgagaacaaccgcggcgcccgcgtgctcgtggcctgcgcccacgccgtgctcctccccttccgcgcccccgaccgagaacagcctccgacaccctccgtcgccatggccccgtcgtttcgggt

SEQ ID NO: 44629 - DNA, 455 bp, Setaria italica
  Peptide Sequence Number=SeqID_110603
cgtgtggagcacctccgtgacggtgccgtgccacatggcgggcttgtaggacgtgacgaggccgctggggagcagcaggtgcgccacgctgccgttgctcagcgccatcttgacggcgcagctgccgcccacgggctcgaaacccacgccgtggccggcgaactcggcggccaggtactccacgttgacaggggcgggggagggagcagccgccgcttcttccgccgccgtcgccggcgccagcgcgcgcacctgaggagctgctgaactcgcaagccgcgccctctggctgccgccgccgcctagcttgggggagaggcacatagagatatgcttccttgagctggtgagaggggttggagtggcatggggcgctgcagtggcagcaggagtgcagaagggcgccatggccagctcttgcaggaactggtgaatggtgagtggcagcgtagcgg

SEQ ID NO: 44630 - DNA, 842 bp, Setaria italica
  Peptide Sequence Number=SeqID_110604
cttgatcagtatacactggctgggaacagaaaggccttgatgtggtggtgtggatgaccgacacttcagcaaccgcgtgaagaatctgatacagaattacactattcagaggcattggaggccatgaacgaggagactggtggattcaacgacgtcatgtaccagctgtatactataatgaaagaccagaagcatttgacgatggctcatcttttcgacaaaccgtgcttccttggaccacttggtcttcataaggatgacatatcaggtttgcatgctaatacccatctgcctgtccttgtcggtgcacagaagagatatgaagtcgttggtgacaatctttacaaggacatctcgacgtacttgtttgatgttgtaaattcttctcatacattcgcaacaggaggcacatctaccatggaacactggcatgacccgaagagactggtggatgagatcaagatcagctcaaacgaagagacctgcgccacctacaacttcctcaaggtgtcacggaacctgttccggtggacgaaggaagccaagtacgcagaccactacgagaggctgctcatcaacgggatcatgggcaaccagaggggaacacagcctggtgtcatgctatacttccttcccatggggcctggccgatccaagagcgtcagcggcctgtcaccctctggccttccgccgatgaaccctggaggatggggaggtccgaatgacacgttctggtgctgctacgggacagggatagaatctttctcgaaggtaggggactccatatatttcctggaggagggtgaaacgccaggcctctacatcatccagtacataccgag

SEQ ID NO: 44631 - DNA, 492 bp, Setaria italica
  Peptide Sequence Number=SeqID_110605
cctggtgcggggtttcgtggacgtcctcgtcctcgccggcggtcgcacctcatccggcgccgccgccacttggagctccgatgaggttaagaaggccttccggtgggcgttcttcttcgaggaggttttcaaggacctgcgtgaatcgggacattacgaggattctgcaggagaactcgatgcagcactcgttcagctcacttcaagcccagagttcccgaagggtcttgctggtatgcggtcggaaaccctttccaaggcaagggtattggttatacgacattttctgaaagcaaaagcaatgagtgtgcaaaattttggtgctcttcttgaagcagttgttgagatggatattgacggcatttgtgctagtggtgtgcccaatgcatgccaagaatatgctgagtcaatattggttatgaattcttcatttacgcagactaggaatgcttgtgacatcagacttcccgctagttctgacgaatggtatag

SEQ ID NO: 44632 - DNA, 283 bp, Setaria italica
  Peptide Sequence Number=SeqID_110606
gtcctcctcccaaaaccccgcttgccggatatggccagcggcgacctcctcctccgcgtccacgccggcaccccggtcctagcgagggccttcccctgccgccttcgcgacccggcgaggcaccgccgcggcctcgtgtgcctctggccgccgccagggtcgacgtcgccggccgggtcaggccgcgcggcgccgcgcccgtacagaatcggcggcggagggacgcggaggagcgcctctcgttctcaagggtggtcacgaggagggacgctgtcgacgagga

SEQ ID NO: 44633 - DNA, 1279 bp, Setaria italica
  Peptide Sequence Number=SeqID_110607
gcggcctgcgcctcgaagcgagcagcggggggatccggcggcgcccacgcgtgcgaggcgagccaaaccccagacctagaccggggcacagacggccaccagccgacgaggcctcccgccggcgccactcctccgtaaaccgccgctgcgctgccgcggtgctgcccaccaccggagatccatcaggtcgagggctgattctcctttttgttatccatcagttcaagcagagctgatggctacatcagagccagtacaagaaagtttgatgctggactacccacaacctagtaagcctcgggtccttcttgctgcttcaggaagtgtagctgctataaaatttgagagcctttgtcgtagtttctctgagtgggcggatgtccgagccgtggccaccaaatcatctttgcactttgttgatagatcatctctacctagtgacattgtcctttacactgatgatgatgaatggtctacctggaagaagataggagatgaagttttacacatcgagctgcggaaatgggctgatatattggtgattgcaccattatcagcaaataccctggctaagattgccagtgggctatgtgacaacctcttgacatgcatagtgagagcatgggactacagcaaaccactctttgtggccccagctatgaacacattaatgtggaacaacccattcacagagcgtcatcttcagacgatcaaccaactgggcataatcttgatccccccagttaccaaaaggttggcttgtggcgattacggaaatggtgcaatggctgaaacctcgcagatctatacttctgtgaggcttgcatgcaaaacacaaccccatgattcaagcagttcagttgtgattcctgtcagtaacaatcagccgtctagctgattcagctatcaacctcaccaactgttaagcttaggaatttcttttctctgcagtgtgcatcttgatgttagaattgaagagcattagatattaatcggcaatgtttgtaccaaccagagttgtagtgttgtacctttggatcaaagtacttgtgatctttgcatctggtagattgttcagattgggcagaagctgttgttacatccataacttcctccctacttagtagttagtaatgatagtgttgatgagtctgttcagtttatgttgtttgtgaaaatactctttacgcagccgtatcaaatgctgcaactttcctatcatctttcatgtcctgctgcaaacactgaaatttggaatgattgtctgaccatatgagtg

SEQ ID NO: 44634 - DNA, 430 bp, Setaria italica
  Peptide Sequence Number=SeqID_110608
gtgatgggttcctcaaaccaacaacccacaaatgaaatactagtaccaggccatagttgtgcctgcattgcccatgttgtgaagtttttgtttattatactgtaccatatcaaatcttaagctttagcattgttgctaccatttgcgggatgccaatttcttcataatccatgtaaaacacgactatttattatgactcatgtgagtttttacctaatggcagttgaagagcagcccagaagtggagagctaattacaaaagaacacgcaagtatttatttcggagtaggagtgatgatagtacaacactgagcaagcgagagatcgaggagttctcagtttctctacggctaaaagatggccagtagatggtatttagtactagcagtatattaacaagatggaagcatggatgcggcattttaggaag

SEQ ID NO: 44635 - DNA, 507 bp, Setaria italica
  Peptide Sequence Number=SeqID_110609
attggtaatatgggaaacgtctattggctatatttgagtaaaaatcaactgctcgggacgataccttcacaaattggccatctcaacaaccttatgaggcttgatttatctcacaacttattgagcggaacaattccaaaggaacttggagactgtcaaaagttgatgttagttaagttaaatgacaacaactttaatgggattcttccgacagtcattggaagtatgataaacttgcagattatgctagatctgagcaagaacaatctcaatggtggaatacccctagaattaggggaactgatcatgttggaaatctagaatctctctcacaatcaattgagtggaggcattccatcctctgtaacaagtatgcgaaacttgtcaatctttgatgtatcattcaacagtttggaaggtcctgttcggctgttcccaaagggatgcacaatgcttcaataaaatggtggcagaccaacatattggccacacagacccttgttatgg

SEQ ID NO: 44636 - DNA, 349 bp, Setaria italica
  Peptide Sequence Number=SeqID_110610
cgtcactatggcaacgcttttaacggaactgaaagcgccaaggagtcgagcaagaagaaaccttttgttgagaaagttaaagttctcaccaaagaacttctagaaaggtactgggcaccactgaggccaggggaaaactgattgtatcatctactatcggctattgtgggttcttgctcgagatggttcataccaccgagaagcagaagctgtagaaagttactccagtttaatttaatctgtgtatctgtgacatctcaaacttgtgttatgtcatctactatgtggtgtttaacttaatatatgatgtggcagacttgaaattaaaaaaaaaaaccaaaaaaaaacg

SEQ ID NO: 44637 - DNA, 536 bp, Setaria italica
  Peptide Sequence Number=SeqID_110611
acatgtaccgcctatggttttcttgcaatattattggtaggcaagaaaaaccataggcggtacatgttagtttgaaaacctagcttttggtgtaatctaattccaacccatctctttgtctgttactaaaaatctggattcaagacgatacatttcaatttttgttaatgtaaggaaaatttccaaattacttccctcaagtatgcccacagtcctgataacccctaaactattttgttcattttacacctacaactatgttaattggtccaatttaccccttagcaagacaaatcttataaggataaattgaaccaattggcatagttctaggtgtaaaataaaccaacaaaaagtttattggggttatctagacttcggccatacttgaagggagtaatttgaactttttcgttattgcaatggcatgaaaagttgttattctctttcatataatggaagacgtgaattgaataatttagaaacaaattagacccagtgcctatggttatccatcactacaccaaaatcgattt

SEQ ID NO: 44638 - DNA, 402 bp, Setaria italica
  Peptide Sequence Number=SeqID_110612
caagtttcctgagactctgcactaagaccattgcactaagaaaccgccactgccattactgagactgcactgcatagttcagttcctcagattctaacagcatcaaaaactgacaaatcatatgtaccgtgctactctagcatccttgaaattgaagcgaattagtaaatgagactcgatcgatcgatcatgcgcggcaggaggcagagggatgagcagtggcttacattgccggatgccagctggagctgcgtgtagtagagcgtgacgggctcggaggagacgtggacgccgaagaatgtcccggtgttgcggaaggtgagcttgacggtggcgttgagcgaggccatctcggtggggacgagcgacgcgtcggtgccggcctggacgacgaagcggtgg

SEQ ID NO: 44639 - DNA, 947 bp, Setaria italica
  Peptide Sequence Number=SeqID_110613
ttttaaagaaacgtttaattcttattccatctcaaactctcccacatcaaaaattcctctgtacatagcaatcgaccaatataattctccaccacgccacgcagtatatcgaccgagagagttcaagaacaccaaccaacaaacaacgaccacgacggagacggcagccacagcagacgagcaatggatatgcatatctataatgagctatcagtggctgtaggtgcaggcattcttgagggagacgggcttgccgagcttggtctggtccatggtgaccttgcagcgcgcctcgctgtggaacttgggcttgaccagcctgcccagcacgaacgcgcgcgaccgcagccgcaccgtcagctgcaggggcaccggcggcggcggcaccaccaccggcggcatcttcttcttgggcggcggcagtgtcgtcggcgtgctgctcaggctcgacccgccgccgtacagcggcaccttgtcgcccaccaccgacaccgtcaggctccgctggctcttccgcgcctggtagaagtacttgatattgccggatgccagctggagctgcgtgtagtagagcgtgacgggctcggaggagacgtggacgccgaagaatgtcccggtgttgcggaaggtgagcttgacggtggcgttgagcgaggccatctcggtggggacgagcgacgcgtcggtgccggcctggacgacgaagcggtggaacgtggcggagtgcagtgtgacgacgggccgctggttgcggctggcgccccagaggatgagcgcgaagaagaagaagaggccgaagaatgcacccacgaagaggatcccgtagcggacccgcttggggatcccgctccacccgccgccgccggacccgccgtacccgtcgtcgccgtcgtcgtccatccccagcagcccctcctcctcgatggccgcctccttcatccacggcg

SEQ ID NO: 44640 - DNA, 570 bp, Setaria italica
  misc_feature (164)..(164): n is a, c, g, or t
  Peptide Sequence Number=SeqID_110614
ttattttctttcaacacctctcctgaggccttagagatgaataccgcatatatgtggactccggatgagcttccagccactgcaacacctcttagtcaattgatattgaaaatatactaaatacaatgatacgcagctctcctgcgtgtttaggaaaaaaaagntattgaaaatatatgcactcaccgagtaatgtgaatggtaaaactttacaattgattttgattaattaagcatagggcaaggttgcatcagttttctaccttttagattcaatgaagctaatctaataatttagagcactttaatgacttacagcattatggaatagaaatactcaaataactatagagaaacaccccttatgtgcactaataatgaataaatgtaaatgaagataagctggaaaaaataatgtctggggcattacttgaaacaagaacgccgttgtcttcattatcatatactatagcagccttgaatccagcattctgtgcatttctaactttgtcatcaaattggcaaccgctcttataaccaaagcaaatgctgaggcagatcctttaactg

SEQ ID NO: 44641 - DNA, 333 bp, Setaria italica
  Peptide Sequence Number=SeqID_110615
atctccatcctcttggacatgtcatcttgacagaactcagttcctgtgttacagctatagaacagaggagtccgcacagatgcagcaccgcagagctgcaaagctgtgaccgtggaaggcgctagcgccaagcaccactgcaccagtcacctaaaccacccagatagaacacatgatgatagattggagaaacaacccgaaatccggtggcgtctccgaattgaactaggatatccatcacacagctcagggagcaccaccaactaaacacaaaaggggcataagagatgagacttttgagcacggaatcgcccataacacctctgaaagcgg

SEQ ID NO: 44642 - DNA, 860 bp, Setaria italica
  Peptide Sequence Number=SeqID_110616
atcagcaggtaagcgaatagcggaagaaagcaagggggtagactctgatacaggtgggtttgatgttccagcatttgcgtcccgcttgcatacagggcagaatgttcgccacgaggtaagccacaggtccacacaagctgcatggaactctgcaaattaaaacaaccaagcctcatacgagttaagaataaagcttgagatggaacaagggtcaagaaagatgcagcaacaagtattgcaaggtttcagatgcaagcaccactaatcattttttatataagcttgagatagaactttgtatctaaaaattccatatactatgcacatcatggaatcagggagcacatattcatatatgagaaggtgccaaaatgcatatgaaatgtagaaagattgtattcaatctagctaacaactcaagcctatatggactgtagggaactattttgatggaagatttttccatatacacactactcacacacaccattcttttactaacgttctagtggcactactctacattcacatctgtaagacatagtaaagaatagtaaacaatgcagacagatttcatatataaatgtgagaggtacatactgtgtcgacaaggtagcactcttagtttttctcccacagtgtagtcctccaagcaaatggcacatgttgatgatgtacaattgtcttcttgaacttttgtgaagatgagacttggcattgctttaactaattgactgctcattccatggaactctcgagcttgggggattcgagccctgtctcgtcttatctggtgtctcctcacaagaaacaagtagctaggacagcagacatagcaagcagtgatatgaatgaaattg

SEQ ID NO: 44643 - DNA, 1842 bp, Setaria italica
  Peptide Sequence Number=SeqID_110617
aatcattatggtgccccatcgatgagctcgcattaacgtgtcagttgggtgccaggtaaggtttctcacaggatctcacgaagccaccattgctgttaaagtggtgaattttgcagcagaaatcagcaccctggtagcgactgagatgacgtgtcagaatcaggacaatgctgtaggtagagctgacagaatgactgagttgatgccgcagctgataaacttgtctccgagtcgccaccatgctgaagctgggtctgttgtggtgatggcggcaccatggtgaacaggctcgggcctgacagtgtgcagtgccgcaggtaagggtgctgctgccctgaagatccagggtaatacctcggagatccatgggaaaagtgtgatgaacctatataccgactgggagatccgtagccagaacaggagacgtgtggtgaagtatacctgatgttgattggtggagacaaatggcccccacacaacgagtgcgcggatgcaaggtgcgatgtgcgagaccatggggatgacatatttgcaaggtctacattgcttccgcttctgtagatgggaggtgagtttgcacaagacctatgggggttaggggtgcgggggataccggaacttgaaatggagtaattacgggatatggattgtgatgaaggatgccggctgattggccttgggggagaggctgccactgttgaccggaacgaagctaaagcggttgattcagcaggtaagcgaatagcggaagaaagcaagggggtagactctgatacaggtgggtttgatgttccagcatttgcgtcccgcttgcatacagggcagaatgttcgccacgaggtaagccacaggtccacacaagctgcatggaacttgtgtcgacaaggtagcactcttagtttttctcccacagtgtagtcctccaagcaaatggcacatgttgatgatgtacaattgtcttcttgaacttttgtgaagatgagacttggcattgctttaactaattgactgctcattccatggaactctcgagcttgggggattcgagccctgtctcgtcttatctggtgtctcctcacaaagaaacaagtagctaggacagcagacatagcaagcagtgatatgaatgaaattgccatgattgaccaagctgagttctcgtatgttggtattatccacaactctgcttcagtttgacctgagtatttcttcaacacctctcctgaggccttagagatgaataccgcatatatgtggactccggatgagcttccagccattgaaacaagaacgccgttgtcttcattatcatatactatagcagccttgaatccagcattctgtgcatttctaactttgtcatcaaattggcaaccgcctcttataaccaaagcaaatgctgaggcagatcctttaactgcttttgttgtcaacggactgcatgcatccagaggttcagcagcataaagcacaccatttgcacctgaatttttcaccgctggagtaaaggttgcctcgacgtcatcgaatgacagggttgtgttgttcgccatgagtacaacattgcaagctcccagctgaaccatgaggcaaatcaccagaaagaaacaaagggggaatgatctccatcctcttggacatgtcatcttgacagaactcagttcctgtgttacagctatagaacagaggagtccgcacagatgcagcaccgcagagctgcaaagctgtgaccgtggaaggcgctagcgccaagcaccactgcaccagtcacctaaaccacctgcaatcatatcatattactacgagtaagcaaacaaatttgaaaagcaggagtgtagttgt

SEQ ID NO: 44644 - DNA, 317 bp, Setaria italica
  Peptide Sequence Number=SeqID_110618
acgaccgtcgccgtggtcaccgacttgggaggcgccggagacgtgggcagcggcccggccatcattctcgggagcttccagcagcagaactactacgtggagtacgacctcgggaaggagaggctggggttccggcggcagccgtgcgccgcgtcgtcgtgagcgaccgagctcgctcaggggagcttcttgctggctgcttccacgaattaattgcttgctccacgtactgttgctaatgacaaagctgtctgctttttaagcttgggtttgcagattgtactgctaaataaaattactacaccatcgcgtataac

SEQ ID NO: 44645 - DNA, 250 bp, Setaria italica
  Peptide Sequence Number=SeqID_110619
gggggcggcgttacaaagcatgtaaaagcaatggtagttcctctcaggatcagagacctgacatactcgcgatcgttcgaggagatatgtgcgaacagcagccccagatatcttcccatacttgtcgaattggatttcaacaaacttaccgaagcgacttgagttattgttcttcactgtctttgcgttaccaaatgcttctagtactgggttagactctagaacctgttgctcaacagtacgcccctcg

SEQ ID NO: 44646 - DNA, 713 bp, Setaria italica
  Peptide Sequence Number=SeqID_110620
gaagaaacacatggctcggatgatcccagggaccgagccctttggcagtgggagccaatcacacgtaaggagacatgacattacatcatctggatgtccaaagtgcagactacagggcacacagggggcagaaaaccaaaccattctgccatgtggccacctaattaacaacccgtgatcaagcgcgcgcgcaacattaggcctgcagcagcctgcagcacaggggcaacaaaaaccagcctaggacctacaagaatacatcagccaaaagcttgcccctatgatcagttcgaccgctgccgtcatgcgttctccttgatggcctcatctatggctttgatgttgtccctcaatattttccactgatccaattggagtgatatacctttcttggtggggagggtcttgccgtccttggtgtagaactcgcgcatgtcgacgtagaccttgcccttccagctcctcaccgacaccttcttattcttcgatatctcggccactacggtgccgtcttcggcggattcagagggcccctcgtccccggcggcctggcgcttggccgccggctcgctcccgcccccgccgccgaagcgcttcttccccttcccccacatcttcgatttctcaagcgttcccgattccaggtgccgcttctttcgagcgtggactgggggcccacttgaagtggatgaggcaaccaaaagcgataggga

SEQ ID NO: 44647 - DNA, 621 bp, Setaria italica
  Peptide Sequence Number=SeqID_110621
tagaaatgacgctatgggcattggctgaagtagcagcagcctcaacctcagccatcgtggcatcaggcttgccataaagaatattctcaaggattgtagttgcaaaaagggccggctcttgattcaccaaaccaatctgatccctgagccacttcaattgcagcgtcttgatgtccacattgtccagcaaaacttgcccctgattaggatcataaaaccgctcaatgagagcaacaacagtgctctttccagacccactgcctccaacaactgcagcagtttttccagcggggaagaagagagaaaagtcacggaaaatcatgacatccgggcgtgaaggatagctgaatgccacttccttgaattctatgttgccatgaacttcatcgaggcaccttccatccgcagtgtcctgaactatcgttggcctctgccttatcacctccagcagcttgtagcccgcaattttccctttgctgaatgctccaagatttgaaaatgattgccccaggctcagtccgccgacgattgctgagaaaattgcagtgaaggccttcccaccatctgtctggccattccggatgaacacgccagcataccagaacaccaatgcccatgaca

SEQ ID NO: 44648 - DNA, 2787 bp, Setaria italica
  misc_feature (2755)..(2755): n is a, c, g, or t
  Peptide Sequence Number=SeqID_110622
cctgaaccagcatcaagtgcacttgtggcctcatctagaagcaggatctttggattcttcagcattgcacgggcaatggcaatacgttgcttctgaccaccagagagctgcagccccctctcacccacatgagtgttgtagccgttaggaagaagagcaatgaagctatgggcattggctgaagtagcagcagcctcaacctcagccatcgtggcatcaggcttgccataaagaatattctcaaggattgtagttgcaaaaagggccggctcttgattcaccaaaccaatctgatccctgagccacttcaattgcagcgtcttgatgtccacattgtccagcaaaacttgcccctgattaggatcataaaaccgctcaatgagagcaacaacagtgctctttccagacccactgcctccaacaactgcagcagatgctggttcagagagtattgttcaagaagcccttgatcgcttaatggttggaaggaccaccgttgtggttgcacatagattatcgaccataagatgtgttgacatgatcgccgtgatccagcaagggcaagttgttgagactggtactcatgatgaactccttgccaagggtagctcaggagcttatgccgctctcataagatttcaagagacagctagaaaccgtgcgtgcccatcaacccgcaagtcccggtcatcccgcttgagcaactccctgtccacgcggtcactgagcctcaggtcaggaagcttgaggaacctgagctactcatacagcacgggcgctgacggccgcattgagatggtttccaacgccgacaatgaccggaagtacccagcaccaaggggttacttcttcaaactccttaagctgaatgcaccggagtggccctacaccatactgggcgccattgggtccatcctgtctgggtttattggaccgacattcgccattgtgatgagcaacatgatcgaagtgttctattaccggaaccccaacaaaatggaaagcaagaccagggagtacgtgttcatttacatcggcactgggctgtatgccgttgtcgcgtacctcgtccagcactacttcttcagcatcatgggcgagaacctgaccaccagggtgcggaggatgatgctcgccgtgatcttgaggaacgatgtgggatggttcgatcaggaggagaacaattccagcctagttgcggctcgcctcgccaccgacgctgcggacgtgaagtctgccatcgctgagcgcatatcggtcatcctgcagaacatgacctccctcctcgtgtccttcgtggtcggcttcatcattgagtggcgggtcgccctcctcatcctcatcaccttcccactcctcgtgcttgccaacttcgcccagcaactgtcgatgaagggcttcgcgggcgacaccgccaaggcgcacgccaagacgagcatgatcgccggggagggcgtgagcaacatccgcacggtggcggcgttcaacgcgcaggacaagatcctgtccctcttctgcggcgagctgcgcgtgccgcagatgtacagcctgcgccgcagccagatctccggcgcgctcttcggcctctcccagctctcgctgtacgcctcggaggcgctcatcctctggttcggtgcgcacctcgtccgcacccacgtgtccaccttctccaaggtcatcaaggtgttcgtggtcctggtgatcacggccaactccgtcgccgagaccgtcagcctcgcgccggagatcgtccgcggcggggagtccatccgctccgtgttcgccatcctcaacagccggacgcgcatcgaccccgacgagccggacacggagcaggtggagtcggtccgcggcgagatcgacttccgccacgtcgacttcgcgtacccgacgcgccccgacgtgatggtgttcaaggacttcagcctgaggatccgggccgggcagagccaggcgctggtcggcgccagcgggtccgggaagagcaccgtcattgccctcatcgagcgcttctacgacccgctcgccggcaaggtgatgatcgacggcagggacatccggcggctcaacctcaagtcccttcgcctcaagatcgggctggtgcagcaggaacccgtgctgttcgccaccagcatcctggagaacatcgcctacgggaaggacggcgcgacggaggaggaggtggtggaggccgccaaggcggccaacgtgcacggcttcgtcagcgcgctccccgacgggtaccggacccccgtgggcgagcgcggcgtgcagctctccggcgggcagaagcagcgcatcgccatcgcgcgcgcggtgctcaaggaccccgccgtgctgctgctggacgaggcgaccagcgcgctggacgccgagtccgagtgcgtgctgcaggaggcgctggagcgcatcatgaagggacgcacggcggtgctggtggcgcaccggctgtccacgatccggggcgtggactccatcgccgtcgtgcaggacgggcgcgtggtggagcagggcagccacggggacctcgtgtccaggcccgacggtgcctactcgaggctgctgcagctgcagctacaccacggctgatttctcttactggcgttcgagctcccggcgcgcggccggtgtagatactggaaggcggtgtagcgtgggcgtggcactggcccaaccgtggccggaagacgttagacgtgtttcgatgtaaacgacgatcaggaaggattgtgccgacgagtgatgcgggagttgngctggcactgctggcggctccggcgattttag

SEQ ID NO: 44649 - DNA, 465 bp, Setaria italica
  Peptide Sequence Number=SeqID_110623
cggcggtgccagtgcaggcgctgatctgcgggccgtaggcgacgaccgccgagaacacggcgcccgtggccgtgttgagcagcgccggcacggtgacgtcgatggcaaccaggatgacacgggggagctttggcgcctcgtcgtcgccgtcgccgcccttaccaacctgtaggtagatcccggccgcctccaggatagtcgccgcgatgtttacccatgccaggtagacaaatggtgggtagtttttgaaggtgacggtgaccctggaaccgtggggctcgaagatggagcactcgctcgccgtcgccatgacgaccgccgaggtgagcgccagcaccatcgtggacaggcggaacaggagggtcaccgccttggagccatttggctcctcgttcatggcatgacagccggatcccatggcgatcgacacactcgcgcttgttggctgaggggttagtaagttct

SEQ ID NO: 44650 - DNA, 800 bp, Setaria italica
  misc_feature (772)..(800): n is a, c, g, or t
  Peptide Sequence Number=SeqID_110624
ccgaagcaaaccggtttcgttagttgtgcagtttgagactttcagatcaataaggcactcttcattcctttcaagagctgttcaggagctagtgcaaggatccgatatccatggcgctgcggagaatcatcaaggagctcaaggacctgcagagggatccaccgacgtcctgcagcgcaggccctgtgtctgatgacatattccactggcaagcgacgatcatcggccccagcgacagcccctactctggaggcgtgttcctggtcaccatccacttccctccagactatccattcaagcctcccaaggtggcgttcaagacgaaggtgttccacccgaacattaacagcaacggcaacatctgcctggacattctcaaggagcagtggagcccggcgctgaccatctccaaggtcctgctctccatttgctcgctgctgacggacccaaacccggacgacccgctggtgccggagatcgcgcacatgtgcaagaccgaccgcctcagatacgagtccacggcaagggggtggacgcagaagtacgccatgggctagagctctttcagctctcctcactcaagcagctcagggagcatgagtggcggagtgagagagcagagcaggcaggggacaagatcacatgtaaccaacatccatgaacaataagattgctttaattcactaactaagcctagagttgagatctcaggaaggatgataactaagaacgatcatatgcacgattttgatggccaaaaaaaaaaaaaaannnnnnnnnnnnnnnnnnnnnnnnnnnnn

SEQ ID NO: 44651 - DNA, 435 bp, Setaria italica
  Peptide Sequence Number=SeqID_110625
agcggcgccacactgtggtctcacgctgccaccatcagcacggctgctgcacctgccactgccgcctgcgcccacatccgccagcggcccggaggatcacgcgtcgaagccgagatgtcgtagtagccgttgctgtttccgccgccgctaatgtacccgctgttgccattgccgttacctccgaaaccgccgccgccgtggccaaaggtggagttgtcgcgcggcagcttgaaggagagctcgtacgccggcgtgccgtcgggcttgaacaggccgtagtagcgctcggacgccagcccgggcttgaggttctcattgaagagcgcgaacacgtaggcgcgcaacggcaccccgggcttgagcggcgtgcccttgccctccgccaccagccgcatcgcgttgctgttgtaccgcgccgcgttctgcggcgtcgcg

SEQ ID NO: 44652 - DNA, 353 bp, Setaria italica
  Peptide Sequence Number=SeqID_110626
gcccgcaatgtgtcttctacagcatcatcaatagctcttagttgcaacctaaatggcaagcaaatattagcatcacggcattgaataacccaatcgcacacagctgcagattgtaacttcttatcgggatggctatcagaaacagaaactgggatacgagataactgcatgcgactgcttttgaatatccatgcaccacaaaaactgactgctagtccctcgaccaaaacacctatctttgcattctcagaaaatatggatcctacttgaaccattgcttcaaccccatcagcaagttcacctgaaattttcaacgattccaaatcgatggcaataactgattctcgcttcct

SEQ ID NO: 44653 - DNA, 606 bp, Setaria italica
  Peptide Sequence Number=SeqID_110627
tcaactagaaaaatggtcggtgtgcctataggtccccgggccgcttcatcatggctctacatctacccagaaggaatccgtgagctgctgctgtatatcaagcaatactacggcaacccgaccatctacatcactgaaaatggcgttgatgaagccaacaacaagactgtgacactgcaggagtcgctcaaggatgacaccagggtggatttctaccacaggcacctgcttgccctgctgagagccataagggagggtgccaacgtgaaagcatacttcgcgtggtcgctgctggacaacttcgagtgggggaacggcttcacggttcgcttcggcctcaacttcgtggactacagcgatgggaacaagcggtaccccaagaaatctgcgcactggttcaaggagtttctcaggaaatgagcatgatgaacgacgctgggacaatgctaaggtctcagtttgtacgattggattgacagtgcgtgtaccgtgagagacaaggtgttacaataaaaggatcggccaaaaacaaagaccatggtactaatttttttttaaaaaaaaaataaacatcacggtcaatttttaacaaaattaacgtcccaa

SEQ ID NO: 44654 - DNA, 1520 bp, Setaria italica
  Peptide Sequence Number=SeqID_110628
cttataacagcgcagcttagctctctcgcggcactgcgacagcgcaccaaacggccgcgagcgtagctgctgccatgtccggtgctcgtctgctgcttgcagttgtccttgtagctgtcgcttccggcgcctacgctggctatgatacagccggcacgccgccgatcagcaggagaagcttccctaagggattcgtcttcgggacatcctcatcggcctatcagtatgagggtggtgcgaaggagggtggcaaaggacaaagcatctgggacaccttcacacaccagcaaccagataaaatcgccgacagaagcaccggggatgtagcagtggactcctaccatctgtacaaggaagatgtgcagctcatggagaacatgggaatggatgcgtatagattctccatctcatggacaagaattcttccaaatggtagtctgagtggtgggattaacagagaaggtgtcaattactacaacaatttgatcaacgagctcctggctaaaggggtgcaaccatatgtgacaatttttcactgggactcgcctcaggtactagaagataaatatggaggatttcttagccctaatatcgtaaatgacttcaaggattacgctgaagtctgtttcaaggagtttggcgaccgagtgaagcactggatcaccttcaaccagcccttcaccttcgcctcagggggctacgccaccggcacaaaagcgccgggccggtgttccccatgggagggaaaatgcagcgctggggactcaggaagagagccttacatcgtgggacaccatgagctgctcgcacacgcagaaaccgttcggttatacaaagagaaataccaggctgcgcaaaagggaaaaatcgggataaccttagtctcacactggtttgttcccttctcccgctccaaatccagcaaagctgcagcaaaacgcgccatagacttcatgtttggatggtttatggaccccctcattagaggtgactacccagcaagcatgaaaggattggtcggaaatcgcctgcccatgctcactaaagaacagtccgagttggttaagggttcattcgacttcatcggactcaactactacactacaaactacgctgaccaccttcctccatcaaatggccttaacaccagctacagcactgattctcaagcaaacactaccggtgttcgaaacggtgtgcctataggtccccgggccgcttcatcatggctctacatctacccagaaggaatccgtgagctgctgctgtatatcaagcaatactacggcaacccgaccatctacatcactgaaaatggcgttgatgaagccaacaacaagactgtgacactgcaggagtcgctcaaggatgacaccagggtggatttctaccacaggcacctgcttgccctgctgagagccataagggagggtgccaacgtgaaagccaagaaaggaaataccgtagaagactagactagactagtaataatacaaagacaaataactaacggacaaaca

SEQ ID NO: 44655 - DNA, 731 bp, Setaria italica
  Peptide Sequence Number=SeqID_110629
ctacattcgtcttcttttttcttttctttttttgaaaaacaattgcacttcgctttctcagttggcaattgacagtcaaaaactaacagttaaattagcccctcataagaagaaaaactcctgtggactcgaattcccatcaccactgtacttatccttacttgtatgccttttagtttgcatccataattaatgaagattagtaaccaaaaaaactaacttacggacatcgcagaaatgacttcaaggattacgctgaagtctgtttcaaggagtttggcgaccgagtgaagcactggatcaccttcaaccagcccttcaccttcgcctcagggggctacgccaccggcacaaaagcgccgggccggtgttccccatgggagggaaaatgcagcgctggggactcaggaagagagccttacatcgtgggacaccatgagctgctcgcacacgcagaaaccgttcggttatacaaagagaaataccaggctgcgcaaaagggaaaaatcgggataaccttagtctcacactggtttgttcccttctcccgctccaaatccagcaaagctgcagcaaaacgcgccatagacttcatgtttggatggtttatggaccccctcattagaggtgactacccagcaagcatgaaaagattggtcggaaatcgatacgacctagaccccaatagactacaactaaaagaaacaagtaccgaagttaggttaaaggga

SEQ ID NO: 44656 - DNA, 523 bp, Setaria italica
  misc_feature (482)..(523): n is a, c, g, or t
  Peptide Sequence Number=SeqID_110630
ggcaagacaagatagtgtttttgcatgccatacagttcctcagattctcttatccaaaaatattctttcgtgagttgaggtcaattaagtaagaaatttggtttctgcaggcactgctgcaggcacatgatcttgctagttcttgaaagaatttactgggagcttgctgttttgcttcatgctatcatgaagaatgaatacttaacatgcgaaattgtaatgggagactagagttatgttatttagctagaattactagctgcctctgttgaggaatatcttgatgcaataatgtggcatcctttttgaatgttttacacggtagttgatcagttacttgagtcaatgtctgggtgcaatgctgaaattattgtttatgtaagcctgttctggtttctttctttccttttttgcatttttatttgagactcatgtttgcatcttgagagagctgcatgcttgcttgatatttttattaaacnnnnnnnnnnnnnnnnnnnnnnnnnnnnnnnnnnnnnnnnnn

SEQ ID NO: 44657 - DNA, 365 bp, Setaria italica
  Peptide Sequence Number=SeqID_110631
gtgtgtgccttttctttttctttgacacggcttaagtcactcatgtagctttaacataagaagccttctcgttgtcgatgttaattagattactttttgaaggaccaaatccgcaggtgtcactttgcagatgttgtttccagttgttccacgaacaccccctcccctccctcatgcccgttcatccacgcgcaaacggccatttgacagtacaacactgtaacaattagcatggtttacttgcctggcaatgtgttaaagaaccagccggattgagtatttgagtgtgctgcggtaaaaagtgcatagttatttgttcaagggtaatgtctctatcaataccaaggattaccgcatatattaat

SEQ ID NO: 44658 - DNA, 998 bp, Setaria italica
  Peptide Sequence Number=SeqID_110632
gcaggattgctgaggagaatgaacggctccgagggcttttatcttggagagatttgtcccgtcgaccggctggattgtgaaagccctgcagtgcactgaggaagagatcttggctgctgctgggttggatgctgttgttttcaatagaattcttgtattcagcatacgcatcttctcccttgctgccgttctgtgcgtctttggaattcttccgctcaactattttggacaagatatcaagcatgttcgaattccttcggaatcactggatatatttacaatcgggaatgtggaagtgagatcaagatggctctgggtccattgtgtagccctgtacataatttctggagtagcttgtattcttctatacattgagtacaagcacattgccaggttgaggctccttcaccttacaagcgcaacaccaaatccaagccactttacagtccttgttcgtggaataccaaagacagctaaagagtcatgcagtgatgttgttgacgatttcttcacaaagtatcactcatctagttatctcttccatcaagttgtttacaaagttgggaaagttcagaagataatgactggcgcaaagaaggcatataagaagttcaaacatttcaccgatgaaactgtcgatcagggatgcaggtccattacttatcgctgctgtctctgtggagcctcttcaaattctttcaagttgttgaacactgaatgcaagcagaataggcggaaacctgacaatgaatccagcttgaacttagatgatgaggaatgcacagctgcttttgtatttttcaaaactcggtatgccgcacttgttgcatcagaaatacttcaaacaactaaccctatgaaatgggttgctaatctagctccagaaccagaagacgtctattggtccaatctttggctaccctataagcagctctgggttcgtcgtatagctacactgctaggctctattgttttcatgttcttatttctggtaacca

SEQ ID NO: 44659 - DNA, 309 bp, Setaria italica
  Peptide Sequence Number=SeqID_110633
aagctgagcttctttgaacttttcagacaaaaggaggatatcgaagcagccatgatcagtgccaagagactcgctcagatggcaagaaagtggcaaagaatggccgctctcgcgaggaagaggctcatgcccacccggcgaaagagaccgagggatcgtcctgcagcagcagcacgtcgtcggtggccggcaagggccactgcatggtgtactcagctgacggcaggcggtttgaggtcccgctggcgtacctcgccacggcgatcttcagcgagctcctgagcctgtcgcaagaggagttcgggttcg

SEQ ID NO: 44660 - DNA, 983 bp, Setaria italica
  misc_feature (964)..(964): n is a, c, g, or t
  Peptide Sequence Number=SeqID_110634
aaaggaggacagaggggtgagagagggagagagagctgagaaggcatggccatggagagtagtgaggagggagccacactttgtggccaccaagaagcggcggcggcggcggcggccgtgaagggaggaggagggggcaagaggaggaagaaggggcagaggagagggggagaagcaggcggggagaggaagaagtacaagctcgtgagctaccacgagctgccggactacatgaaggagaacgagttcatcctcaactactaccgctccgagtggcccatcctcaatgccgtcctcagcctcttctcctggcacaacgagaccatcaacatctggacgcatctccttggcttcatgctgttcttcggcctcaccctggtgcatcttggccagtacttcccccaggttgctgatctgattgggcacctttcctggccaatctcaaaggttgctgaaaatgtctccagcaatatcggggatgtcttatcgggtgcggcgatgttcatccagacgaacccgacgctggcgtcgtacggcacggcggtggcgtcgcagacgacgcggtggcccttcttcgtgttccttgccggcgccatgttctgcctgctgagcagcagcgcgtgccacctgctgtcgtgccactcccaccggctgaacctgttcctgatccggctcgactacacgggcatcgccgtcatgatcgtggtctccttcttcccgcccatctactacatcttccagtgcgagccgcggtggcaggcggtgtacctgtcggcgatcacggcggcgggcgttggcacggtgtacgcgctcatgtccccgcggctgagcgccgcccggtaccgcgcccaccgcgcgctgctgttcgtcgggatgggcctgtcgggcgtggtgccggcggcgcacgcggccgccgtgaactggcacgagcctgcccggaacgtgacgctggcgtacgagggtnccatggcggcgtcgtaccg

SEQ ID NO: 44661 - DNA, 144 bp, Setaria italica
  Peptide Sequence Number=SeqID_110635
gggtgcactgcaccgtcatggggccatcgttatgttcctagtagcccacttcgacgataatttgggttgttgtatcatggatgctctaagctatcttgtaagcggaccggaagaaatggctatggattcgtcattacgtgcgcc

SEQ ID NO: 44662 - DNA, 343 bp, Setaria italica
  Peptide Sequence Number=SeqID_110636
tgtactgtgaataagcagaatctaggtaagtcaaacaaggacacatgtatgccagtttaaggagtaaacaacataagcaatgatttgtcttctgaaaatacaaattcatttttgtgattttttcaagatccctttcaccataagattattacttaacacgaaaaataaggatataaaatccactagcttaatagtcatgaaccaccaatcattttattattcaccaatatatcctaaaaacctaacatgtctaaggttccaaaacttccatatttatttcctccccgtgaatataaattgtacatacctcccggagaataaaaacatggttgagaacacaaat

SEQ ID NO: 44663 - DNA, 893 bp, Setaria italica
  Peptide Sequence Number=SeqID_110637
aatttccaattcctccttaagagcaggttcatgatgttctggcgtcaatctatccatttctcctaaatgcctagcaaaactttcttgagcatgccatggttcatgtttatttacaagtggagttagattctttaaaggatcagtgtgatgtctactatgcataggagtgaatggataggttctagagcgtaaatcatcttccggcaaatcacgatggggcctccttgggtagtcagggagaacttttcctcgatcaaattcagagaaaggatattcaggaagttccgtatcatgcacctgagaacccctcagctcttttgaaataaggtatgaattgtcttcaacatcccaagaatcttccaatggtaagggtctccgaggtctctcaaaaggaatgttgcgccatggcgcatcactcctagcagtagggctttgtatatggggctcatacaattcctcaggcatccttctttctggaccaagctcccgtattctaaaaggcttgatattagagacacggccaagctctgctccagcttcatgttgaaaataaccatccctgtggaatcccatatcatctgaatctcttgataacctatttaggccaaaatgtggtgatgccatgcggaaatccctcggagggctatcaaaaggtctagttgtaggaaaggcttcaaagtcttggtctctgaagacaggctgagcactaggttggggggaatatggggcaacaaatgatcttttcccaacttccggtgcagcaccttcacttcgagaaaagcatatgcttactcgaggattattgaaaagctttccctgaagtgcttcttttgctctgcaggctgctgcaatactagtgtactggacaaatgcatatgtacggcctgagaatg

SEQ ID NO: 44664 - DNA, 603 bp, Setaria italica
  misc_feature (1)..(33): n is a, c, g, or t
  Peptide Sequence Number=SeqID_110638
nnnnnnnnnnnnnnnnnnnnnnnnnnnnnnnnngtttattgaacaataaggataattcaacggctgcagtcgtaacatcaaaataggatgaactgggtaatttctctcatctgatacctctcctggactaagtttaggagcgcaaaaggatactagtatatacaccatccatgacctggctagtatgtacaattttgtctttcaaatcagcaagggagcgtaaggaagaacaaaagaatggagcgaaaccaggtcaccgttgctatcagtcacctagctaggaaagcaaatgtggcgagctttcattgttgctgcttcgagagctttcagacggtcgctgatgcttcgccatttgcacatcccgggtgaactgggtccttgattttgcataaggagcttcccttgctgcagctaacttttgggcgcggagaatgttctgccgtcttttccaccaacacgctgcaaacacaactagaaaaagaatagctaaaagcaccccgaaagccatgccgattttagcagccacggttacgtgaatgccgcattcatctaacccaggaattccacatagtccagcattatcggtgaagttgaatctagctc

SEQ ID NO: 44665 - DNA, 239 bp, Setaria italica
  Peptide Sequence Number=SeqID_110639
gtagaaggtatatatgcagcaaatactgtattcggactaccttctacaagacaagcttctacaacatttcagatattatacagcgtattgattttggtgttatgtgtcttcatcttttttgtttgagagctctttaacagcttggttgctattatttctgttcacacacgcaccaacacaccaaactaaaagatgaagacacataacaccaaaatcaatacgcttctacaacatttcag

SEQ ID NO: 44666 - DNA, 463 bp, Setaria italica
  Peptide Sequence Number=SeqID_110640
ggcaggagaaacagcgggggagcggaggcggcgagggcgctgccggagccgggcagtggaggaaccccggtgggcggcggaggcggcgggggcgtctggcccccacgggttagcgtcgggcagtggaggccgccggagctaaggggaggtggtggcggcgggggcgccgtgcctggcgtcgggcgtcgggggttcggggccggggcgcgtatcccgcgcggaagatgaaagaaggaagaagaaagagagaaaggagagagccagggcctcgccgcgacgcggatcggctcaccttggtcactcccgcttctcttcggcgaggtcgttcgagaagcttccggaacccttgaggcgccgccggccgcgacgccgccaccgtcgattggcgaggtaggaattggatttttggggacaaggccggccggccgttgggaggaaggaatatataggtgagcccttctcc

SEQ ID NO: 44667 - DNA, 595 bp, Setaria italica
  Peptide Sequence Number=SeqID_110641
gggggtatcaagttggcttcacagaatgtgtatattcacatctaaagaagttggtgctagaagctgtgcgaggcgaggatagtgagctggcatttgcaaagtttgtcatggaaagagctcaaatgctggaggatatgcgtgtcttagtggatggcagttgttcaagagatgttgttctaagtcgtttgtcttcggaagggtgtgtatcagcagatgctacagttctggtggagaggcacgatgggactgcatggaccttccagagagccattgacttgttgcagagtgacccatttggttgctgaacctggaggtcttccaattgcagccaataaccacagcagacttccaccgaaacagctcgtcggggacataccaggccccaatgagttgaatcaaggaacatgatatgcgcgtgctttgtaaagctttgttgtgttgctgtcatgttgtatctgtacttgtgaaggagcatgatccatgttgctaatccgtttgattcttaggattttaagcgtttgagttcattctctgtatgttcttctcaactttacaccgttgtatttgaacaactagtcttgtcgttattttcttt

SEQ ID NO: 44668 - DNA, 379 bp, Setaria italica
  Peptide Sequence Number=SeqID_110642
ttattcacatctaaagaagttggtgctagaagctgtgcgaggcgaggatagtgagctggcatttgcaaagtttgtcatggaaagagctcaaatgctggaggatatgcgtgtcttagtggatggcagttgttcaagagatgttgttctaagtcgtttgtcttcggaagggtgtgtatcagcagatgctacagttctggtggagaggcacgatgggactgcatggaccttccagagagccattgacttgttgcagagtgacccatttggttgctgaacctggaggtattctcaaagaccttctcagatactttttcatgttgtattctgcatatcaagttgtattataattgttagccttagcccttcagtatagttaagg

SEQ ID NO: 44669 - DNA, 2279 bp, Setaria italica
  Peptide Sequence Number=SeqID_110643
cgatggactgtactgtaagacgctggagaaatggcaatgctatagaggtttgggaagcgcacaaggtcgcggtgcagactgttctaaagctgcccacaggagaactttttactggttcaagtgattccactattaagctttggaaaggaaggacttgtatacagacattctcaggacatgcagatactgttagatgtttagcagaaatgccaggtctaggaattctttctgcctcgcatgacagcactgtcaagttatgggcgttgacaggtcagcccctgctggagatgattgggcattcatctcttgtatattctgtggatgcacattcttcaggtctaattgctagtggcagtgaggatcgttctttgaagatatggaaagatggagtttgtgttcaaagcattgaacacccgggatgcatatgggatgttaaattcttggaaaatggagatattgtaactgcttgttctgatggtactgcaaggatatggacgacccatgctaacaggttctgcagtgatgaggaacttgcagcttatacagatcttatttctcaatacactcttagcagaaagaccgttggtggactcaagttgatggatctaccaggggttgaggcactgcaagttccagggaactctgatggccaaacattgattgttagagaaggggacaatggtgttgcatattcatggaattcggcagagctaaaatgggacaaaattggtgaagtagttgacggacctggggacgctgcacaaggccaggttcatgatggtgttcggtatgattttgtttttaatgttgatattggagatggagaacctatacgaaaattgccctataatcgttcagatgatccatacgcagtcgcggacaagtggctcctgaaagaaaatctgcccttgacatatcgccaacaggtggtagaatttatactgcagaattctggccagaataactttgttccagatccatcttttcgggatccctacactggggctaatgcgtatgtacctgggggacaaccatcttcatcaaatggtaatgctccaaaacaaatttttaagcacatacccaagagtggaatgctgtcatttgagacagctcagtttgatggaatcctgaagaaagttacagagttcaacaccacactttcatctgactcggaacagaaacaattatctctatctgaggctgagatgtcaagattacctgccatagtgaaagtattgaaagagacatcattttatcacacaagcaagcttgcagacgctgacatggcattgttggtaaaaatattgaactcttggccttcaaaaatgatgtttccagttattgattttctgagaatgttcgtgttgcatcctgatggagctgctttacttctcaagaccatcgaaactggaaatgatgtacttatggagacccttcgtaaagctgtagcacctcctgtgcagccagcaaatttgcttacaatccttaaagctctgacaaatttatttgacaactcatgcttgcaccaatggttgaggacccacagtgctgagatcattgattccatgtctaactgcaagtcttcgtttagcaagaatgcacacttggcatatgccacacttttactgaactatgctgttctttcaattgaatcaaaggatgaacagagtcaggcgcaaattctttctgctgccctcgagattgcagaagatgacactcaagattttgactcgaaataccgggcactcgttgcaatcggttctcttatgcaaaagggcaatgtgaagtctcttgctcttgaccttgatgttaagagcgttgcgagtagcgcaaaggcatctatggactcgaagatcgctgaagttggcgctgatattgagctgctaacaagatgaaaaagagggttgttcgtttgtggttgggggaaattcctccactggaggcgccattgtgcgtaatttaaccatggggctggggttctcacggcaagccaattcagatgccatcctggagctaccacggttttccacccgaaggccatagggttatgcttattgtttcaccttataaccatcgtgggactatggaagtgtggatttttggtgcttgcccttagctttttgtaaattaaataactgggctggttgcctcgatcaaaagctttatgtcggaatgtttacgaggacggcgacagcccgatcggcgtcctttaactctgaattcttatcagcaagtgcatagtctcagagcttctatgagaataggtttttaaaaaaaaa

SEQ ID NO: 44670 - DNA, 322 bp, Setaria italica
  Peptide Sequence Number=SeqID_110644
aatccttggccaccatcttcttgttgtacttggtgggcaactcgtacacatataccttgagcctcccaacaggatcatcttctagcacatcaccagcacttccttcgatccgctcggtgtcctgcgccgcgacgacggcgacgtgagcgaaggcgagaagcaaggcgagcgccagtgccggcgcccgcgcgccccccgtacccattagccgtccgtccgcccgacacccgcggtggccgccgcccgccgcaccttctctccacgcccggcgcctcggtcaggaaggacggggagagatcgagagagactcgagagggtcggg

SEQ ID NO: 44671 - DNA, 245 bp, Setaria italica
  Peptide Sequence Number=SeqID_110645
tggagccttccttgaggcatacatgatccttctgcccgaaagtctggaccagtgtagcacggcgcagcactggaaggatacctcgctcgatagccttcggatccttttaaataggaattctgcaagatgggcaaccgattgctgttaagaagcttgcggataattcaccggtggcgcctgagaagcagttcctgaatgaagtcatcaatcttatggccgtccagcatgagaatatagtagaaatt

SEQ ID NO: 44672 - DNA, 689 bp, Setaria italica
  misc_feature (30)..(30): n is a, c, g, or t
  Peptide Sequence Number=SeqID_110646
ttgaagttactcccaaacctgatgcacggngcccctgcattgcatatggtaggtgcatcaaggctttcgagtcaatgattcatcaagactgcttgtcagttacataattcagtttttaggagcataccttgcatagtaaccaccctcaggatcatttgaagtatcatagaacaaaccacggaaatagacaaagattgaccgagggggtctctggtggaacaaggtgagttctcatcttataaggaggagtatatggtgggatggtgatggagccttccttgaggcagacatgatccttctgcccgaaagtctggaccagagtagcacggcgaagcacttggaaggactcctcgctcgatagccttctcttcctggtaatggaagcatgcaccaaagtcatgaggcacaacaaagaaatgatctgctccctctgtcctgttccagtatggccaacgcttggaaatgaactgaattgcacttctcattatccttggagacttgaagggtaagggatgaccccatggggtaaggtcgcaagttgtatatactggagtatagaaccaatcagcttcttctggatttaaagtccggattgcactagacaataggaaccggtgcatgaagatgcctcagccacatgttcgctgcagagatcttcatgcaccggttcctattgtctagtgcaatcc

SEQ ID NO: 44673 - DNA, 727 bp, Setaria italica
  Peptide Sequence Number=SeqID_110647
ttttttttggaattaaccttactttcccccaccgtaaaccggcaactgtataataatataatacaacggtcatacattacatgatccaccagctatcatctatatatgctaacactaaaagaaaggtcaaaacaggtattgccatacaggcaaggcaggcacattgcctcaaaaagaagcaaggtaggaggaagggaaggagctttacatttaatggtgtagttcactagcatcatcgtcaatgatcagcctctcgtatggttgtgtcgtttacacagaacaccagaacaccagccgtggtgaatggtgatggtgccatgccactatacgtctatacctaccacggcttcaggtcagccggttccccctcggtccagttcagcaccttctgcccgggcttcaggaacacgcccttgccgtgcggcagcttccgcgccagcccgttcaggatctggtggaaggcgtcccggggctcggtcggctgtgggaacagcatggcctgcttcatcgatgggttcgcgagcagcctctgcttccgaaggatcacctccatcggtatggaggtcaggatggtgtccagcttggggacgttcattccttctagtccacaaagacgccgatttcctcccatgggatcgcgtccgcaaagggaaggacaatgtcgtcagcaatgatcaccgggatgctagtcctaaagtacctactagtccttcctacctaaacgggt

SEQ ID NO: 44674 - DNA, 1823 bp, Setaria italica
  Peptide Sequence Number=SeqID_110648
gcaggttcctggattggagttaactttattttcccctatggtaaaccggtaacagcatataatataatacatacagtatactacaacagccatacattacatttgccaccatctaggctaacactaaataaaggtcaaaataggcactgtcatacagggaaagcaggccacattgcctcagaaagaagcatgaaggagctttacatttagcggctatggcttggttcactcaccagcatcattggcactgatgcctctcttggttcactggtatggtctacacaagaacactagccatggggatgatgccatgccactatgcctaccatggcttcagatcaccccgggggccctcggtccagttcagcaccttctgcccgggcttcaggaacacgtccttgccgtgcggcagcttccgcgccagtccgttcaggatctggtggaaggcgtcaccgggctgggcgggctgcgggaacagcatggcctgcttcattgatgggttcgcgagcaacctctgcttgcgaaggatcacctccatcggtatggaggtcaagatggtgtccagcttggtgacgtcgtcctcagccacaaagacaccaatctcctcccatgggatagcatccgcaaagggaagaacaatgtcatcggcaatgatcacggggatgcagccgaacaccacagcttccaccaaacgggggctccatggggcccagccaagtgggcacaagcagaagacggaacgctgcatgtcctcatagtaggttggtggatggtctgtcgagatgtcgaatagtgggttgttcttgaagttctcccatactgatgcacgggcgcccctcgcatagtaaccaccctcaggatcatttgcagtatcgtagaataaaccacggaaatagacaaagattgaacgaggggtttctggggggacaaggtgagttttcatcttctgaggaggagcaaatggtgggatggtgatggagccttcctttaggcagacatgatctttctgcccaaaagtttggactagagtagcacggcgaagcaatggaaggactcctcgctcgatagccttctcttcctggtaatggaagcatgcaccaaagtcatgaggcacaacaaagaaatgatctgctccctctgtcctgttccagtatggccaacgcttggaaatgaactgaattgcacttctcattatacgcggagacttggtggtcaagggatggccccatggtgtaaggtcacatgttgtgtatactggagtgtagaaccaatcagcttcttccggatttaaagtccggattgcactcgataataggaagcgatgtatgaagatctccgtagcaaacatgtgcttgaggcatctagaatcttttgccaaaatattcttgttgtatttgggcggcaactcatagacatataccttgagccttccaacaggatcatcttctagcacatcaccagcacttccctggatccgctcggtgacctgcgccgcgacgacggcgacgtcggagcaggcgaggagcaaggtgagcgccaggggcagcgcccgcgccctcgccgtccccattagtcccgtcacccgcaccgacgcctcgtcccttccctccacgctcggcggctcgggggcagcggggagagacggagaggctccagccgagactcgagagggttgcgggggaggtgggagggagctagcgggattctccgttctcggcacggagaatagaataggacctagacttacaatacgaatagggttaacgaacgaaagaacaaagaacctaactaagaaacttaaaccgaaaaaaggaaaattaaac

SEQ ID NO: 44675 - DNA, 418 bp, Setaria italica
  Peptide Sequence Number=SeqID_110649
gctccagtatagttaagggatgcaaacaggcagatgatcaaattaagatttgcagagttaactcaaatgataaatcttgctactttcaagtttgtagcataaatcaaaagttcagaatttactgttatctattgaaggaagtataaaggaggagaaaagccattataacgcctgaaactgcatcattttcttctacgattctggtgcttccacacatacagaatctaatttaacattcagatgatctattgcttttttagctaattaagtgacttcttagcatgccgtgtcaaatcaggcatacgaatttaatgatccacatatatataacagcattgagccagtgactcactcatgaaaagatagtttgagaataaaagagcaaggaattgcatgtactatgagtggagaattgctg

SEQ ID NO: 44676 - DNA, 608 bp, Setaria italica
  Peptide Sequence Number=SeqID_110650
acaatctctgaatgttctgagtaaatgtactagtatactgtgacaatgcattttaggttcaatatgcagtatgttagatgtggatgatatctggataacctagaatttctctgtcaacacttcattaggaatgggaacaaaagttgagggcgagacctatattccaggatacttcgacatggcagattctagtgtaaactctaatggcaatgcactgccatactacaaggagaacaaaccaaatgtgcatcttagtgacaagttcacaataacatctccaaatggatctgtacattatgacaaggaaatgctaaagcggacaatgcttgtacatgaagctacattccggaaacaggtgtatgaacttcaccgtctttacagaactcagaaggaaataatggtacagttccaaagagaagagttcaagggttgtcctagatatgcagaggcattgcagccaagatcctctgcatcacagatactactcgaggatgttaaacgagtgcgccaaactgcaactcctatttccgtggacacgattcttaagcaatcatccatctaatttgaattaaacgaaagttagttcaactaaatttagtgtgagtgga

SEQ ID NO: 44677 - DNA, 743 bp, Setaria italica
  Peptide Sequence Number=SeqID_110651
taccagtacacatctgctttatttttctgccaaatcttttcatttcctctactaattaaacacacactgtctccaggtacagagttttctttgatacttcagctgtagcccgtcactaactgacacaccagcatctatcccacagcaggccgccagtacataacacgtacaatactaatacaaactcgtagctactacctgaatacataagagtgtttgttgattacataatttctttcttgcctcgatacctgaatcccaaaccttcttattttctttcttgcctgataaacttggtgatggtattacttgatgaatagtacgtacacgtatggtatgtagcaaggggaaaaggccagacctcgatcgctctcacttactttctctcgccatggatgcgtgcatggccgcagctggctagcttcactcaagttccgccgcacctgtagatgaacttgcagctgtggccgaccctgacggtgtacttgtgctgcggcttcacgaggaaggacggcaggcggagcagcgcctggcacacgcagtccggctccacctccttgagccaccggcagcagtccctgtacgcgcggtggccgtcgtcgtcgtcgtcatcgtcatcgtcatcgtcgtcgtcctcatcctcgtcgtcgtcctcatcctcgtcattatcctcgtcctcgtcgttgtcctcgtcctcgtcgccgtcctcgtcgccgccgtcctcgccgtcgcgcacgacgaca

SEQ ID NO: 44678 - DNA, 538 bp, Setaria italica
  Peptide Sequence Number=SeqID_110652
cccaacataaaggaaggtaaatacaggaagattctccaattacatgtatcatttacattcaacaagccacatgaaatgtagcgtgacttgactgctgacaattataagcagctttaggcctgttatgattctcgttccagttaatcagctcagggacatatataatctattagttctctcttttctctttccaagacattattactagtaaattcagggccaatgccattctgatcaattatctacagctgcaggcattgccaagatcaaacatatgttgcgttctaaacgtatcaatttttttcatatgtaggaatgctagactccggttgtttgtcattgcagcatatactgacaaaggctgaatttggataccagtatgtttccatcaaaccagtgcatttgatctttagaagatctggatggcattaaatttactattgtttcaaccaattaaaggccaaacaaatggacatgcgagaaggaaactggaaacccaactgacttagcccttgaaacaaggaaaacataatataat

SEQ ID NO: 44679 - DNA, 395 bp, Setaria italica
  Peptide Sequence Number=SeqID_110653
ctgggaatgattactctgcaacagatagcggggtagttgataacattaccgttaccacctcattggccgaaccaaacgccacctttatttattctgttaccaccactgattatggaatgcttctctagcagaggggaagcctcgccacaatggaaggaccatcgatgccatctcaagctatcccagtttcagaagatgcttattgcaacagcacacctgttccactggatgctctaggcagcagctcaccggctgtcaccaaactccggaagctgctgttccggaggatgctgatcggcgtgaatgatggccgctacttccttgggctgttccactgcatcgacaagcaagggaacataatcctccaggatgcagtggagtaccgcagtgcccgc

SEQ ID NO: 44680 - DNA, 692 bp, Setaria italica
  misc_feature (657)..(692): n is a, c, g, or t
  Peptide Sequence Number=SeqID_110654
gccacctttatttattctgttaccagcagtccaggaggaagcgagcaatgtcagctcctggtgcttcgagtggatctcaagctgctgctgcatctcaatcataggggaagcctcgccacaatggaaggaccatcgatgccatctcaagctatcccagtttcagaagatgcttattgcaacagcacacctgttccactggatgctgctggcagcagctcaccggctgtcaccaaactccggaagctgctgttccggaggatgctgatcggcgtgaatgatggccgctacttccttgggctgttccactgcatcgacaagcaagggaacataatcctccaggatgcagtggagtaccgcagtgcccgccattcttcacctcctacagagcagcgctgcctgggaatcatcctgatcccggccacttgccgctcgtcttgccaggttgattgttcgattgaagagaagatgtcactcttgtgtttggagtgaatggtgcttctgatgatgttgtggtttccaagccactgagcatagatgaacacttgtacaacattcttggtctttctgagacttaatttgcaaccaattctgtaatctgagaggtcttgcatgcttttgctgtattaactgacatctgaagaaaattggtgttcattnnnnnnnnnnnnnnnnnnnnnnnnnnnnnnnnnnnn

SEQ ID NO: 44681 - DNA, 941 bp, Setaria italica
  Peptide Sequence Number=SeqID_110655
ccccgatccagccccgcatcgacgccgaggcagagagagcgagcgagaagagagacaacgagatcgcgcgcggagatgtcgtcggactcgtcgtcgtgggcgcgcgccctggtgcagatctcgccctacaccttctccgccatcggcatcgccgtctccatcggcgtctccgtcctcggcgcggcatggggcatcttcatcacggggagcagcctcatcggggccgccatcaaggcgcccaggatcacatctaagaacctcattagtgtcatcttctgtgaggctgtcgcaatttatggtgtaattgtggcaatcatcctccagacaaagcttgaaagtgtgccatcagctcaaatgtatgctccggagtctcttcgagcaggctatgcaatctttgcttctggccttattgttggctttgctaatcttgtttgcggggtatgtgtggggataattggaagcagctgcgcactgtctgatgctcagaactcgtcactctttgtaaagatcttggtgattgagatctttggcagcgccctgggactgtttggagtcattgtgggcatcatcatgtcagctcaagcaacatggccagccaaagcttgactttccccattcatctcgctgtaaattatttcgaatgaaatgtatcagaatgtcaagatgtggtccaactgccttttcctgcctcttttttcttttgcacctttttggcaaaacaagtaattcggtgcccttagcgcatccgattgtagagttgatattcctgctgccgagactccatgtgtgctggatatcttgtaggtgctattgctgttgcaaaacacactcggcttattgaataaatgcattggaactgaataagatggaaatttttagaaccaaaaaaaaaaaaaaaaaaaaactaaaaagaagaaactaagaaccaaaaggaacaacaa

SEQ ID NO: 44682 - DNA, 508 bp, Setaria italica
  Peptide Sequence Number=SeqID_110656
attctcctatgggcaaatttggagatttcctaggttcagaggatcaactatcaatcgagtcaaacgttgaattctctggtttgttatccagcttcatgttgagatcggagacaagccatgtgcatgcccgcaaaagtactgctgaaaattcagataatcagattggaagtacaccttcagactttcagatatagcagagcagtgttgatggtagttggtactgattcatttgattagcacaaataagctgcttgaaacttcgatttctagtgaaaagcttcccagatgagatctccagagatgaaactgcaattcctttgataaaagtaactccttttgaagtatagattttttgaaactgcagttctcataaaattcagcaatttttgggtgtaaacagacgacccgctaaaaatgaaaaatcaacacacatattttggcatttaaacaccggtgaagaaaaatgagattgtgtgtatatgatgctaatcactgatgtgtatataag

SEQ ID NO: 44683 - DNA, 305 bp, Setaria italica
  Peptide Sequence Number=SeqID_110657
gatatatctctcggtataagacaatacaaaaataaagacattattttgagtctgccacaaaggaaatcataagaaattcaaacataatattaaatgattaatatgatttttctatagacgatccaatgttcttcttatttcagttataaagcttatcagcagtaccatttatatgtttctaatcaattgaacataatttcagttataaagcttatcagcagtaccatttatatgtttctaatcaattgaacataatttccttaccatggacatattcaatgttacacaaattataacgaaattag

SEQ ID NO: 44684 - DNA, 1480 bp, Setaria italica
  Peptide Sequence Number=SeqID_110658
tttttttttttagaagcaaactcaagtaccttacattgtttcataggtaaacacataaatacagtaaaacattagcaatgtactatgtagtgcacagctgccacccagacatctatgctctttatgagatgtctctgtatatatatacttagtatttatgtgtgccttgtaaatcttccctatggtcctcccttatgctagcgtgtgaaggtcttcttggaggtatttcagtttcagttaacacctcgaactagcaatccttcgaaggtgatgcctgggccaaaggccaagatcaacccccactcttcacttattgcccctttcttcaattcatccctcaaatactccaacacataaaagattgtgttgctactcacatttccatagttcatcaaggcctttctactaatcttgagcttctccggctgaagttcaaggcagaactcaagcctgttcaaaattgctggtccaccaggatgcacagcccaaaatacatcattgaaatcctttatcccgacctggtccatgagattcctgcagaacccttctatccgactttcaatcttctcaggcaaatcacgccctagcttgaaattaattccttcctctgagatcttgccatcgatcaccttgtcggtcccaggtaggaactcctgcgtcgagaactcaagctccaagaagggattctctgctggtgtcatgggtcctgccccaacaatcacagctgatgcaccatcaccaaacagggcagcaccaacaaggtcgtaaggacggtcataacttggtggcctgaagcctagcacagtggtctcagcagctgttactaggacacggctccctgggttgttctcggcaatgtccttggctgtgcggagggcagcagcgccaccggagcagccaagaaagaggagggaagtgcgcacggtgtttgggctgaggccaaggcgggcagccaggtgaaggtcgccccctgggagacgaagctcactggatgagatatagacgaggtgggtgatgtcggctgcagggcggccccagtcgtcaagggcggcacgagctgcggcagcaccaaggtcgatcaccgcagagttgcagatgtcaaggcgtggcgtcagtgttgggatgccctccgtcttcagctctgggtgctcatccaggagctccttggtcatgacagtgtaccttgtcctcactgtagtcgttttgcaaagtcgttcgagcttggctctggtggcggggtcgtcgcaggtgctgtcctggaggtagctctccacaaccttctcctgcggcagaacttggccagggaggcccttgcccagggcaagcagcatggccttgcccctggagccctgctggctcttcccattggcgcccccgctgacgacgctgccggacatcgtcaccccccacactgtttctctcctcggcctctctctttctctctctctctgttccaagtgttctgctgctgtgatcccga

SEQ ID NO: 44685 - DNA, 335 bp, Setaria italica
  Peptide Sequence Number=SeqID_110659
cagatctgcacagcactttgtctatattgaaaccagtactttattggatcttcatactactggtctgcacacagaagtgcaggtgctgagaacctaataccaattgaattggccataaagattgcaagaaagattaaggcaaaggagagatttgccgcatacattgttataccaatgtggcctgaaggcaatccgacaactgctgctatgcaggagatcctctattggcaggggcatactatgtcactgatgtataagattgtcgcggacgctctccgaaaggagggtttacatgaaaggcatccacaggagtacctgaacttctattgccttgg

SEQ ID NO: 44686 - DNA, 512 bp, Setaria italica
  Peptide Sequence Number=SeqID_110660
gactactactgccaatgctcaccttgggtgccaacgtagctttggagtcatcctgtggttgtgccgtttctttagccgaaccatcaagaatggatggtagttcattaatcaatagcttggatcctattgaatacaagaatcaacattaccaagttcgaaatacaaaataaagtgttaaaagcatccatcctgtttgtttgcaaaacttaatcaagtaatcattagacccagctaagagttaggacaaagaagagcagcaaacatgccattaggacaggtaagcttctagaagctatacgtggaccactttcatgaaaatgaccatgtagaaatgtgacctttcatggattatgattaatttgtaacctttacctatatcaaacaatatagcaagtagctctggtgcctgcagacaaagaaaatgacatagtaaacaatcaatggaggataatagcaacttgataaacaaacatctgctgcttcacttttagttttttagtgtgaactaatca

SEQ ID NO: 44687 - DNA, 300 bp, Setaria italica
  Peptide Sequence Number=SeqID_110661
ttgagaacgaatctgtaaattccaatcaactgtcattcatcggacggtaacaagactaatattgcacacttgctgctgtaactgtaagtaaagccgctgtaaacaaacgaatccttttccactccatgcgctagctcccggtcactttgccgggcatcccatctcgtcgcgggccttgaggaacacgatggcggcgccgtagtgtgcgagggcgccggcgatgacgagcgcgtggaagatctggtggctgtggccggcgaggtcgaacgccccgggcctccaccgctcgggcacccggct

SEQ ID NO: 44688 - DNA, 482 bp, Setaria italica
  Peptide Sequence Number=SeqID_110662
ccaacaccatttgcagttacttggaaaacaactgaaataggctcatcctccatgaggatatcatcgatgtcgtaataacccggcatctgaccaagagtgcaggatcacaactacttactcctaattctcgattgggcgaatcagttcgaaggctcacctttgcgtcagctatgagtaattttgagagaatattcctcaaaattttctgagagaagcaaaacgaatttcgaggcttaccttctatgcagcacggatacggatacgcggatacggcaatttcttaaacaacccgatacgcggatacgttttaactattttttaataaataaataacaatgcatattaaattgcaaaatagatgttcaaattcaacatggagacatttaaggtctattacactgagaataacatgatagcaggttctaatttaggagaggatgggagcctgggactgcaatcaatcaatataaactcatatccag

SEQ ID NO: 44689 - DNA, 239 bp, Setaria italica
  Peptide Sequence Number=SeqID_110663
gagggataagttatcttacatggagaagagctatctcatcttccaaggcttccctgccaacctcggcctctgccttgtagtcctgatgggcagattccaattgctttaacgcaacttcattggagtccgcaatttctttgttctgaaccttgatcagaaaaatatgtttgacagctgtatgaaacaggtggaggatatgagaaaggggctgcagagctcgttgaaagctgcttctgatg

SEQ ID NO: 44690 - DNA, 182 bp, Setaria italica
  Peptide Sequence Number=SeqID_110664
tacataagtgattagtcatctcatgtacacaagttacagcgttattctggacagctagcaagcagataggcaattacatgttgcttcacgcttccctgtacttagtcagatcgaaggtgagagttctcgagcaacttcgttctgagtccctataaacgccgaccagtgcttcagctttgtca

SEQ ID NO: 44691 - DNA, 404 bp, Setaria italica
  Peptide Sequence Number=SeqID_110665
tagagactcatatgtctcccttaacttcacaattggtgcttgcatatctcgcttttgttcatattcaagcctgcagaacaagatgttgtttatactcaaaactgtatgtgcagtaaaagcaaaatttagttgacggtaattgtgtcactttcacatactgatatttcaattttgacatttgggtgtttagggtcagcttcctctcctgcagtgcttgagcatcttttagttgcctttcttcatactcgcggatattcttcacaccaactgaaatgctaaaatctctgtacaccttgtccacaatctcattgtttttttctcaagcttggttacttctgcttctttcttagcaagacggatctcgagctcctcctttcaggctccagacgattaatctcttcctc

SEQ ID NO: 44692 - DNA, 296 bp, Setaria italica
  Peptide Sequence Number=SeqID_110666
cggcgatgcgctgcgtgaggcggctgcgcgtgggagagccgacgcccgacgggtcacgggagtaggacaggaggtgggatgtgctgtgatgttgggccggctgggccgaatccaggcgcggaaacgtttccgatccgaagttttcggcccatttaatcggggatacgtggatacgccactgatatgtatccggggcgtatccgtatcggatacgtatccgatacgggatacggtccccaggtggagtatccgtatttcgtagcatacatacactagctacaggaaagaagaagcat

SEQ ID NO: 44693 - DNA, 272 bp, Setaria italica
  Peptide Sequence Number=SeqID_110667
tccttgtctggtccttccaacaggaggaactacagccccattatagggggctgtgtatcataaattaaaaaattttgtgccaaggaagttcgacctgaaaattaaggaacgctaggcttgctgttaaactgtcaaaacgagaaaatgaacacaaaagagtatatctttcataaacataatatttaccttattttccaatgtaggttctgctcgatcttgaggtgttgccagaatccattgatatggtgtactctgtgcatgtggtcttgcgg

SEQ ID NO: 44694 - DNA, 419 bp, Setaria italica
  Peptide Sequence Number=SeqID_110668
ggactgggaaagaggtgtgggcttaacagctagatctacaccggtgcaccaatggagtgcagacgctgagaaggtaggcggcgatttggccttgggtcctcgccaagatgtacaggcgtaaggcgttgtcaacgattcctcttcggctcttcaagcggcccaagaggcgaggaaggctacacagcatggctcccccgtggcccaaacaggtggcgaggagaggagatggctccccttatggtgcgtagcgactggcgattggcagttgcgcaactgctcggagaaggggcggcgcaaagcggccgacgctcgggcgctccgtgcctgctggagagcctcaccgcggtggcgctagacggctgggagaaccgattgacggtgaccgcattgggtcggcactcgagcagctccggggctgg

SEQ ID NO: 44695 - DNA, 298 bp, Setaria italica
  Peptide Sequence Number=SeqID_110669
tacaaggttttctggatggaaatattgctgcctagaaccatagtggaagcctgaccactgaacaggggctggggctccttacgccggaggccgacgggagtaatcacgggcgaacggaggccgacgggaggcagcctgcggccggcgggaggcggcctcgcggcccgtggccgcgggaggcggacggcggctggcaggaggcggcctcaaggacggcggccagcggacggcggccgacgagaggcggaggcgctgcgtcagccgtcaggtcgaggcgggagaatgcggcgatgcgctg

SEQ ID NO: 44696 - DNA, 310 bp, Setaria italica
  Peptide Sequence Number=SeqID_110670
agactactgacatctcagattccagctgatttttttcttcttcaaagattctattctgctatcatcccatttgtttgatcttgcttccattaccccacttattccaccagtcatagtgccagatttagtcagcagaatcccatcaacggtaacaactttatacctttcaccactccaacttaaggttttggcttcgtcaagtttatcacagacaagtgtatttccaacagcatacagaactgctttctccaaagctcggtcaaacgtacaatgttaagacacaaaattattagcattgtactaaaaaaaa
